United States Patent Application Publication US 2007/0083945 A1 - sequence listing, part 4

SEQ ID NO: 20696 - DNA, 971 bp, Glycine max
  unsure (1)..(971): unsure at all n locations
cccgtttcttgctttcctgtttagagacactatatantactcgagctcgagctcattgtctgtgctgacacaccagaatgtggcatgagaagaaacattcttacttcatttgacgcccctcccacactaccataagtttaataattatgcctctctggtgaactgatcgaggagaacaactcctccttgttctatgcgccgtgggttaatatcgcggtgtgcggtgttcacctctcttggtatatataggtgagttgcttgtttaaaccttcgcgagtattcaccgtatttttactggaccatataaaaaacactcacggacttgaagcccacgcacaatggcttgggattccaaaaacaaaacgcttgatttgaccttcgcggggcgtttttcttttaaatataaaaacatcaatttcaccaaaaagaaacaccgtatttctttattctttttttatccccacaatggttgaaaaaaaaaaaacaggtaaattcttccccttttatttaatatttcaaaagggaaaaaaaaatggccgtcttttatcaataaacaattttggaaaaaaaaaaccggcggtctttttaaaaaggggcctatttctttcttgcggttagtaaacaaatcttcttttcaaaaactgctttaaaggttttcaaccaacaagaaaaaaactttcttttttctttttaacgcaatcaaaaataaaatggcggcttttggcctcgggaaccaacccaacaatagtcacaatttttcttgtttccataaagaggcgggggggggtcctatattcttcacttccccggcaatgcacaatgagtaaaatatttttttaccttcccacccccggtgggcgacgagaaaagaaaagacattcactccgccctcttggggtgcggtggtgcccttttcttactctgcgctacaagcacaaaccgtcggtcgtgccacccacgcgtcgtgcgcg

SEQ ID NO: 20697 - DNA, 334 bp, Glycine max
  unsure (1)..(334): unsure at all n locations
agctctgacttcagccatcaaaagattataaatatgtgaccntggcttgactttgaacactccagacatctatctttcaatcttctctctcaacatcattcaatatcttccagctctctctacagaatttgttgattcatttctctatatctttctaagagttctttttcaaatactttctcttccaagaaaagttctttgttcacaaactcgagctatccatctttttcattctcttctccctttgccaaaagaacgaaggactaaccgcctgaattctttggtgtctctcttctgccttctaaagaccaaaggactaaccgcctgagaactc

SEQ ID NO: 20698 - DNA, 299 bp, Glycine max
  unsure (1)..(299): unsure at all n locations
agcttggttgatgttgngcatattggtaagtgttgtgaggggtttgctgggaattcgctaggtagaagcgaaagtcatagcgtgggcatccnctttctttcttctttgacccagttgctccgaatcttctattgctcatactggccggagcaacataatngaacttccctcttttaggcctacgtcaatcctctcgctccgcagatactaaattcacgatagtagagggcatgaagcccaccaacttatcataggtaaacatcgacagcgcgtccactatcatagagatcatcccttct

SEQ ID NO: 20699 - DNA, 429 bp, Glycine max
tatatatattgacaaggtgaatggaccatttatatgggataatgatccaagtatgtgtgaccttgaatgtgatttagaagatgaattagaagaagaagatgaagacgacgaatccaacaaaagaaacaagagatacagacctccatctcttctagctcaaaggataaatctagatgattgagcatgggtcgaaataagaaaagaaaaacattagcccctctagatctataaaaaagctctagagatcctcagagaagagggacttcttccctcgactcaatcaccaactgatttatctctggtttcttggtctcccactgataccactacacaatgcaaacatcttgataccctttcactttctcaacctataccttgcatgatgttctcttcatacgagcatgaatttcctggtatagaaagacaaac

SEQ ID NO: 20700 - DNA, 425 bp, Glycine max
  unsure (1)..(425): unsure at all n locations
actgaaaactaagtaagttgcctactcaattgcattgtttccaacctncacctttatttgtgggacatgttacaggttgcacactctccggcggagctcatgggtcaggcttgtgtattcccactaaagaaacatcttatgaagttaattacatgggaaaccagtctagacaaaatttttatgcaggtggattattaggatttcaacatggtcaaccttaccagcagcataatctatggagaactcaccctgataatcagttcaataaagaccagggtgggccacctaacaggccacaacaattagggcctagcttatatgagagaacaacatagctagaagatactcttgctcagcttatgcaggtgtcattgactaatcataagatcacagagtcagccataaaaatactagaggtccatgta

SEQ ID NO: 20701 - DNA, 380 bp, Glycine max
  unsure (1)..(380): unsure at all n locations
tgatttatgagttgattntagtcttagtttcactttggttattagtcgattcaattaagaaaaatcccaaagaaaagcgttcgattgattttttttaattattttattcaaagatattttcgattattttattattattttgcctcttttggttttaaacgtggttacgacatgaaatattggttggattttattctaacaaagattaaaagatattacaactcaaatgatcggtggaaattcatttttactattgattaggtgagaaaacggcttatataaaatggttaaagcacgtcaaaacggagtacggaaagtaaacgaaataaaaataaaagcacgtgaaacaagtggggaccactaagggtacatagaaggaa

SEQ ID NO: 20702 - DNA, 217 bp, Glycine max
  unsure (1)..(217): unsure at all n locations
atagagtgagaaattgtgttataggcaatgtgcttgctcaaaaggggcaaatggggggaggtatataatggaaagaccttctgagccgagatgtnaagttttatgaagaatgaatatggaattggtaggagaaagaagataattatgatgtttttaatgtgttttaagataaagatagagtattagtgtattgtaaatgatgaaaatatgagaaatt

SEQ ID NO: 20703 - DNA, 437 bp, Glycine max
  unsure (1)..(437): unsure at all n locations
tgctactaaaatatacaatatcaataaaataacatacaacaataaaccaaattcatcaaaagtggaaagaggcatcacttcactagattaaaactatgagctattttcccctactactaaaatgagccctatttcaaaatgaatgaaaaaaaaatcaataaaccatctggcaaataaccttcctaggtaaacatgtcaaatgctccaccatataactgtttcttccagcaaccaaagagattagaataccttcctaagataattattcaagacattatgtagattaggttttcacacatcctaattttattgactcaaaacaaaagctccttgtcaaaaacttaattcagataaattctaaacacaaatcaatggttgatttctaatagtatttcaaattntgaatngntgccatcaacaattggttcccttttctt

SEQ ID NO: 20704 - DNA, 429 bp, Glycine max
  unsure (1)..(429): unsure at all n locations
atgcaagccttgatggctntgagaagaaatcacatgtttgtcatcatcaaaaagggggagaatgtgaatgtatgtatacatgattttgatgatgtcaaaagaagaatcaaacaaggctcattttgcttcaagattaatacaagattgtttcaacaaacaaagccttgattcaagatttcttcaagatcaagccttgcttcacaatgaaaggtttcaagtcattcaaggcacatgtaatcgattaccaatacatgttatcgattaccaatggtttgaaagtgtgtaatcgattacacatcatatgttatcgattaccagagactctgaacgttgagaattcnattttaaatgaagggtcacaactgttcaagcaaaataattgtgtaatcgattacactaaattctgaatttgattaccatagcggattt

SEQ ID NO: 20705 - DNA, 374 bp, Glycine max
tgagatgaggaagtgtagaagggtaagacttcctgcttttattcgttgaccacagagtggtacctggagatatgtcgcgggggtcaggagaccttggggacgtcaggtggggtgctattgcccaaaaccaagcttgaccaatcccaacccaacccgggcatagtcagtcagtgagaacctatgatgtacctaaacaggcgagctcctggcagtcaactgataaaaggaacaaagaccacaaagcaaggagacttgtgtggtggctggccagctgtgaactatgattgatatatgggatatgggctctggtaatcgattaccaagggtgggtaatcgattacaaggcttaaaaatgaagacaggaggctaagata

SEQ ID NO: 20706 - DNA, 347 bp, Glycine max
  unsure (1)..(347): unsure at all n locations
agcttctcaaggaagcttctctagtctataaatagatgcatgtgtaacacttgttgtaactntgatgaatgatagtcttgttagacacaactcaaagttcaatttctctccctttttcttcgatcaatttcatgctcccccctttctctttctctccctctttcgtttcctccattgaagcatcctctccaagcttcttatccaaggctcatcttggtggtgaagctccttctttcatggcttattccctagtggatggtgctgcctcttacctcttctcctatgtcttccactgcatctccatggtggaaaatcaccattaaaggaccttattgaagctcaaagat

SEQ ID NO: 20707 - DNA, 432 bp, Glycine max
  unsure (1)..(432): unsure at all n locations
atatgaatgtcttagttcatttcttttaaacaatgactntgaaagaggaaaagtggatacaaatttgttctgcaagaactatgactcccaatttatattagttcaaatttatgttgacgacattatatgtggtgttatttttgaacctctttgtgaggatttttctaggctaatgcaaaatgaattcaaatgagtatgatgcgaaagctgaacttcttcttaggactacagataaaacaaaccaacattgtcatatatctgctagaagacggacttgttccctcgactcaatcaccaactgatatatctctggcttcttggtctcccactgataccactacacaatgcaaacatcttgataccctgtcacttcctcaacctataccttgcatgacgnagcaatgatcgagccttactatatctaattcatcc

SEQ ID NO: 20708 - DNA, 438 bp, Glycine max
  unsure (1)..(438): unsure at all n locations
tgttggtgttaagtgtatcacattgctaaatgtacgaattntaatatttaatttcaaacttaaaaattgttntgattttttttagtccatgtaaattaatgatggcatgacactcgatgctgacatggcaggatgatatcattaaataatgacgtgaaatcatgaaatcatcattgttaagtcaaaatacatttatgtcttaagacaaattaagacccttaattattttgattagatgtaaacaaatacaaaggttaaaagttgtgtcttatgcttaatcataacatgtttcgcaagtttgcatctgatgtttcagacgatagcaagatgaaatcatgatccgatatgatattaaagatgacatttaagacttcatttaatactatatctgagatctattttatagatacattctcctaggatctggcgaatcccatg

SEQ ID NO: 20709 - DNA, 237 bp, Glycine max
  unsure (1)..(237): unsure at all n locations
gcatgcaagataggaaagccgagctngaaagaangattgtggttaaagagaagcggaagggggcgggganttgggaaaggaaagaacgacccgccgaaaganannaanangannangaaggaagngcgagagcgagaagaaaaaaagggnggaaaagaaggagaggagaagaacaaagaaagagggggnaaggggggcacaagnaaggagcnaaaacanagaaagggggagagggga

SEQ ID NO: 20710 - DNA, 413 bp, Glycine max
tcatcaatccaaacacttcgtcacaacataaatcattctaaagtcacatactttagcataggtgacatgtgaaggttgttgttgttgtgttagtgttctttccttggtttagacttcacaaagtctttttagtctttattctaatgttgcacaccacatcttctcaaggacattttcaactttcctcttgtatatcttctaatacagttagcattcattttctgatgtgctctcagtatgtatggtaacgtatgaaaagtgagatgctttcaactttagtattctaatgtgtctgttgtatgtgtggaagttgccacaccctaatttcgtccggcgaatattgttctgatgtgccattattctctcctatttattaaccctctttgtcaccaatttaattactaatttactct

SEQ ID NO: 20711 - DNA, 331 bp, Glycine max
agcttcttacaagagactaagaaatttctgtctttattttttaagatgaaagatcttgggaagctctctttgtattatgaatcaccatactaagagatcgctttcaaggtattctaaggttgtcacaagagagttatatcaataaggtccttaattgattcgacatgaaagatagtaaactatgagatacccctattgcttaaggagacaaatttagtctcaaacaatgccccaataatgaccttgaaagaatcgagatgcaaaagattccttatgcatcagcaattagaagtctaatatacgctacagttgcactcgtcctgatatacac

SEQ ID NO: 20712 - DNA, 421 bp, Glycine max
  unsure (1)..(421): unsure at all n locations
tgttagcagaaagtctgccatacaatgagatctcacacaccctgcaaacctaatatgttaactgacaatatttgaaacaagaaataatcttgaaacaagcacctaataaaacaaaagaaaacaaatcaatggttttgccaattacatagcaaaaccaaactgaataatgtcaaactacaggagcacaagcccacccctctcctttattttatccaagaacactcaagnttctttttttcctttctttacattgggggttgcaaacacaaactaaataattcacaggtagttcttactgaactctacacaagctaaaaccaaacacaagtgccaaaatcacaataaaaggaaagaagacaatacacattctttataagtcagttaaacaaggtatgaaaaacacattatcttcatgacaact

SEQ ID NO: 20713 - DNA, 342 bp, Glycine max
  unsure (1)..(342): unsure at all n locations
tggttntcaattacgagtgtcgcgatatcctacgggacacaataggacatccgaatcaaaagttattacgtttgacttttcctagagctcccggtttcaatttctagcgtctcgatatattaaagggctcaatcggacatccgagtcaaaagttattatcggttaactattcttagagctatacgtttgaattacgagcgtctccatatattatggcactcaatcggacatccgagttaaaagttattggcgtttgacttttcttacaactatcgttatcaatttatagcgcctcgatatattacagggctcagatagacatccgagttaagagttattgtc

SEQ ID NO: 20714 - DNA, 452 bp, Glycine max
  unsure (1)..(452): unsure at all n locations
atgaaacccattgacctcgnccttgaacccctcgaagcccnagatgtattcaaagcgagcgctcacgactatgagacaggtgactatgacgatacattcgttctagcatgtatttagcaggaaactcatcgatacgaacattgaagagngaagtagagccctccgtcacaactgtgcagaccagcgtcgggaactgacttcaagctgcaccattctggccgcgactagtcgaatcccacaacacgtactagtgcacacaacctgccccaatctcggtcattgcttgctttcgcctcccactatcacgcttaacccgactcctctcctctcccccatgtttgccattccctacgtttctccccctctctatttccccccgcctccctcctccctcgcccctcctaacttttcctcacctcccttttcctcctgcttcctcgtaccttcccaac

SEQ ID NO: 20715 - DNA, 294 bp, Glycine max
agctttataagaccgtggaattagccattgttgtgtggcctggatcttctgttggactagtttgacccctttgcttgacaccatgtggcccatgtactccacctgggtttgggcgaaggaacatttcgagagcttaatgaagaactggccctgcaacaaaaccttgaaagccaattccaaatgaagttaatggtcattgaaggagctactataaactagaatgtcgggatgtggacatcaaagcccaagcccatgacataccaccagcctcaggcccatgacttgatggaagcc

SEQ ID NO: 20716 - DNA, 416 bp, Glycine max
tttaactgtttatttaaaccgttttctcacctaataaatgataaaatgaatttcaaccgatcaattgtgttgtaatctcgtttaatcactgttaaaacaaaatctaaccgatcgttcacgctataacctcggttaaaccaaaaaaaagaaaaataataataaaataatcaaaatatcttgaaaaaaataataataaaataatcaagaaaaatcaatcggacatttttctttgaaagattccttgaattaattgactaataatcaaagtgaaaccaaggctaaaatcactaaaaaatcactaaaaaccgttgtaaggtccaacgccttatacggtcctctttgcttttatcggttaacatggaccgttcaaagcataaaatcaacatgtaactttaccacttttgcaagaactacgt

SEQ ID NO: 20717 - DNA, 78 bp, Glycine max
  unsure (1)..(78): unsure at all n locations
catgcaagcttagctcgcctgagcgagctgggtggctttctcctcccctantttcctataaatagggggaggagtgaa

SEQ ID NO: 20718 - DNA, 155 bp, Glycine max
  unsure (1)..(155): unsure at all n locations
gcttaagatgtattcaaagagagctctaaatctcattagagagctctctatgatgatacattgtcgntggtagtccctactgccacannattttgatataaaaaaggatgatatctctagaaacctctgaaagttatgtgcgaccacctttggga

SEQ ID NO: 20719 - DNA, 384 bp, Glycine max
  unsure (1)..(384): unsure at all n locations
ggatgcnnnaanggaggaaatgaaagagagatttttttatcacgnaaaggaaggaataaagagaagatagaagtggaantntccagcctctctcataagactntnatttatgaaagttacaacaagtgttacacatgcttctatttatagactaggtagcttccttgagaagctttcttaagaaaacttccttgagaagcttctttgagaaaacttccttgagaagctagagtttatgctcacacactcatttaaaaactaagcttacctccttgagaagcatttttgagaagctagagcgtatctactcacactcatttaaaaactaagctcaccttcttgagaagctttcttgagaagctagagctaatctacacatcccta

SEQ ID NO: 20720 - DNA, 414 bp, Glycine max
  unsure (1)..(414): unsure at all n locations
actatcaaattcttttctcttaattgttcttcaattttcttcctctcttcaactctgttcttctcctttcttgcatgaattntgttgctcttccactggtgataatcatagaaggctaaacactcaatcaatccaaggatccagtctaagcaaggctgaatttgtgttctaggttagtatttcaattctatgtgaatgttcatcatcttctttagtcgtattttcaattttcatgantanaaacgcgcttaggattgaaaatgaataaggttatggattctattcctaattttgaatttaatcacagattgtttgggtgatatttcaatctagttctgtgatttcaatacaattagggattaattcgattgaactatctctaaagccattgactaaactttcaaaatcttaaca

SEQ ID NO: 20721 - DNA, 342 bp, Glycine max
  unsure (1)..(342): unsure at all n locations
catgcaagcttgttcttagttgatggatgttaaatggctcacgatttcacacgtcaagagccatcttcaggttagaaacatagaataaaatgttcttttaatgagtagtcaaagttttggtgatgcatggntatttttaatatcgggtgttgtttactaatattgggattctttccttattcaaaccagatgtacataatcatgaggggtgacttgggcagacaaggtacctgaccttctttactgcaaatgcacatgaacaaggagagagcatattttaatctttatttccctgatgataatatattgatcatgggtcttaatgccttcttcttcttgtta

SEQ ID NO: 20722 - DNA, 437 bp, Glycine max
  unsure (1)..(437): unsure at all n locations
tctacatcctgtattccattgatcccagcatcttttgcaattgacttgtccccaataatgtaactgaaggaagtgtgtattgcaggtaactaagaaattcaaaagattgacaaaaatctaagaatagtatgcatgcaacttgcaaaacttagaacctgctgaggtcatctgaatttggagggaagtagtaaagcagcctctgaatcaaagaggtagcagctttcctgttgcgtgcaattagaacagcatttggccccgcatcaaatgtataagctacctgcaagtcaaaattattaaatatttaaatagaaatatagagatttatacacatttgtttgtttacatgagcccgtgtaattatcacaactaanaaagatgtatatatacacattattcaaatggnggttataccgaaagttgatgtggtgcacgggcat

SEQ ID NO: 20723 - DNA, 412 bp, Glycine max
gagtatgcagtgaacaatggccctgactttgaagctatgatatgtgaaaaacaacgggataatccttcctatagcttcctctttggtggggaaggtcatggttactaccgttataagctttggttatcaactcgtcccccgggtggtccattcaacccgtcttttccatcatcttccatgcccatgatgcttcctccaaatccaatgatgaatctgtctcctgtaaatgtttctccgatgaaccctgcaggaattggttcttcaccttcgatgctaggtccacctcctttccaacagttctatgatcaacaacaccaccatcaacatcctcagtcttttggacttcctggtcggcctgagtatgatcccgcatccaagtctttcacagggatctctgggccactctcatctg

SEQ ID NO: 20724 - DNA, 445 bp, Glycine max
tgttcttgagtttttctaagttctttaacaagctgtgaacaatatattagtccttcatttaactgtctttgggcttggcggccacactcaacaaagtattttcgacacctactgtacgttgatttgaccaacgttgttatgggaatgttgcgacaatccttcaaaaccttattgatacattctgagaggttggttgtcatgtggccataccgacgtccttctctatcataagccatcgtccatttttcttttgaaatgcgatcaatccatgttgctatggctggactcagttcaccaaatttttctagattttgatcaaaaatgtgcttgcaaggagtatatgctgcatcaaattagttatgaataagaattctaagtatatatcaaagctaaataaacttgaccatgaaatatgaaatcttacccacattctttaacatttctt

SEQ ID NO: 20725 - DNA, 380 bp, Glycine max
atgcaagcttctcaaggaagttttcttaagaaagtttctcaaggaagctacctagtctataaatagaagcatgtgttacacttgccgccactctgatgaaggagagtcttgtgagacataactcaaagttcaacttctctccctttttcttccttcaatatcgtgctcccccctctctctatctctccctctttctgttcctccattgaagccttctcttcaagcttcttatccaatgctcatcttggtggtgaatctccttctttcatggcttattccctagtggatggcgcctcctctcacctcttctcctatgactttcgctgcatctgcatggtggaaaaccaccattaaaggacctcattgatgctctaagatcc

SEQ ID NO: 20726 - DNA, 389 bp, Glycine max
  unsure (1)..(389): unsure at all n locations
gacactatagaatgactaagcttnctcggggccattcctgcgaaggcattcatttgaaagttcgttgtagtgtgacattacttttagagccaatatggcatataacctcctcccataaataccagcatcaatggaaagttatagccagcttatgcgcctatttccttacaaacgttctcttgcacaagacatttaaccgaaaaaatgcacccatatacaatcaaggcagcttcgttacctagattatttacacgtacctccaaggtgtatttgttacttacatcacacacatcttcttggctaaattcacatacatgcatactcaaagcattntggggcaccaanaaatgcacatgtgcacatcttgggcattttaatacctatacata

SEQ ID NO: 20727 - DNA, 362 bp, Glycine max
  unsure (1)..(362): unsure at all n locations
tgagatgaggaagtgttgaagggtgaaacttcctgcttttattgttgaccacagagtggtacctggagatatgtcgcggnggtcaggagaccttgnggacgtcaggtggggtgctattgcccaaaaccaagcttgaccaatcccgacccaacccgggcatagtcggtcagtgagaacctgcgatgtacctaagcaggcgagctcctggcagtcaacaaataaaaggaaaacaagaccacaaagcaaggangctggtggtggctggccagctgtgaattttgtgtaatatgtggattggggcctctggtaatcgattaccaaaggtgagttatcgattacaaggcttaaaattgaggacagga

SEQ ID NO: 20728 - DNA, 300 bp, Glycine max
agctaatgctgtaaacatttattataggccttctcagtagcaaaaccaacaatagcagaataattatgatctttcaagttacagatgcaatgtaagttggaggaatcatccaaatctgagatgggcaagttcttcacaacaacaacaggctgtgcttctctttccagaatgttgtatgtccaagtatgccacatgtttctcctccaatgtagcaacagcagcagcatcaacagtcacaataaagacaacaagcagctgatgcttcttctcagcctttctagaagagtttgtatgcaaatg

SEQ ID NO: 20729 - DNA, 422 bp, Glycine max
  unsure (1)..(422): unsure at all n locations
tgcttgagaagcttctatggaagatggatctttgagcatcaataaggcccttcaatgatgattttcagccatggagttgcaacggaagataaaagagaagaggtgagaggaggtgccatccactagagaataagccatggaagaagaagcttcaccaccaagagagtaccttagataagaagcttagagaggaagcttcaatggaggaagagaatgagagagacagagagagaaaaaagtggcatgagaatgaaggaaagatagggagagaagttgaactctgaagtgtgcctcacaagacattcattcatcaaagttaccacatacacatgcttctatttataacctaggtagcttccttgagaagctagaaaaaattgatggtaacaaaaattgattaacatcggttntttaaaaaagcg

SEQ ID NO: 20730 - DNA, 197 bp, Glycine max
  unsure (1)..(197): unsure at all n locations
cctgangcatgcaagcttattacaaatttgattcaaacacgtgtgtttgaattaatttgagcttctccctggactcgtggttagaatggtggagtacgtggacctacctacatccatccatgatcaccctacttctggtcacaaggtattatatgggatctctacaactctcattaggagcctttctttgcactcat

SEQ ID NO: 20731 - DNA, 338 bp, Glycine max
  unsure (1)..(338): unsure at all n locations
tactnaagctgtacacaattatatatctatttttaacataatcactttcatactctaaggaagacggaatttgatcccctacacttgatgttaaactgcatgtattgctgttctaatctgacggtatgtattttcccaaaggaaagtccatgcttccaattcaatacgaaaataaatgtcttgaatgaattgaaaatgttattatagaggatctcaatccaatgaagatactcattgataggcctaatcttaaccttcaccttaaataaaaatataaaagatctaatctattcgcctttatttgctataagcatttgcatacacctgatccaacctat

SEQ ID NO: 20732 - DNA, 223 bp, Glycine max
  unsure (1)..(223): unsure at all n locations
cggttcgaggtaattacccgttgaagatcgaagaacgatgaagaacgaatgaagaacgtcgaagaacgggtgaaacctttgcgagattcctcacggaaaacgttacggaaacgtttcggaagcgcctcggcttagattntcttcacggaaacaatttttccaagcatattcaaaagagagagaagtgctccaggggctgaacccctcttttttttcttactcc

SEQ ID NO: 20733 - DNA, 420 bp, Glycine max
  unsure (1)..(420): unsure at all n locations
acactatgaaactaagcttaatggaggaaaagaatgatagagaggtggaaggagcacaaaattntgtgcctcanatgaggtctgagatttgaagtgtaattctaaaatgaacaaatttgaaaaaatgcacacacaatgcctttatatatagccgaagtgtcacacaaaattggagtggaaattgaatttctattcaaatttcacttgaatttngaattgaatttgtggagccaaatttggagccaaaatttcactaattatgattagtgaattttagctatggttcagcccactaatccaaaatcaagtccaagattctccactaagtgcgcttaggtgttatgagacatgtaaaacatgaaggacatgtacaaagtgtgactatatgatgtagcaatgagatgtagcaagcaaatgttc

SEQ ID NO: 20734 - DNA, 135 bp, Glycine max
catgcaagcttgttcttgaaggaagatatatatgctttttgatggtgaatgatgtatattaaagaaatatgggttatcagatagtcaacagaatatatctgggactatactctctatgatttgatgagatttatg

SEQ ID NO: 20735 - DNA, 420 bp, Glycine max
  unsure (1)..(420): unsure at all n locations
gggctaatctttcctgtaactnttccttgtcataatctgaagtgctattttcaattgctgatctaatctgcttgttaaaattcatcacaagaaacaagtaaaaaacatcaataagtatcagtacatgaaacagaatacaccaacaatggtagaataaaaattaataatagtggaagattcaaacagacctgctcacttctttcttcaattgctttcttatcaccagctccatcaaggatgacagtgtcatccttagaaattgttatctaaaacatacagaaccttattcagttttctaaatcatttaaccttgaaaatagtatgggcatagaatagagaaatttaatgacactttctttaaaaagcttaaacacaagtagntgctccaggagaanagtcagcatcctataccaaaactat

SEQ ID NO: 20736 - DNA, 224 bp, Glycine max
  unsure (1)..(224): unsure at all n locations
tcgatatcttgacttgagcgacaattatttccttggagaatgtatggcaattccttctttccttgngacaatgagctccttgactcagctcgacctctcttatactggattcatggggaagattccatctcagattgggaatctctccaatttgctctatctcggccttgaggtcattctagtcttgaacctctgtttgttgaacatgtacaatgcgtatcaag

SEQ ID NO: 20737 - DNA, 125 bp, Glycine max
  unsure (1)..(125): unsure at all n locations
acaacatgagtgggnnataaattaatatatnngagaattcctnttaacatgggggggaaaaacgggggtttgtttgtaaaaaaatcgacgttccgcttgcttagaaaatatcaattaaaaaaatt

SEQ ID NO: 20738 - DNA, 326 bp, Glycine max
  unsure (1)..(326): unsure at all n locations
tgcacttagtgaattctcgctaaactagcagcttggcttatcgaaagagtgaaaaacaacactttgccaaagttgcctatttaacctganattgagagnaaatgattattaaatgcacaaaccaaaagtttaaatattctttgacctatttttaccaaaaggtccttatagttttacaaaccacccataaatggggaagttggatacaatatacacaggttttatatccaaaagttagtcgtatacatcgactacacatacaaaagctccttgaagcccgtctaaagtatggttggatcgagacactgactccagcagcacggaca

SEQ ID NO: 20739 - DNA, 324 bp, Glycine max
tgcaagcttgagggcgccacccaccatcttttcatgtggagtaccgataatgtgtctaccatcacgattatcgctccctttaattattgggggtaccacctgtgccgccagatccctccaccttttgggcgtgttctttgaaagatccgtcccccctttttcacatgctctgtatttgcatcctattcgaaaccatatcaaaattgtactgatactgcctaacacatgcaaccattaagtccttccacgaatggactcgggaaggttctcaagttattgttccaggtaacatctatctcagtaagactttcttggaaggaatgt

SEQ ID NO: 20740 - DNA, 422 bp, Glycine max
  unsure (1)..(422): unsure at all n locations
ntggagtttccaagtgccaattcgtcttcttctttagtccagtcttcttctggcttcaattcttcagtgggctttccttctgtgtccagcatcttgggatgttcccagcctttgatgacagctttccaggttctgctatccagtgatttgaggaaggccaccattcttgctttccagtattcatagttggttccatctaggattggtggtctgttcactggtcctccttctttctccatgttcatcagaatttatctccctagatctcactctgtgatttcgagtgttggctctgataccaattgaaattctgataccaggggacagatgtcgtaccggatgtcacgacatcacgcttcaaaacatgcagattatatgtgtccgtatgaacagattaaacaagtaaataacacaagagaatt

SEQ ID NO: 20741 - DNA, 428 bp, Glycine max
ttgatgatatggtcttcgccggcaaaaggatcgatgtgggtctgaaaaaaggcaaatttagtcgtcctgcttggacgaatgagaaaactggggcaaatgaagagggtgaggatgaaggagaagcccgtgctgtgactgccattcctatacagccaagtttcccaccaacccaacaatgttattactcagccaataacaaaccttctccttacccaccgcccagttatccacaaaggccatccctaaaatcaaccacaaagactacctactgcacttccaatgacaaacaccacctttagcacaaaccaaaaacatcaaccaagaaatgaattttgcagcgagaaagcctgtagaattcaccccaattccggtgtcctatgctgacttgctcccttatctacttgataattcaatggtagccataaccc

SEQ ID NO: 20742 - DNA, 75 bp, Glycine max
ctttagatgattatctgctaatactcttgtttagattctaggagagcatacggttcaagacaaatttactctaaa

SEQ ID NO: 20743 - DNA, 181 bp, Glycine max
acccggagacacccgcagcatgcagcttgctttacaaatttaaagaatttttcaacaaaagatagaggaagcaaggaacattttctcattaagatgcctctcataccacatgatgtaactccatgtggagactgtaagccttggatcttcttattaatggagtcctttttctcttgaagat

SEQ ID NO: 20744 - DNA, 281 bp, Glycine max
tagttcctagcttagcccataatgttttccagaagtgactaatgaacttagcatctctatctggcacaatggtcctaggaaaaccatgaagtctcacaactggcctaaaaacgagttttgagatgtgggaagcatcatccacctttgggcatggtataaagtgtgcccatcttgctaacctatccaccaccacaaagatagagtctacacctctttgggttctagggagcccaaggacaaagtccatactaatgtctacccaaggtgcacatggaatgggt

SEQ ID NO: 20745 - DNA, 341 bp, Glycine max
tccccaacatccaagtaactcaacattccaacaacacaaactatcacagccaagaaaacagggcaaaggcagaaaactctgcccaaagcaccaaccaaaatcacaacttttctcacttaaagaccccagtaacaattccttcattccaattcgttaaccgtgggatctactcgaaaatggcacgggaagtctctagtacataagcctacattttgaccattgggatctactagcaaacatctagaactcattctgcactactctttccacaaccagcaaaggcatagcatttttgtgcacaaagccaaaattctgctgtacctatgtgacagcaaaattct

SEQ ID NO: 20746 - DNA, 182 bp, Glycine max
agcttgtatagttccctcatatttatggttattttgcagtgatttttgtaaaaaaaattggttttatggataaagttgtctctacaatatgtccattgtatttaataatgaaatatgtgcaatttcaggtgaaaaagatgctaagtcatgaagttccaaaagtgacagtggagcttagctca

SEQ ID NO: 20747 - DNA, 371 bp, Glycine max
  unsure (1)..(371): unsure at all n locations
tctatctttgttctttattntcttaacattatagtaaaagcctaagaagggtaattcttaattagtaaaggtctagtaataattaatttaacccccccttcttaattattatgaggccacttgatccaacacatcagaggagctattataccctcctgcttggccttctgaagtccatgacccatttgctctgacctttagaaacaaagttgagctagtatcctgaaaaccaccaaaactaaagctcctcaacacccaacaaaatgacctctcctcatttagcccataaactgaagccacacaatcacaatctgacaagcatgcactcccacatnttgacacnatagaaatatcactatattagctattac

SEQ ID NO: 20748 - DNA, 302 bp, Glycine max
agcttgtaggattatggggtacccatcacatgtggtactaggtggcggtcgggcaatggtgcacaacatgttctccacatccacaaatcgcgcataaacccaccatcccctgttgcccacctccaactgagctcacgtactcccacgtagcccatatcctcgtatctttcaacaccgggttcccatcaatcctcccaatctttccccaacatccaagttactcaacattcaaacaacacataccattacagccaagaaaacagggcaaaggcagaaaattctgtccaaaacacctaccaaaa

SEQ ID NO: 20749 - DNA, 413 bp, Glycine max
ggtagaatggctagacatgatacatgtcatggtttggtttggttcaaggataaaaagggatgccccacattatttccatgacacaaaatgcaaaaaaatgatgatttggaaactttatgcaaaactggtcatgcatgcacctatgcggacactcaagtgtcaaatttttatggtcatgtgatgctagggctcaggattcatttcctctattttaatcaacccaatgtttccaaaatatgttcttttatcaatttgtgcattcatccgagtccatttcgggcgtccggggaaatttcacagcattcacccttcaggtgtagacacattttccaaaaattggttatgatcaatgaacttttttttggaaatcgtctcttttcaaaagcatgtccgtttttagctagacaacttat

SEQ ID NO: 20750 - DNA, 332 bp, Glycine max
  unsure (1)..(332): unsure at all n locations
tcatacaacttgttgtaattgattacaatgaggctataatcgattaaaatagaaagtttttgcctttgaagaaaattctctaactaagaaacttttcttcacacaaaccatgataatgcatgatgtaatacaaatatcaaatgtactaagatgtaacaaccaagataacaaccaatacaaatgccactcaatggagttggggatgtaaaaaccaaaacttcttcaagctttagcccttaggttgttcagaagctagctagttagttaagttgaacatcctttagattgctagcntggtgaaatcaagcttaacgaggtggatatagataaat

SEQ ID NO: 20751 - DNA, 217 bp, Glycine max
  unsure (1)..(217): unsure at all n locations
tataaatctgttgtanatctcagcccataagtaaaatcaaatcaaatctagataagataagataagatatagatgaaataatatcgagatgagatcaaatctaaataatatctagataagataagatctaattttgtagaataaattagcctgccctcttcaagccaagcccaattctggattcaagcccaatgctncattaattccctaaaataga

SEQ ID NO: 20752 - DNA, 280 bp, Glycine max
agcttcatgatgatgaatcaagttgattcaagtagtttggatgataacaaagatgatgacaaaaagccaaaagaatgatttcaagattgagtcaacatatataagattaaattcaagaatcaagattcaagattcaagaataatcaagatcaagattcaagactcaaagatgctaaaatcaagagaagacgtaatcaagataagtattaaaaagtttttcaaaactttgagcattacaagaagttttcacaaaatcagtaccaaagagttttacactctg

SEQ ID NO: 20753 - DNA, 413 bp, Glycine max
tgttgttgctaccccatagagcccctcagaacttgttctggccgtgttcttccctacaagccctcttggtttctcgttccaaggctttggtggtagccacatttatatctctcagttcggtattcttttttcagattttcagagctgctgatttgaacctttctttaactgtttgggcttgctcgagttccaccataagggcatgcacttgttcgtcttcctccggtgcctcaacttcctctcttttagcggttctcaaacttggaagccaatccaaaccttgcacgtgggcttttaaccacttacgatagccaccgatgggcccattgttactgcccctgagttccttgtcattcttttgcaacaccttccatgccttgcagaccttctgaagtgtctccacgttggtctta

SEQ ID NO: 20754 - DNA, 82 bp, Glycine max
aagctgacttggtttagacacgattgatacatgatttgagacttgtaggaattgatttgggcaagattggatgaggggaagt

SEQ ID NO: 20755 - DNA, 135 bp, Glycine max
catgcaaccttaagctccttcatactgcacaaggctatgtatatttgaatattatctctatgtggccttcacccgatgaagacactgacaaaattctatcttctctttttctgacataatatgtcaagctggggg

SEQ ID NO: 20756 - DNA, 436 bp, Glycine max
tgttctatatcagaaggctagttgctacaaaggcaatgagttgctaattgaagacggtgacaatgctccactaaccatatatgccaaagcttgtcctggtcaacttttcaaacatgagcttgaagatttaaagcaaaaggttgagctcactaatatggaccggtatgccatgaagaggttctaaagactgaaggaatgtttctctagtatagaacctgatgaaaagttacctgcagatgcagttcattatgaaattgggtgatgctatcaaaccctgaagcacacttgcttctctcaagaaactcttttcaacatggttgtgtctgatcatacctttcatttatgggggttccttccttctccatattcttcttcatacaccacgtggatcctattatcgaagaagttgaatctggtactgaagctagctctgatt

SEQ ID NO: 20757 - DNA, 390 bp, Glycine max
agccttggggctgagaactatataacaacaccaaagttctagttttaagctctctctttcgttttagctttttttcgttttggagaataattcgagttttcttcgttttctactacaatttcgttttctattgattaatggaaggctaagtctccagcgttgttttctcttgaggatcatgcacagctctctttgaggttttattattactattgaattctgattagttcttcctcttcaccaattactctgtatctgttgctattaatccatgcatgcttagtgcttgattaattgtctctgcgcttaatatacgttcatgcttaatgatcacgatcattcatgacttattggtgtttgtgttgcttaatcacataatgaatgccttat

SEQ ID NO: 20758 - DNA, 436 bp, Glycine max
tttgacagttgtgacatctcagtttcctcttgtcaaacttccattccttgcttccattggagctatcattttgcttttgtgattaatcacttttctttcctttagaggattcactacttgcattagatccttgatcctggtgtttttgattggtgcatgacttatttcctttccatggtcctttgccttttcctttgtaagtggattgtgcctgaagtgcctgttcttgattggatcttctctcattgatccttatttcatgtgcctcaatagagcgctgcaattcttcaatctccatgatgtctaagttccttgactcttcaattgcaacaaccacatgatcaaatcatggtggcaaagtcctcaagatcttgtctaccacttgttcatcagagatcttgtctttacatgacttcatgacattgaccagttcttg

SEQ ID NO: 20759 - DNA, 321 bp, Glycine max
tctacatttctctccacacccattgcatgtcaaactctaattcttctccttctttggggggactgctggcaccatctttcaatctaaatggccaatgaatctgcattttatacattagagcctctgtgtctgttactacacatatcaaaccacatgcaaaaatagatgccatttaagcataatagaagctcattaccaagttaagatcaacgtaatcaagttggagttcttgaagggtattgttgatagcaggtctaaccctttcagggatcaagtctgtgcacccacctcatgcaataatttacacacacacacacacac

SEQ ID NO: 20760 - DNA, 395 bp, Glycine max
  unsure (1)..(395): unsure at all n locations
attttctcaatcaagttcctgtgaaaataaagaaagtagaatggtgtgataaaaatactgagattatgtcgaaagtgtgcatagaagaggtgaatgctggaaataaacctcatatacaacagtaggaatagagaaatatttttagtataaaattgaaaatgtgaactccctggaccaaccctntctatttaccattagatgatgatctgtccaagttgcttaaaaagtttccagaagttcttggatgtaatttggaggaagagttgaaagggaatgtaaagatcctggaggagcagagttgtattaagggaaattctcttaggaaactttctcttagaaatccaaaattttgggttacaatggtgattgtagggagactatattgacaatgcact

SEQ ID NO: 20761 - DNA, 263 bp, Glycine max
agcttgccctgctgaatgattgcttgttattatcatgcactggtgcatgtgctcatcatatgctttggtctatgaaatgaaattatggttgagccttgttggttctcctagttaggaagtgtcaaattaaatttgctagtagttttctgctcaagtgttggagcttttattcacgctttggagcgatatctcctatcagtttcctttgcatactatacagtttgcatgacagttgggaacttttgatatggacttagaccact

SEQ ID NO: 20762 - DNA, 439 bp, Glycine max
  unsure (1)..(439): unsure at all n locations
cgcttattgngagccatgccaatggtagattgaaaactattgttataagcgaactctatcaacggaagagaactctcccaactccctttttgctctacgacacacgccctcaaaaggtcctccagcgactgaatggtccattcagtttggccatcagtttgagaatggtaggcagaacttagtctatgcttggttcccaatgctctatttaggctctcccaaaatctagaggtaaacctaggatctctattagacactatgctagatggaacaccatgtaatctgacaatctcactaatatacagggaggtcaacttcttcaaggacaatatgatattaataggaataaagtgagcatacttggtcagtctgtcaacaataacccagatagaatctaaacctctgggggttctagatagtcctacaacaaaatccatgg

SEQ ID NO: 20763 - DNA, 327 bp, Glycine max
  unsure (1)..(327): unsure at all n locations
acaatatgactcatggaccttntaaaatttcattttatattnttgaagaagttcaaactataaggaaataatatcaggaattgcaaaagcagtactgaaaaatcaatctgttaacaatgataaattggtatattcctccctttactgaatttccttgaaggagaaacgtgccttactaaagtcatacttccaaatgggtactatttagcaaattacttttacatagatattagaactatatagtgaaatgagcttctaaaatcagaagaacataggtgaaattgtatgatatacactctctgctgaagttgaaactcacatgacata

SEQ ID NO: 20764 - DNA, 324 bp, Glycine max
  unsure (1)..(324): unsure at all n locations
agctttgagaggagtnttgggacttaccgtgtactatagaagattcatgtgcaactatggacaaatagctcgacccctagctgatttattgaagaaggaaaatatcaagtggactattaaaagtattgaggactctacccagttgcagcaggctgtcaccacagcttctgtactatcaatgccaaatctttcaaaaaaatattccatagaatgtgatgcatcgggaaagggagtaggggctgtgttaactcaagataaaaggcctatcgcttaattcagcaatgctttggcagattcaacactcactttattaatttatgaaaa

SEQ ID NO: 20765 - DNA, 364 bp, Glycine max
  unsure (1)..(364): unsure at all n locations
ngttacaatcaatattttttgttcgatcaaaccactgctaactctaatgcaaatcaaaagaattgttgtttgcatattgactaacactcgatcatcttaaagatggatatacaatcttagcacttagtattttctctcaaggtgttcaacgtattttgagagttctacaaacatttataggaatatacagataactttttacataaagaatttgaatgagcatgtaggttcgtgctctatgtcttcaaagcttctggtatatataacttttcttcaacacgtgtttggtgtctttaaatggatagatttcttcacttgagtttgcgtctaaagaatgtggtccgtggaagcattaatgcttaca

SEQ ID NO: 20766 - DNA, 264 bp, Glycine max
  unsure (1)..(264): unsure at all n locations
agctttaggaganaccatatatactaatgtttttcctaaacaaaaatcaattgatgaagcttcgccgagtgtccccattgaaaaacctttattcaaacctttcaaagttagtgattaggctaaacgaaaaattacggaacttagataaactaaatccttaattgaaggcgtttgtgacaatcatagcgaattactaaacaagattagtagtttgcttaaggtcatccagattctccccaagctacggaaaattctcttcaaatg

SEQ ID NO: 20767 - DNA, 399 bp, Glycine max
  unsure (1)..(399): unsure at all n locations
ntaccttcacaagcacataaacacattactccattaatgcatcacacggtactctatttgaaaatggatcttttactctgtgcctgcaaggactgctgacccttccacctgatagttcatcgcatcaaatagacaaaatatatcataagatataagtctcaaagttcataaatagagagagccacacggtcaaaataaacaaactaaccatgaatgcagaagcaaatattgaaataaataataccactattatgtgtagtggagctttccaacttttgtacctaactgaaggagactcgtcaaccacttgagagcctgtagcagatgcaatacggtaattaatgaagcttcattgtgagaactgtggtatacctatagtgaccacaattagtatcatta

SEQ ID NO: 20768 - DNA, 415 bp, Glycine max
ttgtgtgtgttgttgcttaagcttagtgtcttatatgattgtggcatatcaatagaaattgggaataaaaaggaaaaggtgatctaaggatgaatgctctcctagaacctaagttttgcatcctagaaaaaccatgaattgtttgtagcccagcctcattacaggccaagaaagtccttcagattcaatttgtgtgtttgtgattgtttacatgagatgaactgcaaaagttgagacttgtgttggtcattgatttgaagaattaccttaaacacttgtgcttataagagaaacaatgaccgtgaggattaagcttgatgaaaccttccttgatacctgtcttgcttgctagcttatttcatttgtgcctgttaatgaacatgtttatatctctgaaatactgcatatccttatg

SEQ ID NO: 20769 - DNA, 305 bp, Glycine max
  unsure (1)..(305): unsure at all n locations
agcttgcaataccgagttggtccagntactcgtctaataaatggacttacatgtgaagcaaacaaatccaagttctgtcgatatcatcgagtcgctagtcacaacacgatagactgcactgcccttaaggaccaaatattaaaattgacccaaaagggggaacctatagaagttccgtcaagacccatcacatgatcaagattgtgaaatagagctagatagaagcctagtacacatgatgactcttgaagcaattataagcacaacaacagggtgacatatcccaacttgaaacttggctttga

SEQ ID NO: 20770 - DNA, 426 bp, Glycine max
  unsure (1)..(426): unsure at all n locations
tgctgagggtctccgtcaaggccagtagcttgttntgggtcagcattgcatcttgggctgtgagctccagaaggcttctctttgttggtgtgtatgctcaatcatgaaggatggtgtgatcacaggccgccatgttctctataagctctattgcctcctctggtgtcttcaacttgatttttccccttgcggatgcgtcaaggagttgttttgactgttgtcacaagccatctatgaagatgtttagttgcaccagctcgctgtacccatgtgtaggcatctttctgagtagtccgtgaaaacggtcgagcgcctcacagagtgattcattgtggaattggaggaatgaggatatttccatcttccccttgataagttttgactatgggaagtatttcttcaagaacttttcaacatctttctcct

SEQ ID NO: 20771 - DNA, 170 bp, Glycine max
ctcttctgttttctcttacctactacctattcacgagaccgtgctccccgactcattaattctataatgtctcttctaaatattgactcagcgtcttcgtagtcttttatctaagctattacgtctcaaggtgttctctcccacgttctcgatactctagtcgtggttgc

SEQ ID NO: 20772 - DNA, 367 bp, Glycine max
agaccaaaaccaaagtattaacatctatgtcattaatgagttgatcgtgatgtgactagagaagtctctcttaattatcctgatgctttctatactgtcaacctgaagatagcttaaaccgtttgaaccatgctctaggcatcctcatggtgaagcatgtcatattttcaccatttcaatagtctaaaactactaaacaatcacatgacagagcggtaacattgtctaccacacacatggaaaattcggatgttacaatgtgtacgtaccatcgtgaacatttgttatccttctcattctctgtctcgatacgttcattatgtcatactatactcatactacgataccccctcttttgatacatata

SEQ ID NO: 20773 - DNA, 240 bp, Glycine max
  unsure (1)..(240): unsure at all n locations
catgcaacctnttagaacttatcattgaactttatgtatttacttcacattggtaattatactcagacagcaaggggcgtaactattcatactaacaagcatattcaaaatcttccatgttatataaaataaaattcgtggatcgaaaattttttgaatacaacaatagtgttggtcctaatatacgaattttggtagcaatttgcataatctgatataattaggggatacaagtagtta

SEQ ID NO: 20774 - DNA, 268 bp, Glycine max
tggccgaaacgaaaaccaacacctggaacacactcaggagtggccgacgaagctaccgaaacaaattgggcaagcttccgatgactgcacggcggcacgtggaattcacgtgccgaaaaacgcgcgaggttgtaacggcgcgtggtggtgcatgggagttccgatggcggcgcgacttgcaggggttgggttgcgctttcaaggcgatcctaaccctggtctcaccggagaaaatggtggccggagatggcggcggtcgatggtggac

SEQ ID NO: 20775 - DNA, 406 bp, Glycine max
agcttcccagatatggagagctaaatcctctgttggttcttccttgtaggtacttgatgtaaatacctgtatatctatttaatgatgttttatctgttctctgtgctattagtacttcatttcagtgtgcttttgccttgatctcgtagatgcatgctttgctaggatcattcaataatggaactggtttgattcatagaacttgataggatggggctagtttatcgtattatcacgaggaatcgaggtacgataacctagttgtttgtatgtttgtcttaatgtggttcatgtcgagtcttgtccaacaagaggaatctgagggcaattcttgatcaggattaggctagactatcatgaggaatcggggtttagcatctcaggagagaccatagagcacatgagc

SEQ ID NO: 20776 - DNA, 443 bp, Glycine max
  unsure (1)..(443): unsure at all n locations
ntgacttcagtcatcaaaagattataaatatgtgaccatggcatgaatttgaacaatcaagaaatctatctttcaatcttctctctcaacatcattcaatatctttcaactctttctacagaattttttgattcatttctctttatctttctaaaagttttttttcaaatactttctcttccaagaaaagttctttgttcaaaaacttgtgttattcatctttttcattctcttctccctttgccaaaagaacgaaggactaaccgcctgaattcttttgtgtctctcttctcccttacaaaagattcaaaggactaaccgcctgagaattcttttgattcttcccttccccttaagcaaaagatttcaaaggactaaccacctaagaatatatttgtttccccttacaaagattcanaggactaaccgcttgagaattcttt

SEQ ID NO: 20777 - DNA, 415 bp, Glycine max
  unsure (1)..(415): unsure at all n locations
agcttgtttaactcaccatcaaggtgttttgcaaaactcaacatgcaaggtggttggtttaaaacggaaacagagaggcaccctaattacaagaagatgcaaattaataaggcaggttgggccacgttgattttaaaaattactagagtaaataacccaacatgtaaatgctctattggttttggtgggacagaaaaacagcaaaaaggtaatgcttgttagaagagcatcagctactgtttttgggttgtggggtatttgactagctcgtaatcagttacgtnttgccaacaacaccctttctgtacactcaggatgagaggggagtggcggttggtgctcttggcccttacatgggaatctgtactgctttggaagcggagatgctagcaatatttctcgccattgaacactg

SEQ ID NO: 20778 - DNA, 420 bp, Glycine max
  unsure (1)..(420): unsure at all n locations
ntagacaagctaaacatgcaaactgaaattaaaaactgaaacataaatataaacccaaattataaaatgtactaaaaacaaaataataataaaagtgttcaaaagacaggaaaataaaaatcctatcatgggtcctgtggtgcagaagggtcatcatgtggtgcagaaggggcataatccatggctgtggcatcatcctcatcctcagatagctctagcacaggcgtagccaccgtcgatgcttgcaaagaagacaactccagcacaggtgtggtcactggtaatgcttgtggagtcatctctagcgaatcctccacagtgtcctcctgagcagttggatcaatctcttggatgtctggctcttaataactaggtcaacctctacaacatctggatcatcctcctgagtagcttctggct

SEQ ID NO: 20779 - DNA, 380 bp, Glycine max
gatataacatacatctctcctgatgcatgacgaaagtatctgttgaacaggaaatttgagcgtgatttcaagaggagacaaatagatgacatgaagaaaaatatttatgatacttagtgcacatcaatgcattcagagttgtgcaccaaaacgctagatatcattaaaaatattcagctcgtacatgatagagatacagtctagctatattttgcaaggacttgatattttagcactacaatgtatactcatgtcacataatatgcttcttccataaagattggattatgaagcacgtaatgcaagtttacttatgggatcaacaaactaagctgctgaataccattgcaaaaaccttttgttcaccaaagatccactag

SEQ ID NO: 20780 - DNA, 432 bp, Glycine max
tgtatctattgattgcattctgcagatgaatggttgctgatatcattttcaaaataatttttaaatattttgataatataatatagtaatttggttatgtttaggaactttcactataacacaacttgttttgtaatacctgtgtcgcaaatgatctatgcaattaattgttgcccttcctggtctttcctgaccatataatcaaatgctcaataactgtgatattgtatttcaatgctttcattacttacaccttgctggatattattgtaacgcttatgtatttcaatgatttgataacttagtaaaaaaatgtgctgtatgattattataacataaatgtccttatagaagtggcacacatacgtggttcttctcatttaatagcagcctcttctatgtctcagcagtactattttggttcacggagat

SEQ ID NO: 20781 - DNA, 63 bp, Glycine max
  unsure (1)..(63): unsure at all n locations
agccttgatggtgtcgagaagaaatcacatgtntgtcatcatcaaaaagggggagaatgtgaa

SEQ ID NO: 20782 - DNA, 396 bp, Glycine max
tattcggcctcccatcagcagagccttcattgagaagtactacatgcccaggcaggtacagggtcaggcatcgcaatagccagaggaggactagtagtagccagctgcagatgcaccgccgccgcccttgtaagagacaccatccccggggtctatctatacccacttgcagaggatagaactccagatgcacacatacatgtagcatgtgactagccagcaggcagctaatcacaggggccaggtgcagctaaacgagacattctatcgggtacaatatgcaccggcagagtcaggaccccagtcccttcccttggtctaccctcgtgcagtttggggccaccgttgcttggctcagagatgaggccaattttgagacacgggcaagacccgaaa

SEQ ID NO: 20783 - DNA, 328 bp, Glycine max
agtcttgaatatgtagaacctattctagtttacatgttccatttttcctatatatgtagtccccaattatgcagaaaaggttatttatctcatactttagtgtgaccaagctaataagtgagaatagaataagaattaatataaaatctagtattagtcacatgttacgttctatagtgcaaccttatcattccctcactaacatagtaccaaccttacctaccgatcaccactaatccttatcaacgttgaattatgcagaaaaatggcatctaacgcctagattcaataccatcacgtgattactttaagatacacttagtccctg

SEQ ID NO: 20784 - DNA, 397 bp, Glycine max
  unsure (1)..(397): unsure at all n locations
tattactagtaaacttagatcaagatgtgatcgaacctttgttattactaatgttttttcccatggtgcagctgagattaaaaatgaagttatcggcaaagtcttcaaagtgagtgatcactgactctagctttttcatgagagccctcaagtggaggaagagtttgtggtggacctctctttggtcttgccaatcttatgtgatgatgtgccatgaaaggcacttgaggagttttttcctcccttcgtttatatgttgcctcttttcattgcatgcttacattgaggacaatgtgcacttcaagtgcgagggaaaaggtttagaaaacaaaaaatatgttggtttttggattggctggttttctatagnctggattctatatttggtttctggttc

SEQ ID NO: 20785 - DNA, 330 bp, Glycine max
  unsure (1)..(330): unsure at all n locations
agcttgagctntaatcgttacaaagtctatacttactgcttaatattaagcccaagtctttttaatttgttgcattgtcccaaattggactgcattttgttgaccaatcttttcaacaatgccatccattataaaagattatttagctgttatttatatgtgagatgtatcaataggctttaaaaagactgttctcttaggttagtttggatatttaatggggaacgaaatagaataaaaattccagtccccattgtttggatactctatgatggaacatggtaacagttattgcactgaacatattattcttatgtcacttgatgctct

SEQ ID NO: 20786 - DNA, 431 bp, Glycine max
  unsure (1)..(431): unsure at all n locations
tatctatatacataatatatatatatatatatatatatatatatatatatatatatatatatatatatataattaaataataagtaattaaaagcattatagtagtaataaatcgaaattggatcttctaataaattcttgaagtgtggagtcaacttcatggtcattttgtaagaataattaagtcttatatgcaggaaanaaaaactaagaagtattatatagaaattaaaaagattctgttgtggcccttacatatgttaattttcatctgtaatcaataaaaaatcattttatttctctaaatttctttattctcaatccaaattaatctgattatcgatctcgagctagcaatctaaatntttaatctggatatcagattattaccaaagcccatctagaaagtggtgggctctaatagttatgaa

SEQ ID NO: 20787 - DNA, 394 bp, Glycine max
agcttgcttaagttcaagtaatcacagtcttcctaatgtttctaaaaataaaatataaataaataaaaaaactcatagagcatagtaagacagcacaaacgaattcagaaaaatgctccttattagcttagtcattacaaagagcgagactgaaaaataaacagagcataatgatgctcccaaagaaagaggcaagcgagattatgttgttgacaaaattatccgccaataaatgaatatcaagttcttcctccaaactaaatccttttgttattgctaagattactggtttcagacacgattagagataaatgaacattgaagaaagaaacaatgtaacattgaaggcgatttcagctcaattagcaatgactacctgattaacatcactcat

SEQ ID NO: 20788 - DNA, 323 bp, Glycine max
tccccaggccatggaagttgcctctaatagggaacctgcatcaactggcaggggcaggcacacttccacaccacacccttcaaaatctatcacgcaaatatgggcctctgatgcaccttcaacttggtgaaatttctgcagtggttgtgtcatcctctgacatggccaaggagataatgaagactcatgatcttaattttgtgcagaggccagaactcctttgtcctaaaatcatggcctatgattcaacggatattgcctttgctccatacggtgattactggagacagatgaggaaaatatgtacgctagagcttctcagt

SEQ ID NO: 20789 - DNA, 282 bp, Glycine max
caagctttgcttttattttacaatagtaagaaatttcttaggaagatataatattattcttttctctggtgattttgtttggattacgttgtccaaacttaataatttaaaatttgcttgttagatttaattttaaattcttaagtttagacaaataatttagcatataacttttgtaagtatatatgaaatactcttctaaaatattaaatcttcctataaaaattaaatctgttatattcctaacaatacatttaaatgatctatataaattatctggtc

SEQ ID NO: 20790 - DNA, 360 bp, Glycine max
tagctactaataataatacagaagaaaaacttcatatcctcatccttgaattcagaaaaacaaatattacccctggaaatggtttccagtgccaattttcagcagtagtatgccaaaagggataacctggagagccccaaatctgcatgccagccgttggactgccagattgtccccacataggatatacaggaggcagaggaagggtgtgattagaatgatatggaggaaatgccataattggtcttttaacacaatagctcctttctcttagattcaaccattttcgttcttccttgggcaagaattgtctcttatgcattctatacttctggtttaacaaaaattacttaatgagtc

SEQ ID NO: 20791 - DNA, 429 bp, Glycine max
  unsure (1)..(429): unsure at all n locations
tgtaggattatggngtacccatcacatgtggtactaggtggcggtcgggcgatggtgcacaacacgttttccacatccacaaatcgcgcataaacccaccatcccctgttgcccacctccaactgagctcacgtactcccacgtagcccatatcctcgtttctctcaacaccgggtccccatcaatcctcccaagctttcccaacatccaagtaatacaacattcaaacagcacaaactatcacagccaagcaaaacagggcaaaggcagaaaactctgcccaaaacaccaaccaaaatcacaacttttctcacttatagaccacagtaacatttccttcgtttcaattcgttaaccgttggatcaactcgaanattntactggaagtctctagtacataaacctacattntgaccgttgggatctact

SEQ ID NO: 20792 - DNA, 211 bp, Glycine max
agcttaatcagaatattatgactacttattcacctaggcatagaaacaggtaagccataaaaagccaaagaaaagtttagcctgacttattcacctacctagcttctactttcttccaaagcaataattagaacactaacagcttacaaacactgtcttaacaagaccaagattgatcaatgaagatactcagggtgtgaaataccaactt

SEQ ID NO: 20793 - DNA, 361 bp, Glycine max
  unsure (1)..(361): unsure at all n locations
tcttggggttggctggctattataggaaattcattgagggattntccaaattggcattgcccctaactaagttgactcgtaagaacgagaagtttgtctggaatgagaagtgtgatcaaagtttccaagagttgaagaggcggttgacgacagctccggtgttaattttacccgaccctaagagaccatttgaagtgtattgcgatgcaagtgggcaaggcctgtggtgtgtgttgatgcaagagggaagagtggtggcttatgcttcacgtcaattacgtcctcatgaagttaactacccgacccatgacttggaactagcagcggtggtctttgccttaaagatttggaggcattattt

SEQ ID NO: 20794 - DNA, 295 bp, Glycine max
  unsure (1)..(295): unsure at all n locations
agctntgcttctacaagaaggagggagaactctcattgtcaaacatcccactagtccctgataattgggtgtaccaatatcctccccaacaatatcactactcagccaatatcagtcctacccattacccatcactctaccacccaagatcacccaatcaaccacaaaggccacccctaaatcgaccacaaaatctacccgttgcaaaggcaagatcaaacatcacccataataaccaccaaaacaccaaccagggaagggaattcctagaaaaagaagcccggagaattcaccc

SEQ ID NO: 20795 - DNA, 432 bp, Glycine max
  unsure (1)..(432): unsure at all n locations
aatgccttaatcatttccaaatatgcatgtgaattaggacgcatcaacaagaatcaagccaaggctattgtgcaagcaatcaatggggcaaaacataccaaatgattataatgatggatggctcaaattctcacaaaggtaaaatcatcactttcaaattgagctttcaaaactatcatgacatgtagagaagaatcaaggatttcaagtcacaaaatgtcaagaacttttattttcaaaacaattacccattttttgaacatatcctataattcaaagaaaaacatgcaaagtcgtacgtgcacacgaaattgacccaaaatattaaactgaaaatccgacgaaactaacaacattaacaaattaacacaactaacaaattaacaaaaccaacaaaactagcataaccaaagaacactcctccnccatact

SEQ ID NO: 20796 - DNA, 209 bp, Glycine max
catgcaagcttggaatgggaagaagcataacaatgtatctaggtcttggatctatatgctacatacatattgtgacgtgaagagcacaagcttgaaacaagactatacgatgtatcttccttgggtgtagctatatctctaagggctaccgtgtgtacaacttagaaactaataaacttcttatcggtctatatgttggagtctatggg

SEQ ID NO: 20797 - DNA, 376 bp, Glycine max
tgagatgaggaagtgttgaagggtgaaacttcctgcttttattgttgaccacagagtggtacctggagatatgtcgcgggggtcaggagaccttggggacgccaggtggggtgctattgcccaaaaccaagcttggtcaatcccgacccaacccgggcatagtcggtcagtgagaacctgtgatgtacctaaacaggcgagcttctggcagtcaacagataaaaggaacaaagaccacaaagcaaggaggcttgtggtggctggccagctgtgaattttgtgtgacatgtggtttgtggcctctggtaatcgattaccaagggtgggtaatcgattacaaggcttaaaaatgaagacaggaggctaagatggtctc

SEQ ID NO: 20798 - DNA, 153 bp, Glycine max
agcttgaaggtgtgtaacccaccatttcccatatatagaacactagtaatatgtctactatcactgttattatttctttcttcgtcattgaaggaaacacttgtgctgccagatccctccacctttgggcgtattctttgaaagatccgtgcc

SEQ ID NO: 20799 - DNA, 447 bp, Glycine max
ctgagccaaaatcctaactcaccataatccttaccctcggaagataacacaaagagaaggaaaattcccaatccaagaaagggagaagacactaaaaaagaagagagaattcccaatccaagaaagggagaagacataaaacagaaagaaaattcccaatgaaaaagtgggagaaagcaaaaaaaaaaaaaaggaaaattctcgatcaaggatcggaagaaaacagaagaaatatgcagaaaggtcttcgaaccagacaatatctgaacaatagagaattgtcaccaagtaaataaaaaagaaaggaaaccacgacccaaagtggccctctccctttgattgccaaccaaaatccagtgcgctagcaactttctcgccacgcactaaacaaaaacagaaaaggaaaaggcaaaaacactcaaagccaaattccccacctaaaaacca

SEQ ID NO: 20800 - DNA, 400 bp, Glycine max
ccgcggcatgcaagcttgttgacttgtgtaaagtttttatttgttagagtatgagaaacctttatgaaagataatcttacttgaaccaataagattaccatgagtgataaaactatcattctaaatatttaatgcagtacatacctgatataagtttaaatctattagcctacctatttctataatgattattaaataatttcaataaaacttatttcttttaaaaaaaatccacccttatatcatatttgaatccttaatcttgaaagtaaaataatttcaataaatactcttcttcctcacgtgtctttaagctataaataaataatatttatatactaattattcattcaaagaaaatagtggtataaattggagaaattgcattgaaaattgacac

SEQ ID NO: 20801 - DNA, 446 bp, Glycine max
  unsure (1)..(446): unsure at all n locations
actaagcttaataaaagaacgcaaagcanaaactgaatcaacacgcacaggaagttcagaatcctgcattctggatacaacacactgcaaagcgctccgaaaattattctgatctgagaagttaatatgggcatattgtcctgcaacccatgctgcctgtttttcacaggaaaaataaagtgtagtctaaataataactccatcgcatggttattgtattttagaaggaaactggaatgataaaaaaaaatagcagcatgcagntctttgatctctctgtttttctctctctatcctctctgttttgttcttcttccatctttttctgtctttctgtttctcgctttctttcccgcctaagtcctatatcacatggngattaatggggtaaaaactagaataggagaacagaccttagccctaaggtggcaacaggacagctgaac

SEQ ID NO: 20802 - DNA, 366 bp, Glycine max
atgcaacgcttgagccaaaatcccagacttaccgttttaccttgacccatggtgagaatgtcaatccttgccctcggaagaagacatagaaaagaatgttcccgacccaagaatcggaagaaaacaaagagaaaattcccaatcaaaagagtggaagaaagcaaaaaaataggaaagaaaattctcgatcaaggattggaagaaaacagaagaaatatgtagatcaatatctaaacatacacatagttgtctccaagtttataaaacaaaaaatgaaaggaaaacacgatctaaagtggtcctctccctttgattgccaaccaagaatcttgcgcgctagcgactctctcgctccgcactatacaa

SEQ ID NO: 20803 - DNA, 403 bp, Glycine max
  unsure (1)..(403): unsure at all n locations
ngcactagaggagggaaggatatttgcagctaatgaacatgtttcttgactatttgtccttaagattttactatttctttttgctaatatgtaaatataaatggtataagggtattccgtaaaaacatggtctatatttacttctaagattgttaggggtaaaaatgaccatgtccttaagaaagatgttctcagaaaatcccaaaaataaatccctcttattactagatattttgaattctttagttcctcaatgtacaaccttcaaattgttgctcgttcccctctttcttttttgcaaaaaagaaaatcaaatgctgtgaaaacatggatgaagtcctaagaaaatcaatatcaaagaaaaaatggatgacatcacaattaataagcacaactacctatc

SEQ ID NO: 20804 - DNA, 414 bp, Glycine max
cttgtgagagaagacatgtgctgtggttttttggtgctctcctccctattgtgtgattaatagatccaacgtgcagaatgccttgttctgttctcacttcatctaatgtgaatgatgcggtcatcattaatagatgtgtgtatacattggagaggcgacatctatttgagaggtaataaatagctttcaaatctattgtgagagaatacgagaggaacaatcattatggattgtatcttcccactagagagcatgtttcatatttgaaccacataattggttcacgctttggatcagcattgatttactggaatattggttgctatacatgatccttccagttgtctgtgtggtcattaatagattgttgtatatgaggtatattctcttattctgtggtgtatctctgggatt

SEQ ID NO: 20805 - DNA, 450 bp, Glycine max
gacactatataatactaagctgtctgacaacttggcgatgattgatttccaagtctccaacctccacggaattgtatcaatggcgatccccaagtacacacaaggaggagatacacttacacagttaaggaattttgcagatttctctacaacatccctagccactccaaagcctccaaatttactcttctgaaaatccactttcgagcaggatacaagttcaaaagatcccatcatacttttgaagactatcacattataaacactaaattttcccacaacaattatatcatccacatattgcaatagattcatctcttgctctttaacaccccacttttagtcctctatagagaattttagcaaccgcttccctcatcaaaccggttagccccttctttacaatagtgaatagaataggaacacacgagtcttcttgtctaaccttat

SEQ ID NO: 20806 - DNA, 320 bp, Glycine max
agctatgaaaagtgttgtttttcaccttctttcttagccaatctgctggcttagcgagcatccgctaagcgcaacactcatgggctaagtgcaaggaagactctggaagaagatgagctgtacaggttcgctaagcgcaccgcttcatcccactaagcacaccgcttcagttcatccactaagcgagaaaggctcgcgctaagccgaaattcaccaatgtgcgcttagcagtccataagtgctgttagcgcacgagctcgaacaaagctacctatttaagcctgaaatccgattttagagaaagagtttggactgtgatt

SEQ ID NO: 20807 - DNA, 370 bp, Glycine max
  unsure (1)..(370): unsure at all n locations
taactcactcaaacataacaagtttagcatgctttcgtcaaatctcttctcaaataactatcacaaagcattaaccaagcaaaaatgcccatcatatctcccanagccccatacccacgaaaatcaagtgagaaagaagtctacccaaacctgaaattttgaggtcccacacgtagagatgcgcttcacgactccgaaaaggccttcctttctcgatttggagcagaaatggctaccaaaggttgaagctttgttggagcttcaatggtggaggaagaagaagagaatggcaacatgagagagagaggaaaaggcttctgaaattttggggctgagtgaggagagagaatacaactttttagtttaaaag

SEQ ID NO: 20808 - DNA, 89 bp, Glycine max
  unsure (1)..(89): unsure at all n locations
agcttatagtncgaattgtggactgagtttgtccaagcccgtgaaaagtctaagcacctagaaatggtgtcgatggatgcaatggtatc

SEQ ID NO: 20809 - DNA, 409 bp, Glycine max
  unsure (1)..(409): unsure at all n locations
gttttaagttcttcctcaaaactgtcctaagcatagttcccaatgtcctattaacaactgtcgattgcccatcggtttgtgggtgacaagtggttgaaaataacaatttagtgcccaacttgccccacaaagtcctccaaaaatggcttaggaacttagagtccttatcactaacaatgctccttggtaaaccatggagtctcacaatctccttgaaaaacaaatcagccacatgggaagcatcatcaacttttttacatggaataaaatgagtcattntagaagacctatcaacgaccacaaaaatggagtctctaccactgcttcgttttggcagccctaaaacacaatccatggataaatcaatccaaggatactccggaaatggcaatggaatatacaatccatg

SEQ ID NO: 20810 - DNA, 96 bp, Glycine max
agctgtatggccttttgtttgtataacatattcttgtggtctataagacaagattgacgctctttgaatggagtttcaaacttcaatggcataaaa

SEQ ID NO: 20811 - DNA, 430 bp, Glycine max
  unsure (1)..(430): unsure at all n locations
aggcggatcatagtctctagaccgctcgtgagaaggatatctatctgtctggagaagtgcanaacaccaacgaccacagactattgccacatgcgtagagctatgagtcatggcaagctgagattctaagatggaccgatgcttgaagaattcttccagctctgtatttgtagttaactacataagaaaccaagcgcaccgtgaggacatatctaatagcaataacattattctatgcactgaattgttgggagatggaaggcttcctctacatctaatttctaagacaagcagggggtgtattgtcgagaactctgacacttgggacatcgaacactactttcctctagctgattaagcgctaaagaaatactgaatattaaggcgctgagaaatatagctgagatgacagtgggtctctacttttttt

SEQ ID NO: 20812 - DNA, 323 bp, Glycine max
  unsure (1)..(323): unsure at all n locations
agctntgtcttccagggtgagggtttgttctaaatgtatatggggcatcgtggaagctgcttatgaaagacttgactacccttgcacagacatggagtgtcatttcctactccaaccttgcccctgcttctcacacctctgatctaaacatggacagggcgaggttggtgtatggccttgtcatgaacatggacatggacttgggctccatcatctctagatagattactcagatggcctagtccaacacctctatgttgggctttcttgccctgattacaaccttatgcatcgcctaatgagttgtctctgatttgttgacc

SEQ ID NO: 20813 - DNA, 386 bp, Glycine max
  unsure (1)..(386): unsure at all n locations
ntggagggatactgatcagggaaaggaacagaactagtatggcagtgtatgaaatcttcatattcatcatagccttgtaatattgaacctatatgcacacaaacaatgtgcaaatgctttttatatgtagtactatccgggtctacgacctagtatcaaaatttttcttagttgtcacttgtcaatatgcatcacaaattgtattaacatatatatgccaacctaccacaaaaggctagttaaattattgagaactagttgtctagttaatcgaaggttccatcaagtggaaaacgaaaaagaacctttatttgatcaggtctgcctccaagagtggatcataaaatagcaatttatgtagagtanattactatgacatcccatca

SEQ ID NO: 20814 - DNA, 172 bp, Glycine max
  unsure (1)..(172): unsure at all n locations
cctgcatgcatgcaagcttcttccaccaaaccatgttcacacttttatctnatcatcatatatctcccaacgaagtttatttatatctcccccgctattgatcaacatggaggaatcacatgtcttgctgtggattaggagaaaacaaatgtggaagtcccatatttatcaa

SEQ ID NO: 20815 - DNA, 420 bp, Glycine max
  unsure (1)..(420): unsure at all n locations
tcaatggaatccaatattccgtttgacacaagtcattcaattntgttcttagaaatgtgacataatcacttatgtcataatgctcctgagtttgtattatcaattctacacttagtaccatacaattctgcattaaaggattcaccataagaagctacaatatcaagcaaatatagattatcataagtcaagagtgaaccagttccaacaatatctgaattgaaagacaacctatacacattgtttcgaaatgaacacaaataacccaatttgtccaaataagaaactgaaaccaaatttcgtctaaataacggtacaacaaaagtgtctttcaaatccaaataaaaaaccaatacatagtaataatctaaaatgccatatagctttcacctccaccgatttaccatcttcaacatatat

SEQ ID NO: 20816 - DNA, 324 bp, Glycine max
gcatgcaagcttgagaatccacccaatccagtgtttttgctgacttgctccatatctactggaaattaatggttgccataaccctagccaagttcataacctccatttctccgagaatacgactcgaacgcaacgtgtgcttgttacggagaagccccggggcgttccattgagcatggtaaggctctgaagcgtaaggtgcaaggtccaattgatgcgggctggctgaaatttgatgagaattgcgttgaaattcttacattgactagagatgccacacatggggcaatcttgaaagctgttgttaggtgtccctaatgactc

SEQ ID NO: 20817 - DNA, 384 bp, Glycine max
ttttacaatcggtgcagtaaccaataagtttgaccatattttcgtggtgaagctaacttatctgttggataaacagggagctgtaggactagcaaaacctgcagataggccggatcatgaggtcgatgatcctctatatctgatgacattaaccatcccacaactttttctgaagccatcacaggttatgtgggatgctaccgtgtttggggtgtttaatgaacacttcccattgtacataaagaatgaagatctgtctgaaatagcacacgatggtcaatgtctcaacatatctattatacagctgtagattctataagtcaatttagattattgttaatcacctaaattatcgcttaaattcatacataacttactttgtgt

SEQ ID NO: 20818 - DNA, 280 bp, Glycine max
  unsure (1)..(280): unsure at all n locations
agctngaaggtaaactagatgcctnggttatcctggtaacccttctggccgtgaatctaaaatctgcacctgtcgctagactatgtggattatgctcctctgccgaccaccacacagatctaagcccttttgtgctattatatgaatcaattgaacaaccttgacgctatgctgctatcatatacatcaaacttgcttatcctcatcagtcaaatcagccacaacagtattattatgatctctccttcaacaagttcaattccaggtggtggaattatct

SEQ ID NO: 20819 - DNA, 441 bp, Glycine max
tgtagaacggatggacatgatatatgtcagggtgttgggctggttcagggataaaagggaatgtccaccattatttccatgacacaaatgcaataatgatgatttggaaattttatgcaaaactagtcatgcatgcacctatgtggacacaaatgtccaccattatttccatgaggtattttgctacctaaacatatgtatatttttgtgaggtattttgctatatacatgcgtgtccaaggtatcttgctacctaaacatacatatatatgttttgtgagatatttttgctatatacatgcatatccaaggtatcttgctacctgaacatacacatatatattttgtgaggtatctttgctacatacatgcatatccaaggtatctttctacctaaacatacatatatatattttgtgaagtatttttttggttacatac

SEQ ID NO: 20820 - DNA, 371 bp, Glycine max
  unsure (1)..(371): unsure at all n locations
agcttattatacaaataattttcgttgtatatattttatgaatttattctctaaagtaatcagaaactattaatattttagtgggaagagaaaaaatacattaatatttaataacacttaatatgtgcaaaattgcacatgataaatatacgtctatagataatattgtattttggctctacttntgtataacgcggtggcatacacggtgattataatctaagtggatgttggacaaagggggatcaatctgatattggttctatgatctaatcatatcgtttacaagactaggtacatcatcatcgagtgcgtatccaaccaatgaatgttagatgatcaagaccagcacttagcaacacaaacaactt

SEQ ID NO: 20821 - DNA, 429 bp, Glycine max
tgttcatgttctgactaggcctaatgagggtgaaatcagagttaattgcaattatgtcaatactgtctaattggtgcccattaatatgtggttaatttcattgttctaactttattttggatgtcaatcaaagtacagccagaggattcgattatttattaaagaagtctaactcaatttgatgaacagtgagttgagttattgtgactacctatgtttttggagacaaattgtgttatgagaaaatacttttttctccattaattttgtacattaaacgtattgataaatcagatacaattacaaacttactctttaccaagatgttagtaaattacataagccacactattgtatacattctttgaaaaatagatatatttaaatatttaatgaacttgaaaatgtggctaataaaacatatttacg

SEQ ID NO: 20822 - DNA, 437 bp, Glycine max
  unsure (1)..(437): unsure at all n locations
agcttatcttaaaatcaagcatccaaaacacgtatgcatgtatattgaacaacactctcatnaatttattgtttttgttattgttcttccaatcttattcgttcttccttcgacacagacacatataagcaaaatgcattatttaaagtaaattattgttatctaaacctttgccgatcctatataataatattgcatatgcatttcttgaaatggaattttatacacatataattaagtgattagccatcatgtttaatttgtcaatcaagcatatgaactaaattattattctctagaaactaatcatgaatactcattaatgaagatgattgcttattggggaagcatacatgatgcattaactgatgaagtttgacccacacattaatatataacacaaatcacaaagtcaatttattgagcttgttgatcaa

SEQ ID NO: 20823 - DNA, 439 bp, Glycine max
  unsure (1)..(439): unsure at all n locations
ntcaatcagagaatatagactacaaccacctgcttccacaaagttgtcgacattttccttcctgtgcatttccatcaataaaacaagaagtgacaacaagctttgttcaccaaaagaactctcaattatttctccagagagggcaattatgggaagatgtgacacatcatggcatgtattctcactagattctttctgttgaaaacagatatctaatgataatgacagtaaatgtagagcaggtagaagaacgctgtcaggagcacgagattcagatgatttaaaagtgaaaacagcataaaatagcacagcacggataatatgtagaacaactttgcaagtggctactctggctatcccccttagaggaggatgaattttggtccactggggcaattgggtggttagtgcagagacactgcagaagcgcaagtatctt

SEQ ID NO: 20824 - DNA, 246 bp, Glycine max
  unsure (1)..(246): unsure at all n locations
acacttcatagatatctgctagtcttttntcaactcatcacgtggaacttgggagaaagctctggttcatttatttgcacaaattctcttgctcattatcatactatcccaaagagcattatttagagaatttcactcgaccactatgggatggattgacattaaagtcaaaagtgcggggatcactcccttgtccattggacgaaatcataaacatgtatgcatgaatttctttctctcactgac

SEQ ID NO: 20825 - DNA, 270 bp, Glycine max
attcatagaatggccctgattcttattgatgattcatttaggcttgaggttggggtgacagggtaatcttactgaaaactactctcgagtcttgacattaacaaaaagaaaggttgggtcaacttccatactttgacgttcagcaattgcctagttcatcaaaggaaaatcgcaattagattcaagagaaagaataattaatgatggcagtcttctttattatcctatccacaagtcaatccctcctttttgccttttgtggcgagatac

SEQ ID NO: 20826 - DNA, 429 bp, Glycine max
  unsure (1)..(429): unsure at all n locations
ntaaaagttgnggtaacttataatttaactcattgatttgccgagaaaactaatggaaaaacgagtgtgtaatgattttttatttttgtcttgtatgaacatcctttagtaaaatgaaaatttctctctatatgattaactttggattttgagtcataccttatccaaaactagacatacatgacattttatactggtaaagtttattaaaatttgttatatgataagtataagttatgcaatagttttataaatactctatagaaggaaaaaaaaatgttaacttgagtattaatataaatttttaatcacataaatatatttatgtataaatttggtttcggctggattagactgaattttataatgaaatccaaaatctgattttattcacaacaaatgggtttattaaatcttaatttgttcgac

SEQ ID NO: 20827 - DNA, 377 bp, Glycine max
agcttgatcaaaacaaacatctaatcattctaatccactcaattcatacatttgctcaatcaattcattctcaaacactcatttcacacaaaacaatccactgcataacactttcaaatagttcactgttcaaacaagctatttgttcaagcaatcgaacaactactccacaactaatatttaaatcactgaaacataaagactaaaatttaaatgagtgaagatatatcataaaataactgagataaactatatgtttcaaaacgcacaaatttaaatgtcctgctcttgtgattgctcctgtgcatgctcattgagatccaacacctgagcatccggtgaattctgagggatatgctcgtctagcacaaatgctg

SEQ ID NO: 20828 - DNA, 355 bp, Glycine max
  unsure (1)..(355): unsure at all n locations
tctcttactaagtttctttctctctgactattgggtatggtcttgttcagcgtgtgttcaactaaaccttaacaccctttatatagagaaagtttacataacaagacaaaaccccttcagtcaagaacagtaacattaccgttcctttactctgtcacagggttgtcctttacagatacttttattacagatnagctcaatgtctaantttatgcaatagtaaagattcctgccccttttcttcttttttttaaaaaaaaaacttttttctttgggcaggatacatntgtcatcaactcttgcttgctttttgaatcgtaacatcttcttcatcttggatattttcagaacaaaa

SEQ ID NO: 20829 - DNA, 98 bp, Glycine max
ggacctctgagtcacctgcagcatgcaagcttctatattacgttctttaatggatttttatgcaataaattaattctatattgaatggtgtgtattaa

SEQ ID NO: 20830 - DNA, 391 bp, Glycine max
  unsure (1)..(391): unsure at all n locations
tgtagttntaactttagttagaaaaggcgtctatcaaacaaaattcctaacttacgtcatgactcaattntgatgatgataagagtaatatgtaatttcatacgtatttgacattntttagttatgttaaattataattttacaacattggtaatatatgactaattgactatgaatagtcgcactttttcctataagaggcctgcaatataattattatatttctttttcaatcagtacttagttatgcaattgcatgccacttctacagtccaattaattttgttagttatcagaataaaaataattttaaaagtcatataanaaaatagaaaaccacccatacaatccgaaagaaactgcatgtatattatggttatatgttagattc

SEQ ID NO: 20831 - DNA, 335 bp, Glycine max
  unsure (1)..(335): unsure at all n locations
acccagagncacctgctgcatgcaagctatgctgaaacatttacaatagaccttctcaacctcagtagcaaaatcaaccacagctgaagaatgatgacctctccagcaacagatacaaccctggatggaggaatcaccctaatctcatatggtctagccctcatcaaatacaacagcagcctgctccttccatacataatgctgctggcccaagcagactcgtcatttcttcacctatccaacaacagcaacagtccgcgaaattagcaaacttgttgaggctgctccacaaccttcccttgaagaacttgtgaagcaaatgactattcacaaca

SEQ ID NO: 20832 - DNA, 346 bp, Glycine max
tatttcagttgcgactctaatgtgtatgttcttatctttgaaaagctgcatgtttgtgaaaagcaattgattgaagcagtccataatattcaattcatatggctgaatttgtctatgaagcaaacaccattttgagtgattactgtagcttgtcacttgaggacaagtgaattgtatttctttgcttgaagacaaacaaaactggaaaatgggcggagtttgttagtcgtcttatacgacaaactttggtatagagaacattatccaaaacttgtgtagctccccaatatatggctattttgtagagattgtgtaacaaaatcttgtgttattagtaaagctatct

SEQ ID NO: 20833 - DNA, 165 bp, Glycine max
agcttgcctcaaagaggtccaggtacgacattgcacccgcaagaactagttccgctgcggagtatgatagtcaccgctttatcgagtgctgtacaccacctgctcttttaggccattaatggatggtcttctctcctggagcaacgcgtcctgctcatggactac

SEQ ID NO: 20834 - DNA, 201 bp, Glycine max
gcgtctcgatatactataagcctgaactggacatccgtgtgagaagttatgatcatttgaatttatgcagagcatacgttgttcacctgtgatcaactctatatattataagcctgaaccgtaccttagtgtgagaagatacgacgattagaatttatcagctacatacgcggtggaccttacagcgaccttatgtgggaa

SEQ ID NO: 20835 - DNA, 425 bp, Glycine max
agcttgctgcaccattgacagatttacttaaaaaagaagcattcaagtggacaccagaggcagagacaacatttgttcaattgcagaaagtcatgacttcagctccagtgttagctcttcctaatttccagctgcccttcattctggaaactaatgcttccaacactggtattggagcggtattacatcagaatggccatccaatagcattttttttccaagaaacttgcacctagagtgcaaaagaaatctgactaatttagagagatgttagcaattgttcaagctatagctaagttcagacactacttgctgggacacacaattattatcaaaactgatcaaaaaagcttgagatcattgatggaacaacccctacagacacctgaacaacagcagtggttacacaggtttttgggatatga

SEQ ID NO: 20836 - DNA, 328 bp, Glycine max
actaatataatctcagttgtttaacatcaaaatgatatgtaaatggtttagactcatcttccatgtgatcagagagatatgaaaggcatttaaaaacaagctctagatgcaagtgtgaattggcttctacaaagaaaggaaggatcttctggttaatctcaattcaactacaccctggattcttttttaatacaagctctttcatctttgatctcaccacactgtacttcatcccacttatgtgcagaagcatacatatttgacaagagaatatacgtcgatgaattacacgatccttacaaaatcgttcttgaatttcagttccaat

SEQ ID NO: 20837 - DNA, 63 bp, Glycine max
  unsure (1)..(63): unsure at all n locations
aagcttacatggagctcatcatgtggtatcaagagcatcttcgtctagatgatgntcttttgc

SEQ ID NO: 20838 - DNA, 441 bp, Glycine max
taaggatgttcatcctttttcccactgcttctctcatacttcgtcaaccacaacaacacccttcattttgggaccatcaccgtccgtgtccccgtccatgacattactaattcaactgatatcctctgttaagatgtcggagcagaaggctaaggggctttgttacaattgtgaggatcgatggagccccaatcatcattgtcagaagaaacaatgttagaaaataaaaaaaatattaaataacatgataatgtgactcatgtgaattaagggcctaaacttgatttaataaaataaagggacctattggcaaatatgggaagttaaaaaacttatgggaagttaataaacttttgataactaacttgatggaagtttgttaataaaaggcaaagggttctatctctgccataagagtcttttccctctaattacccatta

SEQ ID NO: 20839 - DNA, 261 bp, Glycine max
  unsure (1)..(261): unsure at all n locations
gcatgcaagctaataagcgcaggtctaggacacgaatgccaagtcattgcgatatgttaagatgatcctcctggtgggtcggatatggtacaaccatgccctcttggttatcgacttggaaattggcgagaggaggagcgcccagacacttactcaacaagcataatgtaaccctttgtggctttttaacttcacaattgggcctaggctttagagtnaccttctgttatggctttaagttcttttgttcctgaatctata

SEQ ID NO: 20840 - DNA, 430 bp, Glycine max
ctgcagaattggtcttcgccagtgaaaggatcaatgtgggtccgaaaagaggcaaatttgatcatcctactaggacgactgagaaaactggggcaaataaagagggtgaggatgagggagaaacccatgctgtgactgccattcctgtacggccaaatttcccaccaacccaacaatatctttactcagccaataacaaactttctccttacccaccacccagttatccacaaaggccatccctaaatctaccacaaagtctgtctaccgcacttccaatgacgaacaccacctttagcacaaaccaaaaacaccaaccaagaagtgaattttgcagcgagaaagcctgtagaattcaccccaattccagtgtcctatgctgacttgctcccatatctacttgataattcaatggtagccataaccctag

SEQ ID NO: 20841 - DNA, 243 bp, Glycine max
  unsure (1)..(243): unsure at all n locations
accgcggcatgcaacctactttctaagacagtgcctacatttctcgtnctcattagcttgtntctaagatgatgcttacgtatacactgtcttagaaagccagctttcgaggatggtgcttacgtaaacacctgtttagaaagcgagcttttcgtagctcttgtttttattataatatttcacttcataataaaatctatccacttttgtattgctaactagcgccttaagggaactagtatt

SEQ ID NO: 20842 - DNA, 446 bp, Glycine max
  unsure (1)..(446): unsure at all n locations
tgtatttaanaatgttttaaaaatacttttaattaatatttgtaattttattcctttattaatatatatgtgaggggtagagggtgtcacaagattagtactcaattacatgacacttatattgttggtttagtgataggaattggagagggaagggaaattgtggattgaattttcactaatcaaaactaataattaacaaaaactaacattagtcaattaaaaatacattacatttataaatataaaaattagtgtgttacattgattttaaggtctcacaatttgagccatgaaactgctgaaaaagatagaaacaagaggaattaagcatgtgtggtaaaagaatataggagcctcacatttaagaaaacataattaaatataagtttaattgaaaaattataattctatctatattacatgacactctatttacgtgtata

SEQ ID NO: 20843 - DNA, 352 bp, Glycine max
  unsure (1)..(352): unsure at all n locations
tatattactattacgtgtgggtaatccatgttctttattaaatggatgagttagatattttaatggatattacaggttcctaaggatccaccattgtccctcctgaggtaaattaataactaacacactgatactgttaggaaccaaanatagaaattaagaacagaaaaaatggaaaaaattgaatggaaagaacggaaagttagagatctcttctagggacagtcagaacaattattgaggttagctagtgataggggggaagggaaggaatattcattcaaagactgcgcttatttgcttactgttcctaactactatngagctatattttttgttaaaggattctcta

SEQ ID NO: 20844 - DNA, 275 bp, Glycine max
  unsure (1)..(275): unsure at all n locations
accngagagtcacctgctgcatgcaagctgtaacctcatcgtgctttacagtctttatatttgggagccaatccaatccttgtgttcggacatctatccacttatgatagccgtcgatgctcccattactgctgcccctaagctctttgtgctttcttcacgccgcattccatgccttgctaactccttggagtaccctcccgttgtggtcactaaaactccgtgcgatgaaaagcgtgattctttcgtctaatggcgctactctcatggggtag

SEQ ID NO: 20845 - DNA, 353 bp, Glycine max
tctcaaggaggtgagcttagttatgagaggggtgtgtgtagctaagctctagcttctcaaggaagttttctcaaagaagcttctcaaggaagttttctcaagaaagcttctcaaggaagctacctagtctataaatagaagcatgtgtaacacttgttgtaactttgatgaatgagagtcttgtgagacacaactcaaagttcaacttctctccctttttcttccttcaatttcgtgctcccccctctctctttctccccctctttcttttcctccattgaagcatcctctccaaacttcttatccaaggctcatcatggtggtgaagctccttcttccatggcttattccct

SEQ ID NO: 20846 - DNA, 106 bp, Glycine max
agctcgtgcgtgatagggttggctcctttttactttgctttcaaggatgaacgtggaatcacagtcgtcgatttcaatgttggaaagtctgatcgcagggggatta

SEQ ID NO: 20847 - DNA, 191 bp, Glycine max
gatgaggactgtgacctttgtaaaactatgttatgtaacacgtacatttgaggttgaaggtctgaaacacagggtggttgaaagatcgaaacattgtgtattcttgcgacagtgaccaatgtggtgttttgtgagatatttttcatgctttgtggttgtttgcctgttatgaccagtgcttgattgactaa

SEQ ID NO: 20848 - DNA, 119 bp, Glycine max
  unsure (1)..(119): unsure at all n locations
atgcaagcgtggacgaatccgatattaagtttttgtttgtntccactaaggaccaaacactgggctacttttccttttcctttctctctctctgtctcactatatatgcaacgaacctt

SEQ ID NO: 20849 - DNA, 362 bp, Glycine max
  unsure (1)..(362): unsure at all n locations
ntgagatcagatttctattgtcaccatttccgcagctntctttaacaatggcatcaagagatggctccaatagccaagagttctcaaaatgaaattgttattgcctttgatttttggaatcgagaatgagatgggtaagagaatggtcagactttaacgccattgtgtttctaaatttaaaattaggaaacatatctagccattctagatttgccatggccctatcgaattcttcttcaatggcatttgtcttgcctttgcttttgcgccaagtgtatttgtagccctccatagttaggtcatggaggccactgtccaagactacttcatgnaagccttggataagccaattgggatgatca

SEQ ID NO: 20850 - DNA, 280 bp, Glycine max
gaccggcggcatgcaagcttctatataagctgtaccatcttatctttaaacacaagttgagttttattcagaagaatagagtttatctctcttatcttaccgagagtgattctcctaaatccttgagtgatacaagaacaccctggctgtatcaaaggacatccacaaccttggtgtgttgccctcactggaaagagtgagtctatcctttcttacatcttaacccgtgatctttcaaaccataattctagaaaatccacctttgtccagaatattctag

SEQ ID NO: 20851 - DNA, 442 bp, Glycine max
  unsure (1)..(442): unsure at all n locations
ctaagcttctatatagctgaaccattntatcaataaacacaagttgagttttattcagaaaattagagtttatctcttttatcttagtgagagtgattctcctaaattcttgagtgattcaagaacaccctggctgtattaaaggtcattcacaacctttgtgtgttgccctcgctggaaagagtgattctttccttcctttcatcttcacccttgttctttcaaaccacaattccagaaaattcacctctgcccagaattatctcgtggccataactcccattttacgcacctcaaataagtgattcttgagcctaaattgactttcaaaacgagacctttcacctcgtttcggaatcacctgatttggagccctgtagcttcagttattgccatttctatatttctgtccagccaccacttaacctacattntaccatcc

SEQ ID NO: 20852 - DNA, 390 bp, Glycine max
cccggacctctgagtcacctgcggcatgcaagcttgcctaattaacctgaaattgagagataatgattattaaacacacaaaacaaaattactaagtatttattacctatctttaactaaaagaacttattacactacaaaataaccataaattggaggagtttgatacaatatacactagttttatacacaaaagttaatcatattcaccgactaacaactccctcatagttacagttttgcttgtcctcaagcaaataaagaacatagcactagtcccctagtgacaaaaatattgcagtgattatgtacaaaggcgtatgcaccaaaagtcactgattgcatgatacaaaaatgaagcacaatgctctcattagttgtcttcacaaa

SEQ ID NO: 20853 - DNA, 379 bp, Glycine max
  unsure (1)..(379): unsure at all n locations
gcttattttcaaataagtgctgtttttaaaatataataagtaattttatgattntctgatgtgtttatctaaactgtttttacttaaaataaacagttttctgtttttttcaacttattaaaaaaatggttattttaaagttggtttttttaactttaaacaaagtcatccatacttgcaaaagataaaactgctgcgggaccaatttgagttgatgacatgggggtgctgtaatctatcatgtctcggaagtttaaaaacagaaatgctatggagatattgcccatactgaagataaagtgtttgctttatagctagtgcaggtttgaaatgcaaattatttgttgttgtcttgtgtcataagtactatttatttaca

SEQ ID NO: 20854 - DNA, 125 bp, Glycine max
  unsure (1)..(125): unsure at all n locations
agctnttatctatctattattttacatggttaacaaaaaaatatgatttgtgatcgtgcttcaatcgttgatcgcatccctggaaatcccaaatcctaaatcacgcgatccgggtttcaattcta

SEQ ID NO: 20855 - DNA, 396 bp, Glycine max
tgtagatgcttcgaggctctccaagggcaaaccttgggtttgatgagcctttggagaagcaagactcactaagggtggatcttgggtttgacgagcctctggagaagtgagactcaactaggacagaccttgggtttgacgagcctttggagaagtgagattcaccaaggatagactttgggtttcaaaaacctataagtctcaccaaggacaaaccttgggtttgatgagcctttggaaacacaagactcaccaaggacggaccttgtgtttgatgagcctttggagaagcgagactcaccaagggcaaaccttgtgtttaacgagcctttggagaggcaagactcactaagagcaggcattgtgtgatgagtcttacactacggaatgctcgac

SEQ ID NO: 20856 - DNA, 394 bp, Glycine max
cacctgatgagtgctcgttgagtgcggttgatgcatgtcttgctgcgaaactcctgctcgtgattcagagtggttgcaatcctataatgaaacaacagtctgctgagctatagaagctgtgtagtttaaattattcagacactatctttatttccaagtgcaagcttaccataaccattcaatgatcatggactacatccatctggtggcgccaacaatttgaaatttgtggtgcaagagtagctaagaagatcagttgcatctcaagaccaccgaactctaataaacgccaagacaatgatcatggggttgaggtgcaagtctctccttgatatataccttatattttgattcccacaatcgatttgaatgaagaataattttaatgtggaca

SEQ ID NO: 20857 - DNA, 358 bp, Glycine max
  unsure (1)..(358): unsure at all n locations
tgcattggaattgcaaagcccactccatcattttgttttttcctgacatctcaaacaaacaaatcatacgtaacaagacaattatagttgctgtttgaatacctcacccactcaagtgtatcacacaattatggcttttctctaatgaaacactcttgcctnttaccactctaattccccttgagttcttaggcaantcaagagattatggccacaacaaagaacaattcaccaatatgtgtaaggttaggctagacaaggaaaagggtaaccaagaaaaaggctaacaatgttcttaggcacacatgaaggagataaaatgcagaatttggaattcaaagtacaatccttcatgcaa

SEQ ID NO: 20858 - DNA, 409 bp, Glycine max
  unsure (1)..(409): unsure at all n locations
nttcgcaaagcttatggtaataattgggacctagccatgtttgtagtctccacagaggccattgcctctctcacccagtattatgatcagccattgaggtgcttcacctttggggatttccagctatcacccatggcagaagaatttgaagagatcctatgatgtcctctagggggaaggaaaccatacctcttctcagggttctatccctcattagctagaatttccaagacagtccaaatctcaacacaggaattagaccacaggaagccagtcgaaaatggggtggttggaataccaagaaaatatttggaggcaaaagcaagaatcttggcaagtaaaggcgagtgggccccgttcatagatattcttgcactgttgatcttcggaggagtcctctttccgaatg

SEQ ID NO: 20859 - DNA, 406 bp, Glycine max
tggagaggatgcttcaatggaggaaaagaaagagggagagaaagagagaggggggagcacgaaattgaaggaagaaaaagggagagaagttgaactttgagttgtgtctcacaagactctcattcatcaaagttataacaagtgttacacatgcttctatttatagactaggtagcttccttgagaagctttcttgagaaaacttccttgagaagcttctttgagaaaaattccttgagaagctagagcttagctacatacacccctctcataactaaactcacctccttgagaagcttccttaagaagattccctactacaaagactactcaaaatgcctcgaaatacaaggctaaaatcctatactactagaatggccaaatacaaggcccaaacgaaggaaaa

SEQ ID NO: 20860 - DNA, 405 bp, Glycine max
taaggcacaatacatacaatgttcatttatgggttattgtccttcaataaaggtttttttgtgttacaattccactaatcgttgttttcgcactttgcaaaatgtggttttcttttatcatcagttttttcatgtgtattttccttacttgtaatgattttgttaatctagccaattatattgttttttcttgtactattgagcattacaaactaggatataaatattttagacgccaaccttctatacctattatcgacatcgatccatctctagaacctatgtcgatgtcactttggaggtcaattcggttgcctcgttcactagataggtattcaccctctaggtatgatccctcacctcattctcttactgctactctatttggaatatttgttcctacat

SEQ ID NO: 20861 - DNA, 443 bp, Glycine max
  unsure (1)..(443): unsure at all n locations
tgcattctggacctatgaatactcagctatcctaccaacttatataaggagctcctcatacagtgaaactggcacaagtgaccagacatctgagacagtagaggtgattttagtattcgtgtttcatagttgtatactataatcgcacatatatctataagattgatgatgggtagcacttcatcaagtgaaacctctattcttaacacaggaggaagttcacagtacaagtaaaccatttggtattcccaatgagaataagttgaaaatatcagcatccaatgtagagagctcatctgaagaactccggaaatcttccatgggtgcaagagctacagattctgcaagagttatgaagttcactaaggtgctttcagagacaatggttaaattaggtattntaacttctgtatttcaattttggtttctatatcacttattgg

SEQ ID NO: 20862 - DNA, 408 bp, Glycine max
tttgaaaagaatatatattctaatttcaattttttgattaacaattacacccaacataatattttttttcttctgatgaagaatcaagacatccattttcatttcttccataacactttttttggaaataacctgatatccgttgaaaaaaactagtctttaaaatcaacaacaaaaatattgactactgtgctcttatatttagcatatcaatagttcaattttcaagcactggtaattaagcattacgtagagtttgaaaagggacactttatcattaaaaagcctaaaattaactttcgcacgaaagtttacaataaggcttttatttatgtttgtttctcatgcgcattttatactaataaatattagtttctagaaattaaaaggaattcacatgtttaataa

SEQ ID NO: 20863 - DNA, 401 bp, Glycine max
tcttatccaaggctcatcttggtggtgaagctccttcttccatggcttattccttaatggatggcgcctcctctcacctcctttcctttgtcttccgctgcatctccatggtggaaaatcaccattaaaggaccccattgaagctcaaagatccagcctccatagaagccccacaagcaagcttccatcaagcgggttgcaccactcaaaacattcatcataccacctattttagggacttggttcctaataatacctattttgggcaccaacaaagcacaaggatttaagctcttgcgaaccaaaccctcatccaacaacttctttacttgaggaataaactcaagcccaagaggtgtggcaatgctagcaagtgcctctttacaaaagagaaaatgtgg

SEQ ID NO: 20864 - DNA, 391 bp, Glycine max
tgtatagttccccaatttatggtcattttggagtaaatttgataaataaatcttgttttatggttaacgctgtctctagaacatttccattgaatttaatgatgaaatctgtgcattttcaggtaaaaaatatgctaagttttgaattgcaaaatgtagcagtcgggctaagctcaacaactgggctaagcgcatatccaccgctaagtgcagcttcagcgcgcttagcgcaaaggagaatctggtagagcatcagcatcaaagctgcacactaagcgcgagatcagtgtgctaagccgtgcagtaagctcagcaacttgtgcattgaagcctaggttttgccatttgagagagattattgagtagagagtgagtgtgagatgctgagaag

SEQ ID NO: 20865 - DNA, 400 bp, Glycine max
  unsure (1)..(400): unsure at all n locations
tcctcggggccatttcctgcgagaacacacatttagaagttagttttacaagataattcttatcttaacacaaaaaatgtcatgctaatccctccagtttagaacgaactcatgcgcacgtttaaagtaacacatttatgcacatgcgcatgtgtagaatatcctactatttatatcaacatagaggccatccaacacattctaattgtcatacatatatatgcatttgaaaggaacacacattctcatgctcaaggcattgcgtcaaaatttacacttaactatgtcctaaacatttgctatcacaaactacctacacacactcgaaatatatataccatacaaactttcattgtttcactcacacttatgcatattggcaagctatntacattatgca

SEQ ID NO: 20866 - DNA, 406 bp, Glycine max
  unsure (1)..(406): unsure at all n locations
tcaagaaagtcctctccaagagtgactaatgttgctgttcagaaggctgtgagtgcttattttctgtagttttctgttcaactgcttaattcagttgagcaagatttgttaggaaatttattgtcttgttcactgttattgatgacatcttttattctcttctcaggctgctgcattgaagggttctgatcatcgtcgtgccacaaatgtcagtgctagattggatgctcaacaaaagaagttcaaccttccaatcctcccaaccaccacaattggatccttccctcagactgttgaactgaggagggtgcgtcgtgaatacaaggctaacaagtaagatatgccttgagttgataggttggcttgttttcttgaccattttggctnttactgacccctttgattt

SEQ ID NO: 20867 - DNA, 343 bp, Glycine max
ttccttctggttgctgaagactaagatcccaattgcctctaatatagatctagttgacccgaccccggacccaaccctcacacccgactcgaacctgacccatttggcccaaattagtttgaactccttatcaagtgatttagcatcggaaactttgcacctcgccgaccttctctccagccatcgtgtggtcctccttgttgatggagggagtacccacaacttcctccagcctcaactagctatctttctgagcttaccatgtcagaccgctccaacaccattacatgtgatgttctttcatcacgggcacttcgtggacttacagggcgagaatgccacc

SEQ ID NO: 20868 - DNA, 368 bp, Glycine max
ttgagccaaaatcctgactcaccataaaccttgacccatggtgagaatgtcaatccttaccctcggaagcgaaaagaatagaagggaaatttccaatcaaagaaaaggaaagaaggaagatttccaatcaaagagaaagcaaaaaaagaaaagaaggaaaattccccaatcaaagagtgggagaaagcaaaaagaaaagaaagaaaattcccaatcaaagaatgggagaaagtaaaaaaggaagaagaagaaggaaagaaagctcctgatcagggatcgaaggaaaacagaagatatgtgcagaaagggtcttggaccggacaatatctgaacaatatagaattgtcactaaatgaacaaaaagaatg

SEQ ID NO: 20869 - DNA, 408 bp, Glycine max
  unsure (1)..(408): unsure at all n locations
tattgactnttacaagattaccttaaagtcatacacactctgttttattattggttgacgtcaacaacgtaatacaattttacattattaatgcatcaccattaaatttgatattaaattaatctaatttatttttttttctctaattctcttaatttttaaactaaatcctataaatatttaacttcaacaaaatatcatatttaatctctctttagatatttgtttttattattcatgatctattcagcccttttattttaaaattgtctaataatttttttattaatatttattttttaacatttcttattatcctatatgaattttggaaggttgtgagaaaaaaaagggatagatgaaaggtgggttaggcgtgtgtatatagatgctagaaattgtaatgaa

SEQ ID NO: 20870 - DNA, 421 bp, Glycine max
ggacacttaaaactacgctataaaacctaggtatctttgcaaaagctactcctctttctgcctctagagctcttttcccgaaatatggtgtgctatggtgttctgtgccctgagcccttgttaaagttataccctaattttgcacaaaacaagctttaaatagactctaaattcccaactttgcgcttagcgccaccctcgctcttagcgcgagtaagtggatttgagcttagcgccagtcgtacgctgagcctagatgaagacaattgttgcacttaacgcactgatctcgcgcttaacacgcggccttgatattgatgccttggtagattcttctatcacgctaagcacgctgatactgcgcttagcggtggatgcacgcttagcccactgatgagctaagttcaactgttacttttag

SEQ ID NO: 20871 - DNA, 403 bp, Glycine max
ttaagtgaggaagtgtggaagggtgagacttcctacttttattcgttgaccacagaatggtacctagagatatgtcgcgggggtcaggagaccttggggatgtcaggtggggtgctattgcccaaaaccaagcttgaccaatcccgacccaacccgggcatagtcagtcagtgagaacctgtgacgtacctaaacaggcgagctcctggcagtcaaccgataaaagaacaaacaccacaaagcaaggaggcttgtgtggtggctggccagctatggatcttgagtaatatttggagtatggcctctggtaatcgattaccaagggtgggtaatccattacaaggcttaaaaatgaacgcaggaagttaagatggcctctggtaatcgattaccaagtatgtgt

SEQ ID NO: 20872 - DNA, 416 bp, Glycine max
  unsure (1)..(416): unsure at all n locations
ggctctgaganttgcaagtaatctatctgagtatctctaagaacatgtacctttaattttgttcgagaacttttttccctagggaattaatttctcttaatttaccaggaaaaatacaagtgacacagacagttattactacaataaccacttcatcgttgttcatgatcttctaagagagcttgcaatttatcaaagcgcccaagaacaacttgaagggagcaaaagactgattattgacacaaaagaaaataaaaatgaatgggggcttggcgagaagcaacaaggcatgataagccgaatattgtcaaattgttttagatattgttctaaacagaaacccccacagatccatgctcgcacattgtccatatccattggttagttatccgtatacctttctctaaagtacagaa

SEQ ID NO: 20873 - DNA, 401 bp, Glycine max
taattgcttttatgtataggattggcaagcatttgttattgacctaaaacgtgcttttgaggtgtttgatgaaatgcaagaggaagaaaatcacgtacatatttaataactaagtcattttctctctatccaaaaggcttatcgtaataacaaatttgatatagagaagttaatgcaatgactttgtgaccaagaaatctcttgggtagattatttgacagatgtctcacatattaggacaaaatgcaaattaaaatggatataattagtatatactaatagtgtaaagattttttacattatcaactaattacaaaatgtcacatttttaaaaagtttgagtcttattataattactttaaaagttttataatgacaatgtataacaattaaacttaatt

SEQ ID NO: 20874 - DNA, 403 bp, Glycine max
tccctttttttttattttgttttgtagaggaaaacactatgatcatgtatgagcaaacatgtagaacaaaaagtatgttgaacgcatatgcatgatgatgcaatgactcatgcaaaatgtgaggctggaatgtgataacggacaaatgcaggaacgatatgttcattatgatgctgaagagatgtttatgcgatgcatgatatgaatgcatttacggacacgagagcccaaaaaatcatctctccttacttgcgcatttgagggtgcagtgccccatgtgtgcagttaagaagacgatatggatcttccgacttcccacgacaaaagacgagacccacatacaacgcatttgtgacggcatgatgcagatgcgcaaaagtgcaataaggggaattacacagca

SEQ ID NO: 20875 - DNA, 398 bp, Glycine max
tctggtgggacatcttgacttgctttccaatctgacattcaccacagattctgccttcttctattttcagattgggaatgcctctaacagcacctttgtcaatgattttcttcatgcctcttaagtgcagatgtccaaatctttgatgccatattttgacttcatcttctttggaggatagacatgtggaggagtaactggtttcttgaggtgtccataggtaacagttgtcctttgatctgctgcccttcattagaacttcactcttctcatttgtcaccaagcattctgactttgtgaagtttacattgaatccttcatcacacaactgactgatgctgatcaagtttgcagtcagtcccttcaccagcagtactttgttcagactaggaagtcca

SEQ ID NO: 20876 - DNA, 441 bp, Glycine max
  unsure (1)..(441): unsure at all n locations
ctgcttatacgtgcattacggacctatgaatcatcagcttgcagactaagtgctcaccaacactagataagtatccttcaggttgtttcatgtaaacctcttcttctagatcaccattcaggaacgccgttttcacatccatttgatgcagctcaagatcaaaatgagctactaatgccaaaattactcgaagagagtctttcttagatacaggggaaaaggtctctctgtaatcgattccttctctttgagtgaatcctttagcaacaagtcttgccttatgtctctcaatgttgccttctgagtctttctttgttttgaagacccatctacatccgatggcttttacaccaacaggcaactcaactagatcccaaacttggttagatgccatagaatccatctcatccctcatagcattataccacanatttgattcct

SEQ ID NO: 20877 - DNA, 408 bp, Glycine max
  unsure (1)..(408): unsure at all n locations
ntggtaatccaggatgtccaaggtaatcatgtttcactaacaaagagaaaagatggagcatacttgtggtggcaaagagatagtataggccatgcaactcatatctaacgccaatcatctgttccaatgtttgatcctgcagagtagcaaaagttttagtaaaggtaatcaacaagtcatatgactaagtgagacgataaacaaatagtagattaaaaggacaattaagaacatataggtcaaactcaatggtaagagatggaagggaatgtgtggtgtgaatgccctttggttgtgtttgagtgccattgatagaagtaatggaaggtaaataagtggatgtggaaatagaagagaaaatagaattgttgccaaatatatggtcaaattgatgtgccatcattttct

SEQ ID NO: 20878 - DNA, 288 bp, Glycine max
tccagattgaaaactaactggttgaatctcaatgaatgatgaagaatgaacgaagaaccgcgaagaacggcgaagacactttcacggaatctatcacagaaacgtctcgaaagtgttacgaaaacgtctcggcttggattttttccttccttctttttctcctcactaattttaagtgatttatgagctatcaaggtgctgaacccctgaccccccccccttcacgctattttataaggaaaagagggaggtggttgttgcccagctcacccaagcgagctgggttgc

SEQ ID NO: 20879 - DNA, 275 bp, Glycine max
gaaaccggtaaggccgattgagccgacttccagctatatatcgttaactacattcatttgtatgttacttttctacatattgttatgtcaatatttaatataatctacatctgcatgggaaagcaaggatactccattgggcacataattcagtgtgcataatgatattgactaatactactctagtaagtttagacctctttctacaaagttaagcccagacatatgataataaggccatgtgttggttcataaatatacactgccaaacaaaa

SEQ ID NO: 20880 - DNA, 398 bp, Glycine max
  unsure (1)..(398): unsure at all n locations
tctcccncaattntctataaatagggggagaagtgatgtgaataagggttcagccccttaggcacttctctctctttcgaatttgcttggaaaaatcgtttccgtgaagaaaatccaagccgaggcgcttccgaaacatttccgtaacatttccgtgaggaatttcgcgaaggtttcgacagttcttcgacgttcttcattcgttcttcatcattcttcgatcttcaacgggttagtacctcgaaccaagcttttcgattcattctatgtacccgtggtggtccacattgtgtttcgtgtatttttattctcgtttcatttactttttatacccttttttgacgtgcttaagccaatttatttaagtcatttctcgcttaaccttaaaataaaataaa

SEQ ID NO: 20881 - DNA, 310 bp, Glycine max
tcaagaaaaagatggcctcagcaaattccttatttccttaatggaattctatcaatagacctccaatctttaatggagagggttaccactactggaaaacccgaatgcaaatttttatcgaggcaatagatctaaatatctgggaagccattgaaatagggccttatatacccaccacagtagaaagagtttcaatagatggtagttcatcaagtgaaagcataaccatagaaaaacctagagatagatggtctgaagaggatagaaaacgagtacaatacaacctaaaagccaaaaacataataacatc

SEQ ID NO: 20882 - DNA, 409 bp, Glycine max
tcggaagatagtgatgaggtacaagccctaaaggcgattcttgaaagagcccgggtagtcaaagagaagttcaagtccatagccatcaaagtctgaaaagagtatgatgaactaagggatgtcaatatggccacagctgaagccttggaacgagaaaccaagaaggcccgaaaggaagaacacgaccaaagcaaagttttgaggggctttatagggcagcaatagtgagctcaagctccgaagaggtgaaaggaatcatcacgggtcaaaggcatgatcttgaaggacgagctaaaggcttgccttaagtcgaaaagaaatttgtcccaaaagttaagcgagactgaagggaatatgtgggccatcatcgatgagtgcaaagagaagctaaatctagcggcgactcacg

SEQ ID NO: 20883 - DNA, 408 bp, Glycine max
  unsure (1)..(408): unsure at all n locations
ntctcccaagtcctaaatgacatttcaagctagtattaactcactttaacctccatttaccacagaattcagacttaaccttccaactctcaaagcctcactctttttccactcataacaccacattctcactttccaaccctaggttaactctacatttcatctctaacagttttccatgggcaatttcagcatacaaacatcacaaacatcatcacaaaaccctaaaacagaatgggtatgtctaactcatccaaacatggcaatttcaacaagctttcaacaagtttcttcacaaataactatcatgaagcagaaaactagcaagactacccatcatatctcccaaaaccccatacccacgaaatttaagagagaaagaagtccacccaaacctgaaatttggaa

SEQ ID NO: 20884 - DNA, 418 bp, Glycine max
  unsure (1)..(418): unsure at all n locations
gcttcacaacatccaagcaaaacaacattcaaacagcacatgctatcacagccaagcaaaaatagagcaaaggcagaaaactctgctcaaacaccaaccaaaatcacagcttttctcacttaaagacccagtaacaattccttcgatccaattcgttaaccgttggatcgactccaaaattttactggaagtctatagtgcataagcctacattgtgaccgttgggatctactagcaaacatccagaactcattctgcactactctttccacagccaaccacacacaagcatttttctgcacaagccaaaatcctgctgcacctattttgacagcaaaattctgcataagtgcatatttcgaaaatcacacttccnctcatccaatcttgctcaaatcaaatcctacaagtcccaaat

SEQ ID NO: 20885 - DNA, 405 bp, Glycine max
  unsure (1)..(405): unsure at all n locations
ntgttcaataatcaggcattntgttgacagattataattattgtgaattgaagtaaaagtatgatatatcctagttacaaaaatagtaaacgcaagcaattaaaagtgacaacaatggtttaaaagcgttggatctttcgaataaacgagtttatgcatataaagatatttctctaactaagagtattcttgttttctatgctgaagactaaagtactaaaccttgatccctcgtaaatttagactaattcaaactaaacttcgttctcagatccctcttgttgaactaggtttaattcaaatagcattatactcacagcataacaaaaactaaaaccctgcactccatccctaataatgcagttatctagccctgctctatcatgttctaaggaaacaatacac

SEQ ID NO: 20886 - DNA, 355 bp, Glycine max
accatcacacggcttcaaaccattacctcttttacttttacttcaaagttgaccgacacaaaaagccatatggatcaaattcaaaatctgtcagacattaatcatcaaaagaaacatcccttgatgcttaatataattatcatgatgcttaatatgaaatgaaagacaaacatatattgatggacttattactcagacagtgctgcgacaaatactactaattgaataaaaaacagactgaaacagaaacgaatttatattcatgtcgtatccaatggcaggaactgttacgttaatgtctaacgaaatatacactcagatcatataaagatatcatatgaattcatggatattg

SEQ ID NO: 20887 - DNA, 401 bp, Glycine max
tataactttgtagcaatggaatcaagtttagcaaacgagtaatcaaagcagtaggctgctacatacttaaggccagagaagacaaagaatattagtctccaaattttgtagaaatattttttaagctttatgcacctcttaaaaagtaagccacatgaataaattgtaacctaaaaacttgggctacagctccagcaacatatcagaaaattatatagaaaaatgtattaacgatttttctcaaattaaaatcgttaaaattaagaaacaaaatattatccagtttgaacttatttttatataaaacaagtgtaagaacccatgacaatttggcgatgcaaacaaaacaaggataggcaatagttccctagccctctatataaacgaagttggtcaagaat

SEQ ID NO: 20888 - DNA, 404 bp, Glycine max
tggagaggatgcttcaatggaggaaaagaaagagggatagaaagagagaggggggagcatgaaattgaaggaagaaaaaaaaggagagaagttgaactttgagttgtgtctcacaagaatctcattcatcaaagttacaacaagtgttacgcatgcttctatttatagactaggtagcttccttgagaagctttctaaagaaaacttccttgagaagcttctttgagaaaacttccttgagaagctagagcttagctacacacacccatctaaaaactaagctcacctccttgagaagcttccttgagaagctagagcttaactacacacacccatctaaaaactaagctcacctccttgacaaaattcatgaaaatacaaaaaaagtccctactacaaagact

SEQ ID NO: 20889 - DNA, 412 bp, Glycine max
  unsure (1)..(412): unsure at all n locations
ntagccttaggttgtccaccatgttgctccctctatatctctaacaagaagaacttaattagttgatcaaaaatgatgtttggacacttgttctgaagccaaaaaataagcgcatcattagaactagaacaagatgggtcttcagaaacaagttggatgaataaggaaaagtagtacacaacaaagcaaggctaatagctcaaggctataataagcaagaaggcatagatttcgttgaaactttttctcctatagttaggcttgaagttataagaatcatgcttgcctttgttgctcacaaaaacattaagctttttcaaatgaatgttaaaagttcctttttaaacagtttcattgaagaggaagtttatgtcaatcaacctcttggtttgaggatcaaactttctcatat

SEQ ID NO: 20890 - DNA, 354 bp, Glycine max
  unsure (1)..(354): unsure at all n locations
ntataagcgcgggttcgggagacaaaggtcaagcgttcgcgatatgcgaagatgatattccgagtactttggatttagtacgaccatgccctcctgatttccagctgggaaattggcgagtggaggaacgccccggcatttacgcaacaagcataatgtaaacctttacggttttaaaagctctatagttgggcctaggctttatggttttcattttgttaaggctttgtgtcttttgtttttgaatttataatacaaggatctttcttcatctgttcctggtctctacccattctcaatcatttgcatgtttacttctttttctaaaacggcagattcgatgacgagtccccc

SEQ ID NO: 20891 - DNA, 393 bp, Glycine max
  unsure (1)..(393): unsure at all n locations
ttaaaatttgaatttgaaattctgataccaatgacagatgtcgtaccggatatcaaagacacaccagagattactctctgaacaatagagatcaactctacacattcaggtccaacacttgatgttagggtaacatcaaggtggctcacaaaacactcaagtcccaaaactcacaaaataactcttcaatctcggacttggtagaaaactcgtgcagccttcattgtttatatagcagtgtgcgtatctgggctgcaacaacttgcgctggataagatctatcattctcctgaaaatctgcacttaaagatctaaaagataaagtttgatcttttagttnttatctttaatctttaatccctgaacgaaactattcaagttgtaattcgaact

SEQ ID NO: 20892 - DNA, 394 bp, Glycine max
  unsure (1)..(394): unsure at all n locations
nttacaatgcaacgaggagagagagagagagagagagttcgttagaatagaaaatagtactaaataggtgagagtgagagaccgagagggaaaacggagagagatgaaatgacgagataggacacggaggttgtagtgggtggtcacgaaaagaacgatttaatggaaacagtaacgcgtttttcggaagggtatttgcgtcaatttagttgtgaaatcatcgtattcttcttgagtgtagtaattagtagaggcttgcatttgcatcctatgtggaaaaagtttttcttctggcctttatatttatcctctgattttccttttcgactaatgctagattctttatcccgcttagaaacttttctaaatggaaaaaagtaggtatctcttgctg

SEQ ID NO: 20893 - DNA, 402 bp, Glycine max
  unsure (1)..(402): unsure at all n locations
ntacagcagattttagtaatgacccactaacctagaattaaaataacttaatgccattaacctagggaattaaaaaaaaattaatggctgagtgtaactgaaattgtggcaaccaaaagtcacccccaacagccaacaagtcagccaccatttggtctcccaaaaggctgatgcctaggttgccaattgggcccttattacaacttgaactaaacctaactaaagcccttttagttgattagcccaaaacatatttttggtcagccaactttacaaggattgggccattatttagacaaactaaacactctaaaattgaaacaaagtggtgtcatttagtcctcctccatttgggccatgatacaactcacaaccttggacttttctccttgaaacttgggc

SEQ ID NO: 20894 - DNA, 245 bp, Glycine max
tgggaagatgtggcctgtcatatttgtcgaaagagtactgtgccactggtcaaactaacttatctaatgtttgccttcacaggacatggccgcgaagaagcttgacctttagaagtccacgagagacaacgctgcccaatgaactacgtccgctcctgagtatgaccgtcaccgctcttcgagtgctgtacaccaacagctcttaaatgccatcaagggatcgtcgtttattctggagcgactcg

SEQ ID NO: 20895 - DNA, 324 bp, Glycine max
  unsure (1)..(324): unsure at all n locations
tgtttaatgtggtttgctccctcgctcctacattcacttccttaatctcagttttttaaacgtagttcgaaccctcattcctacatccacgatcttctcacaacaatcttttaggacaagctagacaaacttataagtcttcccttaacatgaccccccctctctcactatggtggtgacccccttttcaagctaagtaattattttcatcttaagaacctttacatatagacctagcattataattntaaaataggaaacaaatatctgatttataaaatatatctttaattttaaagagcatcctaaaaataagacaatatc

SEQ ID NO: 20896 - DNA, 330 bp, Glycine max
gacctataaaactaagctttaataaattcgttgaacgtgcgcggatgacgcgcatagttgccttgtattttgtcggctccctcgtcctcgtatcgttggccggttgcgggcgcggtttttttcagactgcggagcgcgaaccgtggcgggccgaggctgaagctgcatgtctgaaatccggcgaagtcagggagagtgccgatctcgttcgcatccgtccgatcaatggccccggcatttgcggcgcggaatttcccctgaaggtctcggcgctcggtgaaaacccggcgtacggctttgccgacgaggatctcaggccccccgcgtcaa

SEQ ID NO: 20897 - DNA, 400 bp, Glycine max
tgctctaaatttacattgatgtttgtatttgtgggatgaggttatatgccatttttgttttaagagtaatgtcccactggtaaaactaactttccaaatgtttgccttcgcaggaatggccccgaggaagcttgcctcaaagaggtccaggaaggacaaggcggccgaaggaactagttccgctccggagtacgacagtcaccgctttaggagcgctgtacaccagcagcgcttcgaagccatcaagggatggtcgtttctccgggagcgacgcgtccagctcagggacgacgagtatactgattttcaggaggaaatagggcgccggcggtgggcaccactggttactcctatggccaagtttgatccagaaatagtccttgaattttatgccaatgct

SEQ ID NO: 20898 - DNA, 403 bp, Glycine max
tcaattctgaatttcgagtgtctcgatatactatgggtcacaatcggacgtctgagtaagaagttattgtcgtttgaatttgcatagagcttttgttttcaattttgagcgtctcgatatattacgagaggtaatcggacctccgagtaaaaagttgttgttgttagaatttgctcaaaacttcttttctgactttcgagcgtctcaatatactacgggacacaatcgcaaatcagagtaaaaagttattgtcatttgattttgctcaaagcttttgttctgaatttcgtgcgtctagatatactacgggacacaatcggacatgcgagtaaaaagttattgtcgttagatattgctcagagcttcaattttgaatttcgagcgtctcgatatattgcgggat

SEQ ID NO: 20899 - DNA, 384 bp, Glycine max
tgccacccagttgcttcctccttaagcaacccaactttcaaaatgtgggcctagactcgaaatcctatttacacccctatcttgataagttcaccccccttttttcgtaatttatgaaaaagttacggaagcctataggacttgattttcttcttttttctcttccttctcactcatattaagtgaaatatgcttatttagggttatgggaattttacagaagcattacgggtgtcccggaagcccattttttaacaaaacaggggaggtggttgtcacctagctcgcccaggcgagcacagcttgcctaggcgagctaggttgcttccactttaagcaagaaaatgcccagaaacctctagaaggacccatatttgaaaatac

SEQ ID NO: 20900 - DNA, 292 bp, Glycine max
gatgaggaagcgttgaatggtgaaacttcctgcttttattgttcaccacagagtggtacctgaagatatgtcgcgggggtcaagagacctcgcggacgtcaagaggggtgctattgcccaaaaccaaacttgaccaatcccgacccaacccaggcatagtctgtcagagagaacctgtgatgtacctaaacaggcgagctcctggcactctacacattaaacgaacaaagaccacaaagcaacgacgcttgtggtggctggcccactgtgaatatacgtgatatgtggatta

SEQ ID NO: 20901 - DNA, 377 bp, Glycine max
tctcccccaattttctataaatagggggagaagtgatgtgaataatggttcagccccttaggcacttctctctctttcgaatttgcttggaaaaatcgtttccgtgaagaaaatccaagccgaggcgcttccgaaacatttccgtaacatttccgtgaggaatttcgcgaaggtttcgacagttcttcgacgttcttcattcgttcttcatcattcttcgatcttcaacgggttagtacctcgaaccaagcttttcgattcattctatgtacccgtggtggtccacattgtgtttcgtgtatttttattctcgtttcatttactttttatacccttttttgacgtgcttaaaccattttatttaagtcatttctcgc

SEQ ID NO: 20902 - DNA, 406 bp, Glycine max
tctaggaccacgacacggcagattggggggtaccttattttattacaggtaaattttgtgttcgtaatatgttacattggattatgatgtaaacatgtttttatgttatggtaacctttttttttttttttgtagtgctggatctatgagcacttttcgagtattcatcagtgcgtcaccgatgatgcatacgaggaggcgtcccctcgtgcctcccggtggctgacgatgaaggcttatatgaagggaattacaggagcgccgcaccgggcatgttctgatgctttgacagtcacagacgtgtgctggttgccttacagtgaccatcgaggggttagggggtttgagctgatttcatcgctccagggtcagctgagatgaggtcctttgatggtcacagttcgac

SEQ ID NO: 20903 - DNA, 411 bp, Glycine max
  unsure (1)..(411): unsure at all n locations
tgtgctactgtcgcaacctaccctacgacgggactgcatgtgttaagccaaaggagcgtcttccaaaaaggaaaatgcgtgggagtcgtcaccaacgtttattcgaggaaaacgctagaaaaaacgaaaaagagaggtctgggaattttgaaaagaagggttcagaagttgattacgcatagggaaggtattagcaccccacgcgcttgtcacaagggacgaaagcctttaatcgagtgtgcaaaaacgtgagttcaatcttatttattttcactttatatattttttattttcttggggtcgacaaggctgttgctcttgctcctacgtatcctcaggtgcgatgaggaattcaaacctatgtagttctttaagtctgaaattttgtgtgttaaattgattntatgtttt

SEQ ID NO: 20904 - DNA, 415 bp, Glycine max
tgtacgagtatggggtacccatcacatgtggtactaggtggctgtcgggcgatggtgcacaacaagtgtttacacatccacaatgcgcgcataaacccaccatcccctgtagcccacctacaactgagctcacgtactcccacgtagcccatatactcggttctctcaacaccgggtccccatcaatactcccaagcttgcccaacatcaaagtaatacaacattcaaacagcgcaaactatcacagccaagaaaacagagcaaaggcagaaaactctgccaaaacaccaaccaaaatcacagcttttctcacttaaagaccccagtaacaattccttcgttccaattcgttaaccgttggatcgactccaaattattactggaagtctctagtacataagcctacattttgacc

SEQ ID NO: 20905 - DNA, 397 bp, Glycine max
tgcttctacaggtaatataactacacccaatgtattttcgaacgtagctctgataccacagttggtagtttattagatgatagttgatagttttagagaattgttttagaaagaaggctatgtcattgatttcttggatgatcaattacaacataccaatttcctatttataggctcaagtcaccaacctttcaatggtggtgaatgtttctacattactttaggtctttctagagttttcatgatagattagtatcatgatagttctagattcttctatcttatacatacacttatagttatagattgttctaccatattcatacacattatagttctagattggtctaccatattcatacacactatagttctaggatattctactattttcata

SEQ ID NO: 20906 - DNA, 391 bp, Glycine max
  unsure (1)..(391): unsure at all n locations
ttgacgtttgtgttgaatgcattaaaggtaaacagactaaaagcaagatattaggtgcatatagagttacagacatcttggaattgatacatacagacatttgtgggccatttcctacaccttcatggaatggtcaacaatattttatatcattcatagacgattactctagatatgcatacttgtttcttatacatgaaaagtcgcaatctttggatgtgttcaaaacatttaaagttgaagttgaaaatcaactcaacaaaagaataaagtgtgtcaaatctgaccgtggtggtgaatactatggcatatatgacggttcaggtgaccaacgtctggggccttttgccangtacctagaggaatatggaattgtcccacagtacaccat

SEQ ID NO: 20907 - DNA, 403 bp, Glycine max
tgttggattatggggcacccgtcatatgtggtactaggtggcgatcggacgatggtgcaaatcaactctcccacatcctcaaatcaaacatgaacccaccatccccagttgcccaccttcaactgagctcacgtactcctacgtagcccttatcctcattcctctcagcaccgggtccccatcaacccctccaagcttccataatatcctagaaatccaattccaactatcatgaactaccctaaaccaagaaaacagagcagaggcagaaaactctgcccaaaacacattcacagattacaactttccttactcaaataccccagtagcattcccttcgttccaattcgttaaccattggatcgacttgaaaattttactggaggttcctagtacataaatc

SEQ ID NO: 20908 - DNA, 398 bp, Glycine max
tattaaatagtgatgaaaggaactaagccaagtttgtttattaaatagtgatgaaaggaaccacaggccacaactcaagtccatgccaaacacgaacacatacacacacacacacacacatagagacacacacacacacacctacaataataaagcataagcacccccgaaccccagaattccaaattagttacataaagaaatgttgatgtcgatatttgtctaaaattgcattttacaggtacaattttgagtttattgtaaaatcagaaagtctatataaaaaaaaactggaaaacaacatgggttattaacaaaaatcgatgttaatataataaacaacatcggttatttagaaaaaccgatgtcaacatgcaccttaacatcaatttttcaaa

SEQ ID NO: 20909 - DNA, 409 bp, Glycine max
ttacccatatcatgaggtgcagaccaatatattccacttagtcatcctctttctggaatcttgtagttttgaaatagcttatagcagaccttatgcgtaataatgtagcttatctcctgtagggcttcaattgataattctgaaactctgaaccaaacgtgattgattcctcatcaagcttcttcttcaacctcctccaagttctcaacatatcagcctgaatcagccccctgtaaagtgactcaaaggtacctttcagaggaagaaacccattctctatcatctcaacaaaataatggcaagcctccctccatctctgcctctcacacaacccatgtatcaaaaccgtatacaaatccaaatccggccccgcccctgtctccttcatatcctgccatatctccttcac

SEQ ID NO: 20910 - DNA, 390 bp, Glycine max
tggactagaagaggtataatattaatgactctacaatgttacattagtttttattttatcctaacatgtttgttttaccagcacaacgctaaagctgataaggcaatgtgtgatataactgaagatattcaatatgccactgtaaagttaaatacataggcttttttttttttgaaaataacaatggttcttagatattcatatatgtcttttctcatacaacaatctctttctgcaatagctaccatgatcccgatcaataattgtttgtcactccatcaaagagattgtcgtttgaagttggggatgatgacccgcaatcacacgatcctgcatctacacaattgtcatccacagagatgacaaaaccgattgactaaaaaaaaactg

SEQ ID NO: 20911 - DNA, 394 bp, Glycine max
  unsure (1)..(394): unsure at all n locations
tgccaaacaaaataatcacactttctattgtaaaaaactcgagaaacaagtcttttgtatgattaagataaacgaaacacccttggtagtttatagtataacacttaaaatgacacgaaactgtggcgtagtgatatagtgactggcgagtagcgagggaagttcgtgcgataaaaacagaggggacaatccgagaagattacgagaacttggacacatgagttttgaacacagacaatgatgtggtcacgaaccaaacgatacttcgaggaacccgtcttgccgccaacatttatcatatgattgtgatgtgatgcatacattcatgcatataaacgaagtctcgaacccttttccttttcttatcagcatgcaacanaaatgtggacacatg

SEQ ID NO: 20912 - DNA, 406 bp, Glycine max
tgtccaaaatcgtgaagtaaacctcgggtccctgtctgatacaatactggaaggaattccatgtgaccttactacttctttgatatacaactctactaacttctccattttatatttcatatttaccgggataaaatgagcagatttggtgagtcaatctactatgacccacacagcattgtgtccacgactcatcttgggtaaactagatacaaaatccatagatatactctcccatttccattttggaatttccagtggctttaattctcctgatggtcgctggtgctcagccttggccttttgacatgtcaaacattttgctacatattcagctacatccttcttcatgccatgccaccaaaaacttctcttcaaatcttggtacatcttagtcattcctggg

SEQ ID NO: 20913 - DNA, 173 bp, Glycine max
tcaaccaagaagggatggtccatttcaagtacttgaatggatttatgacaatgcgtacaagattgaattgcccggtgagtataatgtgagtactacatttaatgtgtctgacttaactctttttgatgtaaatggagaagccgatttgaggacacacccttccgaagagggac

SEQ ID NO: 20914 - DNA, 407 bp, Glycine max
tgtaaaaaatggaccccccttgtaaatagttttaaaacagactctgattggtaaatactttctaaataggaccctttgacataaatttgcctcatagaaatattgttgtcccaatttaaaataataaatagtaagagaccctcattcccggttttaacttatcctggttttaacctgtgcaacaaactagccatttctgctatacatgttttttttttctcttttttaatagaattactgctcatccttgtaatttcaacatgaaaacaccacactagggaaatatagcaaaatagcatctttatctatctgatacatacaataattttacaaatctattccatacattctataatgttacaacatggacttcacattatataaactaaaaaaagaaaaactataaa

SEQ ID NO: 20915 - DNA, 417 bp, Glycine max
tatatgcaatgatgtctaaaagtatgttactccctcaatgtaattttgtaaagatttaaactctcaattttagtatctagtgtcaaaatctaggtcacccatctcgtgagaaattgcttttaatgcaaaaatattatccatctatttattgtacaaaatccaaggacaaatgtagtgtgtcatttatctttgtgcattttgtttttagttataagtacttttgtgtagttattgatacttggacattttttttataaaatcaaaatgtgaaatctcatctcacattaaaaagttcgttacctaaattgagatctacattagacatgaacttaaaatgtcttaggtataatagtgcactagaatttaaccttgttgatttctataaatcaagaagcattatccattagacctcatgtg

SEQ ID NO: 20916 - DNA, 396 bp, Glycine max
ttatcccataatagataagttgcaattcagcattcattatagtagtgacctcacaatagcctgaaaaacccatacaccagttaccaagtgagtttctgatgatgcctccggattgccagattgagaatttgatttcgaatgtaccaatcatcacggaccacgccttgaaagattaaatcattcccagatttccagatgaaccagcaaccagcaatagcaaaaagactcccatgatcagcaagagagttcccacaaatccactgagaatgaagcatcgtcgtctgagttatatagagacgcagcaagtttcacactctcgtagccatatgacaatgacgaagacagtgaaagatggtttcattacacctgtgacaagaagaatctagacaatggtga

SEQ ID NO: 20917 - DNA, 398 bp, Glycine max
tttaataatccgttggaagtgaacgagacactgattgtagaacaaagtatatatgcagatgtaccttgcccacatgttattaataacaatgaggctgatacgatgggaaaggataaaacttatgtccctaggccaagtttattggaaagaaatttaacgattttatttttgttacctgattccactcttttttagatactagttatttcataattaaaatgtatataatttaatgctctaagtctaagtcgttgtttttgaaaccaacaagtagaaaaaaaggttgggacatggaattggaagacaagttggagtgtggtggtctgttttaaaatccaacacttaatctctctcttcgcagcctaaaatcccaatggcttcactctcttgtttgcgcc

SEQ ID NO: 20918 - DNA, 407 bp, Glycine max
tgatggcgaatcagaggtgattcaaaggtgttttgattataacaatgatgataacaaaagatgatgacaaaggtgatgacataaagctcaaagatcaatcaaataacaactcaagtgaatcacagatcaatccaagaacaactcacgtgaatcaagaacaattcaagagttcaagataagaatcaagaagaattcaagactcacgaagaaagtttagagtcaagaatcaatctcaagaatcaagatcaagattcaagactcaagactcaagaatcaagataaggcttaatcaagatgagtatgaaaagcttttctcataaattgagtagcacatgatttttctcaaaacatatttaccaaagagttgttactctctggtaatcgattaccagattgttgtaatcggt

SEQ ID NO: 20919 - DNA, 401 bp, Glycine max
tgtagttgctggaaatccttctggaagattagtggatatcactgatgggtggaacacagcttctgttgtgggaacattctcagggcctaagcatcgcttggccacagcagcaactgtgaaggacgggaaggtgtatctgaaccatatggttggaattggatacccaaaaaagaagcatgcaattgttgaggcagttttttaacgcatactttctagaaatctaaacattggggaactgggaatgtggggatcatacatttacaggacgtttagttgaaatttggtgtacctttgcttatttatgtttggttttgttgcattacttggcctcagacctcaatgcttttcccttgaatctcaacctaacataagatgctcgatcgagtaagttaattaccctt

SEQ ID NO: 20920 - DNA, 407 bp, Glycine max
tatcaaaattgaaaatgatggttcctaatctcaagaatcttagagtcttagattgtgagtcttgccaactaggaaaacatgttaggtcatcatttcctcaaactgtacaaagatgtaactctgctttctctaccattcactctgatatttggggaccaagtagggttacatcttttgattttcggtattttgtaaccttcattgatgaatttttcagatgtacttgggtttatttaatgaaagacagatctgaacttttgcctatattcatgttgttctttaatgagattgagaatcaatttggcaaatcaattaagattttcaaaagtgataatgctaaagagtatttctctcatgatctctcttcctttttatcttcaaaaggtattttgcatcagtctacatgt

SEQ ID NO: 20921 - DNA, 322 bp, Glycine max
tccttaagaagattccttaataagctagagcttatcttcacgtacctgtctcatagctaagctcagctccttgagatgagaagctagagcttagctacacaccccctatgatggctaagctcacccccatgacaaaaaacatgaaaataccaaataaaaagtccttattacaaagacaactcataatgccccgaaatacaaggcttaaaccctattctactagaatggccaaaatacaaggcctagacgaaagaataacctattctaatattaacaaagataagcgggctcatacttaacccatgggctcgaaatctaccct

SEQ ID NO: 20922 - DNA, 395 bp, Glycine max
  unsure (1)..(395): unsure at all n locations
ttcaaataattaaaggaatcaagtgttacttgagcatctctaacggattcctttgaagatttcttaaatgaagaaattatattttacagttttttttaattgaagtaaatctaagtgatattttcattgaagtaaatctaagtaacagaatttttttttaaagataagatccgcatgtttaagaagagactgtttcttacaactaaaaacaatatttttgttagaaacaataacacggaaggcaacaaagaagaggacaaaaaaaggtcatcaacaatgtggtgaagaatagacatggtaatggggtgggatgggtattatttntccaattcttgaccccgattcttcaacatgtctctatacccgtacccggtacctgacgggtttaaaatttt

SEQ ID NO: 20923 - DNA, 407 bp, Glycine max
tgtaaagcattgatttgatactgcttccctcatcatgtggcttatgatgtttacaatttaatgagcctttgcaaccctgcaatgagacacacacagatacacaaacacacacacatagagacaaacacacgcagacacaaacacaaacacgcacacacacataaagatacacacacacacacagagtcacgcacacataaagacacagacaaagacacaaacacactgagccacagacacacacagagacccacacacaaagacacacacactgagtcataaacacacacatacacaaacacactcacacacatggatagacacacacacataaagagacaaacacacacagataaagagacaaccacaaacacacacacccacacacacacagattaagaggacaa

SEQ ID NO: 20924 - DNA, 411 bp, Glycine max
tctacatgtctagagatttctagagagagaaaggtccatgttccagagagtttgagagattttgctatgcgaagacctgcagagaccgaagcttgaagaggaaaccgtcctgagagcttgagatgagtttgtgagtgattgtgaggtcctagaggtggaggagacatccccactacttgtattttttcaattcttcatctttctctcctctttgttttaaaggaagcttcccagttatggagagctaaatcctctgttggttcttccttgtaggtacttgatgtaaatatctgtatatctatttaatgatgttttgtgtgttcactatgctatcagaacttcattctaccatgcttttgacttgatcatgtagatgcatgtgtttttagaatcattcaacagtggaaaatg

SEQ ID NO: 20925 - DNA, 411 bp, Glycine max
ctttagctcgtccttcaagatcatgcctttgacccatgatgattcctttcacctcttcggagcttgagctcactattgctgccctataaagcccctcaaaactttgctttggtcgtgttcttcctttcgggccttcttggtttctcgttccaaggcttcagcggtggccatattgacgtcccctagttcatcatactcttttcagactttgatggctatggacttgaacttctcttcgactacccaggctctttcaagctttgcctttagggcttgtacctcatcactttcttccgaagctttaacctcatcatctctcatagtctttagatttgggagccaatccaatccttgtgtccggtctcttagccgcttatgatagccgccgatgatcccattactacttcccct

SEQ ID NO: 20926 - DNA, 400 bp, Glycine max
tgaagttggacccatgatcgcggaaagctctagaaactcgttcttagaaagtgaaactccgcattttttgttactgcaaggtttcgtgcggatagcccgaaattacaggaagagagagaggggtctggtctatgtctttgtatgcgaaatggaagttacgaagcaggaaccgcgtgaggtgatggctttattttattgaaaaataatactttcctgaaaattatgatgttgccacgtaaaagaaaaaaaaatgatatatatttaaaccttagtttttagtaactcgaggagatagacttcataaatattaactcactaacacatatcttttaagaataaaatcaagatcgatgctaatgttaaatggtgaggatttgaggttgagacattcacatccatc

SEQ ID NO: 20927 - DNA, 400 bp, Glycine max
tctcccccaattttctataaatagggggagatgtgatttataaaagggttgagccccttaggcacttctctctctttcgaatttgcttaggaaaattgtttccatgaagaaaatccaagccgaggcgcttccgtaacgtttctgtaacgtttccgtgagtgatttcgcgaaggttttcgaccattctttgacgttcttcattcgttcttcatcgttcttcagtcttcaacggttaagtacctcaaaccaagcttttcaattcattctatgtacccgtggtggtccacattcggtttcatgtatttttatttactttttataccccattttgacgtgcttaaaccatttatttaagtcatttctcgcttaacctaaaaataaaataaatttccagcgatcg

SEQ ID NO: 20928 - DNA, 353 bp, Glycine max
tgagatgaggaagtgttgaagggtgaaacttcctgcttttattgttgaccacagagtggtacctggagatatgtcgcgggggtcaggagaccttggggacgtcaggtggggtgctattgcccaaaaccaagcttgaccaatcccgacccaacccgggcatagtcggtcagtgagaacctgtgatgtacctaagcaggcgagctcctggcagtcaacagataaaaggaaaacaagaccacaaagcaaggaggcttgtgatggctggccagctgtgaaacttgattgatatgtgagatatggtctctggtaatcgattactaagggtgggtaatcgattacaaggcttaaaattg

SEQ ID NO: 20929 - DNA, 409 bp, Glycine max
  unsure (1)..(409): unsure at all n locations
tggaaggtagtcatacctcacaaaatatatatatgtatgtttaggtaggaagataccatagatatgcatgtatgtaaacaaaaaaatacttcacaaaatatatatatatgtatgtttaggtagtgaaaataccttagatatgcatgtatgtaaacaaaaaaatacttcacaaaatatatatatgtatgtttaggtagtgaaaataccttagatatgcatgtatgtaaacaaaaaaatacttcacaaaatatatatatgtatgtttaggtagtgaaaataccttagatatgcatgtatgtaaacaaaaaatatacttcacaaaatatatatatatgtatctttaagtaggaagataccttagatatgcatgtatgtaaacaaaaaaaatacttcacanaatatatatata

SEQ ID NO: 20930 - DNA, 408 bp, Glycine max
ttgcattgttgcagatcctgccaagagtacttgatattggatctataagcatacccgctgtataatgatagatgaaaataatgtattatgttgcattcaaattcagcaaccagtattttatttcatcattcttgccctcatgtaaagatattgacgaggaattaaataaaaagtaattgatgtgtcattttctgaatttaaatgttttacttcttcatattaaagacgaacattgcagatcgattagaaacgcgacaaacacaatctcaattcccagcacaacaaaaaaaacacgggcgttgctgcctaaaagatagtaaaatcgatgctcacgaatttaaacgtttcgtcaactctttttttcccatttaattgtgtaaagcatgcgcatcttatacagagctatac

SEQ ID NO: 20931 - DNA, 401 bp, Glycine max
  unsure (1)..(401): unsure at all n locations
tgtaggccttggatcttcttcatcaatggagtcttttgcttcttaaagtttgatagcagcgtaatggagaaggagaagggtgattggagatgccacttcaaggagaagatgagtctagaagaagctcaccaccataggaagccatggataagagcttgaaggtaagagaagatgaatggagggagagggagaaagggagcatgaaatttagtgcctctaaagaagtttgaactttgaagtttaattctcaaatgatcaaagttgaaaaaatgcacacacatagcctctatttatagcctaagtgtcacacaaaattggagggaaatttgaatttctattcaaattttactagaatttgaaattgaaattgtggagcccaaanttcactaattatgattagt

SEQ ID NO: 20932 - DNA, 378 bp, Glycine max
  unsure (1)..(378): unsure at all n locations
nttagaaatattgtcaacaagtatttttaaaaaatattactagagaggaggcgtgttaaagttagtcggactattcttgtatacacgaaatacttttatataaaggacgtctaagtattgcctatattcttaaatatatattcctcacattctcaaaaatgtgtgatgaataattgtctttattattcaatttataaattatttgaaatacatgcatggatcggaatgctagttgaatacccaaaatgttagttatataaacataaaatgggttataacacttctattacttacgtgacttggtgttaacaccttaacgtgaggatatttcaaaaaggtcatgaataaaccaatagataacacacgctcgagttcatt

SEQ ID NO: 20933 - DNA, 352 bp, Glycine max
  unsure (1)..(352): unsure at all n locations
ntcaccttagctcgattgaacatggtgtaaaatgtgtttacctcatacacccgtatgggaggaacctctacaatcttagctacctgaataatccacaaaactgattgtaaataaagaattatatagctttttgcattattaaaaaaatttaaattgcagtttgcaaacattatgttaatttgggatttccactgaagcatcagtgacgagaaactacaagcaaaactcaatgaaataatgatgagtacttttgcatagaagaagaaataatctgtatatcaataatcaaaccttgttgcatgcatagatttagacatggcatgtatgtcaaccaacagaatgatactttaac

SEQ ID NO: 20934 - DNA, 159 bp, Glycine max
cttctattccatgtcagttaatgtgaatgcttttaattattcatgtcttatctgccggcgggagcttttgtagaagaacatcgactgatcttatctgcattcaaaaatatctgaatttagacatgtctagagacgttctaaggacttttactttgtgct

SEQ ID NO: 20935 - DNA, 406 bp, Glycine max
tgttggattatggggcacccgtcatatgtggtactaggtggctatcgggcgttggagcaaatcaactctcccacatccacaaatcaaacaggaacccaccatccccagttgcccaccttcaactgagctcacgtactcccacgtagcccttatcctcgttcctctcagcaccgggtccccatcaacccctccaagcttccataatatcccagcaatccaaatacaactatcatgaactaccctaaaccaagaaaacagggcagaggcagaaaactctgcccaaaacacattcacatattacaactttccttactcaaataccccaataacattctcttctttccgattcgttaaccgttggatcgacttgaaaattttactggaggttcctagtacataagtctac

SEQ ID NO: 20936 - DNA, 411 bp, Glycine max
  unsure (1)..(411): unsure at all n locations
ntgcttgcatttttcctttgcagttaaggaaataaagcccaatcaatacacatttggtagtgtgttaaatgttattgctgctgctgaggatatatcattgaaccatgggcaacgttgccattctcacttgcaaacttggtttaagcactgatccaattgtttcaagggctctgcttgacatgtatggcaagcggggagacataattgaatctcaaagagtgttcaataagacacttgaacgaacccagtttgcttggacaaccataatattttcctatgcccaccatggagactttgagtaagtgatgagtttgcatacagaaatggaaaggtaaggaatcaatctagactccatcactttcctttttattttggttgcatgatgtagaaagggcatggttgatgtctttg

SEQ ID NO: 20937 - DNA, 417 bp, Glycine max
ttaacacgtgggttcccagataacaaaaacttcaagatctattatttataattattaaaaactaaaaagaaactaaacaaaagatatgaaatgtgtcaaatcactaaacctcctcaacaaggatccggcgcttcccccctgatcgagtcaacctgctagaaccaaaatgtgagcatgccataccagagaaagaactcgcaatcaatctgcaacaacatagagctgcatcttttcgcgtagctccatcctcatcatccaaatagacaacaactgactctctagcaaattcaagtagttcgtggccctatatcaacaaaataaaatggaattaaacctctagcaattttccaacaacttataaatacacaaaaacaaaatgaagattttaataaaatatgaatgtgagtcactatagaa

SEQ ID NO: 20938 - DNA, 387 bp, Glycine max
  unsure (1)..(387): unsure at all n locations
tcctctaagcataagcttaatttcaattatgtcaaatgtttctaaaattaagagtttttgagtatttataaaactagacttaagaagatcactaagcctctaataaggcctatttacatcaagctcaagcccattacacaaataaacaaaaattaggaattttcataaattcacattgaaggtatgcattaaggccaatttctcctcgagttggaattgggcgaagccggacaacttgcgctaaacccatgcatgttgttcaaccatcttcaacatgctccaattcagctccttgtaattntctccttccttgtctttgaagagtagtccatccttgatcctcttggccatatcttctggtagaagctggactctagaccttgtcat

SEQ ID NO: 20939 - DNA, 320 bp, Glycine max
tggactgtgctagggagaaaaacaaatgaccaaagtgtaccaagagccatttctagggcaaaattgggtgttaaggagtcaaattttgattcggtggaattttaggtgtaaatccagtttgagcaagtttagattgatgttatggacttgtgtgaggtgagagtttgcttcaaatttacctcattctaaatttcacttctcaagcctagaaaatccattaaattgaggggttttggacacctagattttgtgttgctgtggtttgaagcttggctttggtttagacatgattgatacatgatttgggacttgtaggattt

SEQ ID NO: 20940 - DNA, 398 bp, Glycine max
  unsure (1)..(398): unsure at all n locations
tttgtcactccacccaaatttggccttcacattaacatgaattaacaccgtcgacaacagcgtcaatgaattgttgcacctcggatacaaaggtttctttgaatcactttgtaatgtatcatacataggggcatgtgcttgctgaaaatactcttgtctaaggtcacgaatcatatcttccaagcgatctcccatttctacatcaaatggttcagattggggcccactctgcatgtttgtcatttcactatgccatatccacgtcgtataattcctcttaattccatcacacaacagatggtcttgtatgtcatcgacttttttccgtctcccattcaaacaatttatgcacggacaaaaaaacttcccgttntcattaggtcgacttctttctaaag

SEQ ID NO: 20941 - DNA, 411 bp, Glycine max
tcaacatcagactacttccagggtgctggaactgcttcacatggacttgatggggcctatgcaagttgaaagccttggaggaaaaaggtatgcctatgttgttgtggatgatttctccagatttacctgggtcaactttatcagagagaaatcagacacctttgaagtattcaaggagttgagtctaagacttcaaagagaaaaagactgtgtcatcaagagaatcaggagtgaccatggcagagagtttgaaaacagcaggttcactgaattctgcacatctgaaggcatcactcatgagttctctgcagccattacaccacaacaaaatggcatagttgaaaggaaaaacaggactttgcaagaagctgctagggtcatgcttcatgccaaagaacttccctataatct

SEQ ID NO: 20942 - DNA, 405 bp, Glycine max
  unsure (1)..(405): unsure at all n locations
ttgtaaataagcagataacatgaatggctataaaattcataccgccttggcttccttgtactcattcactgccttgtgggaagcataactgaaattcacatcaggtcccaactcggggacaataaagtggctggatcaatgcacataaatcaatcaggtcagtcatggcatcaccagtaattccttcgtttttaattataaaactccttttagaaatttatttatttccttttatatttttttttaatttttaaatatattatttatttattttcactatatatctttacttaattattttttttcgaaacattaataagaaacaattaagtggacagagagataagaaaaaaatgtaattntggcatgatagtataaataattgacagatttaatataattaac

SEQ ID NO: 20943 - DNA, 390 bp, Glycine max
tcttcccacaaggaaagaatacattgagagccaaatgtttctcattttcctttctttgatatattgatcaaattcttcctctgcctctgtgatctttatctctatagtttctttggctttcttctgtgtcaggcatttgggaagaactagtgcatcttctatgaaggctgagccaccctgtgcaatgaatgggcatgtggcatgcattgcgtcaccaacaattttcactgtacctttcttgaatttgttaaagaccaagtccaatggtgccctatacttcaactcagtaaaatgtaagaagctcaacatgcaatttcgtattatctccactatcccatttgggaaacctttcattgattctattaatgactgtctaataagaattgggtc

SEQ ID NO: 20944 - DNA, 505 bp, Glycine max
agctttttggagtagaaacatgggaccaactcattttatttcaaaaaggaagtcatatctagtcaaggtctgagagaccatacaagtttcctaacgatttctaattatgtgggccattaagtctatcatatgctgacaatagccgagaagcccatgaatctcttcgggggcggagtaagtgtctgccatcgccttggccttggctaacaatcggggaagttcttgactcccgttcaaggtaagagcaaaccgatccatccacatggttgcctcttggtgtaaagagtcgatcacccttcctctagcctctttttccgcgtatacttgggcatactcatccgcgattctatgctcgtgggccgtggctagacctaactcttcttggtacttggcgatgatagctaacatgttggtctctgactcgcataaacgttgagacaagcttcttttggaccttgaacaaacaatctcttctattctcaaaccatgctatgtgctaccgact

SEQ ID NO: 20945 - DNA, 853 bp, Glycine max
  unsure (1)..(853): unsure at all n locations
atgccctgnnncnatcacaccttcggttatgcgcacagtgacgtccttgaaggggtgccattgaatttctttagtttccggtgctcaatttcaagcgtatcgatctattattagcctgaataggacatccgcgcgaagagtcttgaccatntgaagttcacgagagcctccgctgtccaatgaccagcgtttccatctgtgattcggcctcatcggactatcgtggaaacgcatcaccattaattgctctagagcgtccgtgttctttggagcgcgcgatcatctatgcgccaaattgtacatcttgcaagagtaataccctccaatttctgaaaacttgctatttcaattccacgctgtccatattaaccccgaatctgcctcctgctgaacgtatagcatgcgacttttcagagatccctggtagagtcagggtctccttttatcgccctatcgcactccggggaaagttggcctttaattcccgaaggtctttgctcttgtggcccttctcatgttttcccaatcgctccctgtgaagttcccctcaatttccagcttctggtagtggacggcattatttccccacgccccttgtaaggtgccctatctcccgacctcgttctcccctctatttttcccatcgcccccgtaagttcactgattcaagtccgttatctcccctgattatcgccagcctcttaaaaacgcttattatcaatccttattccgtctatgttgccctcgcccataatcacttatttgacttctattaggcctaattcgcccctctatgaacttctttaacttcgatgccttattatgacggtgtacactctattgcgcgcgatcc

SEQ ID NO: 20946 - DNA, 515 bp, Glycine max
agcttgtacatattgccaaattgataaaaaaatttttggaattttataaaatctcttacctttctatgggatacatttgttgatatgaacaagacctctaagctttaccttttccacgagatgaacaaccaaatgaaacatgacagtgaagaataaaggaggaaatatcatttccatgtggtataaagtgagaacaacttgattttgtaattagtctaaatccttaactttcaataatttaaccacatatttttttaaagaatgagcataactcaattaatactgttgaaacctcatctgacaatgtagatcacatggctaatggtagcaattgccataccaatatgtgacaattgtgactcttcaacgttccagtcaactttagattttctgagtcgatacaccaagaaatgttgcttgaataaccatctgacacaatgatattctttaaggtgttaaaaatgttctattacctttactatccaaagtaaagatagttggagaatatcttccat

SEQ ID NO: 20947 - DNA, 313 bp, Glycine max
  unsure (1)..(313): unsure at all n locations
ataacatcatagatgtgaaaaaaatgaagactttatataagaatggtatttactatataagtagccccaatgatcataanaacanataaggagctgaagttagtaattattcatctagcaatcttgtatggaaaaaatagaatactagttgttaatgttcaacaaaaaaaacacacttcacaagaaaagccactactcagagataagtgtctctaaccaatgatgtaaatggaaacgtttaaagtgaaggaaacttgatcttaaccaacgtgggaaaggaaaacatgttgttatggacataaaccaaacattt

SEQ ID NO: 20948 - DNA, 654 bp, Glycine max
agcttccaatacaatcttgatagtcttcattcagctgacacttcctctcaatgcatattgcaagctgaataacaaagcaaaaaaaacataaattttatcactgtgtacttcataacatataaagaccaaaacatccaagctcactgaaatatttctagtttttcttgtaataacttgtctagaggtataacaatagcaacaacaaaagttttatcccaccaagtgagatcagttacatgaatcgcacaacaccaacttctttcgatgttcttctagtctccctatcctccttttcatggggcaaaaaaccatgcaatatgctctcctcactgattattccttggtatagaggtagctcaatccaaggaaggaattatcctctcacagaggaaatatgctttggatattttggaagagataggcatgattaattgtagacccattgatagtcccatggatccaaatcaaaatttaattggtgaaactaggtgaaccatattcagatccagaaagatatagaagattagttgggaaactcatccatcttactataaccagacctgacatttcctttgcagttgggtcgatagtaagttatgcaatctccttatgttgatcactaaaaggctgttcttcgcattctcaggtatatta

SEQ ID NO: 20949 - DNA, 391 bp, Glycine max
  unsure (1)..(391): unsure at all n locations
gcatgtatgtaaccaaatatatatatatatatatatatatatatatatatatatatatatatatgtgtggttagggagcaagataccttggatatgcatgtatatagcaaaaatatctcacaaaacatatatatgtatgttatgtagcaagataccttggacacgcatgtatatagcanaatacctcatgggaaaaaagagagcaaaaagagagcgagcgagataagaatatgatggagaaaaaatattatnatanaaaatanaaagttgtctagctaaaaaaacatgcttgtgaaaaaaagataatttccaacttttctttganagaatatacttgatcttaaccagttttgaaaaaaatgtgatacacctgagagtgatgctggaaaat

SEQ ID NO: 20950 - DNA, 528 bp, Glycine max
agcttttgatgcaacctcaccctcatggggatggttatggagataaaagtgtgtgtgttattcccatagtgggtcttggaggcatggggaagactacacttgcaaagttggtgttcaatgataagaggattgatgaacttttccaattaaagatgtgggtgtgtgtctctgatgactttgacattaggcagataattattaaaatcatcaactgtgcttcagcttctacctcagctccatcaattgctcttgctcaccatgaaagcattaacaacttatatattgagcagctacaaagtcagcttagacacaagctttctggtctgacgtatttactggtcttggatgacatatggaatgatgatcgtgcaaaatggatagaactaaatgatttaataaaagttggtgcagtgggaagcaaaattttattgacaacacggagtgactcaatttgcttaatggtgggcactgtcccctcttatgttttacaatgcttgtctgtgtagaattctttgtcctattttcatt

SEQ ID NO: 20951 - DNA, 836 bp, Glycine max
  unsure (1)..(836): unsure at all n locations
gcaatgccgtagancgtgtcacntctcaagcgtcgcttgtaatggtgtcgggtctgggtcatgattacccccaaatgttatgagctcattctatttgntntnttcttctgggtaaaataaagcggaagggggtgcattactatgatcatcacgggcgcccaagtgtcaaaacagataaaacggcattccatttgtgaatcttgcgtatcacagcttatgggacaaattcggaacattgtaaatgcttgttatgtggggggtcatcgacatcatagaaagggattccgaccttatgaaatgcatagataatgcgggtgtgagactatcaacgataaggggaacccgaaaagtatgttataaaatgttatagggaagattaactcccgcaataccaccaaactgaaaggtaactgctgagagtaacaagctgaaatgggataaaaaagcctttcgcttattaagtcaccctggcctactgcccaattgttttttgataatacccccaatcacaatgtttcctagtatctccgaacatgcttcctccattaatgcagaccactcccaccccatccccaatcttttggaaagtaaagaacttttttaggcgagagtgaccagttgccaatccttatggtggggtaactcaaacttttcggggtgggtcgaatgaggtgggcaaaacacatcgaacgatctggaacctatactccacttgaacgcggtagccgtcaacctaaaaaccgttcatctatcatacactgcatattgaaagcctgatgatgcttactgtatgggtcgttcgcgcacgcatcatcacgtgtccgacgtctcactcc

SEQ ID NO: 20952 - DNA, 591 bp, Glycine max
agcttcttatccaaggctcatcttggtggtgaagctctttcttccatggcttattccctagtggatggcgcctcctctcacctcttctcctttgtcttccgctgcatctccatggtggaaaatcaccattaaaggacctcattgaagctcaaagattcaacctccatagaagccccacaagaaagcttctatcactaaagctagaaatcctaacttaacaacctacaactaagaaaaagcgaaatcatctatcctatggtttgagaaataacaatgcaaatgaacgatgcaagagaacttacttggattatgtctgtgcaaggaaatgaagcaagcagatgcaatgtatgatttggaagcaagaaaatgcagtagcagaggtagaggtaactttgggtatcacccaaagtgcctcatcctttggcttttttttaaaaaaaactgaaattcgcatggcgcgcctccagagcttttttcttgaaataggcattgtggtgtgctctgacttctatgtgtgatgtgtttctctggattggtgccctaattctacataagacaggctttaaataggctctgaatctgcgatgttgc

SEQ ID NO: 20953 - DNA, 313 bp, Glycine max
ctgagaaagtctttccacacataatacaaaaaggtaactggatagaggatatctttgcctaagacccctcgaaggattgaaagcattactcttctccccattcaatagaacttggaaagatgtgaaaggcatacactcgtaaacaatactaaggaaatggtcatcaaaacccaaatccctcaaagtgtgaatgacaaaatctcactaaatgctatcatatgccttctctagaacaactttgatcgccataaacccttttctccctttagatcttctcgtcttatggaaaacttcttgagccatattaccatta

SEQ ID NO: 20954 - DNA, 471 bp, Glycine max
tccttagagagacctgcggcatgcaagcttgttggatagacacatgggacccatttttttttttctaatagaatatacgtgcatcagtgtgaattgaaaacatgtcaggttgacaacccctctgaggtcaggttgtgccattcaaacaaacataggcagttcatatggatcataaagagaggagacagttaagggcgccccttgctgcatgtacttcatgagtatgaggagaagaggttgtatcttctcggaacttcttcccacggacatgaatatatctctttgagaggagaaactatcaatgttcaaaaagggagctttcactttatctatatatagtacctacctgatgaataagggtctcccacttgatagagcccacttgctcctgcagctgttccataagaggctggagcctgtctaccaagacatcacagaaaggccttactgcttcaccgcttgactttgatg

SEQ ID NO: 20955 - DNA, 410 bp, Glycine max
agctttaagaaaaggccgaactcccctcagtaatctgattttaggcttaaataggtggctttgttcgtgctcatgcgcttagcgcaattctgagctgcttagcgtgcattagtaaattttggcttagcgcagcttttctcgctcagcagatggactgaagcggtgcatttagtgtgatggcccttcgctcagtgaacaagtacaactcatccttcttccataatcttccttgcgcttaaccgatgaatgttgcgctaatgagcatacctcataatatactggtgagacctcatccgacaatgtaaatcacatggctaatggtagcaactgcctacccaattgtgacaatagtgactctttaaacgttcagtcaactttatattttttgagtcgatacacccaaaaatgtt

SEQ ID NO: 20956 - DNA, 804 bp, Glycine max
  unsure (1)..(804): unsure at all n locations
tatagctgatgaccgctaanaaactcagctgaatcatgccattactgaatcataccaacaagttagatattttcactttacacncnaggaggcctgaaggtatcaaagctaatatggtgacttgaacacaaattgcgaaagtttttaaacaaaaagcttatccttataagcaaaatggttatctttacaattcttgccaattcttggatcaatatgaatattgaggctcaattgtcatcatctttcagaagattctcttctttctcttctgaagataaaaccaggtctttgtggaagaatctaacacaaagaacgttgtcttggtgttagacttgaaaggattacaaatatgactctcaccgtgctgggactgccttgccatgtgtggcacccaataattgattgcctttctccttaaccatattaaatatttattttatcaatggctttgatatatcagaatcattcaggactttcttaataagatatcattttattggcacatcagatttattcgccccctctaaatctcgccctttctacaagcacatatgttacctcttcagaaaccctcttttttgtttccaaaaaagcttacattttcctccttatgcgcagattggaatctcctttcttcttaaaccagattaagctataattatttcggctaaacattccctttctgattactcactcaacaatattcttctctgcttaactgattatctgcgtccgttaccctttgacttcacactcactcacgtattaatcagcctaccgtgtccctgtaatgtctctctcact

SEQ ID NO: 20957 - DNA, 529 bp, Glycine max
agcttcagatagaagagaattagggggagaatgagggagtgggggtagactaattcaacgcctgataacaatacaaagaaaacctaactttattcctgtgtacttcttaacatattgaaaccagaacattcaagcccactcgaataattcctggtttccttgcaataactcgtttagaggaataccaatagctaccacaaaagttatatcctaccaagcgaaatcacctacatggatcgcacaacaccaacttcttgcgaggatcttctagtcttcctattcctcctttacatggggaaaaaaccaagcaataagctctcctcactgaatatttcttggtatagaggtagctcaattcgatgaacgaattattctttcacagaggaaatatgctttgactttttgtaaaagataggcatgattaattgacgactcaatgatcgtcccagggatccaaattaaaaatcactggtgaaactagggaaaccatttttcaaatcataaaagatttagaagaatacttgggaaa

SEQ ID NO: 20958 - DNA, 540 bp, Glycine max
  unsure (1)..(540): unsure at all n locations
agtgtagcctccagccatgcctaagacttatattttatagcctccaaaacttaattcaggttcagtaattgttagaggaagatgatattatttctgtgacaccacagcttccacaccgaagcacaagaaaccgatttccagaacttagttttcaatgatccaaaccagcttgaatcatgttggaaaaaatgatgtattggttctctatgttgggcagtgaaaattcccaaccaagagtaatgggtgatccagactcttattgcannatgacagtgaaaaaaaggtgtctagagtctcatcaagctatgacaaaggggctagaccatccagcatttgaacttaattctttagacataagtatccatagtggaatctatcaagagaccctcaataagtcacccattttcgtattaaataaagttccaaaggctatagcaaggttcacatagagagtaaaagacgttgattgcatttactgacacacctgtgaccatttcacaacactgcatctatttgcatagataccctccaaatctcatg

SEQ ID NO: 20959 - DNA, 450 bp, Glycine max
agctttgagcaaattcgaacgacaatttcttttatcttggatgtctgattgagtcccgtaatatatcgagacgctcgaaattgaatgatgatggtcgttgcaaattgaaacgacaataactatttactctgatgtctgactgagtcccgtaatatatcgagacgctcgaaattgaatcttgatgctctgagcaaattcaaacgacaataactttttacttggatgtctgattgagtcctgtgatatatcgagacgctcgaaatttaatacgaaagctatgagcaaattcaaacgacaataattttttactcggatgtctgattgaatctcgcaatatatcgacacgctctaaattgaatgttgatgctctggtcgtatttaaacgacaataatttttccggcagcattgcacaattatttacaatccctggtcgatattatttatttatg

SEQ ID NO: 20960 - DNA, 412 bp, Glycine max
  unsure (1)..(412): unsure at all n locations
tcagaattcaatttcgcgcgtctcaatagattacgggactcaatcagacatcctattttaacattattgtcgntngaattagctcagagcttcagaattcaatntcgatggtctcgatatattacgggtctcaatcagacatctgagntaaaaaagttattatcgtttgaagttgctgagagcttcaacattcaatttcgagcgtctcgatgtattacgggacttaatcagacatccgagtaaaaagttatcgtcgtttgaattttggtcagagcttcaacattcagtctagagcggttcgatatattaccgggactcaatcagacatccgagtaaaaagttattgtccgttgaaaatcctcagagcttcggtattcaatttcgagcgtcttgatatattaccggactcaat

SEQ ID NO: 20961 - DNA, 297 bp, Glycine max
gatggggcctcctcctagctatgatacactggaacttagatacacaccctggatgataactacgctcacccggcccgataatgtacctgaaaatacaaaacaacgtagatactacaaagaatactttttatgcctcgaactacaaggcttaaactctatacccccagaatggacaaaagacaaggcctcatcctatgattagaaaaactattctgctattgacacagagatagcggactcatacttagtcaatgggctgcaaagataccctaaggctcaagacaacgctagggcctt

SEQ ID NO: 20962 - DNA, 1160 bp, Glycine max
  unsure (1)..(1160): unsure at all n locations
acggagcatgctgacacaggcagaggagagaganaananantctgcgnananntntcagntcgagcganacnaagctacnacnanacncccacantccnnnncnncncnnncnctnttcgggtntttgaaatccccttcgcatatacccacagcanaanannnganagangngaagctgctgcgtctcgacagatgtcantatgacgcgtctattatgananncaaactgaggaacaggtccttatctatatcgtctataacactcacaggtngctctcgatatacgccggatancntntgcgcgctaacaacacncgcncggaaggatatgcaaagcgatgactgatctctcacagactccaatataaacgatgcgcaaaggatgngtagacagcgcgtgcgacctcatcagacgagatacgatagagacgatgcgcgctgacgaaccgcaaaaccgcgtcgaaggtgagagcggacagaaactcacatggacgctatcataagcggttcttaaaacaactatgaacgccataataccgtttctcgccttgaagctacatgtataggagaaacttcatgaggcataaaccatgatacgctccatgcaccctagaataaaacggccagagagaggaatagcgcagccaccgacgctaatgatatgagagtctgcatgccctgcaatagactaccaacaaaatggtgcaatggatactaaatggctgctcaccgacgaagacgaagatacccagttatgaggatggaaacggtcgcaaacaggctatgtgggcactgacaacaccgcccctgggataagacattgaagaccacagacgagaactaaaacccccgtaacatcacaacaacgacgaagaagacggaatggtagtaagggaaactagggaatgccagtattacgcaagcagcacgaatccgattggggaatgaacaagacacggtgcgaggccgcgcagcaatgctagagaggatattgattctcgagcggtagatggaagaagctcgaccgaacactcacgtatgggcgaattgtggggaggagattgcgacgacgatcgaccacggcaggacacgaggaacgcacttatggccacccgacacgatataggcngcaatgtctcgaacaatggccgcgccaaag

SEQ ID NO: 20963 - DNA, 1019 bp, Glycine max
  unsure (1)..(1019): unsure at all n locations
ccccaccccgaaccaaaccacacgatcctacgcaacagatacacnncattaaacagatggaacaaatagaaanataannnnnaactgccgtgcacgcaaacccgaaaaangaaaggacccgcaannanaaagaggagaagggggattatattattttttataagggaaaaaaaggggggaggaggggaaataaagtagttaaaaggaaatggaggaggggatgaaaagggagagtaagaaaaagaaaaggataaatggagggtgtaaaaaggaaaataaaaaagggaaatgaaagtggggtgaaaaattaaggtggngaaaggggaagttggagggtaaatgagagaaaaaggaaagaaagtgaaanggattgaataagagaaatgtttaatatgagagaaagggagaagaagggagatagaaagaaaaataaagatgaaaaaaatgaaagaagaaaggagggtggaggggggtgaagataagagaaaagggaaaagaaaggaagagaggaagagaaaagtggagaaaaagaaagtgggagaaagataagggaagaagaatgaaaaaagggataaaggaagaagaggaaaaaagaagaggaaataaaaagaaagaanagaaaagaagagaagtggataagagagaagaggaagaaagaaggagaggaaagggagaaaaggagaaaggaagaaaggagaagagggaagaagaaggagagaaataaaagaatagaatggaaataaaatagaagggaaaaaaagaagtaagaaaaggaaaaaagtaaaaagtaagaggaaaagaaaggaaggagatgagaaggaaaaggaaaggagaagagaataaagaagaaagagaagagataggaaaaagaaaagaattggaaaaggagaagaagtagggaaaaggaaaagaaatggagagtgagaaagggaaatgggaaaggagaaggatgagagaaggggaataagatgaggaataaagagggagaatagaaatggaaaggatgaaaggagagagcc

SEQ ID NO: 20964 - DNA, 404 bp, Glycine max
agcttgagaaagtccttctgattctgtttgttcttttatgactttatggcatgagatgaaattcaaagattagatctcctattagttgttatcaatgaatatcttacacacttgtgcgtgagtgatacagtagtcgtgagaccgtggtttaagctactttccttgatatctatcttatgcctaaattcatctaactgtatagttcacattttattcttctctttgaataactgcgtattttgtgaagacaagtgataggtacacattgcttcatctttctcatcatgcaatcagttattttttaagcataaccctttgtatatagtcactgcatgccattgtcacttgaggacaagtgagttgttctctattttgtttgaggacagccactactgtatatttgg

SEQ ID NO: 20965 - DNA, 979 bp, Glycine max
  unsure (1)..(979): unsure at all n locations
tgtgccctggaccccccgttgtaggngaccntatngaatactcaagcctattctcaaaggactcgctntcccgttaatcatgttttgtagttgagtccggtcggtagccatgtcagagttgtcctgatcctgcctaaggaatgcggtaatcaaatcccttcccattgccgatgcgggaaagcttctggaatagtgtaccagatgaccgcttgccccaccaggctatcttgggngaaatgcatcaataacttctcgtccctggatacccacccatcttgcgtcaatacattntaagagaattcttggngcagtcgtccctttgaacctattggaggccggtactttgaacttcggagggatgacgacgtcctggaccaggcataggtccgccatgtctgcgaacggataatcactgaacccttcaccaacccttaatctttcttcaatgagatcaagtttcaccatttcttccgctgtccggggtggcctcccaacggcagtaacattggttatattggtgattcatggtaccacggatgattgtgtaggatcactactactgagtctacgcgtctaatattgatagactgctattttaacttagttctagcacaaactctccatgaacgacttcttgtagtcccgacgatcaacgatgtatccccgccctgctctacacgactactacacatagaacttagactgccgtcgaatattacttcgaatcatttgcgcgttgctcgtccttatttgtctacgatataccttgttccgatgtattgcttgtacttaaagtatcctaatcgtagactgttcacctcaatactattgtgcaacacctttcactcgttcttacatggagcattattcgttcgtggatccaacacatctggtgtgtttgtctactgcaatgtaaactgttctatatctatctaatgcatttgtcgccgtacgatcatgcaacggtccgtttatgccg

SEQ ID NO: 20966 - DNA, 68 bp, Glycine max
agcttcttatccaaggcaattcttggtggtgatatctcctttttccttggctcataccctagtggaag

SEQ ID NO: 20967 - DNA, 988 bp, Glycine max
tcgaccctaggaaacctatagactcacctgcctgtccgatgcgcagtatgatggcccgagtatgttggggacggtactatacataatgggttatgcaaagagaacggcggcataactagcctgataaatgccaaaggaaatcgtgggaagtatggtttaggctataagcccactcaggcggatatgaagagaagcatcgccggaaggaaagagcggcggttaatagcttcagttgggcacacgaaagcgactgtattacctccctgtgccatatagctgttccttatatgaagactgaggtaacccgtatgcctagccactcctcatgaatcaacaagcctgagacatcttaacctatcttattaatccttctctccccacatagtgcgcactaccaaacaccccttctttattcttcttttatacataagtccccctacctcttctcatggtgatattattttggttattaatatggtcgcccaccaactcactttggctaccgacgttcagtggaccatactcacatccgcgatgatatcatcactccatgataatccagtggggaatctttgtaggaatgatgaacgacttaattgtaaagtaccgttcttatctcacttttcatttcacagcaacgttgattcaccaatcaaccgctattgcttgttgtacttcgaagaacgttggctcctagtatgatcgaccagtcattcacccatccatgctctagatctattaactcattattgagcaccaacttttcttcctccactattgcttgtcaaacatacgatgtgtagattgaccctacatcgatctatcgatcttataattacacgtataatccaacgttctactgatcacctcacctacttgttccgtcgacttcacaccgtcgaagtgctttgactactccaaggaatctctcaatagatccgatccatcagatagactcaacgacatctatcgatctcagttaatgcct

SEQ ID NO: 20968 - DNA, 463 bp, Glycine max
gcttgtcattagtatgaaactttctcccacttactcttacaacgataaggttgatttggcttgatgacacccttattctctaaacgatacaacagttccttctctttcctaatctcccggacaccttgagggacatggctaaaagtgtggctatttgcataagcagccatataacgaacaaccccaaaggaagatgcagctattctcagcttattggcaacttcataaggtgggattgaattgggtggtttattgtccaagtcccagaaaagccccaccctgtttggcttctcgtttggtgtcaatttcgggtttttaccgcattctgacccagaatgacaatatctcaaggcaccatatgtttgccaactttgatttttcggtgagaaaaagaaggtgcaacgaaatttgaggatttgcaatggggtctctgctctattataaaagaaataacttgtaaaag

SEQ ID NO: 20969 - DNA, 905 bp, Glycine max
  unsure (1)..(905): unsure at all n locations
tagtagccgttggacgtgtcgaatactaagcttcgaattgctcaagtttctnttnctctttccaacatttccaactgccaataaattctatgctcttttgtgtcagtgctacctataccattaatataaaaataaagttttaaggaaggattgacaactatgcatataatatacanacaaccatatgcaagaaatanaatttgaaactaagttcttgcatatgaagcatatcaaatatgcaatgaatnggcacatatancccgagagacacgagagtaaggtggggaaagatgggtgttgggaattgagcattcattgttatgggagggattctctggactttgtttggtgttgtcgtgttcaagcttctgaattgcttggtcgagagctcaaaccattgatcttgctcctgcttgatgttgtttgacttcataaaataaaggggcttctttgtctaccctcggcaccgacaagtgtttatggatgaaacacagaacgggcgtttggtttgtttagggctctctatcttagatatcaactttgaagggcgtggtttacctttaggaactgttatccacacgtgatacctgcccaaatagggggagggggccttggagttcctctgggttaactatttattaataatgtgggagagactcttggaaaagcatccacatagtgtttatctagggtgatgaaggtgttttggtagccgatgtgaatctgcggacatgttgtcggtcgatagatgtggccacgttgttggtgcttacgttctaagtgatgaagacagtctttttatagtataacttgatggatttatgtgatggaaattttcggaggtctaccgttaaagacgtatgatgactgtacaagtctgtcgcataacaacggatagtgacggg

SEQ ID NO: 20970 - DNA, 595 bp, Glycine max
agcttgcttaagcaaggaagttgcgataggcctatgtccatatccgaatataaaagacccgaggtgcaatagaagaggtattttggtgctattcagacaacaacattattcccaaggctcttagttttgatttattacatgtttgtatgcttgatcgtgagaattgtaatcaagctctgagtagtgaatcttttcatttgtcggggttggataggctaaacttaatttcgtgtaatactcttttttaatatagttattcatatttattactcttcttcttctcttaatgcttgttttagattgatcacatgttatttaatattacgaattgatagtttagttggtagacactcgtttgattcttgaactgagaataatacctaatgggattgattctagacatagttcaattttaattagactcccttaattcttaaacattaatgttagttatttagattgattttctaagacattaggaattaatctaaataacttagacttttcacctaaggcattatggttggaatataactgtgaattatggataaattgcgtgaattactagattgatcaggatttttgtattgaaaaa

SEQ ID NO: 20971 - DNA, 851 bp, Glycine max
  unsure (1)..(851): unsure at all n locations
tttgcacgtgagcactatgaaactacccttgacgtttgtgttgantgcactaaaggtaaacagaccaaaagcaagaaagtaggtgcatatagagttttttacatctcggaattgatacatacagacatttgtgggccatgttctacaccttcatggaatggccacaatttttatatcattctgacgatactctagatttcatacttgtttctattcataaaagtccatctttgatgtgtcaacatttaagttgagtgaaatcactcacaaaaataaggggtcaatctgccgtggtgggaaactatggcttatgaaggtcagggaccacgctgggcctatccagacctaagaaatgaattgcccacatacacatgccgagtcaccttcatgatggggggtgagaaccaacaacctttaggattggagaacatatttgctttactccctggcccctaggaaggcctaaatccctttacttttaatgaggcacccagggcgtcccaacactttgacttgggtgggcaaccctcttaacttccttgatggtgtccacggggaggcttataccagaagaaaggcccccccaaaatcctcttcttgtttataaatggcgcctattatcccaataaacatttcaaggaccacctttgtgatctctttggaaaatgtaactttttagagaatatcaccctcacgtcatgttttaaagaccaccctaatttttaccccccaaatgcggttaaaactacctcaacttgtcttcacttgtattaaaagtgtttcactttgttccatcaagattggggtgacgcccttcacggcgccttaagttgagagcgtgctcacatcct

SEQ ID NO: 20972 - DNA, 558 bp, Glycine max
agcttgaaggtgtgtagcccaccatcttttctatagtttaatactggtaatgtgtctactatcattgtcatcattttttttcgtcattgaggtgccacttaagctgccaggtctctccacctttgggcgtattctttgaaagatctgtgcccctttttgcacatgttctgttgttgcatcctatccggaaccatatccaaattgtgctaatactgcctaacgaaggcaaacattatgtccttccaagagtggactcgagaaggttccaggttggtgtaccaggtaatagctaccccagtaagattttcttggaaggaatgtatcagcaattcctcatcttttgcgtatgcccccatcttccgataatacatctttagatggttcttggggcaagtagtccccttgtacttgtcaaagttcagttccttgaacttgggagggatgacgatattgggttctagggacaactcttctaggttagcaatggccttaatttttacattcttcaatggccctggacctttcctctagatgatccaactttcctatttctgtcat

SEQ ID NO: 20973 - DNA, 1049 bp, Glycine max
  unsure (1)..(1049): unsure at all n locations
natgacgtcgtggacttcaatctaagcgttgtattatgttgttatggaggatgtgaatatctaaataatgacctagatatcttattatgtcatacctttaataagccctactttagtcgaaatgaagctatgattccgctaccgtagtggagctcagccctaagaccctgtacttagtgtaccttaacacctctaattcggcaattatgtcaccgttacccctatagtcctttaattacctccaaggtgagagctaaacaccttaatttaggccgagtgaacactaaaacccctaatatgggtcatgtgtagaactaaatccctaccgtaggtggtgtgagccctgattcgctgggttagtcaaagtgagactaaaaccctaaacccttattaggtaaatgactttggctgaaagaacgttagcgtcaataattatatatcgggtgctgcctacggtcttattactaatgtgatatgttgcacagtggatgcttaagtcaatacatagattatgaacgtctatgaaacaggcgcaattatcatattcgtgggctgtcttgagaaacccatggcgtttctttgatattgaacgaagagtggttaaacgtgaatactgtggatgtggtaatgtatctattttaggggaggcacggattcttggttaataaatgggctaacttgggaactcttggggtgagatggataggtttntaaacatttgtatctgaggccgtcgtatcgaagtttcgacaatgttaagaaagaatgaatgagtgttggtcttttcttgcaaatgatgttggttaaaacgtaccggaggtgggcgagatcgtgtggtggacggactatagacaagttgacttgagggattaaaaataggactttcttcgtggtgctgacattagatttgatgatcggtaagatgtaaagtggatgttatgtcggtatgtgggtcgactgttctggcgactaatgatggtatgtactagtggtcgttggattgatccgtctgaggacggttgtgatggatgtggctaataggttgaacg

SEQ ID NO: 20974 - DNA, 530 bp, Glycine max
caggcatgcaagcttataacttcaataactgtcctttatattagtcttgatcttcacattttttttgttattaatcatgtcatcgaatttttgtaagtttatattcttttcgatcaagcatcaaacataacattaatattgtgctctttagattaaaccaacttcaataaatcttttaaattcccatacttaaaaatttttacttgtaccactaacacaaactggaagcataatttaacctaccatcgtcaaccataacaaaattctacagtaaacaaaaatgtttactaaaatgggacgaaatgacttcaatttgttgatgggtatccattcttgtaaatgcaacctatcgaaatggaatgtagaggacaataagttcatcttgctattgggatcgttgagaaaattttcaaagcatagaaagttgttagaacaaaggatgacagtttgaaaaaaaaaagtttcaagtctcatatcgtttatgataaacacttgaatagtgtttcactctctatatatagagagctcat

SEQ ID NO: 20975 - DNA, 328 bp, Glycine max
taaatatttgaataaattaggctgtcaaatgccaaccacttacatgactgacaccctgcacatatcaactattcattaatattaggccaacagaagtcgtacacatataaacccttagttatcttatatatcaaaagtgccatacatcttagttgcactttatatcttacttaattatatacagatatattgctttcaatctttattgtcattctaacattgtcatatgatttatgtaaaatgtattacgtgataaaaaagaaatgcctttgtaaattgctatgacacttctttaattaaatataaaaaaaaaggcaacttttttcta

SEQ ID NO: 20976 - DNA, 284 bp, Glycine max
cacgcatgcaagctttctctaccgtaaaaaaacattgttttttctcttcttgtaaaaaaattgcgcaatgtcggctgaaaaatatcagttggggctatttaactaccgatgctggctactgttctttatattccacccgtgaataatacttggacgatgtcttattggaaatgttcgatcggagtcaaccggacatgctgaattatgagaacctcgatctgttgtcttctcctgtccgacggtaagctgtcgttttttttaattctatatctgccaaaaaatgc

SEQ ID NO: 20977 - DNA, 816 bp, Glycine max
  unsure (1)..(816): unsure at all n locations
tcagtgtcgtagacggacntatgaaactaagctttcagcagattaaacacaaaacttttactcgatgtctgaggattctttttattctatacccgaaatgaatgttgcgctcttagcaaattatacgacatcacctgtactcgatgtctattgaggccgtattcatcggacgctcaaatgattgtgagctttacatatctaacaaaataactttcctccgtgctgattgagccggaaatattgacgtctaatgatgttgagcggtacaattaaacggttacttgtacccggtttgatggtccgaaattcaaccctctaatgatgcgacctcgtacaattaccaaataacttttgtcgagttgacgagcggactttaaaggcttatgtgatgggactctgatgtgtagtaaatcttctctttgctgatgtcccgatctatacatcgcgatgatggtgaccttagcatacgaccactctaatgcctagttgaggccgatatgtatgattaggcactatgtcgccttcgatgacaacaagattttgtcagtgttagtgcgtctaagccgccgttatagagggggcgttaatcaacatgttatccagtcggcgactgctctcctgttgtcaccgccttgtgagacgatgtgcgtggtggtgatgctgaacgtacgtgatagtgagggtcgttacaagcagtatactggtgtggtcggaatacgtgcactgccgtattgtgaacgcggtatgccatcgactgttcactgatgtgtttcgaccgatagtcagtaatcgtgctgttctgtccgtggtctatcc

SEQ ID NO: 20978 - DNA, 623 bp, Glycine max
agcttgaggttaatctcaaagctatataaacataaccatgtaagagaattaccaagtatgccatacaaggatgatttactttgtgtggcatgtccaaagggaaaacaaatcaaaaactccttttcaagtaaaaacattatttccacctcaacacatctaaacttgttacatcttgatatgtttggtctagctagaacaacatccataagtggaaagaagtatgaacttgtcatagtggacgactactctagatgttgaattagagtgtttgaagatttgaagactagtcttaggatcttttgattttaataattttgcattgccaaacatatttctaaagttatggaatttttattggatgttcttagacttggcatgttgagtgttttaggctttttggttatcaaacatgagaagatataaaaagtttctaagaggcaataagttcaacactgtgtaatagattactgagtttaagtaatcaattacaaagtattagaacaagaaacaaaacttacctctcttgaaatattggcaagttttatcgaaataactgattactaaattttgtaatcaattaccacttattgaataaattaaatgcatctataacttatgagctc

SEQ ID NO: 20979 - DNA, 394 bp, Glycine max
  unsure (1)..(394): unsure at all n locations
ggtctttgccagtgaaaggatcgatgtgggtctgaaaagaggcatatntagtcatcctgcttggacaaatgagaaaactatggcaaatgaagagggtgaggatgcangagaagcccgtgctgtgactgccattcctatacagccaagtttcccaccaacccaacaatgtcattactcagccaataacaaaccttctccttacccaccgcccagctatccacaaaggccatccctaaaacaaccacaaagtctgtctaccgcacttccaatgatgaacatcacctntagcacaatccaaaaacaccaaccaagaaatgaattttgcagcaagaaatcctgtagaattcaccccaattccagtgtnctatgctgactngctcttatatctacttga

SEQ ID NO: 20980 - DNA, 626 bp, Glycine max
agcttaggtgtaacaaatatccatgctttattttgtttcaaatatccattgaagtaaagtgcaattaggtgtaacagatatccatgcaagaaattgtagtgtggggtacaaaccactgtatatttatcatatgattattaatgtgtactcttctaaattaactaatacagctaggataagtaccaacttggttactggaaatatattatttcgttattttatggagcacttattagtggcttgtacagggtacaacttttattttatatgtcacttgaaattgttatttgcatgtaactttacaaataaaactgaaattggttggataatgtagtgacatgactactgttgaagattatgataaggggagatgacttcccttcaaaatttgactgggttgatgttccatatatgtcttatctgttgactcgctctaaatctggacaaatattactcttcagtaactggagagaaacagggtgaatgatcttatatggttgatttgttctataattgaatctccaatttataattaaaattgagtcaagctctacagcatgattattcatctactcttaaaatatgtaattactggtgaccatacaatcaatattgaattttatttt

SEQ ID NO: 20981 - DNA, 324 bp, Glycine max
gcttccaccgaccatatggaataatactgtacacactgactagtgttctcatattaacttctactatgtagcacgcacataaagtaccatagtcatgtaaacccgtgtgtagtatatctgtatcactatattaaatactttattgattatagcatgtcactagtccactaataatacagattgtacattgcatgtgaggagctatgaaacatattacgtaaaaacatgaaatcctcatagagaaataatccgtacatgttgtagatatttctatttcatatatacatatatatacatatatatatctatatatatatatatata

SEQ ID NO: 20982 - DNA, 169 bp, Glycine max
agcttgtttttgggcaatagcacccctcccgtcgtccccaggtctcctgaccccacctggtgtagaagaagaatagaataagcatcgtggaaggagggaataattttattgaatttctgatttaatataatgattctgtcttttcaacgatatatcgatacatttctct

SEQ ID NO: 20983 - DNA, 339 bp, Glycine max
  unsure (1)..(339): unsure at all n locations
atgaagctctgataccacttgttagacaagtgggctctgatatcttaagaaggcgggttgaattaagatattacaaactatttccccaataaaaattctatttcactttctattcaagttacaaattcccttaacaatgaattccttaaataatgattcanatagaacaatttgaatataaatataaaaaaataatagataaaagaggttaagggaagagaaagtgaanactcagaattatactggctcggncacacncttgtgcctacgtccagtccccaagcaacccgctggagaagtccactatcttgtaaaatccttctacacgtgctgaacaca

SEQ ID NO: 20984 - DNA, 894 bp, Glycine max
  unsure (1)..(894): unsure at all n locations
tatgacctgtacaatcgcgnccngggataaacccagcgacccgganggcatgcgaactttttttgggcgaagagtttctacttgtgtttttatggagaggggagggggaattcnccaaacggtgtggaaaagaaattgtacccctccaccctgcttggtaaatgtgagtcattacaacagctcttttgcgaggtggttaggttttgcgccaatttccacccacgttcccatgaatacccttaacaggcgcagtggatatcacgaagactcacaggaacctagaaggtaatttttaatttctttatactcgaatactctccggccggactataaaacatattctcttgaataaaatctttagaagaaaacttattttgaaaaatgtccgtacgcaagaacattaaataaacttggattcgtccctccctgaaaaaaccaaggctcctttaaattaaaccaaacaaattggattttggccacaatatatattttggggattatagggaacaggggtgggggtaaaaaaaaaaataaaaacaaaatattgtgggcccaattcccccccactttggggatttggtgtggggcacctcctttgggggggcgttgaaacattactattgaatcctccacaccttatgtttacgccccgttggttggaatttcataaaaaatatattatcacccacctcctttctaggcgggggacaaaattatgtggtggcatacttaattgggaagggggtctacctcccccagagaaaaaatgggagggaaaataaaatgtgtgggccaattaaacaccctggttattatcggactgacacccccccatagttatatgtcacatcgcggaggagggagaaacaactcctcacctcccgaatgtgtact

SEQ ID NO: 20985 - DNA, 877 bp, Glycine max
  unsure (1)..(877): unsure at all n locations
agtggacactgacgncgctgtagggacctatgaaactaagcttctatccaggccattcttggggtgaagctcttctttatggatattcccttgggatggtgcctccnttcctctggtctttccttttgctacatctcatggtggaaataccattgaaggacctattgagcttaagatccaccttcatgaagctccacaggcaatatatatatatcatatatatatatatatatatatatatatatatatatatatatatatatatatatatatatatatatatatcacgaaaatgaaatactactacttaaacacaactcacgtatttccaccacttattcgcgtaacattacatctcaccacaatatgatgcaatcctacccacacgggctttggataaagactccacgtgattgggcccagatgcaaaaaatactctatggtctcagagccttaggagattcacgccatggctaattgatccactatcttgtcatatataaaagcttatattttggccgtgatttggcctataaaagcggggcctaaaagactctgtttaggccctgatagttttattgggagttgcattccatgccaaggaattgagggggggaaaaattaatagtggagaccgccataattttcggggggggagtttatatccgatcgcgttttttatttcgatagatcagtgacggcgttatcgtcaccgttatatatactgtcgtatgagtccatcgttaccaaagattaagatgttgacgatgttgcttatgatcaacaacgatagtattcacgtcaatatcatcgtgatcttcaatctttacattatctgatggtcgatcacgatcggcatactcactaaggcgatggt

SEQ ID NO: 20986 - DNA, 563 bp, Glycine max
  unsure (1)..(563): unsure at all n locations
agcttgaaggtgtgtaacccaccatcttctcttagtagaacaccagtaacatgtctactatcatttttatcatctccctttttgtcattgggggtgccacttgggctgccagatccctccacctttgggcgtattctttgaaagattcgtgccctttcttgcacatgctctatagttgcatcctatctggagccatatcagaattgtactgatactgcctaacgaaggcaaccattaggtccttccaagaatggactcgggaaggttccaagttagtataccaggtgatagctaccccagtaagactttcttggaagaaatgcatcaacattttctcatcttttgcgtacgcccccatcttccgacaatacatttttaggtgattcttgggacaagtagtccccttgtacttgtcanagtccggcaccttgaacttgggagggatgatgacgttgggtactaggaacaactcttttaggctagcacaggcatagtctttgcccccttcaatggccctgagcctttcctctagatggtccatcctttcctttttccgtatacca

SEQ ID NO: 20987 - DNA, 918 bp, Glycine max
  unsure (1)..(918): unsure at all n locations
gatattatgacatatatgttccaacatgaaggggagtgtngaaatatgcttttatatatgatnganntatgctntaanttgnatattntgaaaatntangggattttccctcttntatttaattcactatatttgggggttccntgtatattgtatcccacttctaaaatatacataaanggcatttgtgtgtggtgaataacacancatacngctaaatttctctcttacgcanatcaatatattngtntaaaagtagatacttacatactatacaatcatcttactttcaaaagaaacttagacttaacttgccatatataggggtgttcatgggttcatgtaacccgtgtacccaacttgacccaatcaatttgtgatgggtattttaaggtttgcaatatattaaaataanaattatattaaatattaaacagagtagtgagtttttttttataaacatgtagaaattccaattatttgtgagatgacaatttactgatgcaccgtatatctaaatattaagtgaaattaattttttatatgctaattgaaattttgccccctaattttcaattcatgaattggtcccatttatcagtgaacattgatctctaattataattgacattgcccttctaatatactaaaatggttaatagctaaataatttataaataactttaccttaaaactttaagatatccctccttgttgtctgggtccagggatgaagacacaaacccacccactattcgcatgataacgactccctacctttctctcctaacttaaatccttctaatgtatgatcgcccattattcatcaaaatttattttcctacacataagctttaatatcgattcatatctacacgcactgtctaaatcaatatgacatcattcttcttctattcc

SEQ ID NO: 20988 - DNA, 801 bp, Glycine max
tactagctatgtagcaaccgcgatccttagagtgacctgcaggcatgccaggcctggaggtaaacataaaggcctgggttactcggttaccccaactggccaggaataaaaaatctggacccggtcgccaaaactctggggcttatgtacccatcctaacaaacaacattggaaaattgtgcctttgtgccgaatcccccctatctcttatgcaacccctcttagggtggtggattacccagtattccacaatctccatagttagtgcctctatgtttaacatgaatacacctcttacccaacatataaaacacatctcttgattcacactttataaaacaccgtatcttaataagttcgttcctagaacattaccatacttggaatatttgcctcctggaaaaacacaatgctctctagaaaaaaccaccaacctgatcttgcccaaatatttttttgctggtattcgccaggcgtgggtgatcaaataacccaaccaacgttggtcccaatccactcaccttcgaacgtttcgggcaccccttttggggcttgtattcctctttccaacacccacctactgtattaccctatcgtatcttgtctagattatttatctaccgaccctcgctgggaaacaaattcaagtaggttctcaccccaccactgtacgattccaagcgtcgaaatcgcctcgccagaatcttagcgtccacatataacactctctcccatcattatactccttcttatacaggcatagatagcattgggctaaacgtttccactctaaacaattgc

SEQ ID NO: 20989 - DNA, 996 bp, Glycine max
  unsure (1)..(996): unsure at all n locations
agttgtgagcctctctacgagattgctcacgcgaatacacaattaacatcaaccgctccccnnnccccnggggtgttgccctgatgccattaagngaccngagacgagaggccaacattgatctatctgcaagaggggggatttttttataatggttcccacaggcccgacggctggaggaggagccttcccacgaaaactgggcaaaatccacataaagagtcattgcgtgtaaagatacgcgtccctgaggcccacacgccagcaagaaaacgcatcattcacgtctacgcccattgcgtagtgagctaagaatacgatagcggagcacgcatccacaaagaaaaaaacaaactttttggttcaagcacccaagtcgtactgacgcggatacgacgtgcctacgactaagagaggccctcctcccagacgttgggagaagagaccaagggaggacgtcatgagcgacaagaatcccgcggggcgttggacctacgaggcagtacagcgtcggcgaatgaagcacgacaatgttgacgacaaaaaaggggacatatgaggacgccgttaggcctagacgacgtggctcattagacacgatcttttatacagaccatctaacagtaagcagggatgaggatagtgaacgacaacaatcgtaggcggagtagaaccagacacgttggcaagccttctacaaataccgaggggggtggacgacgatcactcacgcccgagaacgaagatcaacccttaatgaacgtacatttaacaaagaaagtggattgtcgtatggtcgatcgatggataacacggacgccgaatgtacacgtctattgaccaaccgataaacgaacagtacgaggctcacgatggaccgaactatacagagatgtgatcaaacaatagccacattcactgaaccaatagcgccgagcgttgcaacgaatggtgcgatatgaagtggccagacgaacgtatcattcgcgagactcc

SEQ ID NO: 20990 - DNA, 620 bp, Glycine max
agcttggttttgggcaataacaccctacctgacgttcccaaggtctcctgacccctgcgacatatctccaggtaccactctgtggtcaacaaacaaaagtaggaagactgactcttccacgctttctcacatcaagcttgttggattatggggtacccgtcatatatggtactaggtggcgatcgggcgatggtgcaaatcaactctcccacatccacatatcaaacatgaacccaccatccctagttgcccaccttcaactgagctcacgtactcctacgtagcccttatcctcgttcctctcagcaccgcatctctggttccagtccctcgcgtttctctgcacccgtcggggcccgttttcgatagtaggcaatatatatatatatatcataacgctcagaatgaaaccctgagggtggttcagaggttggttttgttaaatttttagttgcacgcaaaacgataaattttagactaattaattgagaattaatctataactgtccagtatggatttctctttgttaataacctaacccgcgtatttttcccccaatggacatacttttaccgggagtatatatattatcattgaataatacctatatatataatta

SEQ ID NO: 20991 - DNA, 179 bp, Glycine max
  unsure (1)..(179): unsure at all n locations
atgtgatatgatattttttagtatntacatttacttatcactatgtatttctttcaggatagatacgacatgtatgttctacatttttccttatatagtgttaactgctaaggaagctaagctatcttatntctatatagatctaaaaattctagcactgatatccagaattcattatg

SEQ ID NO: 20992 - DNA, 537 bp, Glycine max
agcttgccgccacggagttttccgactatgctcttgtgttgtggaacaagctacaaaaggagagagcaagaaatgaagagccaatggttgatacatggacggagatgaaaaagatcatgaggaagcgatatgtgccagctagttactcaagggacttgaaattcaagctctaaaaactaacccaaggcaacaagggggttgaggagtatttcaaggaaatggatgtgctcatgattcaagcaaatattgaagaagatgaggaggtaactatggctcgatttcttaatggattgactaatgatatccgggatattgatgagctgcaggagtttgtagaaatggatgatttgcttcacaaagcaatccaagtagaaaaacaattaataaggaggggagtggctaaaaggagttttaccaactttggttcttttaattggaaagacaaaggtaagaaagatggggctgctacttctaatagatccacacctaccccatacaaaattcgtttcaagtgcctaaagggaccctttaaaagga

SEQ ID NO: 20993 - DNA, 936 bp, Glycine max
  unsure (1)..(936): unsure at all n locations
ttgcctcgtgtgcctcttaatctcncgctcggtgntnttncccgtcctgatgggtaccatgaggtgtncgctggggtgtgacccatgcgggtgttgtatatacggcatgggcatctcctttctttctttatgccctggtgcccgattttttggcgtcacgttgcggacgccccctactaaactattctttcttcatccaaccttcggttttttcccggcagacaccatatccgcaatcttggacgaatgaaccccctagcttttatagtttacactggctgagggctaccatcttgtgacatcttctctcaccctggatgagctcctggccgccaatacttcatgctggcatatctttaaaggttcaccctggtgctaacaagttctgcgttgagacggcaggagcctttcagaattgactgatctgcctatgaagtngttnttaatccttcaagtcggatcggaagcatcaaatattgtccacactacgcgcttctgcaactatctgaaaaagtgtttgcacctttcgtttagatgacgcccttcaccgagacatgttggaggctttggacagattcctttctctgcgaagtccgacgttgaattccgggactcaccagcgtctaacaagaacctcgtgtcgtcaacgatagcccaatcctccagccctaacttctcgagaagcagtgctcttctatgtgcgggcgtctttctaacaactttggagcccacattgttggaacttcgttcagccatcggacggagtaatctctcccccctacttgtgctttgaccatggacgcacggatttatgacgaagcagtgccttcactttaacgaatagtggtcatatgaccctctgtcctacgtgtaatccgtcgtctctcccatttcagatctggtgcccgattgctccacgtctggatggctctatcg

SEQ ID NO: 20994 - DNA, 373 bp, Glycine max
agcttgtcgagtccaagtaggacatatgctttcttttctttgaagctgggtgtaagagctttgattcaagaataatctctagcttcgctatctatcagccgagtgttggtctgatcgtaggcaaattcgagaaaggtgtcctctttcactaagctttccacttagttgtaaaatgggttttaatcagttagcgtcaagttctagtggcaagacacttgaagcatcatattgtcaattgttacgtccatttcaaatgtattcaatggcttcacatgttttcaaaaaaggcaaaatgattactcgctttgaatttctaaatgtcattgggaatgccaaaagtgaaatctctccccaatcatggaaacatggctct

SEQ ID NO: 20995 - DNA, 633 bp, Glycine max
  unsure (1)..(633): unsure at all n locations
agcttcaaaccacaacaacacaaaatctaggtatccaaaacccctcaatttaatggattttcaagttttgagaagtgaaattgggaatgggataaatttggagcaaactctcacctcacacaagtctataacatcaatttaaacttgttcaaactggatttacacctaaaatttcactgaatcaaaatttgactcctcaacccccaattttaccctagaaatggctctttgttcagtttggtcatttgtttttctctttagcacagcccaaactttctcataagtcctaaatgacatttcaagctaggattaactcactttaacctccaaataccactaaatccagatttggccttccaactctaaaaaattcactctttttccactcataacaccataatctcaccttctaacccttggttaattctacccttcatctctaacagttttccataagcaatttcagcacacaaacatcactagcatcatcataaaaaccctaaaactgaatgggttagcttgactcatccaaacatggcangttcaacatgctttcaacatatttcttcacaaacaactatcatgaagcagaaacctagcaaaactacccatcatatcttcccaaaccccata

SEQ ID NO: 20996 - DNA, 961 bp, Glycine max
  unsure (1)..(961): unsure at all n locations
gtgtgcctcatgcccgcccactcagctctaagttaactgatgangaggaattcgtggctacttcatgcactcctctaatgacaatatcatcatttctggcactaaattgctgggagttggatgtcatcttctcaaataaaattctggctttaacaagggtcatgtctccaaaggctccaccactggcagcatcaatcatacttcttcttcatgttactaaagtccttataaaaacaattgagaagaaattgcttaaaaatcttgtggtgagggcaactggcgcataattttgaatttttcccagtatcatataggctttctccactgagttgcctgatgcctgaaatatccttctgattgcagtggtcctataagcaggaaaaaattctcttagaacactctctttatgtcatcccanctcggactgaccttggagcaaggagtatagccatcttttgcactccctcaaagatgatgaacgcttcataagatgtatctcttgacatctggagttcatggtgacgaacatatggattcttcaatgttataaggcttacctgaaacatgacctggcactaatgatattccatttagacctatggcatctctcaggtatgaatcccaccttcttatgaaaatggcgacattccttaagccctccgaggggggtggcctatttacatgtcacatacaagctcaatacgatgtcaacgcgggttcaattcacccccaagcctacttccctcctatgcctgttttaaagcaaagtccgtttcaaagcccttcccatatcttaatctttttcagacaagttctgtcctgatcctactccatctcacgtattgttacacgaaagaggtgaattctcctcatttcataaatttgcgcctattcagatttaatttaaatcggttttgtcctaaatttctcattaacataaccacttctctgactaccgccg

SEQ ID NO: 20997 - DNA, 493 bp, Glycine max
agctttatagcgcgggtctgggagattatttgtaagcgttcgcgatatgcgaggatgatattccgagtactttggatttggtacgaccatgccctcctgatttccagctgggaaattggcgagtggaggaacgccccggcatttacgcaacgagcataatgtaaacctttacggttttaaaagctctatagttgggcctaggctttagagtttttccttttgttaaggctttgtgtcttttgtttttgaatttataatacaaggatctttcttcatctgttcctggtctctacccattctcattcatttgcatgtttacttctttttctgaaacggcagatccggtgacgagtcccccgaaggtacttatacctgggacccgcctatcgacttttagcgagaaatgaatcaaaccgaagatgaaggagatgaggatgtgggactttccccacaactagaaagaatggtcgcccatgaggaccaagaaacgggg

SEQ ID NO: 20998 - DNA, 89 bp, Glycine max
acacatatctgatcatcatcaaacatcaagccatgcactacacatggtcctccccttcagatggagctttttacgatgctagtgcgacc

SEQ ID NO: 20999 - DNA, 323 bp, Glycine max
agcttgcttctacagtttacaccacattcttatttacatgtgttgggtaccatgatgatagctataaacaaaccatgttgggattgcactcatttcttttaaaaaatgattgaaaatcatgtgaacatggtacctaatgcattgttaaccaggaaatgatggttcttctagcgtctcatgtcgatctcataattacatttgtcatgcataacataagtatgccctagacgctcatctctatgatatgttgccgaagtattgacaaataaaatttctattccttggattatggggtcgaaccaagcacatgcttttaataaaag

SEQ ID NO: 21000 - DNA, 231 bp, Glycine max
ctagtatgtcatgcaggatgtgtctgtttttattgatagtgtctgcctctcatcaataagaccagatatcacttgtctcaatctatttgctcataacttagctatcagcttgtacatacatcccatcaaggagaatggtctgtagtcatcaaatgactggcgatgtttagttttgggaattagagctatgaaagaagcataactgcttctaggtagctgtcatgcacatgg

SEQ ID NO: 21001 - DNA, 577 bp, Glycine max
agcttaatctcctccaactgcacaaggttcttattatttgaagagtatccttgtggaaccttcacccgaagaagacactgacaaaaacttatcttctcctttttggacaaagtatggcaagctgggggcaagtaaattttcttcccatcagaccttggatgcaactgtgatcgtatgcccatataagctagatcttgacgagtattcaagccatccttcgtcttgccttgaatgttaaggagcgtcccaatcacactgtcacaaacatttttctccatatgcataacatcaatacaatgtctaacgtcaagatcagaccagtacggaagatcaaagaaaatgaacctcttcttccataagcaaatcttacttttatccttcttttgggtctttccaaatacagtattcaggtgttgaacccgctgatataccttctcaccagtcaatggtatcggcacaatatcgtgctcttgacttccattaaaagccttttttagtcgtctgtaaggatgattgggtgttagaaaacggtgatgcctactatagactattattcttccatgttatagttgtatgt

SEQ ID NO: 21002 - DNA, 593 bp, Glycine max
  unsure (1)..(593): unsure at all n locations
aaaaaaaatcaatactaagactaaccatcagcatatttagcattaaactnttcataaatttagtatcttcattcaaccatcaaacgtattagagaaaagaagaatgatattttacctccaccttttccattttcataccggaaaagttagaacttttagataccttaggaatgacatcattagagtcttcaatgtattctccctcttcccaacatatcaagtcatataaaacctcaacttccgcagtgattgttgtatatcaccttggagatcctttgctaattaacaacccctgtaagctcagagggttgcacttaattctaattgagtgacctttataccctgagaatattagtaattggaaggatattttatatcatatctcctctattatattaaaattaagacagatgattaattatatctattattgaacanatctcctctttaaaatattaaagttattgagcattctatgacacctttctttatttaatttatcactattgttttaaagtattaagaatatatatatttagtgagatatctttatttaataaatataatattatgatatatagtattaacattat

SEQ ID NO: 21003 - DNA, 494 bp, Glycine max
tagcttgcagacaataaaatcaaacgcttctcttattttgagctacttttgtttgttacaataaactaaaaaaaatatacttttgtttgtttgttctaagggtcacatataaaaaaaataaattcaagggtcattacctaaattatttgacttaagataggtctatatacaaagaaaatgaatgttatcaataacatccttcatttacatcatgtatacaatgatatctcctatattttactcaaattacccaaaaactcttttgatttgcttaataccatttctgtgacacccacacccatatcgatgtcatatttatttttgaaaattgaaaccaagaattacccttgattacatgcacatatgcccttctcacgattgttataacattacatacttagccccatgatgttcacacattacgtctaaacaccctttattgtatcatatatggttttttaattgtaaatgccaaaaccctcactttggtcttc

SEQ ID NO: 21004 - DNA, 983 bp, Glycine max
  unsure (1)..(983): unsure at all n locations
ntcctttaattgagatcattacaacttctctcctaaattgcaagtcccacgcatgctcgtcaatattgaggaagaagacaacttcatcttcaagcatatagttattttcagacaggaactggaaatcatggttccgccagggatggagaccatcatggatggtgatctgccactgggtacatctactcttaaccacacgtggaacagaaanatatttttttgagcccaacacaataattttaaacaccttgctggaagaacttgccaccgaattttaacgcccattgaacgacacaggttctacataatacgagaatataagacacctatttggctaataactttgcttgactatgtttaagataagatgggcctagaacaacaaccaacataatagagcgggtggagactctccacaacgcatgatggggtgaacattcttggtggggctccaaagtaaagaaagccttcgtgtggtaccccaccactcccttaggtggtcccggatgggcgccccgcagtaacctacacaaaggagtaatttcgcgagcgaaaaaagcagaaacacctcctgtatatggcgggcgttctccccctcatacacacacaacaaaaggtgccttatatgtcctccaaaagaggcgcctcgattgtaacaaaaacaataggtgaatctgcgccgccttgtgaaaaacagcccacaattttgntcgacgatagacaaataaaaattctttctttcgacaataagaagaatactacgttaagtcgaccctcaccgatacgcttaaagtagtggtcgaccggagagcggacgacatatctcacttgataagaacaaggggatattatatcagatcactcctccccggctcagaatatgcatcgtttggacggtagtccgacccaaagcactttctagtgcatcttatactcgaagtgaacaacaaaactactcccgcgcaacggatgaaggccctatt

SEQ ID NO: 21005 - DNA, 1023 bp, Glycine max
  unsure (1)..(1023): unsure at all n locations
ccacccccgcgaggctgtgcctcaccctccacccaactaaaaccgaactgacangatataaaatataacaaaanncaaaagannaaaagggtatgatcatgcatgacgagcngcgnaaanagaacgaccgcagcagcagccccccgaaagagagcggagatttgtgactcccctacacacacctcactaaaaactaagcgaaccccccctgagaagagaagccagagcggtatctaccacacccccccataacagctaagcctcacccttcctgcccaaactacacgaagaagacacaaaaaaaccaaggcccctcactgcaaaagaacaacctcacaaatcgccgcctgggatcacacagaaccaacaacccctcagtactcactgatcacgggcgcaaggaaaacaacgccccgaaacgaataaaacaacccaatatcaaaattccacaaacgaagagggggacgccgaccccgcggggcgatgggcgccaaaacaaaccaacccacaaggcgcatggagaacccaggagggcacctcgctcaaccacaacaaccccccaaacgtggcggaggcgtaataagcaacaaaacacgagagggggagcggcgaggaaagcacacgcagcccgcaccaaaaagggacgcgcctcaccgcgagaccaacgcgcgggcaaagcggcagcgacgaaactatgagaaacgacaacggaccagaaggaggggagcccgcgcgccatcaacgaaacggagaggggcgcgaagcggcatgcaaacacaatgtgcgcgacgcccatggaaaccgccacgcagcgcgaacgcgaagacgatagcgcacctgatctcgcaacccacgacacacgccacaccggacgaccttcaacaaagaacacgaacagcacactcggagccgggaccaggcacgacatacccatgcggcctagcgcgacagagaatatgcacacacggacgccgcaaacggaaacacgcgcaccacaccgacagaagatcgcgtataacccgg

SEQ ID NO: 21006 - DNA, 951 bp, Glycine max
  unsure (1)..(951): unsure at all n locations
nagttatttaaagcggaagtgaacgngaccctatnnantactcaagcgtctctctgagcaaagcanaagctngctcttgtnttcaccccaggtaatgccactatcttcttcaccagctcattgagaggtgatgcaattgtagagaaattacgaacaaccttctatagaagcttgctaacccatggaagctcctaatatctnccacacttttttgggtgggccattcttggatggccttgatttctcacggccacttggaccccatttctaccatctacaaagcctagaaaactatcttattcttccaaaggtacactctctatatatgctatatggcgttttccttagactgaacactcttctgcagtctcggtatatattggtatctttaataaactttgtgtatcatcgccccttactgaaatcactcggacaatacctacctcattactctatggatatatgcctcaagcatacttctttcaacaatcgaaccattccgtaatcagatattctcacactccctcatcacgatcgtatgcatcacacgatcttacataccaagcgtgtctccctaataacgacaataacatgttcttgtacgcactctcttatcaactccattatactgccctcaccctcataccctctacactaacgtagcgcctattgcagcgcgatcgatcactactcatttgacttctccatttcatcatatccacgtatatttccattactcattaacgttctcactctccctcgcctacacgctataatccaattctacaacatctataccacactacacctaatccatactgttatcaagcaactcgctccatctaatattattcgctctatatttgtcgtctacatgtcatactcatcttccctctctccctacgtctaaatcacccgcactatacgacatcctatattctatctacaacg

SEQ ID NO: 21007 - DNA, 350 bp, Glycine max
agcttcaagcaaagcttcaacctttgtccattatttctgccccaaatcgtgaaaggagagcatttttggagtcgtgaagtgcgtggctacgagtgggacttctaaatttcaggtttgggtggacttctttccctcttgattttcgtgggtatggggttttgggagatatgaggggtagttttgttagttttctgttgtgtgatgattatttgtgaagacatttgttgaaagcttgtcgaaattgccatgtttgggtgagttagacatacccattctgttttagggtttttgtgatgatgtttgtgatgtttatatgctgaaattgctgatggaaatctgttataaatgaa

SEQ ID NO: 21008 - DNA, 425 bp, Glycine max
  unsure (1)..(425): unsure at all n locations
ctaagctttagtttgatgcaggaaacatagctatgtctaaaatctgaatttggttttaaaagtagaaaggcatgaaagttaggatatgcttgtgagagnntctttgcccgaatctgcgctgccccataaggcgtactttgcacctacgtagcatggaaaatacctttcaatggtatgtaaatatgtgtgtaaatatatgtagcatggaaaacacctctcaatggtgtgtatatatgtgaatatatggcatanaactccttgcaaagtgtgaatgagtagcagaaaaatgtctctcaacatatgcgtatttgaggataggtagcattaggagctttctatatatgtacccatgtcaaaaagggcctangacgcttccaaaatgaatatatgatggcctcgaatttccttttcaaatgcaagtatgt

SEQ ID NO: 21009 - DNA, 511 bp, Glycine max
agctttgaccaaaatcaaacgacaacaactttttactcggatgtcggaatgaatactgtattatatcgagacgctcgaaattgacaatatatcgagacgctcgtaattgaaaccaaatgctcgaagcaaattcaaacgacaataactttttactcggatgttcgaatgaatcccataatatatcaagacgctcgtatttgaaaacataagctctaagcatattctaatgataataactttttactcggatgtcggattgagtcccgtaatatatcgagacgcccgtaattgaaaacggatgctcgtagcaaattcaaatgacaatatcgagatgctcgaaattgagcaatggaagctcttgagcaattcaaatggtcataacttttatttcggaggtccgattgaggcgcataatatatcgagacgctcgaaattgaacaatggaagctcttgagcaaatcaaatggtcataacttttcactcggatgtccgattcagggcacataatata

SEQ ID NO: 21010 - DNA, 325 bp, Glycine max
  unsure (1)..(325): unsure at all n locations
tcattgcctaacaagccaacttacaacagcaagccccaagagactcagcataaggatgcacaggtcaaagttgagtatgtgaanagaatgtatgaccaagtgaaggtgcaaattgcaaagaagaatgaaagttatactaagcaagccaacaagaaaaggaaggaagtggtacttgaacccggtgatgatcctggacatttgaggacaaatgttttccaagaaggagggaatgatgagaatcatgaaacaggccaaatacagtctaaaggcccaagtggagaatgacgaatgcccaagtggagaaggacaaagcccccgagtggag

SEQ ID NO: 21011 - DNA, 145 bp, Glycine max
agcttaggacaaggttcgatatattttaatttttatccaaacaaaacggtaagactaatggatagaaacattcttgactctcttgatataaacttccactttcatggtcttgacatgaacgaatgagcgggccacacctaccttt

SEQ ID NO: 21012 - DNA, 93 bp, Glycine max
aaataaaaaatttatattaaaaagatattatgaaaaaattccatccaaatttacctacctacaattttgggaaaatgaaccgcaaaattatga

SEQ ID NO: 21013 - DNA, 511 bp, Glycine max
  unsure (1)..(511): unsure at all n locations
agcttgagatgaggaagtgttgaagggtgaaactttctgcttttattgtcgaccacagagtggtacctggagatatgtccgggggtcaggagaccttggggacgtcaggtggggtgctattgcccaaaaccaagcttgaccaatcccgacccatctcgggcataatcagtcagtgagaacctgtgatgtacctaagcaggcgagctcctggcagtcaacagataaaaggaaaacaagaccacaaagcaaggaggcttgtggtggctggccagctgtgaattttgtgtaatatgtggattgtggcctctggtaatcgataactaagggtgggtaatcgaatacaaagcttaaaattgaagacaggaggctaagatggtctctggtaatcgattaccaaggggtgtaatcgattaccacgcttgaaaaccaagtcaggaaacataaggagcctctggtaatcgattaccagcctgtgtaatcgattacaccnaggaatgggtcactggtaatc

SEQ ID NO: 21014 - DNA, 258 bp, Glycine max
tccttatactgctcacaaacagggtgatgatgaaaaattttattcacaacaagaaataacagagtttgtaatactaatactatatagagaatttctatattatattacttacagatgctcacgtgcataaagcagccagtgatacacatggtactataacacctatctcgacctgcggatatcttactatctaaggggagaaatattttgtcaaaacggctaacaattctatgatattattctgattattgatttatc

SEQ ID NO: 21015 - DNA, 563 bp, Glycine max
agcttgagatgaggaagtgttgaagggtgaagcttcctgcttttattgttgaccacagagtggtacctggagatatgtcgcgggggtcatgagaccttggggacgtcaggtggggtgctattgcccaaaaccaagcttgaccaatcccgacccaacccgggcatattctgtcagtgagaacctgtgatgtacctaagcaggcgagctcctggcagtcaacagataaaaggaaaacaataccacaaagctaggaggcttgtggtggctggccagctgtgaattttgtgtaatatgtgagatatggcctctggtaatcgattaccaagggtgggtaatcgattacaaggcttaaaaatgaagacagggggctaagatggtctctggtaatctattaccatgggatgtaatctattaccaggcttgaaaacgaggtcaagaagcctctggtaatcgatcaccaaggggtgtaatcgattaccaggcttaaaaagggaactgggagttgatggaagcctctggtaatcgattacaacctgtgtatctattaccagagggatggggca

SEQ ID NO: 21016 - DNA, 974 bp, Glycine max
  unsure (1)..(974): unsure at all n locations
nggtagtaccatcgatggacactatcgaatactcaacgctttgcngaatntggggtcttcgcncagtgaaagagatcaantgggtgggtccgaagaagagcgcaatattttgtattcatnttatctatngtacgaactgannnaaatctggnggcaanatgtaagatggctgagaaaggagggtagaagacccatgcttgtgacctgccatatcctataccgggcaaagttttccaccaacccaacaatgttattacttaagcaataacaaaaccttctccttacccaccacccagttatccacaaaggccattccttaagtaaccacaaagcctgtctatcgcacttccaatgaccaagaccacctttagcacaaacgataaaaacaccaacaaaaaggaattttgcagcataaaccctgtatggtcaccccaaattcggtgtctatgctaacttgatccatatcactcataattaatggtagcataacccaccaaggttctcacctcattttctgngatacaactcaacgcacgtggctatatggagaccccgggatccatgacatgatgacctcgacataatggaactattgatcgctggtgaattgagaaattgctgtaatctacatgaaacacacatcatgggaatctggagcgggatactatagatttagtttgcctacccagacatgtatgaaggtaatggctcttgtcttatcttacacacattgctatcactcaccgatggtgaccttgttgtgctacaaaaatggcaccgctccaagtactcacaggtaataatattgctccttggtgggtttaaacatgatacaacgatatttataaaataatcgatatataatgctaatatcggttacacaaataatctgcaccattgcttaaaggaagctactagtggccagcgctccttaaaagggttataccaatccatatatctttgataaatctacg

SEQ ID NO: 21017 - DNA, 549 bp, Glycine max
tgcaagcttgatttgtgagttgattttagctttagtttctctttggttattagtcaattcattcaaggaaatctccaaagaaaagcgtctgattttttttattattttattcaaagatattttgattattttattattattttgccttttttctatttaaccgaggttacaatgtgaacgatcggttggattttattttaatagtgattaaacgagattacaacacaaatgatcggttgaaattcattttatcatttattaggtgaggtaacgacttacataaacggttaaagcacgttaaaagggggtacgaaaacaaacataatgaaaacaaaagtgcgcaaaacaagtagggactactaagggtgcatagaatgaattgaaagattcgatttcgggaacttaccaattgaagaccaaagaacgatgaagaacgaacgaacaacgatgaagaatctccacgatatcgtttacggaaacgtctcacaactcactaatttcgagagagttctcaaatcttggagggctgaacattttgctctgcctttt

SEQ ID NO: 21018 - DNA, 960 bp, Glycine max
aatgtacgtcgatggacttcaatctaagcttagaccgctctgttgacccgaatgacgttatacttatttcggacaagtgtgattatgttttataacgaagggaatgtgagccttttatccccttgtgagggcttgtatttaaaaaggtttataaaatacttttcacttatttcttgaattctatatcctttttaatatatatgcgaatgggagatgatgtttcacccagtcaatattcccctttttcaaatgccctcgatatggcttaacttgggatctagtaggtgatggctttcctgagtcaggacggttttgtagtgttgtaaatgtttagaacaagcactcacatatgctttaataatcccaatggggacccgcaaattgcttgttatgttctactttccctggcccctttataatttgtcgattgggatggaagtgtaaagtctgtctgaatgatgaaaacaatatcttctcgtatgtcgcccgtatgggtagcggtaccggtcgaatattcagtgattctcctactatagttcattaacatttgtgttacagacctcggctgcatcagtctattgaacgcgggtatgacgactcactgctattctgaaatggaaacacgcttcggttcctatcgtttgggtagaatgtgggggcgactacgtttgctgttgcaatctgttggcttcttttcatgtcctttgtccggcgattcaccgcgaagtgactgcgcgactgcatcaggtcgttctttggatactacgttgtcctatatggatctcgatctattatctgtgtcgaccactcctcgtttatgtaattgcttcacaatctatctttgtgcggtattatagcgtcctctacagtaatttttagatcgtccatgcattatcgatcttctagactcatccttccaatgcagtctgtacttaacattggttgactataacataaccg

SEQ ID NO: 21019 - DNA, 199 bp, Glycine max
gcttctatataagctgaaccattttatcaattaacagactctgagttttatacagaaaagtagagtttatctcttttatcttagtgagagcgactcttctaaattcttgagtgattcaagaacaccttggctgtatcaaaggactttcacaacctttgtgcgttgcccttgccgcaaagagagattcatttcttccttt

SEQ ID NO: 21020 - DNA, 510 bp, Glycine max
agcttggagtcgctccaacaatttatatacttatctcctacctccttagccaatcttaggtgggctaaaagggtttcatactcaactttattattcgtcatctcaaactcgaaccttagggattgctctatgattacttcacctatgctttctaggatgactccagccctactcccttttttcattggatgaaccatctacgtatagcttccacctctcagattatggttctgtagtggttgtcattttggctatgaagtttgctaggcactacgccttcattggacctattggctcatatttaagcctaaacttggacaacttgatcgatcaggctatcattcgactcgtgagttctggtttcttcataactgttcagatagggtggtcagttcaaaccacaatctaatgactttggtaagaaagatgggcttagtctccctacaattgtgactagagcccaaggctaacttttcattatttgatatcatggctctgcattttttagga

SEQ ID NO: 21021 - DNA, 390 bp, Glycine max
aacaaactgagttgagcccggccttaaaccgggtaaaccatatgcctctaacaggcgatccgacctacttccacccctatatggtcatttttaagagctaatccagactcaattgggtataatgtatttttgttatgaaaatttagaataagtttataatcatataaatatttttttaaattgttaacctataaccacactaacctctagattggtttcgatgttcaaaattgatatacattttaatggacgaagtaattctgaattatctatgataatctagataatattttatctaaaatcaaacaaacagatcattatgttcataagatattgtaacaatgacccacacccacactgcccacactgctgattggattatctctgact

SEQ ID NO: 21022 - DNA, 526 bp, Glycine max
agcttaaaagggagagaaaaaaaagaatctattgattacacatgagaccaaaaaaatgcctatgagaattaagagaatttcatcactcttgttacctttctggatcccacgaattatcaaaacacacccatcttgatggaagaagcgcacttgctggcaatttgcaccacttgatacaatcttcacattgagcccactggatcttttcactggcacaaataaagatcattgctggcaattaatttacatacataaattaattaaaaaatatcatcagtctaaatgagaaattaatgtgtttcttgtgaacttggtaatgagacatgcacaacaataaaaagtatatagataacacccctcagaaagtacaagaaacaaccaagtcaatcaaccaccgtataatattggttcactttgcataacatatcttcgatcttaaagagttaaatatgatctttcatttttcagcttaatcaatttgaccgcgttgaattgatgaaaacttaacattttccactttaaattg

SEQ ID NO: 21023 - DNA, 79 bp, Glycine max
aaaaaagagaaggcagtgcgatggagactgttgtcgtgcgtttgagccatggtggcacgtggtgcaacgtgaggagagg

SEQ ID NO: 21024 - DNA, 502 bp, Glycine max
agcttccatcattaacactaccatgttcatgggattgccatttataatgtaagtgacaattacctggacaccccacatataagggtgagcctagggactttgatgagaatcatgaaactggccaaatacaggctaaaggcccaagtggagaaggacaaagcccccgagtggagaaggaagaaggcccaagtggagaaggatgaaggctcaaaggcagagacactatcaagactattaattgttgttgaaggcccaaactaatttgaaggcccaagttaaatatgttttttagttataatttttatttattgtaattttggcccaaactgtttagaagactcatctctatttttatctttttgttcagatacactataagtattggtttttgttttcaataagaaattttggcatttgataaaatttggtgagagtttctctttgagttccttgttgaaccaattctagacttatcaagggtatccttgtggcggctaccctg

SEQ ID NO: 21025 - DNA, 1026 bp, Glycine max
  unsure (1)..(1026): unsure at all n locations
ctagatgtgtcagaataccttgggaagattcctttatccacctttgaatctattttgcanatgatatttgatcttaaggacaacacactcatatttgtgaaagataanaagtaatgaanataattaaggtctttcttccctaatcccatagttcatatacgaggtctcttnttttatcanatgggtctgactcacattattggtttntgaaccattacgaaagtccattctcacctattntgtttccccaaaaagtggtgtacgaaagagaaagtttcacaaaagcatggtccctagcccattttgcnagagttctattttttcctttcaactaccatattctattaanggtgttctcaatgaagagaagttgtgaaagataccattcctttacaaaaaaatgattngaactccatattctaaaactcagttccttaccactttgatgaagagtgcaaatccctttttcattttgacccttganaaaatatttcaagaccttgaagactcatgttatatacagggagtacacccatcatatcttgatagtcattgactatgacagcatatttctttctctaaacaaaacatcgagtttgtccaatagatctatgtgccatagtgtaacggttgtggtggaacacatcttagatttaagaagtttatatgttccttgtgcatgatcacaaaaatgggttcaagaatctaggatctatactaatctttagcaatttaatggttcggtgattgctagttttgtgccacccattttatctntatagaacagaatgcacatttgttactaactattaacacctctagacggtgcgtttaggaaataggacatctttttactcattcccgtggtgcgaaggacgtaacgtgcataatgattactcgatatttcgacttcacatatatgcgttgggtaacacattgagtatcttccttcaaactgttggtcaagtatgctcncgcactagtngcatatgacacacactccatctccttggtatacttccgatt

SEQ ID NO: 21026 - DNA, 633 bp, Glycine max
agcttgtgaaatcaatggaatccaagatttcttttgacacaagtcgttcaattctattcttagaaatgtgacctaaatgcttatgccatattgctcctgagtttgtattatcaattctacgcttagtaccacacaattctgcattaaaggattcaccataggaagctacagtatcaagtaaatatagattatcattaaccaagagtgaacaagttccaacaatatctgaattaaaagacaacctgaacacattgtttccaaaggaacacaaataactcagtttgtccaaataagaaactgaaaccaagtctaaatgatggtacaacataagtgtctttcaaatccaaataaaaactcgtgcataataataatctaaagttccctatagcttccacttccaccaatttaccatctccaacatagatccatctttcaaaatcaattggctttcggtagcttatgcaaccctttattgaaacactaatgttagttgtggcactagaatctaaccacaagtgtttctaggtactgaagctaaattgacctcaaacagaccaaagtaagaaacatacccttcttttgacgccaaacatgatgtttggaccatttcttctttacatgttcaggcttact

SEQ ID NO: 21027 - DNA, 807 bp, Glycine max
  unsure (1)..(807): unsure at all n locations
ctcgacggactataccaagctctatgaaccagngacggagagagatctatatatatgcttgcttatggtagagagaggaagactacagatnttgatcacgtaaagcgtgtttaagatgaaaaagactaagtcttattgcatgaaaaagatatcaaagaaaggtgggaggtgtatttcacaacttattatgatgatggatcgactctacagtctaaaacaatagaaaggacggactatagtatcatcgcgatcaaaacaggagtaatgaagcgttgaaaaatagtacggtatgcgttgggccgacacatcctatgagtgggaactctgaataagctgatggtaccaactcttatgaattataggtcaaacgcatgcggggaatgagagagccgttttgcatctatagacaaggggattcaattgtcaattttgggatcacctttatctacataattttgaaagttcacgaataaaagaactagttcggaacattgttttgctgagcacttgacgattttttcccgggaaggacattccatgacaacaattgcttatttttgactgaaacgttataaccaaaaatttggaactttaaaaagggaggttgatttccctccaaatttaagggtcctagtgccaggggacacacattcttattgtcgtaagcactacctctttcttttgtttccggaatccaaatccgactttttcaacttccttgaatggggtaaaagttaatgaacctaactgttctaccaattgtttatactcacaacgttttcagaatgacttccttccgtaattgct

SEQ ID NO: 21028 - DNA, 209 bp, Glycine max
  unsure (1)..(209): unsure at all n locations
agcttcctcaattgatgtttgtttattaacttccttagttntaagggtgactcctaaagcttgtaagtatgtatcggtataatttgcccgctccattatgctcttaatgtctctaaaggttactctcctcgttgacattttttgttttgaatggaaatgccatgacatggttgccgttactgtgtttgacattcctacttagatattgc

SEQ ID NO: 21029 - DNA, 623 bp, Glycine max
agcttggagcattttcaaggttttcatacgctatgaacacattgttctatatggcaatgcaaggattttgcagttatttagtgctaataatcggagacaaaagccatgattttcaaggctttaatggataaagttgacctcttaatggattttatagaagagctcatatcatatatggacacaaggaccaatttacatcttatatgtatcacataaatattaaattttccctgcttctagacataattggtattgcaggaagcaccaatctacattaaattttcactgtgtgaatattttctcagcaagttatttgcatgctaatgttaaagaaatatatgattaaaaaatatatgactcgaaagctatttgggattaatgtagtattcagactaagagaaaatacatacccagctaccttcgactcattggtccttttaagcagacttgctttatgtcatcaacagtactgcttgttgatgcttttggaactaaccaaaaaaaattaagagatttgcatttttagtgagggtaacgaattgcaaaatcctcttgcatatcgaatgcaactgggttttgtttagagacacaacgaaagttgaatcatgcctttggcttcaaat

SEQ ID NO: 21030 - DNA, 252 bp, Glycine max
attactacttatcttaaatatttatgcatcggcgactaaaagtcataaattatttactattaatatttttatgtacttttatgtttttgtcgtaaaaaatgtattatgtatgtacaaaatccctcctattttctctatccctgtgtataatattactccacataactgcttcttccacactaaaatatatgctaatatttgggatcattgtatatggtgctgctgcaaccgcacgtatcaataatgattctt

SEQ ID NO: 21031 - DNA, 504 bp, Glycine max
  unsure (1)..(504): unsure at all n locations
gcttgagaaagatttgtagaatagggaagcaagacacggcacaaaatatagtgcatgatacgacattcgaaagtgaatgagccagcaagcaaacgacccttcatatcagcattttcattccaaaccattttacgagcatcatgactagaataaatatttttccagtcatcaacgatggtgccctcaaaaggtacaccttgactacttaattttttcggggaataaaatacggactgatcaataacaatatgaattttatgcaccttagaaaagatgacaccatcacgaattttcaagttattatagaagacacagactaactcaggataatatcaaaatttgatgaaatcaatcaatttagagtgttgaaagacttggtagcaatcaaaagtctctccttcaaagaactcanagtctaaaaacttaggatcaagaatgactctatnntgaaaagaggaatagtacctgtaataccctaatttcatctgggaactatcattcatt

SEQ ID NO: 21032 - DNA, 131 bp, Glycine max
tttttctccaaaatcgagtagcacatgattttctcaaaccttctccacagagttttactctctggtatcgataccagatgttgaatcgattctagtagcaaattgtttgaaaagtttcaattgattacatg

SEQ ID NO: 21033 - DNA, 367 bp, Glycine max
agcttttagaggtatttgactaattagggtttattgtacctgacatattagggattagtgttacttgacaaattagggtttagggttacttgacaaattcgggtttaagggtatttgactaatgagggtttatgtgtagttgattaattagggtttagtgttacttggctagttagggtttgggttatttgaaaaaatagggttgcttgactaattgggtttaggggtatttgacaaataagggtttaaggttacttgacaaattcaggtttaagggtatttgactaatgagggtttgtgggtagttgactaattatagtttattgttatttgataaattggggtttatgacacttttattaatctt

SEQ ID NO: 21034 - DNA, 790 bp, Glycine max
  unsure (1)..(790): unsure at all n locations
tacannaagattatcnttacccaggaaaccatggaatccattttcatatggatattcaaggtttaattaatggtcctttaagatcaattccattatcaagattgaatacaagactaggggtagaggaaggaaagaatcacatgcggaatttatacttagttcggtccttaagaagacctacatttcggtgtcaaagaccctcaaactatcacttatagataatcaagtacanacactatgcacatgcaatgantgatcaagagaaagaaacataagtaaaactgtatcaattcaacaaatccttggaaccttaaccaagatcagaaacaaaaaagaataaaatggattgatacccttttgtgaatcacatttagtcttaaaatgacatatggacagatgattgcactgattcaagattcatgaatcttatacttttgaaattttcagataacttaaagcctatgaaataggagttttattatataaagtatgaatataactttgtgcatcgaatgatgtcaaattatatattattcacaactactgttggcttgaacactcagggacattttaccctaggctagtgcactttcgtcataagatgttcagcttactcttttgataccttacgtctatgtatgtattaacttgccatcagaagaattgtcttgtactgtagtcaactgacgtctagtactattttaactaaactcctgtcttactggtaaaccatttagttgctgtaccaaaggtcttaatgttgaagacaccagtttccttctgccaatct

SEQ ID NO: 21035 - DNA, 528 bp, Glycine max
agcttgactaggcgagttgattttagccttagtttcaccttagttattagtcgattcgattaagaatgagaaatcccaaagagaaaacgtccgattgattttccgctttattttactaaaagatgttttttttttatttccaacgtggttacggcacgaccgaacggtcggaattcattctaaccgaagttaacggataatacaattcaaacgatcggtggaaatttattttatttttaggttaagcgagaaatgacttaagtaaaatggcttaagcacgtcaaaatggggtataaaaagtaaatgaaatgagaataaaaatacatgaaacacaatgtggaccaccatgggtacatagaatgaatcgaaaagcttggttcgaggtacttacccgttgaagatcgaaaacgatgaagaacgaatgaagaacgtcgaagaacgactgatacctttgcgaaattcttcacgaaaaatgttacggaaacgtttcggaagcgcctcggcttatattttcttcacggaaacaat

SEQ ID NO: 21036 - DNA, 309 bp, Glycine max
  unsure (1)..(309): unsure at all n locations
tatgacaccattgctacttnccctaaagtctttatcttttccttccactttattccatgccttagagatcctctaaagtatattcacattagcttcattgaaacctcacgtgatgaaaggaacgatggtctctttcgatggcgcgcctctcatagggtatnctaactgtcttactgccaacacgagattataattaatacatccnctcatccctatcaaaggggacattggaaatccttcacatgagcataacactcctacccctcctttttttcaccatgggaaccaactaatgaacgctcttgtcat

SEQ ID NO: 21037 - DNA, 574 bp, Glycine max
  unsure (1)..(574): unsure at all n locations
gcttnctcggggccatttcctgcgaaggctttcatttggaaagttagttttaccaagaaatgctactcttaaaacaaaaatggcatacaacctgctccaataaacacaaacatcaatgtaaatttagagcaaacttatgcacatacttctttacaaacgttcacttgcacaagacattcttataactaagaaaaatgcacccatgtacaatcaaggctccttcgttacctagattatttatatgtacttccaaggtgtatttgctacctacatcacatgcacttccttggctaaatttacatacatgcatactcaaagcatttggggtaccaaaaattgcacatgtgcacattccggtatttctaatacttatgcatatacaaacattgtgatgaatcttggctatctacacaataaggtgctacatttcatgctttattcaagtgtttttgctacctaaagccgcatgcaaattcaagtatattttcttttgccgactaaaattgtattcaaattaaaaggtatttttgtaaggtattttctttacataacatgcaacatatttatatttttt

SEQ ID NO: 21038 - DNA, 959 bp, Glycine max
  unsure (1)..(959): unsure at all n locations
ggtgacctcatganngcaaatattactaatgagatatcannatactccancattaatntttagcatgcatttgttttgtttattcattttttanngtnngggtttctcggggaaaaaacaccataactatacgccgccgnaagggatccctatcggaccaagaaccaaattaagaacgatgggtgatcaagaggagacgcaagaacggatgaaagccgacctgctgcttttaaagaacacattggcctcatgatggaggccatgttaagtatgaagcagctcttagagaaaaacgccgcaaccgccgccgctgtccattctgctgccgaagcaaaccgactctcttggaactaccaccatcctcactcaacatagaaggacgggaatgggacacactgggcacgatgcacccctcactgggatcaaccgacggcttaccctattgattgcgcccacctatcacacccgcttgcagaaatgcggccacatgcttttccgtcatgaaagaaacctctcatccgccgacgaggccacataactctcagactatctcggcggatgtgagtccactcccatgaccccgagggccgcccaccacggtcatcgccgatatcccgatccactatctctctctcggttggcatcgcccacctagctacgcgggctgatcttcgtcacctcgatgccccaacgacgagctccgtccccccacccaccaagcaacctcgccggcgccacaacaccgctcacccaccgtctctccctaactcacgccctaaccgccgtcccaacgggtattcacccgccacgtgcgactactgatcctcgatactcccactgcggacctttcacgtacgctcaaccctcattccaccatcgaccacatatcatatcattccctctacgacaaccgacgcacgaccgattgttcgtcctagaccggaccgactcaccagccg

SEQ ID NO: 21039 - DNA, 347 bp, Glycine max
agctagcgcatccaatatcctaatgagggttttcatatgtttctcagactggactaacacacttgctgcccaagttttacggtcttgtaggtgacgatcctcataagcatcttaaggagttccttattatcagttccaccatgaatccccctgatgttcaggaagatcatatctttctaaaagattttcctcattctctggagggagtggcaaaaaattggttgtactacctttttcccagatccatcatcaactgggatgaccttaatagggtgtttttggaaaaatctatccctacatctaggaccacgaccattagaaaaaaccatttacgcattatgcaactt

SEQ ID NO: 21040 - DNA, 916 bp, Glycine max
tcacttatctgagagaagaagatgtcgattcaatcatactacatctatagtactacttcttcgggtgttcatcattccaggaactaggctatacgtgttgaaataggtcaaagttggtcgttatgaaactttttatatctgtgttacttaacctcatatgagcctagactcaactatcaatgttcatgtcgttatacatcccgctgaaacacctttcataaggtctcctaacgggatacgaaacctaaacctgcaactacttaaatgtaatctaagtgtaactccgataagctactcaatacaaggaccgataaacatttcggctcgaagacatcacgtattatacctggtttcgatcagaaggtagcgtggaaattcacgcaaattgttgcttttacacacggtttcccagtaacctatttatttaaaccacaataagagtgtacccgttcttgcgcatacacaaaaccttatcttattggtccagccaattgacctgagttattacttcaacaactatgagaatttttctatgcagtgtcatcatgactgtcctaatgacttagtttccgtgcgctcaacaccgagggaggctttattttggaaataggcgagtctacaatcgcgaccaatacgataatgaccctcactcaattgcatgaaagctactgaggatcgactatgacttcacgccctactcgtagaaggttcgtactacatagatagaacctgctaccgtgagcctctggccttgcgtcgaatgttcggatctgagctttataagcacatcgtttgacactgcgccgtaactcgagactcgtgctgtaaggccgaccattggtcgaacctcgacaatcgatcctagccgcgctgatctatcactgtgcctgcgaagatggaccgaacgttactgccg

SEQ ID NO: 21041 - DNA, 535 bp, Glycine max
agcttgcttaagcaaggaagttgcgatatgtccaagtccatatccgaatataaaagacccgaggtgcaatagaagaggtattttggtgctattcagacaacaacattattcccaaggctcttagttttgatttattacatgtttgtatgcttgatcgtgagaattgtaatcaagctctgagtagtgaatcttttcatttgtcggggttggataggctaaacttaatttcgtgtaatactctcttttaatatagttattcatatttattactcttcttcttctcttaatgcttgttttagattgatcacatgttatttaatattacgaattgatagtttagttggtagacactcgtttgattcttgaactgaaaataatacctaatgggattgattctaaacatagttcaatttaattagactcccctaaatcttaaacattaatgttagttatttagattgattttctacgacattaggaattaatctaaataacttagactttttacctaaggcattatggttggaatataact

SEQ ID NO: 21042 - DNA, 326 bp, Glycine max
  unsure (1)..(326): unsure at all n locations
gcttattcatttagtgctaatttctctaccttcacagttttagttagttaagatctcttataaatgtcagaagaagaaatgatctcttaatgagctcatttcatactgtatgtgcaagaagaggaaagggtgaagcaagaaaggacttgaagtgctcatgttgtgagtacctctaaagacaagggcaaaagaaaaagaactgaggagcccaagaatgaagctgctaagggttcaggacaaaagaaacaaaatcatggtgacaactgtntcgtttgtagtaagcttggacatgtagagaagaaatgtaccaaatatcatgcttagcg

SEQ ID NO: 21043 - DNA, 569 bp, Glycine max
tacagtagagccgaccggatggcatgcatgacaggagaactcttcgcttaggttttattttctttcacagattcaaaaaaggagtttctcactcttaatgtggcttccaaatcaacccaaatggaatcccaagcctatcaaacatgtttccacacactaaacacctaaaataacaacagtttataagttctaacaaccttagcatgaaacctaaaggtaaaggacctaaagtgttgatttatggagagataccttcttatgatcctacgacacatctaatggagaatactccatgaacaagcagaagaaagaaagttaactcctctataccttaagctttgagcacaaatcttgaaggtaaggcaagaaacaagcacttggaggttaagagcaccaaggtcaaggcaagaactcttcttcaagaactcaacattttatcttctcttactcaaaccccacaactagaacagaggagaatggccatcttttttccctagcatccacgacacactcaatggtttatttcctttggtctctcataaactatatttttaggaactttgccttta

SEQ ID NO: 21044 - DNA, 1094 bp, Glycine max
  unsure (1)..(1094): unsure at all n locations
ttaaccctcgtttggaacgcgtcgantatcgaagacttcgagccttagctgactattgattaccacccgataacacgagggnttgaagattctcgaagagcttgtctatttctctgctatatctcagggcctggtggcntaggcattgangcctaataaactgaantgacatgctantaacgataccagcataggacgccattgccgccataacgcatngagtnatcagcccctcncgcgttagtcngcctataccaatntgtctacaacgcttataattacaggactctaagcattgcccagtgtacgtgcgcagctatacgccttcaattgatacatctcatatcttggtccgtaagagaacttgacacttgtccacacctcgatcatgcatcaccaaagatacgtgacgctaatggtttgacttgcgcttaattcaattcacatcgactctgattacgctcacctnggccttatctacctagcggaatgcatcaacctcagatgcacaggttcgtgcagnacgcgcatgacttattccactgtggactatattgatagagtattgccctatcatcttgtgccaaatatgccaaagccactcctttgttggactccctacatatggtctcggaatataacccttcatgcgtcacgcgcgtatgtttgttggcgggaggacaatcttatcattgatgccacaaccctaactcttttcacacccgtgtgtgataaggcacatacccggtgcgcggacatatgagggaagtgaatccaaacagcactgtccgccttggtgtatcgaaacctcattaaattgtcttctgaaaaaacggctacgctcctatgtgcagaattctcaaggagaacgttaaacacaaaaaaaactcttgggaatacacaccataccacccctaatggccattaggcgtagcaaacctgggacgtttcctgcgcaccttatgcccaccttgctggtactggcacattcccaacgtcacttcacgtcagtcatcggtaatatccgcagaacgcgcgtgcatccagcctctctgacgttgtgaatactgacctcaactacgcccactataccc

SEQ ID NO: 21045 - DNA, 627 bp, Glycine max
atgcaagcttgtactctaatcattcataaacttgttttaaacatttcacataaatattgttaatggtatatttttccaaaaaaccgatgttaatgttaacatcggtttctataaaaaaccgatgttaacgtaccttaacatcagtttttccaaaaaaccgatgttaatatccaaaacgttaacatcggttttttccaaaaaatcgatgttagcatacgttaacatcggttttttaaaaactgatgttgttttcaggaattttttttaaatattgcctctgtttttacaaaaaaccaaaatttaacctgtaaatttaaaatcagaccacacagcacacaacatatatcatctgcattttgctttcaagtaggttttagcagaaaactagctagtaaactattaattgaaaaaaatcaattgataactatggataactatcaacaaaggttattcaatgttaaaatgaaacaaaaattgtaaaaaatgtaatgcaaagtatgataaactgattaagtaacctaaagttacatagttccgtaacatcctatgtttgatttcaaactcttagatgatattgcgcccactggatgtgaaatgcctggagtatcctgctttcaaggggtctaa

SEQ ID NO: 21046 - DNA, 90 bp, Glycine max
actcaggacttgtctgggtcaacttggcctgggggtaactatcatggccccgccgcgagctatctcttcttgaagtcgtatactcgtcgt

SEQ ID NO: 21047 - DNA, 694 bp, Glycine max
gcaagcttttggtacaaagaagaagaagattttcttttgagattcaaggcttgtaaaggattgtaagagattgattgaaaaagtattcaagattgaatgaattcttttatttgcaaaacaaagccttgcttttatagactctttgtgtctggtcaagaagacaacttacaagagttattacttttagaaaaacttaaaaccaatttgaaaaagtcaaaacctttttgaagagttacatcttttgatttattcagaaacaataactggtaatcgattaccaaataagtgtgatcgattacacaaagcttttgtgtgaaaggatgtgactcttcacatttgaatttgaatttcaacgttcaaaggcactggctatagattaccaaaacattgtaatcgattatagcattttgaaattaattggaacgttgtaaattcaatttgaaaactttttcaaaacaattttgctactggtaatcgattacaaaaatctggtaatcgattaccagagagtaaaaactctttggtaaacatgttttgagacaaatcatgtgctactccatttttttaaaaaacctttcatacttatcttgattaaaccctctcttgattcttggaatctgagtcttgaatcttgatcctgattcttgagatcctgaaccctgtatcttgattctggatctaaacctttttcctg

SEQ ID NO: 21048 - DNA, 877 bp, Glycine max
  unsure (1)..(877): unsure at all n locations
ctcgtccccttggacctnctgaanacnctnnaagtcttcctcatctccactagctcataggtgcactaccccccagtatctattatatatttcccctgaccngtacctagatgaaaatgtctcctttgattcatcctatcctacccccttaccatacctcctaccataaaagaaactttccaggggtgtcatcaatttacttttctctccctgaagaacttgataagttgagaacatgcccttttgtattcccatacccacacaccataatctttcgttaaactatggaagcattataccttttcaacacttaaacattaatagaactatttttgaagaggagaatcggttagacttttntaccaggcaacactttttatgaattgaccaagtcctccttcttttaatgttcctatcttcaagtaagagcataggagattgtgatattgtttctcttacatgcgcccccccaatacttatgatgaacctcaagagcatggcgtactttcaagcttgactccattaaactgaaaaccggctggtgcctttaaacactatttggcctatcaaggaaccctcttttgctattatcccccattttcttgatacttgactcgtgtaaggtttccaaattaaacaatacttcaacattttagttccactaattaggtgcttctttcctcactccttgtcccacctagaatcttactgttggcagattttctttctttagttcagaaaccttttgcttcctctaattttgtaacttccactcctgtactctccttactcttcctccttatgtctccccactctattctctctactctggacgactgtctgaacatatgcagtctctccccactcatcgcgcccg

SEQ ID NO: 21049 - DNA, 576 bp, Glycine max
agcttcttatccaaggctcatcttggtggtgatatgctccttcttccatggcttattccttaatggatggcgcctcctctcacctcctttcctttgtcttccgctgcatctccatggtggaaaatcaccattaaaggactccattgaagctcaaagatccagcctccatggaagccccacaagcaagtttccatcagtagtggctatcggagattttatgtgggcaccatcatcagggatattgccaagtagtacacttggtggtgatgttaacgatgtgtatcgcctgtgtcttgatggtataaacataaatatggaagaaggatcaggagacagtgatgatgttagtgtaggagcaacaaatgaatttggagacattgcaaatggatattgccaagcaaattgatcgtattgagaagattggtaaaaagaaattaaatgcctcatcgaagatagccgaggtagttagtgacattgcaaaaacatgtatgtcacgtatagaaaatgtaattagtgcatctattaatgaagtggtgaaagaacttaaaaccctaccctgagtttgcaaatgaccct

SEQ ID NO: 21050 - DNA, 331 bp, Glycine max
  unsure (1)..(331): unsure at all n locations
atctaggcatctaaaacccctncaattactggatttttcaaggtttgagaagtgaaaatgagaatggngtaaatttggagcaaactctcacctcaaacaagtctatatcatcaatctaaacttgctcanactgggtttacgcctaanattccaccgaatcaaaatttgactcctcaacancctaattttaccctagaaatggttcttgccttcactttggtcatttgtttcctctcttgacagcccanctttatcataagtctaaatgacatttaaactangataaccctcaagcatacacttttcactcaaggactacatctcactttta

SEQ ID NO: 21051 - DNA, 310 bp, Glycine max
agctttagtcgcaatcatttaaagagtgtctgattgatggttcattggtccgaccctcacgttgtgcctttttgctttaaagatacgtgttcttctaatgatccgagccttttcgctcgatccatggggatgccttaagcgcttgattaaaattgaacccaataggcttttgttaaaagttattgcacttggactgcctatgcatacacatgcacatacatatttcttatcttgtgaattgaaagacagggataggcttgtttcaagcgatggacaatacctctccttatccaagacatatatcaaatca

SEQ ID NO: 21052 - DNA, 1097 bp, Glycine max
  unsure (1)..(1097): unsure at all n locations
actcgatcgtcactcgttnccgnttatctatatctatactcagnctgattcgttatatcacnatctacaannacanccncnnccccccccnnnnnnnntttatcccctatgacgnacgtttgaagngccactataatactagcttggcgattatttaccgcgaaagatgaagggtctggtaaggattttgatatccgcttgagctgaaactgcgcaaataaaggatagacgatgatgaaccctctatgataccattctacatgactaaattcccaccagctcaacagtgtcattactcacccaatatcaaacccttctcattgcccaccacctgattagccaaaaacacccaatcaaccacatacgccactccctaaataagtcacatgggctcgcctggcgcacattcaataccatacaccacccttaacacaaaccaaaacaccaactagggaaggaattgtccaacaaataagcctatagaattcaccccaattccggcgtcttatgctaacttgctgccatatctactcaataatacaaatggtagcataaccccacccaaggttgctcagcctctatttttccatggtacgaactggacgcatcatgtacttatcatggatgagttcttagcatttcattgaacattggatagcctcaccatatgctcaacgctaattgatgcggctggtgaaattggagaaatagcttgtgaatctaacttggtacgtgcccattcatgggaattcaaacttcgtaactacaactccttactactacgattacgctcactctatcgtacatcaatgatcattccactgttgttggactacttaatactcaccaatcactcttattagatataaatacctcttgacattcatagctaatcataacatcgaatgatagatctctataactatcccatcatctgactctatgacatatagtatcgactcctgcaacgtgcggatcagaaactcatatcgattcattattctatcgatacatatctcgtcagcatcaatgtactgattctaacacttctaacatcgatccgtctgaacgcatttatctgcttgtatgatcgtccg

SEQ ID NO: 21053 - DNA, 324 bp, Glycine max
atccttccagccgacccgcaggcatgcaagctttttagcaattcaaatggtcatttcgctacactcggatgtcggattcaagcgcataatatattgagacgctcgaaattgaacaatggaagctcttgagcaattacaatgggcataacttttaactcggagggccgcttcacgcgcataatattttgagacgttctaacttgaacaaaggaatctcttgaacaattcaaattgtcataactttttactcggaggttggattcaggcacataatatctctagacgcttgaaagtgaacaaaggaagctcttgagcaacacaaat

SEQ ID NO: 21054 - DNA, 1120 bp, Glycine max
  unsure (1)..(1120): unsure at all n locations
cggactcggtctgacgctatccgctcgcntctngntaaggnantcaattacgtgctatttctcactacataccaactacncaccncnacnnnnnnnnnnggtgtttcnnttttgatgaccgttgntaggngcantctagantactcaagctntggcctcaattacgagcgtntccatatattacgggcctcaatctgacatctttttaaaaagtacttgcngctagaaattgctcagaagctcctgttctgcgaatttgagaagcctcgatatactacnggaaccacaatcggacatctcacgtaaaaggttattgtcgtttgaatttgctcagagcttctgttcttaattacgagagcctcgatatattacgggaatcatgcggacatccaatgaaaaaagttatcgccgcttgaatctgctcacagcattcgttgccattacgagcgcctagatatattaccggattcattcggacataccaataaaaggtattcgcttttatttgctccagcgtctgtttcaattccagctcttgatttatacaggactaatcggcatcccgccaaaggtttggcgttgaattcgtatagctttcggttccatccacacctatatcctccggcacatttgacttcgagaaacatatggcgcgtgagtactccaagctcacctgccactagacccgcgattattcccactctccgacccccgtaaagcatcggtattgatatggaagctttcgtctggcacctgcctataaattctactatcgtaccctcgacgctgtcgatctctgcggcaggcgcgcccaccgaatcacacagcgcctctccgcatcgattgcctacataccgtccgntctctgagtctccctctcgctccaccttctcctactctcgccgcacaccttctcatctcacctagtgtctgtacgcgcatacccgcatctcatcatctgtacactgcgccgcttgaccgctcacaccantagtcacgactcgagttgtcagcaccttcatcgctactctctctcgtcaactcttatgtatacactggacaaggcatctgactctctcgctgtcctctcgattgatgtgtgtccgccagaccgtccgcg

SEQ ID NO: 21055 - DNA, 366 bp, Glycine max
ataaaagctaaaactaggaactaggatgtttgattttgtgacacaaaaaaataaggcgctcgaaaatgaacagcggaagctcccgagaaacacgaatggtcaaaacatttcactcggatgactgattagaggacacaacataacgaagacgcataaaaatgaacagcggaagcttccgagaaaatagaatggacatacacttacacacggaagtccgacacggcgatagaatatatcgagactctcgaaatagaacaatggaagcgcttgagaaaaacgaatggccataacatttaaaacggatgactgaaccgtggacataataaacagagacgctcgaaattgaacagcggaagctcacgagaa

SEQ ID NO: 21056 - DNA, 1021 bp, Glycine max
  unsure (1)..(1021): unsure at all n locations
agtacttaatcgactgagtggacggattacgatacttcggacaacacaaccacggcagncnnttgtgtgatcctgacggcaacgaggccggnacccgcagcgacgaacagaaataatggaatgaggacattgtgtatgttgacgaggaaaccagtgaggaaaagctaatgcaaacacaaaggcaagagatcagatgccacctggacgggacagaagactgacacgcgtcgccagcatagaccaatgatgcacgaaaagaaagcatgcacgagggcattcgacgacaatccctcggggggggcgtaaatccaaaagaatgtgagaaagaacgccagaggtagaccaccgaccgcaatgaaaggggaacaaaaaagaaggccacatccaacaagacatgcgaaggaaactccacagctggacctggcgaaacaaccagggagaatagcataaaacagcgaatgagcatgcaggtccacatcgagaagacgccgaaaacgaggtcgcacggacggaaaaccagaacgaaaatgggcgaaacaaagaccgcgacgacgactgactaaggccgtagttataatgaaacactaacggagaccggacatcgaccgacgacgaatcacgagcggcgaaagacaagacggcgatggacgggtcgacgcagggacgtaccgaacggacaagacaatctcacgattgcgggacatgacaaactaccacgcagtccaaacgatcgaagcgatagaggcaccgtacacctggagaacatctcgaccgcatgaagggagacgaacgcagtccggcgaccgaccaatgctatcaagcaatgcacagacactgatgacaggtagcgagaccggatgacgatacgagacgagaccgcacacaacgtatcgcatacacagacagaacctgaaacgaacggaccaagatgaacaggctngaacgaaacatatccgtagagacgagagcacatccgataatnactgactatcaggatacgacagagctctataccgaggcg

SEQ ID NO: 21057 - DNA, 125 bp, Glycine max
agctttataacagatggttaaactgcactcattgtattaaattttttggatttaggatgagacatatattcaaagaagactatcattgtgcagatcgcgttactaattttgttattgatgatagg

SEQ ID NO: 21058 - DNA, 1035 bp, Glycine max
  unsure (1)..(1035): unsure at all n locations
gcagctctcgagcanccaacatcacatcaacttcgtagaacgcataactagctgtgcancgagtacgtgactactcacctcactcnnncacccccanccataagtgttgttgacgntccatgtgaaccgacgcacagtaaagctngttgggattgtggtgcgacacggcatatagtgacacgaagtgacgcacaggcgaatgtgcatttcatttctcgcacttccgcagatcatacatgaactccgcactccccattggcccccttcaactgagctcccacactcgcacggtactatgtacctcttcctgcgcacacccggatccgacgaccccgccaaggtccacaaggaccagcaagccaggtgcaagaacacgacgtacctgaaccacgaaaacgcgcagagggagacagtctgccgaaatgcacgaagttccacggttgccctcatcaatcgcccacgatgtgtgtctggcagacatgtagccatggaccgactgaaatcgtacaaaggtcgatacctaaactactgttgtcggcggaccacagaaacatcagaacccattgtatctcttccatcacaccgtgccaacgtttctgcgcgggcacacgctgccgacaatagcaaactttcgggaatagggcaagtcgcaaccgctcgtcacacctgttggcaaggagaaccacgaccgaccgcgaaattgtgcaacgcagcaagcagcgcagaccgaaagccgtgcactgcagtattatgggttcatgtaaaacgcaaggatatgtactaaggccatatactactataaggctgacagggcccaccagtcagcaggatcccgatgaggccccgccatggaggtgaggttgcggacctgcgactacgtcaccctcagcgcacgcccgaggaacggcgaacaaggtaccatgacgaacagcgcggatgagagccacttcctgacggaccgcatacaaccgctcgcctggatagatctcggaaccatcgtcatgcaggaccagacgcccgcgtgtgaaatgcctc

SEQ ID NO: 21059 - DNA, 458 bp, Glycine max
tgcaagcttataagtagctggcccaatttgatctattatctcattgggcccataatatttcttgttaagcttaaaggatcccctttgttggcctataatagaggactgtctctgaggctgaagtcgcaccatgaccaaatctcctatgtcaaaatggacatctctacacttcctgtcaggtgtgtgattcattgccagatgggccttctgaagcttcttctttatttcagcacaaatagattctctatctgataagaactcatccactgcctccactttcgacgagcctgtaatataccatgacaagattggtggtttcctcccaaaagtaattttgaatggtgaaacacctaagcctgagtgttgcgacgtgtttgtagaccattttacctatttaagaagcttgccccaagaagaatgtttcttttggacgacggcatgcatgtattgttcgatca

SEQ ID NO: 21060 - DNA, 365 bp, Glycine max
gggaggaatttttcgctaggtgtgttgtttaaagagagatactgagtttaatataaagaaacataatgacatcatgtggattatttcgtggcataattcagcttattataatatagtaaaccaatttagcaagtgtttattgtgagaaaggggagacatgcaatcagctaaaacaaaggctcctctgctcaagtctctaatcttgaagatctctatgcaaaatagtgttttaaaactcaaatcaaactaaatgatctgatcagtgtagcgaccactagacctgtatttgtctggcactttaatgcttagaatgccttcgactcgactaaagtagtgactcattcctaactgataaaaaatgtgac

SEQ ID NO: 21061 - DNA, 1080 bp, Glycine max
  unsure (1)..(1080): unsure at all n locations
gcgctaacacgtccgagagtcgcgagcagacacattcttctcccatccacttgggganttgaaaganatnactatatttaaacgatgatatattatgaggtcaacacatcaaataagagctgtgcatcgaacagcctncccggtatggtaatanatccccacctgatcgcatgatcagaatcaaaatagtgtgcacggcgaggcgattttattatatattgtttgctacatctcaatgcataagaccgtggcgtcaggaagtgatatactgacctcatttctcaccaccatgagagcgatcaatagttaacatcggacttattgagagtcctaagcatgcagggaacaatgttgtgcacagaagctaagttcttaactctatacacggatgggacgctagatatgaccataaagcacacaatgcgtcggacttgtagtgcttgcgttggccctacgacacggacgagtggaatgtatactgaagggtccctcgccacagctgatacatagtgggacctctccttgttggacctcggaacgaacatactgtaatcctcataactttcggtctcactaacggcaactggcagaacggggtacgaaagacaccttggcttcgttggatacaagagcaagatgacatggaactgttcaatcgaggtcgagggaaagaatataaatggaatgatatcgttggaccgtgggaggagctctgggacaactcaccaaaattgtttggtagctatgccgtgggaaccacaacaaaggcatcagagtagtcacgtcagtaagagggacagaatcagggtgacacgcatctggccagacaccaaatattatgtggagagcggaggtaacggaccgaatgacatttcagggacacaaaaggggacatgattgcggcgatcgagacctgcgaggggaaggagatagacaccctatagaacagcattggagcgagtaacacagaattaggtcgtcagcgagcgtatgacacaagttacaggcaaatacatcgagtcgatgatgtgaagatggctgaagtcggacggcattcaattggcgccaggagtgtggacg

SEQ ID NO: 21062 - DNA, 1215 bp, Glycine max
  unsure (1)..(1215): unsure at all n locations
acttgtcgcgtactactcacgacagtacgtgctactcgatctcncactntcgtacctgnatntgaactacctctcgatatctctccncacgccttacggcgttgttgcgtccattgaccagacgccatananagctcagcctcgtccacatatatctgatcgcatacgatcgatacttatcgccgcaacgcaaggaggctatgtcatcgtctncctagtgttgtcgcaattgcaatgtgccactgcagtcgacatgactctactcggtaagagctggaaatacgtacactcgactctgccgtactctactgtatatgattatcaatcatagtacctgaatccgtccctaccttgaaccgacctcagtcaccttatagatcggacgactaggaatctaagaggtaggatatacaccatcgtatatccctcaattaaactctttatatggactcctccaatcacaaaccccgatgcgagaatttactccttcattggaatgtcaaaatcccaacgtataggcttattctctgcatgggaaatttccccgcaccgacgcgccaccacgagcactttatgatgctcgatatcgatatcacaacgcctaatgccattctgtgaaatcatgacaagatgcagtgccgcctctttttcttggttagaacatgctcgttgcgggcaaccttgcttgtgactgacttaatttagcatcatacttacgatctgtcgctatacaacaacattgctgtattgcctctgctccactttctgcattcttcgcacgcctacaatcgtgcttggcgcgtatggtcaatttcgctcttccgatcgaagcgtcccttaagatatactccaggtatgcgacgacaactgactagtcctgaaatccattaatgactcgctgcgttcattctggaatcttcctcgtaagcatcctcccttctactgacctcagtgcgtggcagacgcgtctttctctcataaatgaaggggtgctctcatgtcagtgaacaatccactactatatctctaatacacaattctacagacgcggctcttgttcgcgaccactaacggtatagcgtactctcatacttcctcattcattgacttctaccgaactcctatcctccttagcacgtccgtctcgatgcttccactgatgctgcttgtctgctctgaccaacgtcatcacgcacgatactacattaccgcacg

SEQ ID NO: 21063 - DNA, 868 bp, Glycine max
  unsure (1)..(868): unsure at all n locations
ccaccctcgaccacgaacataacagacacccaacctacnacacncccccacaccacactcaacataaaaagctaacagcaannaaaaaagaatcgcgcgtccgtcccgggaccttagagcgactgcagcatgcagcctgaaaggaagccaacaggacattatatagggcgaggaaaagagccaacaggccgaccatccccccacaggcacaacgccaaccaaacaacgtacgcctcaaccacggcggggcaaaacacccccaacgggggaaaccaaaaaaaaaaaactcaactgtcaaaccgaccccaaccggacaaggaacaaaaaccataccaaaccaaaatcatcccaaatccgcccctcagtcaagaaccgaccacacaacaacccaacgggcgcccccaccggatccacgaaacaactaatcagaccccgagcacagaccgactaaccaacgcacctaaccacaccccaccacatcacacaacgcaccaaacaccaccgaactaccgccctcaacaacccaacccccaaaccagaccaaccacccacacacccctgggacacaaacaaccaacccactgcccacacaccacccccacatcaacacctagccccaacacccaaccacacgcatcaccaccacaccccccaaacccaaaacaccagcacacacaccaaccacccaacacaaagcatccaacgcaacaacatccaaccaatccacccacacacacccccccacctccatcccaaccaccacaaacacactcctctcaacacaggaaccccacacataccatcacacacagctccactcaccacactcagccaccaacacaacaccaacgaacaaccacacccaacg

SEQ ID NO: 21064 - DNA, 1181 bp, Glycine max
  unsure (1)..(1181): unsure at all n locations
ccaccgtccgccgcttcaacatccaacatgcactatcactccccacccccgcgaccggagtttgtgcctcttgaccgccataacaccagctatttagcttcttacgccacttctaaaaacagagaaacgttcgttcagggaaatacggccacccatccaaaaactactcgaccgatcacctatcgcatcgtcagatgatcgcaagacttacattctcgacttaaacagttgtaggtgaacgaacctgcatctcatgcgaacaaatgcctgcacacgaggacgcgcgcataccacatactatctcgcccatcacactctncgcatttttcatgcattacacctcgtacctactcgcctatcgaccaactcgaaggatcgaccactctcactctacctacacctgctacattataattgcccggcgatccactcncggcgatcatctaatctatcgttagcacaanctcattgacatacttgtccaaccgtcgtactcctctactccatatattcacgcacttgcaaccttcatacacgaccactctacgcatgctacacacatacattacaagtaaacgatactatcgcttctcatcgatcacgcgaccactgcatcgtgccgctcgatcagtcaacacactgtttaagtacaactccgcaccgactacttcgcgccgctttatctctttaccattagtacgacctcagccanaaatctcgtcatccgcgcacctctcgactgtgtgcgcgccacgcactccgtactacacccgccgtccgacagttcacatcatgcagactctcacacattcatctgatacaatccatcgccgccacacgcgcaacagacacaactccacactccactatcatcgaagcagtcgaaccccactcactcacgattcaactcacgctcgtcaccttctgaaaacaccctctcaccaccctcgactccggtctcaaccaccctctatacaactcgccagcaccgtatcatcaccccatcctctcccctcctccgcctatctaccgactcgtacacgccatgccactcaatnacgatgataggcacctaccacacgctgatcgatgcaatgcttacccactctcctacctcataacacaactgcgttctactcctcgatccctgacacctcgcttcttctacaccctgcatctcc

SEQ ID NO: 21065 - DNA, 170 bp, Glycine max
agcttgcctgtcgcaatctacccttttttgttatggctacgcgagactcgcgggaggcgtgttccacgaaaggaatacgcgcggagtcgccaccaacgtttatttgaggaaaacgttagaaaaaccggaaaagacgcgatctacgaacttttaagtgaaaggctcgggag

SEQ ID NO: 21066 - DNA, 977 bp, Glycine max
  unsure (1)..(977): unsure at all n locations
ccctaaacacgctcattctttctaagtatactgctacattgtactcacccaacccccccnccgncnnctgtttgactccctgagngaccttagatctcagctaataaaacaacatctaacatcccggccactcaatcataccttttctcattcatattattcaccaacactcatttcatattaaacacaaccacttaaaccatgattcaattcatttcaactgttcaaacaaagctttttgtacaagcaatccgacacttaaacaacagaaatttaaaggcttataaagcattaactaaataactgacttgaaataataactgataaaaaaactggtcataatttgaaaaatttaaaactatgcaaaattaaactctgacatctaatgtgacttctgatgctcgttagatcaacaccggacaactggtgcatctgagaatgggtgctctgctcatggttggtgctaggcatggtgctttaaaataagtgctggagatagaactggaaaataactcttgactgctgctcctccgaacactgatagtccaatataatggctaaaagacagctatctctgattgataagtctctgtggacaactctggctgcggagctaccctccaaagaaaagtgactttgccaacacccgtcaagactcccnaactatactggtgtgccaagtctgaccctgataaagaaaagctctgcaggctgacataagaatgtttaagtaaagaggcctcaagactgaacgctacctcaaggaggcaatatccgatgtctcattaacgaccactatcaaacctcgataaaacatcatcagttctcttacaaggacatatactcattaacatctattgtcatctatgatttatcctccacttcttaagccctatatgcctcgacgaataataataatccatcaatgacgcactaccgcacaatgatctacggctaattacggaacgactaacacc

SEQ ID NO: 21067 - DNA, 501 bp, Glycine max
agcttgcacattataagatcgacagatttttttctgatgcctaatagaacctatccacgcttgcctatttgtgatgaaggtagaaagaaaggatccaaactatacttcagtgaagagatgcccaacaaaagacaaaaggtgtagatcactaactattcaaggtactggaggaccttattcagcaacaacaagttggtgaaggagttggacaatcatgatgcttacacttcatggaattagactgtatggtttgatataatgaatgtgtccacttccaactatgtagattggcccattgaggatgatcacaaggactcaatatagttgttgcatccaatgaaggtataccactttgatgatgtctctgcttgctttatgaagaatccaaaagatggatttattaagcatctgctcaagctttccattatcttcaaccacatcatattcgaattgaactagatggatgaagatgagttctctgtgcgtatcattcatattttt

SEQ ID NO: 21068 - DNA, 380 bp, Glycine max
cctagtaactcagcttgccaagaatcataaatctgcacctgttgcaagaagttgtggtctatagtcttctgcatatcaccatatagatctctatccttctttgcagcaatctggagtcaatgagcaacctgaagcttatgctgccaatatttataatagacctcctcagcagcaaaaccaacaacagcagaataattatgaccttctcagcaacagatacaatccacgttggaggaatcatccaaatctaagatggacaagtcctttacaacaacctcagcctgtcccttctttccagaatgttgctagttcaagcaagccttatgttcctcctacaatgcagcaactacagcagtcacaacatagacaacaagcaactg

SEQ ID NO: 21069 - DNA, 360 bp, Glycine max
  unsure (1)..(360): unsure at all n locations
ttctctaaacngtatatgaccgactataaattgataggctcatgtcttctcaataaacattaatcatgtttccaaatacatgtgtaatggatatttctacttcttatgcctcaactattaatttgtttggttttatttcttagtatntaattaagaactaattttgaaagaatgagaannaaaattgaaacactaatttttttattnatttcactattttaatgcnacagcttaaaaaaatagaataaattataattaattaaaattctattattagctttttaattaatacgcatatagttaaacatgtttattatgggaataaaaaaaagagggaaaaataaatcaacaattgatgaa

SEQ ID NO: 21070 - DNA, 180 bp, Glycine max
caggacacactgcaagaaaaagagaagggctcacccccgctaaagatatgaagaagactccagaatacaagcggactacgatgcagttaaatctggcaataagtagacaaccaacaaggccttgtgcacccccaaaaaccgcccacatcataaaaaaccacgaaacagagagcgggacaa

SEQ ID NO: 21071 - DNA, 834 bp, Glycine max
accgtaaaccatgctaatcagacaacataattaaaatccccccccgggagtttgcctaaccatcaggcccaaacccagcgagaactcgctaacagcgcagtattttttatggacattcgaggcatccatctgctaaggaacacagaaacaaccgcccagggcgaggaatcaaaaaccgagatccataccaaccctgggagacccgaaaacaaacttagtaagcacaacatagaatgggaccaacacgaggacactgcgaataaacgggaatgttgagggagctggggagaacagggagagtcctcaactggggcatggaagagagatcccagagaaaaagactggaagccgggaagcacccaaaggtgagaaggcggacgagggccaacaaaacaggaatgaacccacgcaggaaacaattaaaaccaacacaggcaagacgcaacatcaaaaagggaaagagtttagcgaacgtacatgagcggaaaaaaatcactgacaatccacctgccgaagcctcaaaagaaccgcctaaacgaatgaaaaaaacaaggcatcaacacaggatcaaaacacagtacaagaaggcggtagagaacacggacgaccgcggatactaacagagacaaaacgtgctacactgacggacaaccaaaactaagtcaccaacagcacagcacatgccggaagaccaacgctcaacaagcaacatgccgcaccaacgtcgcaaccgactgataaaaagagcgtgttgaacgaggcagaaccacgagtaatccaacaataacaatgaacggagaattagagcaacgaattcaagaaagcgagaagacg

SEQ ID NO: 21072 - DNA, 370 bp, Glycine max
agccaccataatgcttctataaatctctttttaccctaaataaacacatttcacctaatacgggtgagaaggaagagaaaaaagaataaagtcaagttctatatgcttctgtaaagcttccataacttttctgtaaaattacgaacgaagggggggtgaacttatcaaacggtggtgcaaaaagcaactttcaaataatcgactcgcttggacgagctgggcggcaacctcctccccattgtttctataaataggtaaaagggggctattccaaatatccctaatcccccctgctatgcatttcagctattttgggagaaaaaaattgattccgtgaaaaaaatccaggtcgaggtttttccataacgct

SEQ ID NO: 21073 - DNA, 1357 bp, Glycine max
  unsure (1)..(1357): unsure at all n locations
gtagatcctcacgcgcagttgcgttacttttctcacgantgttctcactagcntttgtccgtcaccccacacnacccntcggtgtggtgcnctcttgancacgcgtgaagngcaccgtatgaaactccagtctgtacgtagggcagtccaccatactgtccaaggtggaaggttggttatttgtccactcatagtcancgataagtcctcgcgcaatgaagggcacacttgacttggtctactgtttcgcacctttgtgcggaatattgcatcagatcaagtgtcgccttattcgcccatggtccatttagttggcatactattcgggcatcgtatacagacaatcgacctatacggtggtctcagtgaaagcaaactttcttggctccatcctacaagttgactccgcataaacgtgtccacggtcgattgtaacataggacgcatgtacaccaagttaggatccgtttaacgagcgcatgttagcaaggatgtccgcttatctatttgggcatgcgacgaaccttctcgctaagtacatccttaagatgggtggttggtcgcaagtaatcgcacttgtcatttgttaactgacagcacctgtgtacttgtgacgggcgatgatattgggacatgcggaccgacttctttatggtatcacacggatcaaacgctcacctctgctaagggtccatggacctcttcatttaaataactcaacatgtccgatattctggcactgaccctgagcgagctgtactatgtgtgaggaacgcaatgaggaggtcctgtgtggtggatatcgagcgcntctactggcantcagtctcnacggtagttcctccagctggctgtctcgtatagcggctaccacagcgcacggctgtgatcttattgccgcgtagtaagctcatcgtcatgtattcgagccggcggtcattcattcgcattatgatcgacgcgtacgtatcgtcgctcttatctggttactcgactatcgtactgacagttaattagtgacgtgtctgatcaacgggtgactgtatcgctactgtatcgtcattggtcgcgtngagatcgtagtactgaatcacatctactaggtgcacaggacgatactgtataacttcgtatacgtgatgacatacgngacgtgtgatcatcgtggattgcgcatgtgatctgtgcaattactcgtattcgtactacggctcggagctctatctgctctcctangttgctcttcntcattgcgatagcgtcattcgtcatatctatagtgatctatatatnangtacctggtatcgtgcacactctactgagtatacngatncngggatctgcgtatagacgcgg

SEQ ID NO: 21074 - DNA, 905 bp, Glycine max
  unsure (1)..(905): unsure at all n locations
acacacacacagcgaataangagagacagacangacatanntcaccgaccacaacacgatacaaataactacaaataagaaacaaaaagagaatnaaaaagananaannnaaaaanaggacgaacccgactcaaaanatnnaaanaaacaaagaaaaanaaaaagannnnagggggaggagaggattattgtatagaagaaagaaaaaaangggggagtaaaaggaaggaaaaaaacaaaaaaaagggaggaatgaaaaaaaaaaagaaagggaagaaaaggcgggaaggaaagaaagaagaaaaaaaagagaaagtaagagaagaatgggggaaagaaagaaaaatggaaaaagaagaatagaaagaagaagggagagaaaagagagaaaaaagaaggagagggaaaaaaagaagggaggagaagaaaaaggaagaaggaaagaagaaaagaaaggagaaaagaagaaaaagaaagagaatgagaagaaggaggagaagagaaagaaagaggaagaaacaaaaaaaaagaaaaaaacaaggggaaccgacagaagcaacgaacagaaccaaaaaaaaacaaggggagagacaaaaagaaagagacaggagaacaacaacacaaagaaagaacaaggacaacaaaacaaaaaacaaacgacaaaaagagaacgccaccagaagccggagacaaacaaacgaagcgagggaaaagaaagcgaagaagaacaacacgaaagaagcaagaaaaaaggcaacacagaaggaaggagaaaacggaacaaacaaacaaagcaacaagagaaaacaaacaaagaggaaaggaaaaaaaaaaatagagaaccaaaaggaggggaagaacagaaacaaacagagagggaacaaaacaaagacgaagagcgcacg

SEQ ID NO: 21075 - DNA, 1000 bp, Glycine max
  unsure (1)..(1000): unsure at all n locations
gaatcgacgatgattggaagtacgtaataataaacttgtcataacaagtanacacctaacncnnnnnnnnnnnaaatgtttgaacactgataccagccnnnnnnaaaannnnnnnnnggnnnnnnaangaagaaagnnagaggaagagagttttttatattaaaagcaaagaataagggggggttaaaaaaaaaagaaacgaacaaaagaaaaatagaaaataagaatgaaagaaagaagtngagtcaaaaaaccaaataaaaagaaaaaaaacagacatgtaaagataaaaaaaaagttaaaatgaaagataaaaagatgaaaaggaagaggagagagaaaagaaaaggaaaggagggtgaaataaaaggaaaataagaggcaaagaagaaggaagaaaaaacaagaataagaaaggtagaaggaggagacaagaaagaagaggacgataagaaagagggacggaagaacaatggagaacactatgagaggatggaatgaataaatggacgaatggatagaagatgagaacgacagaagaagaatgaagaagaagataaagaaaaaataatataaatggatatatgatagaagaaatgagcgaaaagaaaagatagagaagagagaatatgaaagacggaagagagaaacgatacacgaaggatacgataatagaagtagaggtaaagaaaaacaaaagaagaacaatggcacagtaaacaatagacgaataaagaaataagaaggaatgaaagaacgaatgaangaaatgaagaacagacggatagataaataaatggaaaaaaaaaaaatgaagaaacacaacagcaatagaagaaatgatgaaagaagaagaaagcaagcgatgagaagaagaagaatngaaagaaatacgaggagataagagataagaatttagggagagaaggaaagcaaagacataaaggagatagataggagcagcagcgcatagactaataagggagaaagacgaacgaag

SEQ ID NO: 21076 - DNA, 531 bp, Glycine max
agcttcccaagtttttaagttattcctcaattctttttatgcaaagttccaaaagtcctattaacaacttccgtttgcccatcggtttgtgggtgacaagtggttgaaaataacaatttagtgcccaacttgctccacaaagtcctccaaaaatgcaaatcatcaagcctaggtataggatgcctatatttaatggtgatgttattaagggctctactatcagaacacatgcgccatgtcccatcctttttagggaccaaaatcactgggacagcacaaggactcatactatctcttacccaacctttgctaatgagttcatccacttgtctttgaatctctttggtttcttgagaattacttctataggctggcctattgggcaaagaagctcccggaatgagatcaatttgatgctcaattcccctcagaggtggtagtccacttggcacatttggatcctgcaaaagagttttaacactagaaggcacttcaaaatcatcaaaagtgttagtggtcaaatctgatttt

SEQ ID NO: 21077 - DNA, 965 bp, Glycine max
  unsure (1)..(965): unsure at all n locations
ntgagtgacttcgatgactatcatctaagctngagccattcacacgacataccttttactccgatggccggatggagtccgttcttatatcaggacgctcgaaantgaatgtggaagctctgagcacaatcangccgaccataactctttacctcggatggtctgattgangtcctttaatataaccgaggacgctccgaaattgattggttgaaacctcttgagccaattcaaaccgaccattactttttttctcggatgtgtgattgagtcctgccatatctcgagaccctcaaattgaatgttgaagctctgagccaattcaaccgacaatactttttactcggatgtctgagtgagtccctgcatatatcgagacgctcgcaattgaatgttgaagctctgtaccaattttaacgacaataatcttttactccgatgtctgattgaggcccgctatatatcgagacgctctagaattgaatgttgaagctctgagccaatcaaaccacataactcttaactggatggtgattgaggccgtccatatcagacgctcaaattgatgtgtagctttaaccaattaaacaaataactttactcgatggctgatgagccgncaatttcagaccctcaaatgatggtgactcttgcaaatcaacaaacaacttttaccgggggtggatgaggccgcaaattcaacctcgaatgatgggagtctttgcattcacaaaaatctttctggtggttgtggtcctctattaaaactcaaataagtgagttttcaataacacaaatttattgagtgttgatccccatataccccattatgtgacttccactaaaaaatttctgggtgttggcccatagacccaaagagactttcaataacaatttttcgtgtgggcctctatcaccaaggggcttccttaaaaatttccggggtgccctccccgaagatagcg

SEQ ID NO: 21078 - DNA, 604 bp, Glycine max
agctttacatgcctcatgacacctaagcacacttattggagaatcttggacttgatcttggattagtgggctgaaccataactgaaattcgctgatcataattagtaaaattttggctccacaaaattcaatttcaaatttatgtgaaatttgaatagaaattcaaatttccctccaattttgtgtgacacttaggctataaatagaggccatgtgtgtgcattttttgaactttgataatttgagaattacacttcaaatttcagacctcatttgaggcacaaaattttgtgctccttctcccttccctcatcttttcctctttcaagctcttatccatggctttctacggtggtgagcttgtgcttgactcatcttcttcttgaagtggcatctccaattatctttcttccatatccattccactgccatgatctttaagaatcaaaggactccattgatgaagaagatccaaggcctaccagctccacatggagctacatcatgtgatatcaagagcattttcatctaggtgatgttcttttgcttcctctatccttttggtcagtcaattcactttaattccttggtcttaatcttattc

SEQ ID NO: 21079 - DNA, 1086 bp, Glycine max
  unsure (1)..(1086): unsure at all n locations
tgggtattacatcatggacctatcatactaagctggaaggtgtctacctacaaatatatatatgtatgtntaggtaggaagataccatatatatgcatgtatgtnaacaaaaaaatactttcacaaatatatatatatgtatgtttaggtagtggaaataccctagatatgcctgtatgtataacaaaaaatacttcacacaatatatatatgtatgtttaggtagtgaaaataccttanatatgcatgtatgtaaacaaaanaatacttcacaaaatatatatatgtatgtttaggtagtgaaaataccttagatatgcatgtatgtaaacaaaanatatacttcacacaatatatatatatgtatctctaagtaggaagataccttagatatgcatgtatgtaaacaaaataaatacttcacaaaatatatatatatatatatatatatatatatatgtatgtatgtatgttagggaggaagataccctacatatgcatgtatgtacacaaaagatacctctcacaacanatatatgtatatatatactatatatatatatatatatatatgtatatatatatatatatatatcatggcgtgtgcgtgcggcgatacgcaagaaccctctgatatgtatgtatatagcatagataccgtcccaaaattatcccctgtttggggtggtagaatcgccttcatagaaaacgcccgcgcctctcaacacaaatatatcttttgcttataatccacatcgtgtcgaaagaaaacatccaccttttttgagaagagttctgtcaaacaacagttgtttaaataggtgtatccttgatggagataccggacatatttgtaccccacatcacctgtggatcgcaattgtatacacatatttgaaagttgttgctaatatgaacttattcgtaccgtatcacaccaatcttttcgcctgagtggcgtgggtgcaaaatttgctaaaccaaaatttgcgtttgagtgaaatgcgaccttctatcgtaagcaacgatatttgtccgtgtagctctggaaaatatattacgtcgtgggagattactcgcgtaagn

SEQ ID NO: 21080 - DNA, 490 bp, Glycine max
agcttctaatttctatttctagaccaaaatcttatttttatcatctagggcattaatgagtcgaccattatttgactagagaattttctctaaactatccttattttttctatactttagcttacaaacttaagaggttaaccatgctaaggtatcctatggtaacatcgcattttgtaccatttcaatagtctaaaaaaactacccaatctcatattggaatgttacattgtttatgcattgaatatacaaggaggactttgtcaatatactagttttatgcaacatcttgaatacttcaagtagaagatacatgtgctatgtccaaaaataaataaagtaaatcacactgggttcccctaaggttttcacttattacaactaatatcccttcattttttggtcctacacaaaaccccttagtttttttggatgtgttacatcgggtactgtaacacccttaaaaataccttttcaatgaaagaacgtc

SEQ ID NO: 21081 - DNA, 236 bp, Glycine max
atgcttcatgatgtattttggccatacttgatgtacattgatattggttaatgtggacatgctgaatgaaatgttgttttcaagtataaaaaaaaaaatattcataaaaaatgaaaagaaagcaatcagttgttgaatagatcttaatggacaaaatgataaaccttggtcactctcatgttaatttatcttattcttttatttttcttattgcactattcccttgcccctttctt

SEQ ID NO: 21082 - DNA, 613 bp, Glycine max
agcttgtaggcactttgaacgcaatattctttttattttttatcctccaaatgactattttgtttttgtaccttgcataataggcactcgaagaatggtattcacatcccttagattgaatatttgattaatcacacccacgtttcaaactttcatggtgaagtcatccataatatcttgttacgtttgaagattctttcatctccatttgattataagagattcaatagtgagattttacttcattctcaactagggttcgttccaaatacctatattagtaccatttcccaactttcatttatatcctttctttatgaccattttagaagagaacatacttcaccatgtaaatgatgggttgtgccttactaaagcttccatacactcttcccttaagaaatatttagccttgatgactcttgacagcaaaacatttagcatagaaaagatcctccattattgctttcctaaccatggaaagttgaaagcaaatatatttctaaaacctaaccctaatttctctttataacacataaccctgtccaacaccatccaatttaacccctttcctacctctttttctctaatccccaccaatctgaatttatca

SEQ ID NO: 21083 - DNA, 857 bp, Glycine max
  unsure (1)..(857): unsure at all n locations
cgtgcttgcatcactgaacggacatacnaagctnttgcccatccgtctggagctagaaaatccaaaaacaaatccctcttattactattctatttgaatnctttagttcctgaatgtccgaccttcaaattgtgttcgtcccctctttctttctgcaaaaagaaaatcaatgctgtgaaacatgatgaagcctaagagaacaatatcaaaaaacatggtgaatacattaaaaccactcctattttcaagcctttggtaatttgcttgtctcttatgcgtgggggtttgttaataatgtataattttgcttccaaaaaactatgactaatcttttcattatcaatttgatgtattgataaagatatgggtttcactgctcactactttctgctctgctctctcctttctttttcccctgactctctactagacgctcgctttacgttgccggaccggccccaagccccacttcatcgttcctaaaccctgtgttgagaccaaggcggtgactctctggatgctacgcccccaaaaattaaacttatggattgggcctaaagtgctccctcacaatgagggtcctctgcctagaccgattgaggaatcagttcctttttctaggggaggatccaaattctttggacaaactttctcttgcgcgattttcccagcttccctgtaaagattctcacgcgggtggagccttataactccagaaagctccccacccaggtcggactttgcaacattccgcaagaccactctacccaacttgggatcgatcggagagtcttaatactgccctgtcccacttgatttgttacccatcccccacgatccatctgtcgtcttctacn

SEQ ID NO: 21084 - DNA, 448 bp, Glycine max
ctattcagaaaagtagagtttatctcttttatcttagggagagggaaactcctaaattcttgagtgatacaagaacaccctggctgtatcaaaggactttcacaacctttgtgggttgccctcgctggaaagagtgaatctttccttcctatcatctccacccttgttctttcaaaccacaattccagaaaatccacctctgcccaaaattatctcgtgaccataactcccattttacacactcaaattaagcgattcttgatcccaaattgaatttcaaaacgagatctttcacctcggtgtggaatcacctcaattggagccctgtagcctccgctattgccatttatatattcctgtccagccaccacttaacccacggttgaccatcccattcatccatttgatgccagaaaccaccttattaagacccacgagactaaccacc

SEQ ID NO: 21085 - DNA, 252 bp, Glycine max
catgtcattttttttaagtgaacggttttgatcccacatgtggtcgggtgctaacacatgaactaaaagattggaagttcacgcttccttttgttttgaacgaaaccacgatacatactgaaacaatgtatgcatttccatcaaagttgttacgctatgctatgatccatactatcccatgtgagtgaattatacgacaatcagattgtctttatgttacaatctatcatcatgattaatgcttaaacacaa

SEQ ID NO: 21086 - DNA, 549 bp, Glycine max
cttatttcttttccatcgattgttttcttttaccattaatagattagcaaatgatagcaagatcacagcaaacaacacattaagaaggaagtgtaaatgagatgcataaatatgaaagatgagtataaatcatagcatagagagcagtgggtcaataatagcaatcacggctaaaacctgcattatttcatgaagggataagttctgcagttcttacattacatcaagccaatgatataacatgacagcataccttgagacctgcaaaaatatatagccagatataattaataaaaagaaaatatagtatgatgaaccttaactaaaaataccatagaagtaagattcaatcaattgagacaaagaaacttctaacaaagaattatgaagcttcaatttttataacccgacatacatggtataaagtacaattaatattaaaatgaacagatacttcaatgataatgaaaagatacttgctgtataatcaaatttgcaacgagcagaaaacaaagaaggtataggaaaaaagtcccgtctttgcttggg

SEQ ID NO: 21087 - DNA, 487 bp, Glycine max
  unsure (1)..(487): unsure at all n locations
attacttaacctagctattctataatcatgacctctatgtgcaatattttttcttcatattttattctggctactntcacaaacgtgcaatcaactccaagctgcagtggattttagcaaagttgaggacattacatgataaactcccattaagtagttctgcatttcacttaaattaatatagtttagaagctgcgtgataaaattctaacctcttgagttaagtcaaataattgtgttgagtatataaagtacaactgacacattttcattcatcatcatgtattgctttaatctatattgtacgttaactctcattgtttacctcaaactccttttcttttcttttttgcattctaacttctagtgagaaaagttgatgataaaaaaagcgaatcacgatcttgttttgttcaaaaatcaagtgttgtcagcatatagctaacctgagcccattaagacaatttaaccatttttaaaatactct

SEQ ID NO: 21088 - DNA, 445 bp, Glycine max
agctttggggtaggtgcgacaacatattttattgtgtattttatagaaagatgctttagaagggtcactaaaaaaatgagaatatgttttatcactgattagttttccaactgcccctgagaatattttgtgcagctagaagaccaagtgattctctgcttatttatttccaagtttaatcatactctcttgccttcaagacgaaacaaatccatcttttatatataaagcgcgaaaaatgtttggctggaattatttcaaaaactcattttttttttcaaactcattttgtgtctagtaattgacgacctgtaagcctcaacactttggtaggaagtgcaaactatttcattcactcaatagatattctcaaacctaagatgaaagaactccattcatgaaattgattaatccaactggactaagggaaacacattacgaacca

SEQ ID NO: 21089 - DNA, 837 bp, Glycine max
  unsure (1)..(837): unsure at all n locations
cggtgttacatcattaacggacacttngaaactcaagctcgtctctacgtccttcctactgaccttatcttctaagccgttcttaaacctctggccagctctgctctggtnttgcatttttcttatctaaaccccacatcaattttaattccctgattttcttctattaagagtcagtagcaagtggtttgacccttcaagtgatgcaccaccatatgtattggccattttcgtattctttggcttcatggacaaagctgcttctcgattttcttcagtgccttttactcttatcggtgcccttttgctttggatttgtgccttgggggatttccatttgcactgaacacccgatcaccatttgattagtactgattcttgctggtcgcatgcctcgaaattcgtttctgtcttacagcttgcacctctacgtgcaggttgcatatcatggcttgtgtaactgagagctgagctaattgacttgcttcaagtaaggttgacatatagacaactccatcgcgagtcggacaagtttgttcatgaaacattaataacaaatgaggtcaaagttctcaaagaaaaaggtttccgatatgtaacttaacccaggtgtgtctcaaataaaggatccgaatcgcctgacaatctttttttttaacttcgtaataatagtgaataagggctacttaaaatataactcactgtatacaccgcaacggtgtggcttaactctaacaattggttcttctgcaggggaaatcttcacaaatgatactgtcttctccctatttaagtacctacccgaaaacggcgatttacactaacgacaatagtcat

SEQ ID NO: 21090 - DNA, 571 bp, Glycine max
agctttacactttttttacacaaacattttctctgttgttctttattgatgattgggaacaatgactagggaaagagatgattctcttcaatatattagtgtacatttgaatgggcaaaatcatccttattggagttatgtgacgagaaattttttgaaaggaaagaggacgcggggatatttttctagaacctatgttaagcaaatagataaatcataatggaaaatatgaaactgagttgaaatattcgtgggaagcaaacaattcaaagataatcacttggatcaacaattatgtttcacaatcgataggggttcacatgcaaaatatgaaacaacaaaagacgcttgggaccacttgaataggttgtatgtgcctgccaactttgcaaaacaatattagttggaggatgatatgtgggctcttcaacagaacatgagcgtattcaagaattttattttgccatgttcaaccttttgggaccagttggttcttactaaatatgttgtactacaaatcattcaaaccatattttgatttaagaaaagagcaatgtttggtccaattttt

SEQ ID NO: 21091 - DNA, 224 bp, Glycine max
ctcgatgaccttaaagaacttgcacctatgaactgactgcttgttttattgatcatatggaaaaatgtgaagtgtatcatatatagactgtgcgtaaaaaattattgtcaccaaatatatgctgttgtcatgtgctaatgcaccatatgtatgctggtttaagtgacgtaccgaatgacgcttgcacatatctatcctatacgttgccccattttttaaaaaag

SEQ ID NO: 21092 - DNA, 79 bp, Glycine max
  unsure (1)..(79): unsure at all n locations
agcttatnccactaaacaaagttgattatactggtcattcataccattaggtttggatagaaatcaaattctctgcttt

SEQ ID NO: 21093 - DNA, 373 bp, Glycine max
  unsure (1)..(373): unsure at all n locations
aagttttcttgacattgcttgttgcttttaggatggagattgaaagaggttgaacatatacttcgtgatgggtatgatgactgcatgaaacatcatatttgggtgttggttggaaaatctctaatacaggttagtgggtgggatgatgtagttaacatgcatgactttgttcangacatgggcaagcgaatagaccaagattcctcataagatccagggaagcgaacgagattgtggttaacaaaagatataattgaagttttataaagcaactcggtaagtgagaggatggcttcttatcttgattgttttttctatcttatctttacatcatagacaaagctttgtatgataattcggaatttttttaaca

SEQ ID NO: 21094 - DNA, 316 bp, Glycine max
  unsure (1)..(316): unsure at all n locations
agctttacatagagctacatcatgtggtatctgatcatcttcatctaggtgatgctcttttgcttcctctatctttttgntcgatcaattcactttaatttcttgttcttcatcatcttctccatatatctcctccattgtcttgtggtttggtgctgtttagaatagattaaaaaaaaaccgattaaatcttagatctacacttgttcttgcatttctatggttcaaattttatagatctactcttgaatcatgtttttgtgttgattttaggttctatcatttttcagttctaatctcctactgctaattcttt

SEQ ID NO: 21095 - DNA, 311 bp, Glycine max
  unsure (1)..(311): unsure at all n locations
actctagaatctncaggcctaaataagtctacaaaaccagtaatatacttataaggcaacagacaataacaaagataaacaaaaaggttataatggttattgttgactacgaccaacaatacacagtaaatattgtaaatattatcaacatttataacatatattgtaaatattatcaacgttggtctttatacttggagttggtcaagccgttgtctcaatcccaaacatatattgtaaatattatcaatgttataacattagtggtaagagtagttattgaaaagaataaacaagatgaaaatatcaaa

SEQ ID NO: 21096 - DNA, 298 bp, Glycine max
catcccaagttgcctacacaacaagatctccttgccactcgagcaaccagtaaggaacaacaaacccattcttctgccctttctggactactaaaatctattcagggaagatactggcaaacacctccacttacaaacctgcagataagattggagttgttatgtagaacccaatgcccacaaaccctttgagctgagaaatatgaaaaacagggcgacatttggactgtagaggaagccacaactgatatgccactgtcacatctactcactacggtggcgaccataaaacagagca

SEQ ID NO: 21097 - DNA, 409 bp, Glycine max
  unsure (1)..(409): unsure at all n locations
attttaattcctaggattatgagcaaactatgcatattcaaactatgacttaagaaacataggcgaataaataacaagctgatatttaaaagatactaggctgcctcctagtagcgcttctttaacgtctagaaccggacgcgggatgatgatctattgatcacgggcctagcacctgctcgtatattgccctaagtctttgaaacaggatatggcactacacagtaaactatgactacgctaccacttacttttgctatgaatatggcgtggtattgaccanatctctacttatcctccgactcacgggatgacataaatgcatatgcatgcacgctcatgattaggcagttcaagtgcaacagattaaaacgactgtttattattgttcaattttacttaaacgctc

SEQ ID NO: 21098 - DNA, 93 bp, Glycine max
agcttagtgcacgttgtaggcttagtgcgccttatgtcttattgcgagctgtaggcggcttagcgcacgatgcatgcttaacgtgcactgcag

SEQ ID NO: 21099 - DNA, 337 bp, Glycine max
  unsure (1)..(337): unsure at all n locations
tttgaatttatgaatgtaagcaacattatgcaagactaaggtgttggntaaacaaactgaaccaatggcaagaatgggtataatgtcactattangtagaggtacagttttatcataaacaagctaataagatctaaaatgatgaagagagcanagtatatgaatgcttgcaccagaatctaaaagccaacaatcatgaagaanattggaagtggaagtagaaagaatcataccacttatggaagaaacatcatgaagaatgacaacattggtagcatgactttctaaaagaatcatcaattggctatattgttgagcaataagttgaaactgggaa

SEQ ID NO: 21100 - DNA, 139 bp, Glycine max
agcttatagcatctcaggtcgccaggaacttttagatcgttcttttttcctccaccgcatgtcacaggttgaagttcattagtaacaaccacaacctctcacgccaacgactatatgaacatgccacacaccatctcac

SEQ ID NO: 21101 - DNA, 1199 bp, Glycine max
  unsure (1)..(1199): unsure at all n locations
tgttgcgtcgaggaccttgaaactcagctttgacgtgatcattatttatggcacagattaaagatgaagacctggtcgtgatntatctttggtgtcaccctgattcagtgaagttattcaacgcatgcaatttggtggttttgatagacacacctaacaaacaaaccgggatagactcttcatgcgtcgatttggtgggatgacaccgaactgggatgacattctctggcgggtttgcatatgtggaaggtgaacgccgtaattaattggattggctttacaaccgcttccagggccttttttanagcgtgatgccctcccttgcagtattgtcactgacagagaccaaacatcgatgaaatgcaggaaagatgtattccctgaatgcacaaatttgttgtgcatcttccacatacacaagaatgtgaaggctaaatggaaatcactaattgcgtcaaaatatgcttgtgattatgtcatgcgantgatgtggatctcctacatgaatcgtcctcacgaccaacaggtcgattgacgttcatttagatatcagctgactgatnaccgaacatctgatcattatctcacctgactatgcctggacttctcgaatataacgcatacaccgatgtcattattgtctccagtctacctggctttgtctatttacgaaccatagcactagtaacgaccttcttcgctcgtattctatgatatcgcctcctngacttctaatagaatatgatctcgatgcncnacgatacttgttccatccagcgcgcagtgcaactgtgtgtcgatacgctctttgcgctcatactaanacgattcgtctatgtatcgcgacttatcgctctagatantcgcactagatctgcactcaccatgacatgtctacgtggctagcacatacaggcctgatngctattcgtcgatctctatcatcactgatgtcgnctcgctctcacanctgcactgagcagatctgttcantcagtcgtcgtaactcgtctatatcacgatacagtgtaactctagcatagatactctgttatgtatcttgtcactaatttgaattacgtgtctgtactcgtatctgactactatacntcactcgtatcgtgtgtcgactcgtcactacttctatctgcactcccggactctatacgtcgtcgcgnttcgacnacacatgtacgcgn

SEQ ID NO: 21102 - DNA, 588 bp, Glycine max
agcttggacttcctgtgttttgggaacctctcttttctcttttgtacccaaacccaatcacctggttcaagcacgactttctttatgcttttgttggcttgccttgcatagctcgcatttttcttttcaatttgaaccttcacttgctcatgcaactttttcacatactcagctatagcctgtgcatccttatgcttaaacatagcaatgttaggcataggcaacaaatcaagaggagtcaaaggattaaatccatacactatctcaaatggtgaacaattatttgtgctatggacagcccgattataagcaaactcaacatgaggcaaacaggcttcccaagatttaagatttttttttaaaacagtcctaagcagtgtgcctaaagtcctattgactacctcagcttgaccatcagtttgtgggtgacaagctgtagaaaacaacatttattaccaatcttaccccacacggtccttcacaagtgactaaggaatttggatccctatcacatgcaatgctccttggtaatccaagaagccgccctatttttttgaaaaactgatcagccacatgacaagcgtcatc

SEQ ID NO: 21103 - DNA, 1026 bp, Glycine max
  unsure (1)..(1026): unsure at all n locations
nagttggtacccttcatgatgaactatctaatactaacccttcatcantnggtgttctaaaatggctcattttattccatgtaaaaaagttgatgattgcttccatgtgtgctgattgnntttcaaggagattgtgagactcccatgtttgcccacgagcattgttagtgataggactctaaattcctagccatttttggaggactttgtagaacaagttgggcactaaatttgttattttcaaccacttgtcacccacanaaccgatgggcaatatggaaagcttgttacatatagacgtttggcgatacttttgctcactgatatgttttgagggaacaaacttaaggaactttgcgaaagctatgtttactccacatggttcgaattttgcttacaaataaaagctgttcattagcaccaacaaattgttctccttnttgaaagtgtttatggttctaacccactaactcctcttatctttntgctatgcctaatgttattgttctaatcataaagaaggtcaagcaanacgcggactatgtaatgagcctcatgagagagtccaagatcacattgtgagaaaaataaaagctatgcttaacaagccatcacaaggatgaagaatgttgcttctaaccagagattggtttggtcgcatacaaacaaaggttgaaccaagaatcaagctcaccacggagatgactttaaggctgagaatatgcacagttcaattgacgccggggataagtgataccttcatgcttatatttttttggcgatggaacgattttgcgaatttctcagggaaatttagcttgctcacaggtggtccttgtgacttacaggtaacaggaaaagaccttcacagtctcttttaatcaccattatgaaaataagtttgtttttgccaagagggaaatgcctcttcattaatgatgatcgaatgacactgtgaagtgaaaatacttggtaaccagcgtattttatcatgaacggcatgaccgatacttggaatggctgccg

SEQ ID NO: 21104 - DNA, 323 bp, Glycine max
agcttattgtctgcccaaggaagcacttcccttctaattatttcaagggataagttttctggttgttggccttgatttgattggagagcaggttagttaaggttcagattttgaattttaagtgcttacaaatcctctcagatcctcattcataaaggtcagaatggtcaaatcttaaacccatccccgaacacattgatttgagcctcattgctgttgtcaagtcatatgccttaagttacataaagttgttacagatcctaatggcaaaacgtatcaacgccttggataaaaaaaaaacggggtttaactttcctgtccta

SEQ ID NO: 21105 - DNA, 920 bp, Glycine max
  unsure (1)..(920): unsure at all n locations
nggtagcgagacgtangangcgganactcagctaagatcctaccgaagagaggggcggagtgaacctccctgctatgtgtttatttctgtacccccgcctctgccagagaaacgtaaaaaaaaggggtgtcccgggccaatttaaaatcctcaaataaatactcttgtaattcccaggtccaatcggcgccctataaggctcctcctttctaaaacacccccggcctaaatcgcactccatggcatgccgacacgcgtgcctacaacccccgacaatcaacaagacccctcctcaccatctataaagcgacttcccatgccaactaccattggctgtcctgcctcccgcaacgattcccactgtcctcaccgccaaatcggatcctctttttgtcatctagcttcttctcctacttcattcttaccccgtgctccctatcacccggagaagatatttctgccttctcttcacactctggttttactccactgcacatgccctgagcttactgctactttcttttctcagtgtttatgcatcgacttctctctggacctcggtactcgatctaacacccctttcctcccactcaccttttcgcttcatcgtcgttctcctgcgaatcatatactcacatgagtactactctatcttcatcatgtacgatccccctctgtcggattcttctcttactccgtcctctactactgtagctctacactctcgtatttctccttctcttcgacccgctactgcatcatatttattcttctcatttctagcgttcccgcgcctacgtccttgccttgtatggattcactctctgctgctgttcataaatctttgacgcgcctctcttggtctttcgcatccttgttcgtctttcgggcatccactatcccacgtgcggcctcgttcg

SEQ ID NO: 21106 - DNA, 993 bp, Glycine max
  unsure (1)..(993): unsure at all n locations
aaggtgatacccccgtagnaaaacatggacannnccancaanncctgccnaaannangccntccatngancgactataaagtgagaggctgatgtcttctctaaaacattaatcatggttccaaatacatgtgtaatggatatatctacttcttatgcctcaactattaatatgattgtattattctttatattaaccgacaagcactcttaaacgaagagaaaacaacggaacactcacgcatgtttaattcaccattttaatcaaagctttaacaatacatcaggcaccctccatgacattttcttactaccgtgcatgaataaccttacgctccccccttatttcgcgattactaaaaaatgggaagactatggaccgccgtcaggtgatcgtcctttaccactcacaacactgataactgacgcgtctgttgcggattcgtcgatacgatacaatatgagctctgcaggcgactgtcaacacctacccccaaagcgataggccgcctcaattggatataccgtcagttctgaantgtcgactcgatacctgactgacaatgtgacttctgctccatatctaatgatgctgcatgctactccgcctcctaactgatgaacaactacatgcacgatcgcacgaaccatcacccatcttaagtgcctaaacgctcgcttaacgtctgacccaccacgcatatcatatgctcgatcagcgacgtccgacgaatcgactaaccttcctgcattatgtttcgatcgagacctcgaccattccgatgcggacaactgaacaaacttactactcatacatctgctgttacactactgcgactcttctatataaccatcgccgcacacgctngctntcgtctactctgtcacatccattgcatcggtcgaacggtcgactcgaccgcaacgatatacacttaccgatggcttcgactgcattgcacgcgacgaatattctcgactcgccggaacgccg

SEQ ID NO: 21107 - DNA, 376 bp, Glycine max
agcttcaacattcaatgttgagcggttttactctttactagactcaatcagacatccgagtaaaaagttattttcgttttaactggctcagaggttcaacattcaatttcgagcgcctcgctatattacgggactcaatctaacatccgagtaaaaagttattgtccgttgaattggctcagggcttcaacattcaattttgagcgtctcgatatatgacgagactcaatcagacatccgcgtaaaaagttattgtcgcttgaattgtctcagaggctaaacattcaatttcgagcgtctcgttatgatacgggactcaatcatacgcccgagtaaaatgctattgtcgtttgaatttgctcaaagattcaacatt

SEQ ID NO: 21108 - DNA, 536 bp, Glycine max
agcttatatataagctgaaccaacttatctatactctttaggcgaggtctagtccgacaagaagagtttgtctatgttatcttagtgagagtgattctcctatattctggagggattcaagaacaccctgcctgcatgagaggacttgtaccaactttgggtgtggccctcgctggatagagagagactttccttactatcatctacacccttgttctttcaaaccacatttgcagaagatacatctctgtccacaattattgcgtgagcataactgccattttacacactcaaattgagtgatttttgatcccaagctgaattacagaacgagatctttcacctcgttatggaatcacctcattaggagccctgtaggttccgttattgccatttttatatttcttgtcagcccccacttaacctacgttttaccagcccattcatccattttatgccctaaaccaccttattaagacccacgagattaaccaccttattttccatccctttctttatcattttccgcatttttc

SEQ ID NO: 21109 - DNA, 853 bp, Glycine max
  unsure (1)..(853): unsure at all n locations
atgcacctgaggcctataactagctatgctggtagaagatgactgagatgccaaaaacaccttttttttacatcttaggccagaaagatttaatgaaggtataccacgtgtcggtgaggctacaatagactacaggaccgtgaattccgccttccctctctgactttgtcgaagacaactcaaagatgagctagcttgagacacacatggtgtgcgatatttgcgcatcaaaacagctagtagagcgcatatgcgtgatgatgccatgaactatgccngatgtgaagcattaatatcataacggactgagctgaatgtcatttatgttatgacgaagctatgcacgctgatccaagcattaagacctagacctgaaatatgtttctactgccatatgcggacgaagcctctgtgtacaataaaaacgtgaaaagaccctctggcttcctgtttatgacagagcaactctatgctgcanagataaatgccgaaggaccgcatccctgaatgtgggcaaagcgggacaagctactcacacaacgttactagtcggactgagcacgtcaactactgcggcctatctaaggcctaagcatatagatcattcgcaaatcgtgattctcggcgatagttcacaggtaaattgttaatgcgaaatttgttcggcataaaacagagtccgcaattgccctgtgcggacaaagcttcctgttcttaaaaattggacacctagcttggaaactgatactcttaatcggaaggaatacttttaatggggagttttacgaccatctttttaaactactaaaattcgtgtaatacaaccacgataatttcgtgattttggtctgcg

SEQ ID NO: 21110 - DNA, 171 bp, Glycine max
agcttgtggttgttgtggagctctattcgattatcctacataagatttgttagaatgtcctagaaaaaagtgttagtgggaccagaatatgcattattattttgtggtctccagccataaggctaattagaacatgagccacctctgtagccttgatagtttccttggaag

SEQ ID NO: 21111 - DNA, 800 bp, Glycine max
  unsure (1)..(800): unsure at all n locations
nagtgtgcctcgttacggcctatatctgcttgaggtcagaggcctatgaatctccgctatgcatgtcctgacccctctctgactgaatttaacgatcatgggtgatgctgggcaacatgacgaaatccggaaagaaagagcttcgctgttacctacctaagttaggaagttcacgaccttgtganatgagactactcttgctcgaaagaaacgtgtgtgctntagtatgggcantccatcggctaaggcagtacatgctgagcctactacctgttgatatcaagaggactcgttagtcatcttgaaagcagcttacggacgaatgccgtggcagtctgtatcgagttgactatctcgtacccaaggcataaagaacacctacagatattgctcacagctctaatgactatagccatgcatctgaatcccgataggacatatgccttgttgagaaaatggataagatcggacaatggaccgatgttgacgaacgtcaacatttatgcatgcgtggggcgtgtggctctccgacatcatggtccttacagcagctagataactgccacactgcgattaactgccttcgcaccatgctcagcatctaggcggataatgatctcctgaggaggaatagacactgcctcaccttagatgtaacttaacctctttccnagaaagggggttttggattctaccaggatccctgttggtgaacccgtcataagaacgactgttctatttgcaatcccatccctaagctgagtgcgtttgggttgagacacactcggccaggacctaag

SEQ ID NO: 21112 - DNA, 630 bp, Glycine max
agctttttgaaaacagtctttgctactgtttttcgattacaataaactggtaatcgattactagagtgtaaaaactctttggtaaaagattttgtgaaaaattcatgtgctactcaatgttttgaaaaaattttcagtacttatcttgattgagtcttttcttgattcttgaatcttgagtcttgaatcttgttcttgattattcttgattcttggttcttgaaaacttgaaacttgaaacttctcttgaatctttctcttgattcttgaattgttcttgactcaatcttgaaatcattctcatgggctttttgtcatcatctttgttatcatcaaaacacctggaatcaatcttgattcatcatcatgaagcaatgaagtttgcttctacaatctccccctttttgatgatgacaactctgaaatcaagaaacacatacacacactttttcctagtcgatcactcacttaactttttcattctcccccttttgttttgagtttatgctttacttgaaattaagttgattacttatgtgaggtcttgatttaattcctatttcctctcccctttggcatcaacaaacagccatagtgcgttagaaggtataaaacaatcatttactattt

SEQ ID NO: 21113 - DNA, 329 bp, Glycine max
  unsure (1)..(329): unsure at all n locations
ctaagctcgctaataacctgaagttgagagaaaatgattattaaacacacaaaatgaatatactaagtatttattgcctatactgaacagaaaatacttataacattacaaaataaccataaattaggagagnttgatacaatttatacacagtttatacacaaaaagttagtcattttcaccgactaacaaatgttcaaagggttattgagaagaactcccacccatggttttccgagccaattcaattgaatatgtttatagatgggctgagaccacaaaccaaagcaactgctagatgcttctgtaggggggaatattgttggatc

SEQ ID NO: 21114 - DNA, 217 bp, Glycine max
agcttagacgcgaaaacgggttttttttactctttatgaaagagggaaatggaaaggggggagaggatactctgaaacgctatacattgggatcaaactcacacccagggcgggacaacaccattaaaggacaccattgaagatcggagaaacagcctacatgtcagcgcaacaagctatgtctcctcaaccctggatattgcccaataaatggggg

SEQ ID NO: 21115 - DNA, 326 bp, Glycine max
  unsure (1)..(326): unsure at all n locations
tcttagtttcagatgatgcagntgagtttgtagctacctcatgcactcctctaatgactatagcancatttctggcgctaaactgctgtgagttggaagccatcttctcaattaaatttctggctttagcangagtcatgtctccaagggctccaccactggcagcatctatcatacttctctccatattactgagtccttcataaaaatattggagagaaactgctccgaaatctgatggtgagggcaactgtcacatagttttttaaatctctcccaatattcatacaggctctctccactgaagttgctaatacctgagatat

SEQ ID NO: 21116 - DNA, 206 bp, Glycine max
  unsure (1)..(206): unsure at all n locations
agcttgtataaagacgtccttgattatttaatcattttaaaaaccagnaaaatattaactataaaaaaatttataaaatttcgcataagtaatgtacaaatccaaaaataattaataaataaaaacatattgaattcaagtcgttaaagcacatagtatatcaaaagagaataaaaagaacataatattaacaaatatatggatta

SEQ ID NO: 21117 - DNA, 347 bp, Glycine max
ctctgaatgagaatattcttcacatgcatgtataattgtgagtatctcacaatgtattaaaatgcccgcacatgattctggtaagtgaccataatctttatctcttcatctctgacattcttttactatatgtctgttctatgattgggtaaaaagcactttttatcaattaatcacttaaaaaaatcgctctattaatatatatgccgaaattattacggtataatatctatatctctgacatatataagaacgcgtcactattgatatatatataattttaactatggtgcacctgatatgtactgttgccctttattataaacgggttataattcattgcccct

SEQ ID NO: 21118 - DNA, 958 bp, Glycine max
  unsure (1)..(958): unsure at all n locations
cccacactaccaaggacgaccaagatccaacacaccgacaaactgaaccaaacgcatactgcaccaataatcatntaattaaganaaaaagaggnatgatgactcgtacactgccaaaacacggaaanaaccgagaagaacccgaggaaagtaaccacggggggagcgaaggagggaatttttttcttcatcaaatagccgagcacttaaatggacggagtaccacaaagagaaaaaaccgaacccgccagcatgcaacaaaagaatacggagcaagagagaatacaccgagaaaggggaaccacgaaacgaaacaccaaacgagtcacgcccagcagagaagaaccagcacaaacaaaggcggggtatcaaccgaagagaagaaaaaacataaatgaaggaacatacaacacagaagaaaagccagaaacatacggcctaatggaagagagaaacaacgagagcgaactgaacgcaggaatacaagacatactccggataagagaacgtgcgagagaagagaaagcaagacaaaagcaaacggatgaacacagaaccaagaaaaagcaccaagcaacaagaggaagtagacatcgagaaacaacaaacagtggaaaatacgtagagaatgaaaacaaaaaaaaaagaagatacacaggggcgcatgcaagaacaaataaaaagataaaagcagcggggggaggcacagaaataaaatagagaagagtgaaaaaaggaaaggcggaccaaagtaaaaacaagacaggaataaaataaaggcccgaatatgggaaagatgaacaaaacgacaacactgaaacagaagagaagaaagtgaatgaagaaaaacaacaaactaggcgaccgaatcagaccgaagaacaaacgccgggccgacaacgatagatgtacgacgaagagagaaaacataccaaacgagaagagaccaacacacacg

SEQ ID NO: 21119 - DNA, 1089 bp, Glycine max
  unsure (1)..(1089): unsure at all n locations
ccagcatcgcanacactctacacacgggccctnttgcgatntcacgcgagacagtaactcacacaccccnnccnnnnnnnnnnnngnnnnaggattgataccctcgtaagaccagctggannngacgcngannngcncgccaagagngccnnnnnnnaaananagagacagcaaggcagaggtgtgtgtatgtctacnttatctaagggcacccgcagacgaggaagaaacctgtggaaacacccgaccgagagcaagaaaggagcgacagcgatcccacaacacaaacaaggtagtgaagcaagagagagggctacacaccgcacacacaacataatgaaacggtgcacaaaaacccaaccgcccccaaagggaggacagagagaacgctcacagaacgcggagcgattcgccggccgataaacaaccacataagcggcacacacacggttgttcccttggagaatatcggcgtcacggaaaagactcctgaaccatgataaaagggagcgccggcgaggcaacctacgaaaaagcacggcgagaacgcgagaaagaacgacgcgccaaccacgccccaatcgaggacgggaaacgcaggagccgacgaggagaaacgtacacaaaacgatggacgaaatgcggtgaaaagagccgccgccggaggaaaagcaacaggagaacggggaggagggagcaaaaggaggccaacgatggtaactcgcggacggaaccagcccggcgacggaaaaaaacacagaacgacacaatggcacgaaaaaagagccctccgacgtcagccggactgaggccaaggagatcgcggtgggaaaccggcgacaggcaaaacccgatccgcccccagggcgccaccggcacgggaagcgaccgaagctagcccaaatagcctgccccgtccccaggaaaagaagtttcggcaggcgaatagaagaagaggcaaactgaaaccgacggctgacaaaaaacggggaacgtggagtcggatataacgcactcgggcgaacaatcgcgccgcgaccagaccgcagaaatcaaggcgcgagccgcggcaaagaggacccatccccg

SEQ ID NO: 21120 - DNA, 232 bp, Glycine max
aaatacccatatcagtatatagggtcataattcaatttctttcttagtgaccgactgattcactttaaaacttttattggttattaagccagacataagagaactcaatgtgaaatataaactgtctttttggatgcagaaggagagatgaaatttaatgaaagagtcacaatgatttctatggaacaacaagaaaactttttttggctattaagccagacataagagaact

SEQ ID NO: 21121 - DNA, 415 bp, Glycine max
actaagactactcaaaatgtgctaaaatataaggctaaaaccctatactactagggtacccttaacttgtaggatagggtgcccttaatttgtaaggtaccctacaaacctaaaatggccaaaatacaatgccaaaaagaaggaaaatctattctaatatttaaaaagaaaagtggatttgaccttagcccatgggctcagaaatctaccctgaggttcatgagaaccctagggccttcttcagtcgctctagctcaatcctcttggagcctcttgctcatggctctagtgactagtctcttcctagggaggattgcatcattaggcttccatgatcatcaataatggaaaaaccatcaaaattgtgcacgagaaaggaagaacagaagtgaaaagatgaagaagaatgaagaac

SEQ ID NO: 21122 - DNA, 242 bp, Glycine max
cttgaagatgtttagaagaagttttggcttttacatgcccaactccttttagcggcatttgtattggttgttaacttgattgttgcatctttgtacatttgatatctgttatgcatcatgcatcatcatggttagagtgaagaaaattttctaagtttgaaaaatttcttctgaggcataatatatatgttttaatcgattacatcctcattggaattgattacaactgagtgtctatagct

SEQ ID NO: 21123 - DNA, 358 bp, Glycine max
atggcttattccctagaggatgacgcctcatctcacctcttctactttatcttccactgcatctccatggtggaaaatcaccattgaaggacctcattgaagctcaaagatccagcctccatagaagcttcacaggcaagcttccatcagtatatgtcggtgacatggtcatgaagtctcaaagtgtagcccaacacgtggcagacctagaagaagtctttgtggaactccacaaatacgacatgcacctcaaccctgaaaaatatacttttgtggtaggggaaggcaagtttctccgcttcatgatcactcactgagggattgaagcaaaccccgacaaatgcactggcatattgga

SEQ ID NO: 21124 - DNA, 373 bp, Glycine max
  unsure (1)..(373): unsure at all n locations
agctntaacctcatcgtccctcacagtctttagatttgggagcgaatccaatccttgtgttcggactctcagccacttatgatagccgccgatgatcccattactgcttcccctaagctctctgtcctttcttcacgccgcatcccatgccttgcgaactccttggagtaccctcgcgttgtggtcactaaaaccccgtgcgatgaaaggcgtgatgctttcgtctaatggcgctcctctcatggggtagccaagctgtcttatggcgagaacgagattataattaatacaactccttgttcccatcaagggaacatttggacatccttctcatgaagatagaatctctattctttcttccttctagcgaggg

SEQ ID NO: 21125 - DNA, 152 bp, Glycine max
ttacattttgtgaactgccttaggatggaaagaggtgtctgtttcaatcaattcctcagaagatcactgccaaaattttagcattttcattcctttttggtgagaactggcggtctttcaacagagtctacgtgagccttacatgttcccac

SEQ ID NO: 21126 - DNA, 423 bp, Glycine max
agcttataacttattcttaaaaaagaattgtgtaggtgtgaaacttacaaactatatttataaataatatttgaaaattttactttatcatttaaacacactaatatttccaacttgtaaaactattttttttttaaaaaaaactgcagttatgcctaaataaatttttaaatcaattccaatgttattgaatcactaataaccatgctaattttttttattaatcgtacattataaattatattgaattgtaagatgcagaggatcaaaataaatatattaaaatgacaaaagaaaaataactaggatcaaaatattaaagaaataaagaggccaaaagtcaaaaaatatttgtgtaattaaagatcaaaaggtaaatacaactatatgttaggaggaaaaaaagtattaagtctaataaat

SEQ ID NO: 21127 - DNA, 432 bp, Glycine max
  unsure (1)..(432): unsure at all n locations
aaagacttaatataaccccgcatgcggtagttatcgttgaaaactctggctggcttttatttgcttagcccaagatcattggtcatcatgcttcaagtatgtgcaagaatggatgctcggttaatcgatttgattgatctacaacccaacccccttcctgaagaagtctgtaaatcttcttccgggagacaataattagcttcctttggtctttatcacctgaccacatgaaatttctaataagctttacaacatcatttataagatgagggccagtaatatacacgaaaagcgtacataaggctcccttcaatgacagatctaacaagctgaactctacccataagagagagcaatcctccgttccacacaactaatntcagcttgatttatcaacctttgcttgacaaatagaagtataattagtataaa

SEQ ID NO: 21128 - DNA, 410 bp, Glycine max
  unsure (1)..(410): unsure at all n locations
ccgagtcattcatccctatgagatgttgttgaagtattggcgatcagaattgccattccttggattatagggttgaaccaagctcatgcttttacaaaaaggttcatcaagtcaagttgaaatatggaagtaaccgtcttgcaaaattggggcaaaagatgaatcgagtcacatcattgcttcgtctactgccaaacacatttaggattattgatgtccttgttacttccagtttcaccttgacaaagatgtcatggaccatgttgaaaatctaaattgattcaaccccatatcttgcgtaanaatttgcaatacttcaactgtacatcattcgcatgcatccatgcttttcattagttgcattgctcgttgcattctttccttgaaaaactaaataaatgaacttaata

SEQ ID NO: 21129 - DNA, 432 bp, Glycine max
  unsure (1)..(432): unsure at all n locations
cttctatggaatgttccacaagaatatgccaaatgaatattccaagaatatgccaaagaaatattccaagaatatgccaaaggggaggaaaactacacacatctcttcaatagctaagctcacacccatgtcaaaatacacgaaaatacaaaagaaagtccctactacaaagactactcaaaatgccctgaaatacaaggctaaaaccctatactactagaatgaccaaaatacaaagcccaaaagaaggaaaacctattctaatatttacaaataagagtggacccaaccttggcccatgggctcagaaatctaccctgaggttcatgagaatcttagggccttctttagcaactctagctcaatcctctggagtcttctatccaatacccttggnggataggattgcatcatcccctcccccttgaaaag

SEQ ID NO: 21130 - DNA, 251 bp, Glycine max
ataatgttttggatttaaagcattgttggatattattattgtgcttaagcttgtcatctgaacatgtaatgaattatttatattttaattctatattataatatttgaagaaacatgtatttatttaattggagttcattttaacatttagaaaagattatgtgtgcattattatgccaattaaaaagtaatccactgataaaaatattaataattaaaaatagtaataatttatgactaattttttttac

SEQ ID NO: 21131 - DNA, 392 bp, Glycine max
  unsure (1)..(392): unsure at all n locations
acttgatgccttggtcattctagtaacttatctngccatgaataaaaaatctgcacatgttacaagagtttgtggtctatgttcttctgcagatcatcatacagatctttgtccttctttgcatcaatctggagtcaatgagaaacctgaagcttatgctgcaaacatttataatagacctcctcagcagcaaaaccaacaacagcaaaataattatgacttttcaagcaatagatacaatccagattggaggaatcatccaaatctgaaatggacaagtgtcataccctaatttcgtccggngaccattgtttgatggcatgcaacctttggttgaccgcttcgaggtacttggcaccctttgctgcacaatacttgaagtttcgagacat

SEQ ID NO: 21132 - DNA, 255 bp, Glycine max
agcttgtgtggtatcgacaagcaaggacaaaaatgaatcttcaagtgacgtgacgaggaatcctgggggtagctcactataggtaaggggagtttattataaaatttaccattttaacaccatagttaggattataggaacctagctatgaggatatctgcctgtccttgtgcatgctgatttttcttcaaagaaaattacgttttaactaatgggatgcgatatatatattgggatgaatgatattgttttggc

SEQ ID NO: 21133 - DNA, 439 bp, Glycine max
  unsure (1)..(439): unsure at all n locations
tccacaacatccaagcaaaacaacattcaaacagcacatgctatcacagccaagcaaaacagagcaaaggcagaaaactctgctcaacacatcaaccaaaatcacagcttttctcacttaaagaccccagtaacaattccttcgatccaattcgttaaccgttggatcgactccaaaattttactggaagtctatagtgtataagcctacattgtgaccgttgggatctactagcaaacatccagaactcattctgcactagactttccacagccaaccacacacaagcatttttctgcacttgtgcaaaatcctgctgcacaatttcacagcaaaaatctgcacaaaatgcaaatttcgaanaccacacttcccctcatccaatctttgccaaatcaaatcctacaagtctcaaatcatgtatcaatcatgtctaaac

SEQ ID NO: 21134 - DNA, 252 bp, Glycine max
  unsure (1)..(252): unsure at all n locations
agcttgaggttagatgttggtgatcaaaggggagccttttcctctccctttgatgttgtttggttgagccatagagtgggaagcactgcttcttcctccctggaattccattttcatttttctcgcagagcatccgtaggagctcatgaaaaagctttattttgggttttgggtctatttgcaatagttnttgggtgatgttgttgggatgggcctgccgatggaatggaggaaagattttccccttgaccc

SEQ ID NO: 21135 - DNA, 446 bp, Glycine max
  unsure (1)..(446): unsure at all n locations
tgcacctcttcactctcttccctattcataccctntagctnttggagccaagttatcccttgtgttctaggtttaaaccatttgtgatagccgcctatgacaccattgcttcttcccctaagttctttatcttttcttcctactttatcccatgccttacggatcctctgaagtatcttcgtattagcttcattgaaacttggcacgatggtctcctctgatggcgcacctttcatagggtatcctaactgtcttatggccaacacaggattataattaatacaacccctcgtccttatcaaagggacatttggaaatccttcacatgagcataacactcttgcccctccttctttacaccatgggaaccaactaatggacgctcccatcatgcctgccaagagttcttcnccaattgctttgtcctttctcgagcacatgctatg

SEQ ID NO: 21136 - DNA, 408 bp, Glycine max
  unsure (1)..(408): unsure at all n locations
agcttgttgtttgcgacgccaacggagactactcaacaccatcggattcatattcatgatcttgatcttgatcctcgtacgctgttgatgaggagcgggttgagtggccagtagttttgaaacggtgtagtgtggggccagtggagtgcactgttgaagaattaccaatggggcttccatccatgattcgtgcactcgactttcctagcgtcactgctcctccctgcttcttcttcgcagccatgtgccatttcttcagagccttgtttgtttgctcgtcaaatattgctgntttcatccttgaacccatctgcgtgtatgtatgtgtgtgtttacagtgatacattgtcgtcaattagaccaattcaaacgtttatagcttgcaaaagtaaatcgtgtaatattaca

SEQ ID NO: 21137 - DNA, 448 bp, Glycine max
  unsure (1)..(448): unsure at all n locations
nggctatctgattatgcagtgcctcctagttgactagaggaacagttgttggtcgcccatgagcacactgcacagaaaattcccattttgtcaaaaatgctgcctttcctctcaatagattcacaaacatgaaaacgtatatcttacttggaaacaaagtgatgtatgttttagctcttcaactataagggaacattctgatggtagcaatgaatccccaaacataattgcaccttcaataaaagagcattatgattaaattaaaggaatactaccaaacataattgcaccttcaataaaagagcattatgattaaattaaaggaatactaccgatgactgcaatatgccctcccaaaataaggaaatctgacaggatcgggctgccaacagatgggggtttcatgcatagtattganggaaaacaaaggtaatatcatatgtttctg

SEQ ID NO: 21138 - DNA, 405 bp, Glycine max
agcttctccttccttttcctataaataggggaaggagggaagaacaaaaatgttcaaccctcctggtatctgagattcacttaaaattagttaggaaaattgtttctgtgaagaaaatccaagccgaggcgcttccatgacgtttctatgggtgatttcacaaagattttcaaccattcttcgtcgttcttcggcttcaattggtaagttcccgaaatcggacttttcaattcattctatgtacccttagtggtcctcatttgtttcgcgtgcttttattttcatttcatttactttccgtacccctttttgacgtgctttagtcatttatttaagtcattttctcgcctaatcaaaaataaaataaatttccactgatcattcgtatataacattctttatttc

SEQ ID NO: 21139 - DNA, 410 bp, Glycine max
  unsure (1)..(410): unsure at all n locations
ntggacattgccttataaaagtcgagtagtgggtgtttcctagcatttggtatgctctctttcccaaagggtagttgtctatttgcaccttttttctctctcaatacatcctccccatttttttagtttttcatatttctaaaatatcacttttcactcacattcgctctcgtaattgctttgcatcctctccactttcctctaaacatttccctcacttcttgcataactcctcttcctttctcttcatctatgtttacccatttccctttgccgacaactgtttttcccattttactagtaagtttcacatatatttgtgcatttcacaaatttttgttagaattaatgtctcatgtgagagacatgtgacttatgttgggactaataaataaataattaataattaa

SEQ ID NO: 21140 - DNA, 358 bp, Glycine max
  unsure (1)..(358): unsure at all n locations
agcttcatataagctgaaccattntatcaataaagacaagttgagtcttattcagaaaattagagtttatctcttttatcttagcgagagtgattctcctaaaatcttgagagattcaagaacaccttggctgtatcaaaggactttcacaacctttgtgtgttgccctcgctggaaagagagattctttccttcctttcatcatcacccttgttctttcaaccacaattccagagaatccacctctgcccagaattatctcgtggccataactccaattttaagcactcaaattaagtgattcttgagcctaaattgaatttcataacgagaccttttcacctggtttggaatcacc

SEQ ID NO: 21141 - DNA, 440 bp, Glycine max
  unsure (1)..(440): unsure at all n locations
tatgcgcatatttccttacaaacgttctcttgcacaagacattctattaaccgaaaaaaatgcacccatatacaatcaaggcagcttcgttacctagattatttacacgtacttccaaggtgtatttgttacttacatcacacacatctccttggctaaattcacatacatgcatactcaaagcattttgggggaccaaaaattgcacatgtgcacatcttggtatttctaatacctatacatacacaaacctcatgatgaatcttgactatctacacaataaggtgctacatttcatgctcttttcaagtttttgctacctaaggccgcatgcaaattcaagtatattttccttcgctggctaaaattgtattcaaattaaaaggtatacanttttntggtaatgtatcttctttacatagcatgcaacatatttatgt

SEQ ID NO: 21142 - DNA, 362 bp, Glycine max
  unsure (1)..(362): unsure at all n locations
agcttttatcaatgacatccgaatctactgtatttagttagctgctttatctatacaattatataactactacaatatgagagaagttgggtagatatccttttgtgaagatgtagagaaagtatatgtctggcttgaaattggaatcttctttagattagattcattcaacaataacagatctaggtcatttccttgttaaacttgctcactgcangtagaaaaatgttgtagagatacaatcaagcaaagataataaaacatacttttaagtgaatatcaattgctcgatataacccatcatgaactgtgcgtgcatgtgcaggtaatgtttcagcgatgaccatatacctggaaagttt

SEQ ID NO: 21143 - DNA, 421 bp, Glycine max
  unsure (1)..(421): unsure at all n locations
tcccacgtccgcacctgtaaagatctgattaccgccttccttagctacagtacaactctgacatggctcccgaccggagtcagctgcaaaacatggttaaatgggaaagcgagttctttaaagaatacgctcagcattggagggacctggcagcgcaagtagcccctcccatggtcgagagggaaatggttaccatgatggtggatacctcgcctgtgttttactatgagaaattagtgggctacatgccttccagctttgcggacttggtcttcatctgagaaaggattgaggtgggtctaaagaggggaaagnttgattacgtctccttggtatgtgccagcggtaggaggaccgaaatggatatggcaaagaagaaagagggagatgcccataccgtcacttcaacacctacatgggc

SEQ ID NO: 21144 - DNA, 404 bp, Glycine max
aatatcatcagttttacattcatgataccttgcagatgatagtcttacaagttaatgcttatgagtcaaaaataataagtgcaccattacactgtcttaccattgagccacaatacaatattgaatacaaattcaaactatactttgactaacaccaaatctgcttaagacaccaatgcaaacattgcatgaagtatacacgcagtaaacattttgctgcatcaaacaatggtgagtttattaattgagtaacaccaaacctttacgttgtcaatacaatatcatagacaattagttacaaacgcatgtattcttaaactgaaaccaagtcaataaaccattccaaacgaacacatgtgacaaccttatgaggaacatagctaactaatggcttatctttagac

SEQ ID NO: 21145 - DNA, 369 bp, Glycine max
  unsure (1)..(369): unsure at all n locations
agctngcctgtccgatgcagcagtaatgatggcccgagttatgttggggaccggttacgaacccggaatgggtttaggaaaagacaacggcggcataactagccggataaatgccaaaggaaatcgtgggaaatatggtttaggctataaacccactcaggcggatataaagagaagcatcgcgggaagaaagagcggtggtcaaagctcgcggttgagacaagaaagtgaaggaagcccgccctgccacataagtagaagctttataagtgcgggtctgggagacgaaggtcaagtggtcgcgatatacgaagatgatgttctgagtacattggatttggacgaccatgccctcctgatttccagctg

SEQ ID NO: 21146 - DNA, 394 bp, Glycine max
ttaccgaagcagctccatgttgctacctcaagaagcttcattaagaggcttcctcaagaagctttcccgtggcttctttgagaagctctctcaagaggcttctttgagaagctagatccttatttacccacacccttctattaactaaattaacctccttgaaaataattacggataaaaataacacaataaataatcgaacatcaaacataattactaataatatatagagatatatatatcagggtgttacaccttgattgcatcatgcatctcttcatggcatcgtaatgggcatatcattcctgcatttatcatatatcatattcatgcattgcatttgcgtgagtcattgcattatcatacatcttcatttaacatgcttttgttctac

SEQ ID NO: 21147 - DNA, 404 bp, Glycine max
  unsure (1)..(404): unsure at all n locations
agcttgcctcanagaggtccaggaaggataaggcggccgaaggaactagttccgctctcgagaatgacagtcaccgctttaggagcgctgtacatcagcagcgcttcgaagccatcaagggatggtcatttctccgggagcgacgcgtccagctcagggacgacgagtatactgatttccaggaggagataggtcgccggcggtgggcatcactagttacccccatggccaaatttgatccagacatagtcctcgaattttatgccaatgcttggccaacagaggagggcgtgcgtgacatgaggtcctgggtgaggggtcagtggatcccgtttgatgcagatgctatcggccagctcctgagatatctcgtggtgctggaagagagccaggagtgcaagtat

SEQ ID NO: 21148 - DNA, 391 bp, Glycine max
tcaaaacaacaaacttgttcagttcttctagaaagagaacacagacacaggagatctatgaagtcagcggatgccatggataacaaactcctcctttcccttctactgatctctcaatggaagattcatctgacattttctgttctggaaatatccaagacgaagaagatgttacgatcacaaagtccaccaagagttaaagacaaatgtattctgcctaaacacagttaaaatccaaggcagtaatctttactattgcatagattagacattgagcttatctataataaatgtatttgtaaaggacagctctgtgacacagtaaatgaatagtaactttactgttcttaactgaaggggttctggcttgctatgtaaactctctctatat

SEQ ID NO: 21149 - DNA, 339 bp, Glycine max
agcttctagatatattatgcgccggaatcagacttccgtttcaaaagttatggccatatgaatttctcgagagcattcgttgctcaatttcgagcgtctcgatatagtctgcgcgttaatcggacttccgtgtgacaagttatgaccatttgaattactcgagggcttccgttgttcaatttcaagcttctcgatatattatgcgcctgaattagacttccgttacataggtatgaccatatgaattgctcgagagccttcgttgatcaatttcgagcgtcttgatattatatgcgcctgaatcagactttctggtgatatgttatgaccactttaatt

SEQ ID NO: 21150 - DNA, 388 bp, Glycine max
attatgcgcttgaatcggacttccgtgtgtaaagttatgaccattggaatttctcgagagcttccaatgttcaatttcgagcgtctcgatatattatgcacctgaatcggacttccgtgtgacaagttatgaccatttgaatttctcgacaccatacggtgttcaatttcgagcgtctcgatatattatgcgcctgaatcggacgtccgtgtgacaagttatgaccatttgattttctcgagagcttccgttgttcaatttcgagcttctcgatatattatgcgcctgaatcggactttcgtgtgacaagttatgaccatttgaatttctcgagagcgttcgatgttcaatttcgagcgtcttgatatattatgcgcctgaatcggac

SEQ ID NO: 21151 - DNA, 419 bp, Glycine max
acctgctcatatactagaccttctacattaatgttgctctcaagaggcttgaaggttgcagaaccttggcagaaggaaccaaggcaatcatcaacttgggtctcgaaaaggttcctgtccctggagagtctggctttccatttccgggccttttccctcttcctcaatcacacaaggaagcaggtgaatcctgtcatcactattctttcatcttgattttcttatgagcagatgcataattaagcttagttcaatcatatatatagtcaatatgttagtagttagctttagatttaattactcatttagtccttacagctacacaaactttacctttttagtttttatacttaagaattatccatattggtccctacccatacaatttttaatccggtgatataatttttatccctttt

SEQ ID NO: 21152 - DNA, 326 bp, Glycine max
aggagtaaagtatgaacggcggtgttggtgaaggaacgagaggaagaggttatatttgtgtggctgtgtaagtctttgattgtggaaatgaccaacgaggaggcaagtgggtaacataatttcgttccttccagggaaagaagatgaagaacgtaacaaagaagaaaacggggaataaaaatgtggaaacggggcatctgaaccatttccattgcctttaaacatgacagcctttgcctgtactttatttgttcgataaactctgccttgtactttcaataaataattgatccatgtccggaataacggtatgtttctttcgagag

SEQ ID NO: 21153 - DNA, 449 bp, Glycine max
  unsure (1)..(449): unsure at all n locations
taattagggtatttgatggtgcatntatagtcatgttttatcaggagcctgtgagtatggatattacgtcatgcattggatatggtgcatagtcagtggcggtttgaagaatgaatggaacaaggtatgcatactattacaataagtaaggactttgatggtatcaaatcctacctcaatggttgatgtagttaaccaatttcatttntaaaaacttttagtggttttcagatggaacaccattagacaatgacaccatgacgacacttcgcaagaaatgggcagcctattttctagaagttccaaagatggatgttacacaaatttagatgacataagcacattaatgtttgcaactaaacatttttcattgtttttgtgtgatgaataattattgtcagcacatttagttgaacattattatatgactgtgtgttacttaattattt

SEQ ID NO: 21154 - DNA, 418 bp, Glycine max
agcttccaagtgaaaactgcatcttttggaggaattatcattttccatagtaatagtgaggttctcccatccgaggctggtgtagaaagggttatcaataatttatatgcagacttagtggtatacacaccactagggtcagctttccataacatgacatccttaacatatctctgaatatatatggaattaatctcctccataaaattcacagcttgatcactttcataatcaaacagattcctccaccacttgaagttccatctccagctatcctggacgaaatttcccatcattgaaatgagatcagcttgctgttcattgatgagacacagctgattgtatttctgttggagaggataatcctcccctagccacttgtctttccaaagaattactatatcctcacaccccacct

SEQ ID NO: 21155 - DNA, 422 bp, Glycine max
  unsure (1)..(422): unsure at all n locations
tctaccttctcctccaagctcttccttggtaaccctactcaccttattcctattttgctttactcggtctaactcttgtgtcgagctcttgaccacttttgctactcttgtcatggaagggtagaatccagaaaaagatatggtttactttctcctagcgggcatcccaagatcccttcaaactcttttatggttggtactaattggaagtccctaaacatgaagcatctgagcgactagtcatagtattgagcgagggatgcgatggcttcaatggacacttctatcatggccaaatcccagattttcctatatgccttgcggaaggcttgacgtcgaacttgatccatttgctgccctagctctcgcaagttggctagttctaggctcttgactttgacatgatagaacctttntttaaa

SEQ ID NO: 21156 - DNA, 391 bp, Glycine max
agcttacaatcaaatttaattatataataataggttaaacaatcattaaaataaacaatgatatttataatggtcttttattttgagtcaactgacattaaattgaataaaaaagtgtttgttaatctaatcattaaaaaaataacacattaattaaattcttatcttaaatagtgatttgtatcatttgtgtaaaaaaaaattggatcatgttatctggataattgttttattattgggtgaaaaaatcaaaaaataatgtgtcacaatggttttggctttagaacttacaagataagggaaattttcacttttgaaaataaaataaaataaatgataatggattattgaagaatgacatgacataacttgtcaattattattatcattt

SEQ ID NO: 21157 - DNA, 443 bp, Glycine max
  unsure (1)..(443): unsure at all n locations
tcccttctcttcgcttctgcaccttatgtcactgtgttgtaatggttatgttaatgttttcttctaacctccccctctttctctctctcttaattactttctccaccttttggtaaataaatttaagggaatttttctttttatgaattcaacgctccacgactaatttaccagctctaatttattagtattcatcatacaattttgtttcactcatttttttcgcaatctattattacaagagtctatcatgaaattaattgtgtcttttagaatgaatttgactaattntaattctccaagtgactgcaactgatggactcatcangatgttgtgaagctcaatggacgtggggatatttttagaatttgcacacttgaattagtaaaagcatgagaacatagtaagataattatgggttacgttggtgagttatgatatt

SEQ ID NO: 21158 - DNA, 414 bp, Glycine max
agcttgttggaaaggtcatcccaatgacctgtaatgcaacacacttgaaggcatacttcaattagaaaccaggtgtcgtactctttttcctactttaatattttatcccaaataaaaaaataatgtcttttggctgaagaggttttaacaagttgttcctaggtcaatgtaaaaggaaactcttatcattacaattacttaatgaaatccatttacaatttatatcatttactatttgttaccatcattactcatgtgcttatatttgcaaataaaaaaacatgagctgaatggaaaatgtcttacccaacactgcgtatagacctatttatgtcttactcaaatctatgtgatgaccttttcaagtcttgtatcaatagtacattggcattatgtctttgcgcaaatgcatat

SEQ ID NO: 21159 - DNA, 445 bp, Glycine max
  unsure (1)..(445): unsure at all n locations
tcgaatgaatgctacatcgagtaagactaagccaccgtactattttctaataaataattggaaatggtaatttgagacttaatttaatagacaaagtttttcattaatcgtaaattatatattaatttgattcaaaaataaattataaattgaattgatattaaacataaatttatttttattaagagatgttgttctttcctgaaaaactaattgaaagttgaaaaattaacttattaaattataaatatttaataaaactagttattaagataattaaaaagtataaaatgaaagacaattaataaaatcataatttatttaaaaatgataattagaaattttgataattatattaaagataaaaataataaataaatgtaaaattagaaactaatattttntaaaaatattaattcaaatagcatcttaaaaaatattaaaa

SEQ ID NO: 21160 - DNA, 355 bp, Glycine max
agcttgtaaggttaaagtctcacgattgtcacgtgctcatgcaacaattgttagccgtggctatacgagacatctttccaaacaaagtcaggttagccataactcgcctgtgctttttcttccatgctatatgtagctaagtcattgatcctgtgaagtttgatgagctggaaaatgaggccgcaattatactgtgccagttggagatgtattttccccctgctttctttgacatcatgattcacttgattgtgcatctagtcagagaaatcaaatgttgtggtccagtttatctacggtggatgtacccggttgagcgatacatgaagatcttaaagggtatacaaaaaatcta

SEQ ID NO: 21161 - DNA, 451 bp, Glycine max
  unsure (1)..(451): unsure at all n locations
tcgccctgaaacgaagtaattataggctttgtacccagaaatgcaatgcaaaaatgttntgagttatgaaaatgagatatctcgagtttcaacactctggggcgagatgagccttaaactgcacaatgctcacaatgttctttctctcttgttatgcttcgntggtcttctttttctttttctctccctttttttttgaaagacctagattgactgtttctttctaaaagatgtgatgattcatgcaacctcatcctatcttttgtagatctcttcagagacttcctcagagtgtatgttttgtttgatataattgcttggcaattttgggagataaaagtggaggcatttgacatttatctaatcaattgaaatattgattccagggttcgtccctttaacttttttttcaaaactntgattaccttgtacaacaaggaaatataatgct

SEQ ID NO: 21162 - DNA, 290 bp, Glycine max
gcttcgaggacacgtgtccatggcgcttcataagatttagttcagataccaatcagacttattttctacacaattttgtcattaatggtatattaaataagatgatcaatcaacactattttaatcaagaatatatctatcagtattaatttgaaattctctgcaatccataattataaatctgagaatcccgtaaaaggttcagaatacatttgacacttaaagagaagcttttaagcttccgaatgcaccgtgtcggattatcgtgcttcgaaaatttagttcgaata

SEQ ID NO: 21163 - DNA, 448 bp, Glycine max
  unsure (1)..(448): unsure at all n locations
ctcagcttaagtangctttcttgctccctctgcacaaggttcccaatgtccttgatgtaccgatccatcttcattgggagaaatatttccttaaaaaggtattgtgcattggttccatgctttccggttaagagagaagggaaaggcataaagtttgatgtattctacccgcacatgtttctatctcatcatgttggttaacttgatgaacttcaagtgtcgcatcaaattttcataggctgaaacaccaccactaaacatgttattctctaacatttgtaggaatccatgcttgaaatcaaatgtgactccttcatgtagctcgagtagttggatggtattggtttcctcgaagctatgggagaggtagtccataagagtctgagcctgantagntgccatngctctctctctctattcatggatctttgcatgaaaattttggata

SEQ ID NO: 21164 - DNA, 395 bp, Glycine max
agcttaacctaaatcactaagacaaaggtaagggtgaggttaattaactatattgcatttatctgacaaaagttacaatgtttaagtcttaatccttctacacataaagaactttaaattttttgagagctttgaatacaagatacaaggtttcaacaattcgatcatggtcaagaaggtctcttgtatttataggcatacttctaaagtattcatcgagacttcaaagatttcaacatattttcacatatcagagcttataatgggaagagcattcttcaccctatacattataacaagcaattagtatataaaagatttcaaaagccaactataagtaccgtaagtgaacaacatatacgaggtttttacgtgttacatgtaaagcattacta

SEQ ID NO: 21165 - DNA, 446 bp, Glycine max
tactaagcttgaatgtgcatctacaatatcacggccataggctttatcagcaccaattccacagtagtatgggccctgttcaaacccacatagattttgagtttagttatacaaggcaagatagatgtgagggaaaaaaaaaaagaagaaaaatagaaaaaacaaatgtgaatgaagaatgtgaatgctgatatagcacatcacgttttttttttttttcaattaacactaattttaccccacttatgcacagtaattgaggcacttatacatattttgaccaagaaccaatttgtgctagaatttcaacaaaaatttattggcattgcgttttaaactttgatgcataacaccagacgggtcactcaaatgtaatactatctccaccgtctcattataattatagtttataaaaaaaatcatcctaacataattattattttagt

SEQ ID NO: 21166 - DNA, 324 bp, Glycine max
  unsure (1)..(324): unsure at all n locations
caccttccaagtaaaaagaatcgcttgattcacccttaagaaagaactacgtacgtctgatttcctcttcgatggagggtacgaaggagcaagagcctcgcttttgtcgacctcaaaaataaaaaaggaaacaaaagttaagataacacaatttcacaattctaaaaaataggctgttgtccttngagacaaacgtgaggggtgctaataccttcctcaaacgtaaatacaactcccgaacttagaattttcgttntgactagtttcctttggtttttccgacgttntccacaaataaacattggtggcgactccgcgcatctt

SEQ ID NO: 21167 - DNA, 336 bp, Glycine max
cattattatggatgacagatttttgtaataaagagtagcgttttgaattcaatttgaaaacttatacaaaacgattttgctacttgttatcgattacaacaatctggtgattgattaccagagagtaaaaactctttggtaaacatgttttgagaaaaaatatgtgctatttaatttttgagaaaaacttttgatacttattttgattaagccgtttcttgattcttgaatcttgatgttgattcttgagatcgtgaaccttggagtttgaatcttgactcttaactctattgtagagtgttgaattcttctcgattcttatcttgaactcttgaa

SEQ ID NO: 21168 - DNA, 333 bp, Glycine max
acggcggcataactagccggataaatgccaaaggaaatcgtgggaaatatggtttaggctataaacccactcaggcggatataaagagaagcatcgcgggaagaaagagcggtggtcaaagctcgcggttgagacaagaaagtgaaggaagcccgccctgccacataagtagaagctttataagtgcgggtctgggagacgaaggtcaagtggtcgcgatatacgaagatgatgttctgagcacattggagttggtacgaccatgctctcctgattttcagctgggaaattggcgagtggaggaacgccccgcattacgcaacgagcataatg

SEQ ID NO: 21169 - DNA, 443 bp, Glycine max
acgatccagcggctaacaatttctgcgcattttttctaccgaggcatctccatgttgcttcctcaagaagcttcattcagaggcttcctcaagaagacttcccgtggcttctttgagaagctttctcaagaggcttctttgagaagctagatccttatttacccacacccttctattaactaaattaacctccttgagaataattacggattaaaataacacaatatataatcgaacatcaaacataattactagtaatatatagagatatatatatcagggtgttacaccttgattgcatcatgcatctcttcatggcatcgtaatgggcatatcattcctgcatttatcatctatcatattcatgcattgcatgtgcgtgagtcatcgcattatcatacatcttcatttaacatgctgttgttctacaaactgcctacatt

SEQ ID NO: 21170 - DNA, 413 bp, Glycine max
  unsure (1)..(413): unsure at all n locations
agctttgaatgcactattcaatggagttgacaagaacatcttcagactgatcaacacttgcacagtggccaaagatgcatgggagatcctgaaaatcactcatgaaggaacctccaaagtgaagatttccagattgcaactcttggctacaaaattcgaaaatctgaagatgaaggaggaagagtgtattcatgacttccacatgaacattcttgaaattgccaatgcctgcactgccttgggagagaggataacagatgaaaagctggtgagaaagatcctcagatccttgcctaagagatttgacatgaaagtcactgcaatagaggaggcccaagacattngcaacatgagagtagatgaactcattggttctcttcaaacctttgagctatgactctcggatagggctg

SEQ ID NO: 21171 - DNA, 426 bp, Glycine max
atgatgcaactgaggtaggagctattttcatgcactctctctaatgattatggcatcatatctggcgctaaactgctgagagttggaagccatcttctcaattaaatttctggcttcagcaagagtcatgtttccaaaggctccaccactggcagcatctatcatacttctctccatattactgagttcttcataaaaatattggagaagaagctgctccgaaatctgatggtgagggcaactggcacacagttttttaaatcgctcccagtactcatacaggctctctccactgagttgtctaatacctgagatatctttcctaatggcttgggtcctggaagcagggaaaattttttctaagaatactctcttaaggtcatcccagctcgtgatggacctttgagcaaggtaatacagccagtc

SEQ ID NO: 21172 - DNA, 420 bp, Glycine max
agcttcaggttgttcaattgcttcagattgttgcatagaagggcaaaggtttgtgtggtggtcggcagaggagcataaaccacaaagtctggcgagaggtgcagatttttgattcacggccagttgggttaccacgttaaccaaggcatctagtttaccttcaagcttcttagtctcagctgatgaagatgaattcatggctacttcatgcactcctctaatgacaatagcatcacttctggcactaaattgctgggagttggaagccatcttctcaattaaatttctggcttcagcaggggtcatgtctccaagtgctccaccactgacagcatctatcatacttctctccaatattggagaagaagctgctctgaaatctggtggtgagggcaactggcacataattttttaaatctc

SEQ ID NO: 21173 - DNA, 428 bp, Glycine max
  unsure (1)..(428): unsure at all n locations
ngatgtgaganagtgtggaagagtcagtcttcctacttttgtttgttggccacagagtggtacctagagatatgtcgcgggggtcaggagaccttggggacgtcaggtggggtgctattgcgcaaaaccaagcttgaccaatcccgacccaacccgggcatagtcagttagtgagaacctatgacgtacctaaacaggcgagctcctgacagtcaaccaataaaagaacaaagaccacaaagcaaggaggcttgtgtggtggctggccagctatgaatcttgagtggtatctggaagttggcctctggtaatcgattaccaagggtgtgtaattgattacaaggcttaaaaatggagacaggaagttaaaatggcctctggtaatcgattaccaagggtgtgtaatcgattacatggcttaaaaattg

SEQ ID NO: 21174 - DNA, 419 bp, Glycine max
tacttccttttcctataaataggtgaaggagggaagaacaaaaatgttcaaccctcctggtatctgagattcacttaaaattagttaggaaaattgtttctgtgaagaaaatccaagccgaggcgcttccatgacgtttctatgggtgatttcacaaagattttcaaccattcttcgtcgttcttcggcttcaattggtaagttcccgaaatcggacttttcaattcattctatgtacccttagtggccctcatttgtttcgcgtgcttttattttcatttcatttactttccgtacccctttttgacgtgctttagtcatttatttaagtcattttctcgcctaatcaaaaataaaataaatttccactgatcattcgtattataacatcctttaatttctgtaaaatgaatcctacc

SEQ ID NO: 21175 - DNA, 430 bp, Glycine max
  unsure (1)..(430): unsure at all n locations
agtggagtagggggtgtttcctagcattnggtatgctctctttcccaaagggtagttttctatttgcaccttttttctctctcaatacatcctccccatttttttagtttttcatatttctaaaatatcacttttcactcacattcgctctcgtaattgctttgcatcctctccactttcctctaaacatttccctcacttcttgcataactcctcttcctttctcttcatctatgtttacccatttccctttgccgacaactgtttttcccattttactagtaagtttcacatatatttttgcatttcacacatttttgttagaattaatgtctcatgtgagagacatgtgacttatgtagggactaataaataaataattaataattaagggctaaattgtaattgggttaattaggagaagtttcta

SEQ ID NO: 21176 - DNA, 339 bp, Glycine max
agctggttaaaattgacttaaaatcatctctgtgcactagtgatagataccataatttcattttgttccttaacctttgaattgttggtgaattttatctcttcaaattaaagtgacatattttacatccaactttaaaaaacttgtgaattttatccctagttaattatccattaaaagcttgtcataaaaaagttaggagtaaattttaccaaaataaataaaaaacaatgggggtaaaaaaatgaggagtttagaataaaaagtgcaattatgtctaaagtataaaaacaagggattaaatttgcataattcttaaaattcatgggtaaaatcttc

SEQ ID NO: 21177 - DNA, 429 bp, Glycine max
tcagcttgaccttgatctggtcttgttcttgtatcaactttcctcttgaatcttgaagtgttcttcaactttcctcttgaatcttgaagtattcttgattctatcttgaacatcttaaactcattctttgattgacctttgagctttttgtcatcacctttgtcatcatctttgttatcatcaaaacatctttgagtcaatcttgattcatcatgaagctttgcttctacaatctccccttttttgatgatgacaacttctgaaatcaagaaacacacacacacacactttttctagtcaatcactcacatagaattccattctccccctctgtttgtgaaattatgcttatcttaaaattaagtcgattacgcatgtgagttcttgattaatccctatttctcttcctctgtggatcaacaaaaagca

SEQ ID NO: 21178 - DNA, 174 bp, Glycine max
  unsure (1)..(174): unsure at all n locations
tatgcggctgtctggcntatgactaattccatatttgacatgctatctaggaatcttgctagtctcctcttattactagaaatgacgctgcacgaccaatcgattttggcgatctaaaatgtccattagagatatgcttcctcttctgccacttataaaatgaaatcctattcg

SEQ ID NO: 21179 - DNA, 350 bp, Glycine max
  unsure (1)..(350): unsure at all n locations
agcttggtgaaacaagtttgaggctnttctgcttaaatgcttaatccatcttctcaattatggagattggtctaatatatatatacactcatactattggtgtgttttttcttgggtacagaaaagtttaggtgagtttgatcctgtgaaattcattcaaggcttcacagttcaaaaagcgcttaatgtacatgatattctaattcacgttctggtgaaatatgaattctatcttgccaattggatcaatcttcgntcacatttattatatgattgtgtaaagagttctataatttgatcaagcctatggatagcatgctatggaggatcattcattccaccaaaatgtc

SEQ ID NO: 21180 - DNA, 424 bp, Glycine max
  unsure (1)..(424): unsure at all n locations
aggtaccggtggttatatgctaaatattaaaaaaaacctctgcatttacctcagttatgtgatcacttgtaccaggcaaattacctttacaacatgtcctacccaatcatacccttggaaccaaagtccgaaacttctgaattagctagttactagttgctgattctggagtcgaaggaagcacaaattcacagagtaagacaattacaatcatcatggtccatgcgtgaacgtaggtaatccatttccgttactaactgggacttaggactaattgcattccgaaacttggttaagccatgcgattcaacctacgtaacaatgccgtgttttacgtacaaggggggcgtgtcaaagaatgtaactcatcaattgatgttctntaatctttctatggtaatctatcttcaagctttatattaag

SEQ ID NO: 21181 - DNA, 316 bp, Glycine max
gaaagatagcataatggtgtgataaaaaaattgagattatgttgaaagggcgcataaaaaaagtgaatagctggaaatatacctcacaaccactttactaagcttgggtggactaatattgcagaaaagtcaagtaaggggacatatttgagagttgaatttaaacaactcagaaataggggggattcgttgaaaaaggagcaaatattatgggctaagcttgttgggaaggacacatgtcttggcttggatggggaaaaaaaaacctttgcagctagtgatgaatgggtggaatccataaatcaggtatgtatta

SEQ ID NO: 21182 - DNA, 437 bp, Glycine max
ggaggatttccagcctgtgtttggctatggaaacgcccatgctctggagaaactcgtggttgaagtagatggcatcctccagctggagctcgttacgcgcgaaggcaaggccgtattcgtagatgagggacggctctaggctggtcctggatagccaggagaaccagtccatggttgaaaatgaagattagggtttgtgtcttgatacaataagtgtggtacgtctataatataagctaaagctattggctagtttaccttgaggtttggtatgggtgttgagataatttataagggaaatttgacgtggtgtagagttaaagactagagagagacgccgatgcttagttgtggcgggtaaatgggtatttaatttgaattttattgatcctgctctctaatttattggttatatattcactttatttcgctttaat

SEQ ID NO: 21183 - DNA, 376 bp, Glycine max
  unsure (1)..(376): unsure at all n locations
ggagaattgactaagaaatcactacgcanagcttcaaactcgaaggtggaggacacatgaacgaaaacgcaattcatgggctcctaaaaagggtggagaatggagaattgcactaagcaatcactacgcatggctccaaactcgaaggtggaggacacatgaaccaaaacgcaattcatggggctgcgaaaaaggggttgagaatggagaattgaactaagcaatcactacgcatggctccatactcgaaggtggaggacgcatgaacgaaaactcaatccatggtgctccgaaaaaggtgagaatggagaatngcactaagaaatcactacgcaaagcttcaaactcgaaggtggaggtcacatgaacgaaaatt

SEQ ID NO: 21184 - DNA, 396 bp, Glycine max
ctgtctcagcgtttgtgcgagacggagactaacaagctatctatcatcgccaagtaccaagaagagttaggtctagccgcggcccacgagcataggattgcggacgaatatgcccaagtatacgcggaaaaagaggctagaggaagggtgatcgactctttacaccaagaggcagcaatgaggatggaccgatttgctcttactttgaacaggagtcaagaacttccccgattgttagccaaggccaaggcaatggcagacacctactccgccaccgaggagatccacggacttctcagctattgtcagcatatgatagacttactggaccatatgattagaaaccgctaggaagtttgtattgtcgctcagatcttgactagttataactttttg

SEQ ID NO: 21185 - DNA, 365 bp, Glycine max
  unsure (1)..(365): unsure at all n locations
agcttttatgtagatagacccgacgctttntacctattgctgtaaacttttacctgcatttactatgttaaccatattaggagtttatgtttggttttagaccatcatttatcaatgttgctccaaaaatgccttacttctgaataaaactctggctaataagcaagttccctgagttcgatacttagatcactctgatttaattttaaatacttgacgacccgtcgtgctttccggctaatcggatttcccttgaacatatttgtataaaggaaaattggaccagataagtactacaggggaaaatccacaacatgcatggactgaaagattttagggcagggtattactggctcactatggaa

SEQ ID NO: 21186 - DNA, 324 bp, Glycine max
tccttgagaagattcctgaagatgctagagcttagctacacaacccctataatagttaagctcaccccattccaaaaatacatgaaaaaaagtccctactacaaagaatacttaaaatgccctgaaatacaaggctaaaatcctatactactagaatagccaaaatacaaggcccaaaagaaggaaaaacctattctaatatttacaaagaagagcggatccaaccttgacccatgggctcaaaaatctaccctaaggttcatgagagccccagggccttctttagtagctctagcccaatcctcttggagcctcttgctcatg

SEQ ID NO: 21187 - DNA, 376 bp, Glycine max
tgagaatggagaattgcactaagcaatcactacgcatatctccaaactcgaaggtggaggacacatgaacgaaaacacaattcatggggctccgaaaaaggggttgagaatggagaattacactaagcaatcactacgcatagctccaaactcgaaggtggaggacacatgaacgataacgcaattcatggggctccgaaaagattgagaatggagaattgcactacgcaatcactacgcatagctccaaacgcgaaggtggaggacacatgaatgaaaacgcaattcatggggctccgaaaagattgagaatggagaattgcactaagcaatcactacgcatagctccaaactcgaaggtggaggacacatgaat

SEQ ID NO: 21188 - DNA, 243 bp, Glycine max
cttgctacggtacgaatttgcattgaacaacgaccaatagatacatatgaaattgtattataagactcagtcccattaaagaatattaattacggggtgcattcttattatcagtaattagcattgaaataagaattcatgagcataatacttttctcgtttaaacatgttttataatttctaaagaattcacaaatttaatctttgttccttaataaaaaaattcttttgggttgaattttt

SEQ ID NO: 21189 - DNA, 379 bp, Glycine max
atatgaacggtttgttgctgcacttgaagaagcatcacgagacatgctacctgctctaaaaaacaaggcattaaaggttcgttatctttatatacttaggttattgttttcttttcccgggttcccattttagacttgacttaatattcaccctttcaagttacaaagggacatgacattactataacaaaaggtttgcaaatattatcaacttaagagattttttgtctaaactactggaggatatatatcaacatatgtgtgcaggccgtatacgtgctactgagtcggaagtcagagcaagaacgtagactactttctgcacttgtcaataaagtgaggtaacaatgagctattacctggctgaattataggtatt

SEQ ID NO: 21190 - DNA, 449 bp, Glycine max
  unsure (1)..(449): unsure at all n locations
gtgatcctntnagtcatctgccgcttgcaagctcgtatacattgaatttaaatataaatataaaaaatctccttacagcaataaaaaatatggtatgatgtaatttgatttaagtaattattaattatataactattaatttacatattgattcaagttaatatttaatttaatatatcaatggaaatcttaaattaaatcggtacaaagaaaaaaaagggtaaaaaatttaatttgaattcatatcaacttattaataaaaaaaaatattcatcaatttttcacatgatattaatttattagtaaaaattattttttttacaataaatagtggcttttttagaaaaaatgattgaatatagtaataatgcttggtttaggatttagaaatcgagtaaggttgtttataaaaatgatagagttcctgttctattttaataaaattctaa

SEQ ID NO: 21191 - DNA, 447 bp, Glycine max
  unsure (1)..(447): unsure at all n locations
ctgatcatggncagcctntagctttctcaactcttattcatgtcgtcgctctatctccgtgatgcgattttggagttgttaaagagtatttgtgtctgcatagttgtcggatgaggatggaagcttttgaaagaggtctcacttttgaggctagaccgagtgctaaccatggatgaacaagagagaattgacaagaaactgcgggatacattttaccacgacccacggtgggcactaaatgtacttaccaaaatccagaattgacacatgttagggtgggtgtggctaaggttggctcccgaacttcacatgtctgctntgagagtggtctttgtttagaggataagaggggggacctacaaaacaaaggactctgacgcttaagtaagtatataagttaggagataaagcatgtatatacgtaaatgtaagctcgagttagtgata

SEQ ID NO: 21192 - DNA, 429 bp, Glycine max
agcttatggcggcaaagggtaagctatcatgcctcaagcatgttgatgttggtgcttgtgaacattgtatccttggaaagcagaaaaaggtcagtttctcaagggcagggaagactctgaaagctgaaaagctagaattggtgcacacagatgtttgggggccagccccagtgaaatctgttggaaactcacgctattatgtcacctttatcgacgactctaccagaaaggtatgagtttattttcttaaaaataaatctgatgtgttttctgtgtttaaaaggtggaagacagaagttgaaaatcagacaggtctaaaggttaaaagtctgaaatctgacaatggtggggagtatgatagtcaggaagttaaagacttctgttcagaacatgggatcagaatgatcaagacaataccaagaacacctg

SEQ ID NO: 21193 - DNA, 419 bp, Glycine max
  unsure (1)..(419): unsure at all n locations
gatacaggggtgcccagtgaggctgttaagcgggttgagtagtccatgggagttgaggcgggtcgagaagcaaacatgcctgagtcagacaatatatccaagacatattttcattgagataagtgaatgcctttgttattgcgagcaacttcaaggccgagaaagaactttaaggtgctaaggtccttaatgctgaaagctgtatcaagaaggtttgtgatatgtgtgatggtgtcgagattgttacctgctaggattatatcatcaacgtatacgagaacagcagtgatatcatggttatggaagtggagaaagagggaatgatctgttgtagattgacggaagtcgtgggagatgaggaaagaagagagtcgtgtgaaccattgacgactggcttgtttcanaccatataatgaaca

SEQ ID NO: 21194 - DNA, 420 bp, Glycine max
agcttaccacctctcccatcatgcaacctccgatttgagagcttccatttgagatcatgtgtgatgcctctaattatgcacttggggttgtttttgtcgtagagagtttatagactatcacacatcattgcttatgtatcacgcactctagatgtagcctaagtcaactacacgaccaccacaaaggagcttttagctattgtttttgcatgagataaattaagatcttatttgctttgctcccatattactgtctatactggccatgcagccttgaggtacctattgaagaagcttgatgctaaattcagattgatcagatggatgcttcttctttaggagtttgatattgagagcagagacaagaatggagcagaaaactcggtggctggtcatttgagcatgattgagggacgtgac

SEQ ID NO: 21195 - DNA, 453 bp, Glycine max
tcatttctctgatattagaaggggggtcacacacaccaaacaaccaaatcacgtcgtttcatttaacaacaatcaatcttttccctctttctcttaattcccaatattcttcacattcacttctcttctgccatgtgaacaaacatcaaacatagcaagcacaaaacaaaatcgcagttccatccatagcactgcctcaattcttcccccaaaaaaatgagccagtgtgttcccagttgggatgtcgaagacaacccaccaccctcaagagtctcacttcgctccaactctaattcaactgcccctgatgttcccatgttagctctcttttcttcttcttttgtctctgtatcatacgagaaattattttataattcgagactatagctagtgtgaatcaattttatgtaattaaaattttgtacgacaatacaaaaagtctaactcaactga

SEQ ID NO: 21196 - DNA, 331 bp, Glycine max
tagcttgcagcagatcttttggctagagatggcaaggctccactcagattaattgcaagacttctctcatcctacaattgctcgctagctgaaagttgcgcataatgctaatttccaaacacaaatgatgtttaaaaataaacagtcctcaatgttttggagtaatgagaatggcaattttcttatcagtaaatattattttgctataattatcagatgggaaattcgaatatgcaacctcccctccttcctttttccttctgccatttttcatctagtggatcagatcttttatatctcctatgagaatcataaataatcttgttaacaa

SEQ ID NO: 21197 - DNA, 377 bp, Glycine max
  unsure (1)..(377): unsure at all n locations
ctttctggcatgtcttatatgcatatcttttattcaacatgttatgcagccatattcgggtaaagggtcatcttgaattttctattagtattgngtatgattcacaggaggtgatgggttttaatggacaggaggggagatgatggaaggagaggtttcacttgtgttggtttggttcaagagaaaaggaaacaaaggtcactttgctctaaaattaaaattaaaaataaaaaaaatcccccattttcatccaaccaaccacattgcttgtattgctccggactttattcatactttctaatctcttagaatcatagaatggtttgacagtctctgctttcaacaacctgtttcttattaatatctgtctcattttc

SEQ ID NO: 21198 - DNA, 377 bp, Glycine max
agcttcttataagctgaaccattttatcaataaacacaagttgagtgttattcagaaaattagagtttatctctcttatcttagtgagagtgattctcctaaattcttgagtgattcaagaacaccctggctgtatcaaaggacattcacaacctttgcgtgttgccctcgctggaaagagagattctttccttcctttcatcttcacccttgttctttcaaaccacaattccagaaaatccacctctgcccagaaatatctcgtggccataactcccattttacgcactcaaattaagtgattcttgagcctaaattgaatttcaaaacgaggcctttcaccctcgtatggaatcaccttcattggagcccttagc

SEQ ID NO: 21199 - DNA, 417 bp, Glycine max
  unsure (1)..(417): unsure at all n locations
tgaacaacggaagctctcgatttaatcgagtgtgtcataaattttcacacagatgtccgattcggggaaataatatatcgagacgcacgaaattgaacaacggaagctctcgagaaanttgaatggtcataacatttcactcggatgttcgatccggggacataatttatcgagacgctcgaaattgaacaaccgaagctctcgacaaattagaatggtcgtaacttttcacgcgaatgttcgattcggggacataactcatctagacgctcgaaattgaacaacggaagctctcgagaaatttgaatggtcataagttttcacacggatgtccgattcgggaacataatatatcgagacgatcgaaattgaacaacggaagctctcgagaaaatcgaatggtcataacgtttcaca

SEQ ID NO: 21200 - DNA, 391 bp, Glycine max
  unsure (1)..(391): unsure at all n locations
agcttgtgaactcaatatataaaaatagacagcttgagctttgaaacatgcaaatcattattctctttctctatcataatgttacatatatatgtctttgtgtggacttctccctttatttctgccttcttattagcatagagttgcgagtatgtttaacttgagggttaatctaaacacgctcatgtgaaaactttgagaaaacaaataaatntactcaagtcaatttgagtattagtctcattgataaaactatttttaatgtgctcaaataatgattgttataccaatctttagatctgtagaaattttattttgaacactataactgacaagtttaatatatattcagttatacattattgttgtgtcatgcaaaagacatgttttg

SEQ ID NO: 21201 - DNA, 379 bp, Glycine max
tctagacagatatgtaccagctgcttctgtaattaattatgcctacattatgtttcgaaggtccaatagcctaaaagaacggttgaacaatgatagcatcgaactcaagaaatctgtgaaaatccgaattgaataataggacaggcccaacgagtattcatgtgtgtgccatgaatcacacataatgaggttccaacaatttctaatcaaattttaactttaattttaattatccttatgctagaaagattaactttctctatttatttcatatacttgcacaaattttgggaaaacacgtgtacgaaactaagaacttatgtgaaacagtatcatgaacacttctaattgcttttaccagagatctcatagcatttac

SEQ ID NO: 21202 - DNA, 382 bp, Glycine max
cagcatgttcttgattattcctcagatctttaacaagctttgaacaatatagttggccttcatttaactgtctttgggcttggcggccacgctcaacaaagtactttcgacacctactgtacgttgatttcaccaatgctgttatgggaatgttgcgacaatcctttaaaaccttattgatacattctgagaggttcgttgtcatgtggccatatcgacgtcctttcctatcgtaagccatcgtccatttttcctttgagatgcgatctatccatgttgctatggctggactcagctcacgatatttttctaaattatgatcaaaaatgtgcttgcatggagtgtatgctgcataaaactagttatgaataacaatttttag

SEQ ID NO: 21203 - DNA, 436 bp, Glycine max
  unsure (1)..(436): unsure at all n locations
caactcagttattagcttattntacttaatataaaattagaatttcatgtttaatatgcagtaattatttaagtgcatttttacgtcagtttgtgtgataattaagctaaatagaaatactaaaccatggcataggagctatgggccattctattgggcatctattgggcatcatcaaatttgcttggcagtggcagacctgcatgtgtgcaggtgcacccccttaatttggtaaaattattactaagtattntaaatttttttattttgctgctctatatattttaaaattaccccattaattcagggtcttatatccgccactgttgattggtcaagaggttntaggcgtattcgtattgtttcagattcctgcaaattaattgttgggaggagtgtgctccaatcttcacccttgctataactngggtaggga

SEQ ID NO: 21204 - DNA, 454 bp, Glycine max
  unsure (1)..(454): unsure at all n locations
tggcctangctatgcatgctacaaacatcaatgtaaatcttggcatgctgaatattaacatgctatgagcacagggtgcattttccttaatgagaatatgacgataaatatatttaatttatgttggccttaatattatgacaacagaactgcatagctacaattgcaacagattaatgcaaatctgggtcagttatgcagcatcatccataggatgaagtgattaacagtgatgtgaagtatctcaggcgcatagacatagttaccgttctgttacggttatgcgcaattcatctgatatattgatttttccatacaattttaacagtgatcaagtgtttagcatttccttaaatgattnttttgttccccatttggtactgttcagaatttgaaggaatntctttcttatgctgangctgaagtgaggtctttggctcaactatatgccaat

SEQ ID NO: 21205 - DNA, 327 bp, Glycine max
agctttgtggatttgacctgaactgttgtttagtgagagatcataggattctaacaatttcctttttcccatgtcaattggtatctctccaaacagtatgattttagacatgtctctaaaaccgccaagcatataccttggaaatttcagatggtatagcttcagacagcttattacttgaaagaacaatcattcttaccaataaaagaatgagctctgtactctaactcatcttttttgggaactaagacaagagtttccttggagtggttataatctgaagtcaaagccatatgaataacttgaggggtttgctaagaagtcatc

SEQ ID NO: 21206 - DNA, 384 bp, Glycine max
  unsure (1)..(384): unsure at all n locations
ggcagagggtcggggcttactcaagaataatggaatgtgtangtggcttgtctcatacctccattacacttcatttgtacctgagcttgcttccctatttttatntaatttgttcatgtttatgtgtgaattgaatcttcccctccaggaccaaaagataaaataattgtcaatataagaacctttttatagggatagacaccaaaatctaagaatacatgataattatctatcctccaaacttaactcaggataaaaaaaagtagcacattaaaattttatagggatagaaatgatatattttaccctattntttttcatgcttgacttaactcttcaacattattgtcaatgataagaaactttggcatagaattgatggag

SEQ ID NO: 21207 - DNA, 392 bp, Glycine max
  unsure (1)..(392): unsure at all n locations
agcttgaaaccaaacttcacagtggtatgagtaactgattgactgatgcacacatataaccattgacacagaagcaacttcattatttcgcagggattatactggatatctctggtttcaaatgatacaaacaccacgttgccaatgtntaagtctggtgtgcttcatccaaacttgaaaccaaatggcatttgaaataattgtattattaatatgagaacaacttcgcatttgaaataattgtattattaatatgagaacaacttcgcatttgaaataattggattattaatatatgagaacaacttcgcagtggtatgattaactgattgactgatgcatacatataaccattgacacagaagcaacttcattatttntaataatatcaa

SEQ ID NO: 21208 - DNA, 384 bp, Glycine max
  unsure (1)..(384): unsure at all n locations
tattaaaaaaagaaaatatatttaaattatggaggatccaaatagcctttntttaaaataaaaaaaagtgcactctgtattttttttattgactcatacatctattatttatttgatattggatggatgtataatgtcatagagaaattatttttacacaaataagtatagtctgattaatatgaaaaataaatgctccgcaataacattaaagtaaaaaaaaaaaaaaaaatctattgtttactggttttggggtttgtgtgggggttctataaaaggattaggaaatgggaacagaagagaacaaaacatatggataaggaaggttgaagaagaagcatgacgaagaaggggaagaagcaattgatgtcatcggcgccgtgg

SEQ ID NO: 21209 - DNA, 292 bp, Glycine max
acccactcacaacgtttggacttttaagggataacaccataactaaacgcgccacaaggcatccctatcgtaccagatccaaatctagaacgatgggtgatcaagaggagacacatgaacagatgaatgccgacatgtcagctctgaaataacagatggctttcatgatggaggccatgtaaggaatgaagcagctcatggagaaaaacgtggccaccgctgccgctgtcagttcggctgctgaagcatacccaactctcttggctaccgcgcgccatccttcctgaaacat

SEQ ID NO: 21210 - DNA, 279 bp, Glycine max
gttttgaccctgccttctacccgtgacggcataagaaagatatgccatttctctctcggtagctaagaaggagcattggaataagaatctataggagtggaagaatgacatattctgcatcaaatgggtagggctcaccatggcaaaattgagccctgaaactcattgaagcttccggaagtgcatctgccatggagatttggacccatgtaccttagatagcctctggagggcatttcacttcggcaaatgataacctcattgcagctgaatagaact

SEQ ID NO: 21211 - DNA, 137 bp, Glycine max
ctttgatagcccttttgagccttgtttccctttccttgttttgaagctcactacaagccttaagtgaaaaaccatgatattaccatatccctaaggaattttggagctttggaattgttttgggaataagtgtgggg

SEQ ID NO: 21212 - DNA, 330 bp, Glycine max
gatgactccccgaggggatcagatttggtacggccatgtcctcctggtttctgactaggaaattggagagtggaggagcgcccggacgtttacgcgacaagcataatgtaaccctttgtagctttaaaactctacgattgggcctaggctttagagtttccttatgttaaggaattatgtcttttgttcctgaatttataatataaagatctttcttcatcttttcctacgcctctacccattctcattcatttgcatgtttatttctttacgcttaaaaatgccagatccgacgacgagtccctcagaggtactgatacctaggaccct

SEQ ID NO: 21213 - DNA, 229 bp, Glycine max
cccatttataactacgatgcgaaacagatttatgtcctatgggtatgaagaactggaatatacatgcatgccctaatgattgcattcattacataaattagatttttgaagatgtcacatgccccacacgcggtgtatcacatttcaaagtgaaagatgataaatgtagtgatgaggcaacctcatgcaacaaccatccaacaaaggtgtgctggtatctttcaattat

SEQ ID NO: 21214 - DNA, 365 bp, Glycine max
tgtagacatgcaagcttcacacaatttatttttcccaaacttgagttttggaagatcaattactaagtctttcctaactagatgattgagatgatgcatgtttatgtgtgcagttctacgatgccacaaccatgaatcatttatcttacttaccaaacagatcaactcatgaaatgatgcatgttcaatgtttaacatatagatattacctattctcttgccaatatggacaacatcacagagcatagcttcactagtaagacaaaaattcttgttgaattcaattttgaagcctttgtcacatagttgactaatgctcaggaggttatgctttagttcatcaacatatagaacattctctattt

SEQ ID NO: 21215 - DNA, 202 bp, Glycine max
tggaaggtttcttcctctagcttcccaaggaagctacatcccttgcttctcaaggaagcttcccatgtgttaggctataaatattgtcataactttgataaatgagaaacttgtgagacacttcaaagtttgacttctttccctaatctccttcaattaccacgcccccctcccccctacatgtatgtctcattatcttact

SEQ ID NO: 21216 - DNA, 414 bp, Glycine max
cttcatgcttaagtatgtatggcaaaacttcattactgttgatcaagacatacaagtgagcttgtaacaaatgttctacacttggagtgatcacatgcagtcctcttgaacccttaccacccactctgtcatcatgccaagactcaggaaggccaacaggtttagccttctctaagtattttgaacaaaattcaatggcttcttctgcaatgtacctctcaacaatagacgcttctggacgatatagattctttgtatacccttttaagatcttcatgtatcgctcaaccgggtacatccaccgtagataaacaggaccacaacatttgatttctctgaccaaatgcacaatcatgtgaatcatgatgtcaaagaaagcaaggggaaaatacatctccaactggcacagtataa

SEQ ID NO: 21217 - DNA, 437 bp, Glycine max
  unsure (1)..(437): unsure at all n locations
ccactttcacctgtcttgtgtatggttttcttgcttgaaagtttataattttatttagccagaccactttattggacctatgtgtacatgtgcttgtggtttgagtttcctcattttggctgtgaatactgcataaggttaaaaatcaactcttcttgagaaccattataagaaccatggttaaattttccttggttaaattttattttaatataagagtaatatttatttatttatctttgtattgcctataatggaatatgtaatatttcattcatcttatattaatagcctttctgcagaagcccaagacatattaacaatatcatattccaactntgatttttgtccccttttctacaaggatcctttactatgtaccggttggtggtttcctccaaattgcctagattttctgacatgtacacactcactat

SEQ ID NO: 21218 - DNA, 105 bp, Glycine max
tgaagctcactacaagccttaagtgaaaaaccatgatattaccatattcctaaagaattttggagctttggaattgttttgggaataagtgtgggggggttttgt

SEQ ID NO: 21219 - DNA, 212 bp, Glycine max
tgtttgtgaaaatggtctagatatattcttaaatcacaattcaatccccctactacttgtgatttttgtctttacaagaactaaacttgaaatgttgtctaaggggttcaggcttaacatatgtattgtgtgcataacccacctttgttgtctggctggatgtgcatagtgagccaaattgtgctcttactcttaataccctctgcttaaca

SEQ ID NO: 21220 - DNA, 361 bp, Glycine max
tagagcacctcctttcttacctcttccttcatcggtggattcaaccgcctctaggtttgtcggactggcttgtagtcttcttccatcattatcctgtgcatgcagtaagcagggttgattcctttgagatccgatatgtgccatccaattgctttcttgtgtttcttcagaatgtctaccaacctgttttcttcttctgttgtgagtgcattactgatcactataggcttatcttcctccaagaacatatacttcagatgattgggcaatatcttcaactctaccttcttcttctcggacgaaacttccttctttagtgtctcaaaatcggcttctccctcaggaatactgtcttgatgat

SEQ ID NO: 21221 - DNA, 404 bp, Glycine max
agcttaacaaagttattcaacatagaaaataagattatgaagtagtaactaaatggtagtaattagttgatttcaaacaaaatgtgaggataaagaaaatattgtagacaaccttccaatgatgcaacaatgcccctgaaattttttgccccaagcttgtgtagatcctcagcaacctagattggatatatgcaaacatttatccctagaaccacaacagcgcccaatgcaatgagaaaaatctatcaacagctgtttcaacaaactctcctgtatgataccctgataaataatatagcaataggtgatcaagaacacacgaaaaccatattcacaagctttcattggtggatattgttttgcatatgtggcacaaaatcctaccactcacacgtcataatcct

SEQ ID NO: 21222 - DNA, 411 bp, Glycine max
  unsure (1)..(411): unsure at all n locations
actaagctntctatgaggcttctttgagaagctaatgctttaaccactaacagccttctaataacaaaactcacctccttgaaaataattagggataaaaaaacacaacaaatataatcaaacatcaaacataataaccaataatatgtagatatatattagggtgttacatacggcacccttatcgaacccgtgccaaaattagaatgatgattgaaatagaggaggtgcaagagcagatgaaggtcgacatagaggccaagaaagagcaaatgaccacaatgatggaagccatgatgagtatgagaaaaatgatggaggtcagcatggctacagtcgttgccgcaagtaccgccactgaggtggacccacctcacccatctagcctcaaacaagtaaatcatctagtct

SEQ ID NO: 21223 - DNA, 381 bp, Glycine max
agtctttgcggaagagacacagtgaaaattatagaatgcttccgaaagatgaaaatatatactttctatttttttaaatgaagggcaaaattgacctttcattaaattgctgggtgcaccagcaatattgctgggtgcacctagcatatcccttggaacaattgtgcagtgcgcagtgttttcagtggagtcatgagtatgccattcaatcctcacttcttctttttttcctatattcctaatagattttatttagcacatatttcacctctgcttaatgatgcagaggtcatatgagcctagcgttacttattagttatgtttgttcgacaatgtaaagcatgtgattgttctttcactaataattttttcaaatgttca

SEQ ID NO: 21224 - DNA, 409 bp, Glycine max
  unsure (1)..(409): unsure at all n locations
acagctcccaggttcgatcacaagcttagggatcttgagaagcatacttataacgagacaattataatcagtatcagttcttatctgccagcactagtaagaagtttcttcatatgaagctcataatttataatggagattatagaataatgggtgataacaacaaagatcctattgacatatccatcagctatcgaggcttgccatcaacatgtcatgactcaagtgtgaagcacttaaaagaccgtggcaatagggcctctgagcctgcactgcagaaacagcattntttttcctactttgatagaaatgccgaaataattatgtaaaaaaaaacttgtgttcctagctgatgacagaaacactttggatatgctcagagactaaataccaccttcaaaatgtattt

SEQ ID NO: 21225 - DNA, 416 bp, Glycine max
  unsure (1)..(416): unsure at all n locations
agctntgaatgctctattcaatgagagttacaagaatatcttcagactgatcaacacttgcacagtggccaaggatgcgtgggagatcctgaaaaccactcatgaaggaacctccaaggtaaagatgtccagactgcaactattggctacaaaattcgaaaatctgaagatgaaggaggaagaatgcattcatgacttccacatgaacattcttgaaattgccaatgcttgcactgccttgggagagaagatgacacatgaaaagctggtgagaaagatcctcagatccttgcctaagagatatgacatgaaagtcactgcaatagaggaggcccaagacatttgcaacatgagagtggatgaactcattggttcccttcatacctttgagctaggactctcggatagggctgaaa

SEQ ID NO: 21226 - DNA, 400 bp, Glycine max
tcgctcgaaggcaaactggatgcattggttaacttggtaacccagctggccttgaatcagaaatctgtacctgtcgcaagggtttgtggtttgtgctcctctgctgaccaccatacagacctttgcccttccatgcagcaacctggagcaattgagcagcctgaagcttatgctacaaatatttacaatagacctcctcaacctcagcagcaaaatcaaccacagcagaacaattatgacctctccagcaacagatacaaccctggatggaggaatcaccctaacctcagatggtccatccctcagcaacaacaacaacaacctgctccttcctttcaaaatgttgctggcccaagcagaccatacattcctccaccaatccaacaacagcaacaacccc

SEQ ID NO: 21227 - DNA, 351 bp, Glycine max
ttagatatacatctatttgtgagttttcatctagcagcctatatatagaaccattcgagagatttcatccagaagcttaagattatggagagacagtttatgataatctacaattagcatcaattgctctgctttaaagaaaaaaattaaaaccaccttacatttaccttttatgtgtcttggattctgcgaaaggattttgcacaaaaaatgcaataaaacatgttgcatgcatgattcctagtgttcctacaaataaagttaggttctttttgtttttatatcaaactcgtggctatctttgtttacatgtcaacgggaatgaaactgctttcatatcactgttgaact

SEQ ID NO: 21228 - DNA, 339 bp, Glycine max
agcacactccagacatcttctcagagatcccaacggtcagatcatggaaaagtgttttgtgaagttgcagaccaaatttcgagaagatccaacggtcaatgaaggctgggcagcgtttttaccgaggcagcttcatgtagctttctctagaagcttcattaagaggcttcctctagaagctttctcgtggcttctttgagaagctttctcaagaggcttctttgagaagctagatccttatctatccacccctctattaactaaattaacttccttaaaaataattacggatgaaaataacgcaacaaataatcaaacatcaaacataattactaataa

SEQ ID NO: 21229 - DNA, 330 bp, Glycine max
  unsure (1)..(330): unsure at all n locations
agctagtatganagagaatgtcatatgggatatcgttgtctcatttataagtatgtaatgtatgtgagccttacttggttctaacacatgaaggctggttatgtgtttttattgaaagctgtgatcaatttattcctgtaactgttgagaacttgttcatcttgatactagcactccaaggattgcattgaattgcataccaatagacaataccatatttgaactgtgtgaattgaattcaatttaatgtagccataaatgagtgttaatcctaccttttaattataaatgacccgggagtttattttgacacaaaatcactcacctttt

SEQ ID NO: 21230 - DNA, 405 bp, Glycine max
attacaattagaaggaagaacatttttaatctagaatttaaaataattacaaattggttcattttattttcggatcttgagaaactctttagccttactagtagtgtgtgatctcgagttaaattattgaaatgttattggttaatatctttttactgtaacatttatgcaagttacattgttagtagtatatacatcttttttgtttttttacagcgttctatctactataaggagtaataaataatttttccttttcctaaacttaaaaatcaattaaatcatattgttgcatatttcgggtggaatgcaaatgataattaagtcatgaagtattggctaattagtacataaactatccaaatccaattttaaaataccaataatttgactattaataatcac

SEQ ID NO: 21231 - DNA, 374 bp, Glycine max
  unsure (1)..(374): unsure at all n locations
tactactagaacggccaaaatacaaggcccataagaagataacaacatattctactatttacaaagaagagtggacccaaccttggcccatgggctcaaaaatctaccctaaggttcatgagaaccctaaagccttctttatcaactctagcccaatcctcttggagcctcttgctcatggctctggtaactggtcctttcctagggaggattgcatcagacaggatacccacaaatgggaggagaatgaatagaaactngtactttaaagaagatgcacataccaattgacatggtgtgcctagaatgttctggtcatcataatcatcaccttcatctattactaatacataatgtatcgatatgtaagtcaa

SEQ ID NO: 21232 - DNA, 452 bp, Glycine max
  unsure (1)..(452): unsure at all n locations
ctgccttgancctgaatcgaaatcgaagacccgcctctaccattaaggtttgaggtttttggttngaacccccggttcgggttcctctaaatacgtaacacatgctccgtgaagaaaatccaatccggcgcggtctcctataggttctgtaacggttctctgctggactacagcaagattcttaacaggtgtcgccattgttcgtccgacgatcgggcttctaaggttctcacacatatgacactgacagtcatgcctccaaaatgtgaaagtgaacctaggcgactgctcgatcttctacagacactcctctaaacttaaaacttacttgagatattttactagaccaactatgacctactttcctaatgtactactgaactacgtacgaggactgagtttccttgacactattagttattccatacgaagaccttcccaagcttgactcg

SEQ ID NO: 21233 - DNA, 446 bp, Glycine max
acctgtggcatgcaagcttctaaacaaatttattcaagcaaatgaaatttgagaaatccagaacacatcaaaagatgaaacaagaagaatatagggttgtttggataaacaactataaaagggcttattgaataagtatttatcatgtaagcacttgtatagtttttataatcaaaaaagaaataggcttaaactattttcatataagttgtaaggttgttttcataatattttggagaggttactgaaataagctaaaaataacttatgaagataacattagttattttcataagctttctaaaacacttacacaagtgcttatatagttatatcataagataagtccaaataagtagtaaataaggtcttccaagcatacccttaagttattgaatttgagagaattaaattaacaaaataaaatagtcaaaggacaataaaat

SEQ ID NO: 21234 - DNA, 419 bp, Glycine max
  unsure (1)..(419): unsure at all n locations
cagaccaagcttggaaagattatcaccatcatttagtatacatcgttcataatggtccaccacttgaaagagggcttgcaccagcgtagattttccattccctgtcctgtctactataccaattttcttttgtcctgagaagatacaagtaacatctttgaggaccataggagcagcagggtcattctgtatatgaaggttatgaagttcaacttttccctcctttggccactctggttcaggcctgcaatcttgaatggtagaccttggcaaagtaacgaagatggctcaagaacaaaatacaagaccatattgaagaggaaatngattctgacagacaaccattccaagctgccaaaattgtaaaaggccacctgagaataatcatcaattagagccttaactttgatcaagaatag

SEQ ID NO: 21235 - DNA, 427 bp, Glycine max
  unsure (1)..(427): unsure at all n locations
agcttattcattggaccaggaccatcttttggtgttcaaatatgttgggagtcagagtttcaagttgtaatacttgatcaaagtggcttagaaatgagttatccttggatggaagcaactttagatggtgaagacaatggtaatacatttgaaatttgtgaaaatttttgctgtaatgttgatttttaatatgtattatcattaatactaaatttctctcaataattcagtatattaatttcacttttttcttgtttatttattttcatagggcactggtgttggtatcaatattgaatgagggcttctaatggctagcatctcanaagatactagtgaagaaacaccattgcaggttcttttggttagtttgatttctgattgagttctatttctcaaaatatactcacctatgcaagtgttcaat

SEQ ID NO: 21236 - DNA, 418 bp, Glycine max
  unsure (1)..(418): unsure at all n locations
tcagcaggttggtgatgtggattcacttctagctggctcttggcactggcaagtaaagatccactatgaaataatagttcagtattagatacaaatttaggaaggagtaatttaaggtaaagagtgttatccagtgcatgttggatttgacaaaattcttataacatttgtaaaaatcacatagatccattctcaacattgacttgggttttcaaaaaaggaatacaaagtgaatactagtaaaaaccactaaacaataaagccaagactcaaatcatttcatgtattccacatgattcanatttatgaggtgtgtataaagagacatttaatccataccttcaatcttggattcttggaaggtaacgccaatacataccacattgtatagaagccatagtatatgcttactaaatat

SEQ ID NO: 21237 - DNA, 396 bp, Glycine max
  unsure (1)..(396): unsure at all n locations
agcttgcttctacaatttcccactgtttgatgatgacaaacctgaaatcaagaaatgcatgcaagctctatcttctaattgaccactcacttaactctacccctttgtttttgagtttaagcttcacttgaaattaagttatttaattatatgagttcttgatttaatcccaaatttctctccccctttggcatcaaaagaaagccaaagtgcatatagaaacaaaanatcatacaaaagctcataatcatccaagctttgtaatccatacaacagacaaggaggacaataattcatacataaactaagcaaggaagataataatttatccataaactataatataatgtcngataatttagaaagtcatcaagataccaaaattaaacactaatt

SEQ ID NO: 21238 - DNA, 436 bp, Glycine max
tatccttccttttcctataaataggggaatgagggattatcaaaattttttaaccctcctggtatctgagattcacttaaaattaggtagaaaaattgtttccgtgaagaaaatccaagccgaggcgcttccgtaacgctttcgtaacgtttccgtgggtgatttcgcaaagattttcaacagttcttcgtcgttcttcgttcgttcttcgtcgttctttgatcttcaaccggtaagttccagaaatcgaacttttcaattcattctatgtacccttagtggttctcatttgttccacgtgcttttatttccatttcatttactttctgtacccccttttgacgtgctttagtcatttatttaagtcattttctcgtctaataaaaaataaaataaattttcaccgatcattcgtattgtaacatcctttaatttc

SEQ ID NO: 21239 - DNA, 408 bp, Glycine max
agcttagtgataaaagtatgagactctgtggcttaatccagcttctcgattatggtgattggtcttatatatataatatatacttaaatactatcgttgtgatatttcctgcttatagaaaagattagcggagtttgatcttgggaaattcataacaggtttcaccgttcaaaaagcacttaatgtacaggatattcaaatttacattcttgtgaaatatgaattctatcttgtcaactggatcaatcttcgttcatatgtactatatgattatgtaaagagttatataattcgatcacgcctatggagagcatgctatggaagatcatacatacaccagaatgtcactgaagcagcatcctttatgtaaagatttttttttctttcaatagattatatgctcgtgat

SEQ ID NO: 21240 - DNA, 375 bp, Glycine max
gtaccttgtcattatgtgttacatggaatatcactaatatgagattatcgtatggtggctacctagctaagggagaaatttctgagtcaatctgtaatgaagtcaattcaattgtagttcttgttcttttgtcatgtgtctgatccatttatgaagataggcattcctttagctctggcaatatttggcttatgtctggtcttttcagctgcagttggtaaaatgcaagacaaggcaatctctacagctttccatgcagaattgacattgaatgcttcctttaacttcggatcaacaatgttatgaatatctcctctttcaactatgggaataacccattcaaggatgtgaatattttttcaggcgtccttgata

SEQ ID NO: 21241 - DNA, 384 bp, Glycine max
agcttgcacagtttttattaggtattaattgttctgcatatctaacaatcgtggttttaaattgctgttgtcgttgcgatccttgacattgcgtgaaaatgtgtttgtcatgatttggttgcagagaatcgtaaaatctttatgttgcggtcgcaattgtggttatatatggatcatgatttaaaaccatactaacaattttgcgctttgtgtttatcaatcgattaattgatgattgaatgtgaaaattaatagaagtttttggcaatgtagggcaatgagaggctccaacaactcaagaaggggcttatcaaaccaatacgatggtccatgcaaggcgacaaaccccattgacaaatgttggagatgtgaccccaattggga

SEQ ID NO: 21242 - DNA, 439 bp, Glycine max
  unsure (1)..(439): unsure at all n locations
tgctaacccatggaagctcctaatatctcccacactttttgtggtgggccattcttggatggccttgattntctcagggtccacttggaccccatttctaccaactacaaaacctaagaaaactatattatctacacaaaaggtacacttctctatatttgcatagagggtgtttttcctaaggactgaaagaacttgtctgagatgtcctaagtgatcatctagcctcctactatacactaaaatatcatcaaaataaacaactacaaatctacctatgaaatcccttaagacatgatgcataagcctcataaaggtgcttggtgcattagtgagcccaaaaggcatcactagccattcatacaaaccaaacttggtcttgagaagcagtttccactcatcaccctttttcatcctgatttggtgataaccactttta

SEQ ID NO: 21243 - DNA, 413 bp, Glycine max
agcttgttactactattagatagctactaatactattgcaaactgtaattgtttttttaacttaattatattacacttgtttatgtatgtgtttttctcttgacttaaatataattttggtcattttattttactcaatacgtaattttggtctctctattttaaaattaaaatatttgatactcctatttttaaaaatctacaattttggtctctctattttaaaatacaaacattttgtccctatattttaaaaaattcataatcttgattctcatattatagaaaattcacaattttggtttaatatataatttttcctatgtattatttcttttattttttactttgcagttaattaaatcatttcttgatgatatcttaaatgaatatgtagatctacgatttaatta

SEQ ID NO: 21244 - DNA, 452 bp, Glycine max
  unsure (1)..(452): unsure at all n locations
tcgcttaagacaacttgtgtaataaattacaataaggttgttatcaattaaaatagagagtntttccttctgaagaatttttccaactttagaaattttcttaattcttaataattttactaatgctaatgcaagcaataaagcaataaactagttctttccaaatgcttatgcaatgcaagcaaatatgcaattcatacgcagttcatctccccctttgggcattaacaaggccaaagagtttaaacttatgcacaaaaaagaacacacaaattgaaggaaataaaccatagcatttcattaatcatgaaacattgcaaacaattaatcattaatcattgacctttctaatcaaacacttaattntcttcaaacaaacacaaacatggaaaaacataacaaaacagactaacatatagtagaaccaagcactgaaacataattacgcttca

SEQ ID NO: 21245 - DNA, 312 bp, Glycine max
agcttgttgggtagaagtaactaatgttctgttttgtgagaatatatgtattagatacaaagcatttcagctgctctaaaattaaccataaaccttcacttcttctcttttgagaggatttttattatttctaattttgggaatctcttgtgccaacagaatccttctacaaacttaagttgaatctttagccaatgaattttccaaaactcagtcttatttgtaaggttcatgtattctgccaatggaatggaattgtatatgaagattccaaatgtatggtttaattatattaataacctcttaaaaaaa

SEQ ID NO: 21246 - DNA, 375 bp, Glycine max
gtctaagatcatagaagtcgtgggttgttttctggtccacaaaatttatgtagccttttgtctttttttttttttttccggatgtttaacttatttgtctagttcatagcaatttgtttgtgtaccatgaatattcgatgaatgtgttgtatggactcttcagcaattgacatttatttgttttatttcagttctaagggtgaaaacaaaaacttcgaaaatgacgctacaattgaaagcaatgttgtaaggatttgacaaaggaaaaaatgtttgatctttaatgggtgtcacccttttctgttgatgaaggtttgccatatgctctcaaagggtggcctaatgttggtgatatatggggatagaaagtgggga

SEQ ID NO: 21247 - DNA, 316 bp, Glycine max
agcttcctctacctgaaaaaagagaaacattatcggccagggagcgtttttaaaaagtaattgcgcattgtccactgaaaaatattcatctggcttcttcacgaccgatgtcggctattgagtattctattcatcccctaatgaaatatgcatgatgtccgttaggaaatgttcgatcggcgtctttctgtgatgctcttttttagaccttaatcggtcatcttttttggcggacgtcgactgtctatgtattcaaacaatatcagggaaaaatatttttctgcctgaaagggctaatgttttctgggccgaataa

SEQ ID NO: 21248 - DNA, 386 bp, Glycine max
tgtcttcacatataatcgtcacacagcatatccctagcaagattacccatcatatctccccaaaaccccatacccacgaaatttaagagagaaagaagtccgcccaaacctgaattttcgaagtcccactcgtagccacgcacttcacgaccccgaaaatgctctcctttcacgatttggggcagaaatgagcaccaaaggttgaagctttgtgtggagcttcaatggagaatgaagaagaagagaatggcaacgtgagggagagagagggctgtctgaaatttctggttttgctgagtgaggagagagaaaagctttttggtcttaaataaaaggttttcctctttttctattattttattcaagctctggcacatgtcccctat

SEQ ID NO: 21249 - DNA, 352 bp, Glycine max
  unsure (1)..(352): unsure at all n locations
agctnttgggctatacacaaggcataaagtatattatatatgcttaactnnttgagttgagagataattttctggttactgtaaaaaaatcaagtgaaattgagaatggagcagttaggtcactagctaggctgtcatagctagctntgtagcaaagaaaaacaatggattttgaaaggttgttatctttattatgtaatcaactttaagaataagtggtgtacataggtggaagtttcaaattaagtgacgtaggacgaagggttatttttngaatggaaaagtgttaatggaagcaagtgttgagtgagaggatatttataacaatattttgcactctggagttaatata

SEQ ID NO: 21250 - DNA, 443 bp, Glycine max
  unsure (1)..(443): unsure at all n locations
ntcttcttccctataaagatgatcattatggtcactgttgtgtccaatgttgatgtcatcatcagaaccatcaacaccaccatcacagacaacatcaatatgaggatcatatgttagcaaaaagaatttgtaatcttcatccacttcatcctctgacatatgtgacatatgaccctcttttactgttaaacttgccacttttccatgactcttcacagttcttgtaccactgtcactgtgattttgcttcaatcgtttatttgaacttgaatgttcaaatctcttccatcgtctttctaacctataatcctcagaattaggacctttcggtttcggaatctctctcacatcatcataatcatccaagtcaatcgtgaccaaagcaggtcccattntcctttaacaataacagtgtcctcctttgaaacaggaatacttactca

SEQ ID NO: 21251 - DNA, 288 bp, Glycine max
ggaagtagttggaccaaggatgctactgaaaaacaataaggagacaaccgcctcataaacacaaacatcagagcacaattagagcgaactcatgcacatactttcttacagagcattcactcgcacaagagaatcttctaacaaataaaatggacccacgcacaaacaaaggaccttcgttacctaaattatttatatgtacttccaaggaggatatgctacctacattacaagcactgccttggctaaatttacatacatgcgtactcaaagcaatttggctccaaa

SEQ ID NO: 21252 - DNA, 172 bp, Glycine max
acacacgtcacaacactcaatgttttgaagtgtcgaaactttgtcaacatgtgaacgatcctatacttgtacctaaagagtatatactatgcatcgaaaaactatttgtatgcattaggcccacatagtgtatactttcttttgaagctttgaatattatacccatttctaa

SEQ ID NO: 21253 - DNA, 508 bp, Glycine max
  unsure (1)..(508): unsure at all n locations
tgcttagtatggtttgacgcctttgancnccgtgganattcggaaanntttcggtaacattctaccnnngnggtagcgatgtttaatatgtttctcacgttatnttcaangaccccggcgagtttgggtgttgtattcctgactatccattcctgcccctgtagagacctatgttttaaataactgaatgatattttcttagtaaaccgattttgccacagttaaggctgaaaacaatttatttatggatgggatggggcttctatatttagttctaattctcacaagaatgttcccatacctattgctattatatgattattattattataatcatcattatgggcatttatatatctactcataccaatgtcaaaaagcttttgnnggaaggccttcttaagctgaactctggccttactgtaatagagctttcatgatctcctgaagtaatgcttcttcatgaaccagaattgtgaaacttcacttcttgagattctatcgtcct

SEQ ID NO: 21254 - DNA, 387 bp, Glycine max
atattacggtactcaatcagacatccgagttataagttattgttgttcgaatttgctcagggcttcggtatgctatttcgaacatcgtccaatactaccggactcaatcggacatccgagtaaaaagatattgttgctcgaatttgctcagagcttctgcattccatttctagcgtttcgatcatttacgggactcaatcttacatccgaataaaaagatattgtagtttgaatatgctcaaagcttcggtattccatttcgagctcctctaagtattacgggactcaatcatacatccgagtaaaaagttattgtcgtttgaatatgctcagagcctttacattcacattcgagcgtgtcgatatattaccggactcaatcagaca

SEQ ID NO: 21255 - DNA, 292 bp, Glycine max
ttactctgatgtctgattgtgtgccgcaatatatccagacgctctagagtggaataccaaagctctgagcaaattcaaacgacaatatacttttactcggatgtcagattgagtcccgtcatatatctagacgctcgaaatggaatactgaagctctgagcaaattcaaacgacaatgactatttactctgatgtccgaatgagtcccgcaatatatcggaacgcttgaaatggtatgtggaagctctgagcaaaatcaaacgacaataaatttttactcggatgtctgatt

SEQ ID NO: 21256 - DNA, 304 bp, Glycine max
ccaccacacagacctttgcccttctgtgcaacaatctaaagcaattgaacagcctgaagcttatgctgcaaacatctacaatagacctcctcaacctcaacagcaaaatcagccacaacagaataattatgacctctctccagcaacaggtacaatcccggatggaggaatcatcccaatcttagatggtcgaatccttcacaacagcaacaacaacaacaacatacttattttcaaaatgttgttggcccaagtagatcatacattcctccaccaatctagtagcaacaacagcaacagcccc

SEQ ID NO: 21257 - DNA, 158 bp, Glycine max
gactaatatcacatcgcatgtaattaacatgttgcttatccatatcgacctacgtcattaatagtatcgatgcgacatacattatggtctaattacatttgaagtagtgactatagccgccatgatatctttcttgctatatgagattgactgggttg

SEQ ID NO: 21258 - DNA, 386 bp, Glycine max
  unsure (1)..(386): unsure at all n locations
agaacactcagaccgggtgtatttacccccaatgcctagactctgaagagtccgttaaggcctctccctcctgattcaggtccaactaagaaaacattttagcacattttagtacaacctgcccaattccttctatttccgtagcatatctaagaaaaacaaaccacacataaataaatgtgattaagaaaattatgtcttcaaactcagtaacttcttctccgtgctttgaaaataacacttagaatgagataataatctcggtgaataaaacaactaagagaaanttattggtaatgtaagtatccatactctcttccgcatccagatgacttatatataaataaacatcattatcatttcagatggacggataatctcataat

SEQ ID NO: 21259 - DNA, 372 bp, Glycine max
atgcatgtttggtaaatttgtacctaaattgacgataggatgacgatgtacctaaaccctgatgacgaagtacccatttccagccatgacgtaaataaaaaaagatttcccaaaatttttatggaaattgcagagattataacccgtgcattttgttggtccatatagataattgatattttgaagagtcaaatgagagcttttcttggttgttgattcaccaaatacatagaactttgaatagcctctgcagcaatccagctagctgctatcgatgtggttctattgccttcaactaattatccgttctttagatctcatgactatatattcatattttatcaatattgcttccttgaaacggatgatatc

SEQ ID NO: 21260 - DNA, 415 bp, Glycine max
agcttcctcggggccatttcctgcgaaggcaaaaatttggaaagttagttttaccagtgggacactactcttaaaacaaaaatggcgtacaacctcctcccataaatacaaacatcaatgtaaatttagagcaagcttatgcacatatttccttacgaacgttcacttgcacaagacatcctatcaactaagaaaaatgcacccatatacaatcaaggtagcttcattacctagattatttacatgtacttccaaggtgtatttgttatttacatcacacacgcctccttggctgaatttacatacatgcatactcaaaagcatttggggtaccaaaaactgcacatgcgctcatcttggtatttctaatacccatacatatacaaaccttcacgatgaatcttgactacctaca

SEQ ID NO: 21261 - DNA, 387 bp, Glycine max
  unsure (1)..(387): unsure at all n locations
tgagaagctagagcttagctacacacacccatcttataactaagctcacctccgtgagaagctntcttgagaagctagagcttagctacacacccctataatagctaagctcacccccatgataaaaaaacatgaaaatacaaaacaaatcctactacaaagactactcaaaatgccctgaaatacaaggctaaaaccctatactactagaatggccaaaatacaaggcccaaaataagaaaacaacctattctactatttacaaagaagagtggacccaaccttggcccatgggctcaaaaatctaccctaaggttcatgagaatcctaaggccttctttatcaactctagcccaatcctcttggagcctcttgctcatggctctg

SEQ ID NO: 21262 - DNA, 96 bp, Glycine max
agcttccgttgttcaattatgagcgtctctatttattatgtgcttcaatcgtagcatccgagtgaaaagttatgaccattctaatgactcgagagc

SEQ ID NO: 21263 - DNA, 281 bp, Glycine max
  unsure (1)..(281): unsure at all n locations
ctaganattcgaatggtcataagtnttcacacggatgtccgattctggaaaataatatatcgagaccctcgatattgaacaacggaagccttcgagaaattcgaatggttataagtttgcacacggatgttcgattcggggacataatatatcgagacgctcaaaattgaacaacggaagctctttagaaattcgaatggtcattacatttcactcggatgttcgattcggggacataactcaactagacgctcgaaattgaacaacggaagctttcgaca

SEQ ID NO: 21264 - DNA, 363 bp, Glycine max
agcttggcattctcaatggtggaaggacctccgaaagctatatcagcagcctgagttcattcttattcatcagcagatggtatggaaggtagggggaggggaaaaaattaaatgctggaaagataaatggttgggggatgattgtcaacttgaacaacaatataatcagttgttcttgattagtggtcagcagaatagtaccatctcgaacatgggaagcttctctcaaggcaattggtgttggggcttaaagtggagaaggaatctatttgattatgagcaacatatagctgtggcatttatggaagcaattactgatatacaaatccaggctcatatgcaggatattatggtctggaaagc

SEQ ID NO: 21265 - DNA, 426 bp, Glycine max
atcatcacttattagccttattagagtatatttgattgttggaccatatgaaacaatgtgttttgtgtatttaattttccaacaaattttctaactgagtcaagatggtattttatattccaaatttcaagtaaaataaaaatatttgagcttccaaggatatatgatggctcatggctgccacaaatatttcatgcttaacatctttatacatgaaaatattggtagcacataatggcttgagatctgttaggaacaaccaccgtgagctcatagcagttgtttatctttaagtaaacattgtacttcatgctcttacctttgctacacagtcaaggagtggactgagcttgaacaccctaacctttttcttcttgatgcttatattatggcacaactggtagttgtaatgaaagaagttccttt

SEQ ID NO: 21266 - DNA, 405 bp, Glycine max
  unsure (1)..(405): unsure at all n locations
agcnttgatcaaatagtatctagcataagactattttcacattagactaataggaaaaaaataaaaatcattaattatatatttataatcaatatttaatactattgaccaagttagtacagtaaaactcaactcaaatattatggctataaaaaatgttatatatttaatttatttattattttcgtctgttctaaattattttatataaataaaaaaaatgataaaataaataaaaaagagtagtaatttatcaaactaacattagtattaatattattaatacattcaaaaactaaagtaatactcattaggggtattagtagtttntttaattaatattacattgagaaataatatgacatttattttaggatatttattttaaatacaatacttatttta

SEQ ID NO: 21267 - DNA, 354 bp, Glycine max
  unsure (1)..(354): unsure at all n locations
atcatacatagaagcatgacattaattgcgtgtaagtggtcggtcaggttaaaatttgtcaaaatttcaaagcaattcaattaaaacaagttcaatggtctacacggtgagcataatttatattaccattcaatcataatttattattaatataaattttaaattaattatcataaaaatcaataaatttttcatacaaatgaattataattgggtaaagatataaaactttttacacaataaatatataattttttctcttaaacttaattgatttggatttatctttattttacatgctgaatctaacctaatccgactnntaatggattggatttggttgatttctaaaca

SEQ ID NO: 21268 - DNA, 352 bp, Glycine max
agcttgcaatagtgttgatgttggatctcttcgcgatccccagccggatgcagatagagtcaatgacccagaatggctcattgttattggggtttgtacacatttgggttgcattccattgccaaatgctggtgactctgggggatggttttgtccatgccatggatcacattatgatatttctggctgaattaggaagggaccagcaccatacaatctggagggtcctacgtacactctcttggaagaaacaagttgatgaatggttgaaaataaaagtggttctgcattcaagtgggatgagttaacaattattatttaaaaatttatttgacaattgttcaatgctctt

SEQ ID NO: 21269 - DNA, 446 bp, Glycine max
  unsure (1)..(446): unsure at all n locations
ntgaacaacagagaaacaatgtaatcccaagaatatatcatcattntctccaaactttaatgttattgatagtgagtgatgtcacaaaacctccagatttgaatgtgtgatatactttagtatgaatttttttttatccttcaaaagtacaacatatacatgtatcttctagtgcaattttcaaagctgactacatcaagaatggctggattgaagcaagtaataagaaacttcatcctgtatgctttctcttctttgaacccttgccaccagagaaaactcctgtggcataccgtgaattggcaagctcccgaggcacagctgctccaccagatttcagaacttcaattaattctgcaaatatattcttattctcctcattcacaaaaactatgccttgacctttctctccattctagatgcccttccaatctgatgtacatact

SEQ ID NO: 21270 - DNA, 336 bp, Glycine max
  unsure (1)..(336): unsure at all n locations
agcttttaatntcaaattcaaaatatcaaattggttcatatatcaatttagccactagtatcgatacatcttctggtaatcgattactagagaggcactatcatatttttgagaagataattgatcttaaaaaacttttgtaaaatattttctgtagccaaacttgagcaacatcaattatggagttctttctaagatcctaactaaggacatcgctcttcttgcttttttgaattcatgacttgaattgcgttcatctttgacttcgtcaaaacttcatatcatatatgcttctacattcatgattgactgatagacaaatttgtcacattgtta

SEQ ID NO: 21271 - DNA, 327 bp, Glycine max
  unsure (1)..(327): unsure at all n locations
ggagtattctcacaaaatatagtgaccctgactgatcaccttatgattntacttagtgagagtgacctgacatacccattgtgtggtgtatcatattatgtactcctaagcatcccagtgtggtttttcacagacatggtatcacattgcatataggcttgagtcttagtataattgttgcataatgtttgctaattgtttagtatgaaattgatgagtgttattacgtcttgacctgagcgtgtgattgtaaaataaattttaaatgataaagtattgaagtgacgtggattgtattaagttgagctatgttataaaacctccata

SEQ ID NO: 21272 - DNA, 227 bp, Glycine max
cgacccgggatcttaagcaccgcggctgcagcttgtagtattagtaggtataatttgcctgttccattaagctcttaatgtctttagaggttatttcctcgctgacatcttttgtcttgaatggaattgccatgacaagtctattgttactgtctctgatgtttggcaggtgatattgggttgcgggaggtaattcctattggatgaactttccattcttcacttgc

SEQ ID NO: 21273 - DNA, 385 bp, Glycine max
  unsure (1)..(385): unsure at all n locations
cagctgatggtacgctaagcctcacatctcatgctaagcgcatattgcagaanaaaattgttgcagaaagcgctaagcatagcctgccgtgctaagacccagatgcttacgggactttacaacttagagttgggcttaccacaaggctaggctaagtgcttgggttntaaactcaaacgtgcactaagcgcgccatacaaatttcaatttttaaaaatcaaaggcagaggcactttgggtgttacctttgcacccaaacctctgcaccttcctaaccttgagcacttgtgtactttctgttgcgtgtgtactacttgcctgcatcttcattgcttcatttcaagaacaatccaagtaagttagcacatctttattttattttgca

SEQ ID NO: 21274 - DNA, 294 bp, Glycine max
gcttgactggcctgttcctgtcaccgcggcttgccgatacggtctcagcttgactagaacccacttatttacctgaaactcatggtacctgcgatgtccatccgcgatttccttcatgcgagcctgcgctttctgcaatttccggcgaaggaggttaaacattgcttccctctgactgagcaaatcgtccactgttgctacagtggaggagcctgttaagtattgtggcaaacttggaggttcgccgtcaaatgttacctcaaagggtgttagcctcgtggctgactggacaga

SEQ ID NO: 21275 - DNA, 236 bp, Glycine max
aaacgataatatcttattactcgtatgtccgattgagtcccgtagtatatcgagacgctcgaaattcaaaacagaagctcttagaaaaatcaatcgacaataactttttactcggttgtccgattgagtcccgtagtatatcgagacgcttgaaattcataatagatgctctgagcaaaatctaaccataataactttttacacggatgtccgaatgtgacccgagatatatcgag

SEQ ID NO: 21276 - DNA, 358 bp, Glycine max
  unsure (1)..(358): unsure at all n locations
gctttctccagaagaaacaaccttctggaggaatcttttggagggcccaagtggacctggttgctatttacacccccctttttactaaatgcacccccttatatatttttctgtaattctttttccgtaacgttacgaaactttacgaatttcgtaacgatacttattttcctttccgcaaggttacgaatccttacggatttatgtatttactctttttggctttcanagaagttacggaaactcacggattgcgcaaaaacacctcttttcgatttccgccacattacggaatttcacggattacgcaagcctgcttccttttggatttctgagacgggctcggacttcatttatt

SEQ ID NO: 21277 - DNA, 368 bp, Glycine max
  unsure (1)..(368): unsure at all n locations
agccgcccagctcgcccaggcgagctcagctcgcccattctagcagggttgcttcctccagaagcaaccgccttctggaggaatcttctggagggcccaaatgggcctgggtgctatttgcacccccatttttactaagtacacccccctctgctgttttttggtgattcttttttcgttaagttacggaaacttacgaatttcgttacgatacttgttttctttccgtaatgttacggaaccttgcggattacataatcatcccctttntgacttacggaatgttacggaacctcacttaattatgcaacgatgcttccatttgatttccggtgtgtcacagaaacttactgattgtgcatcaatat

SEQ ID NO: 21278 - DNA, 373 bp, Glycine max
taacaactagttttacttttcatttgttggtatatactatttttagtactgtgtacttttcattgtcacataggtaaatttattgacttgtatttcattttgtacagttaaacatggaaagagacgcaggaagggtttttaacggtttcaaagaggggagggttgtttttgctcccacttacaagtattcacataattcagactcttatgctggtgagactgtcaagtcaaagaaaaaacgccgaacgccagcatggtatgcaagtcacttgactcttattatataagtcactcaattaaatgactagtgctagctagatggcttttcagtttttaataaagataggtaaataaaaaattgttgacaacactt

SEQ ID NO: 21279 - DNA, 419 bp, Glycine max
agcttgttcatgtcctcatgggcttgaggcacaagacttctcaactaattgaactataaaaaaatcatatctttggcacttgggtataggccttacttgggagcagccacatttttgtttaaaatatgtttttctattttgaagccttataatagcatgaaattgtcataaaatgacaatttgtggtggctttaaaaatcttaagagatcaattacaaatattttacaagatcaacgacacaattactatttttttagtttagagacctaaataaaaactcctaaatagttgagggaattaaattaaccttgaatgaacaaaaacaaacaaattttcacatggatatgtaaatagaaacaccataattcttaattaaaatgaagctgtgacttttacggatcacctttccgtaaagtat

SEQ ID NO: 21280 - DNA, 393 bp, Glycine max
  unsure (1)..(393): unsure at all n locations
gcctttagggcttgtacctcatcactttcttccgattctntaacctcattgtctctcacagtctttagatttgggagccaatccaatccttgtgtccggactctcagccacttatgatagccgccgatgatcccattactgcttcccctaagctctctgtcctttcttcacgccgcatcccatgccttgcgaactccttggagtaccctcgcgttgtggtcactgaaaccccgtgcgatgaaaggcgtgatactttcgtctgatggcactcctctcatggggtagccaagctgtcttatggcgaggacgagattataattaatacaaccccttgttcccattcaaggaacatttggacatncttcgcatgaagatagaatcatgattctttct

SEQ ID NO: 21281 - DNA, 402 bp, Glycine max
agcttcaccttctggtcctcctcatagttgtggcatgagaaaacatgctctattttcatctcccactccaagtaggcctccggatcattctttcctttaaatggaggaatgtggagtttaataccatcaatacggatgtgtctaggaacaccatcattccctcttctcctcctttcttcttcattatgagctctattctccatttgatccaacctctcatggagcgcatcatctcgttgtttcattaacctctccatatgttgcatcatagcttgcatttggaattgcgaaagccccactccatcattaggatgtagacctgacatctcaaacaaacaaatcaaacgtgacaagacaattatagttgctgtatgatacctctccactcagtgtatcacacaa

SEQ ID NO: 21282 - DNA, 439 bp, Glycine max
tcgcttcttcacatagtccgcctatgctagaccttctttatgtttaaaaacagaaacattaggcataggcaaaagatcaagaggagttagtgggttaaaaccataaacaacttcaaaaggagaacaattagtggtgctatgaacagctctattgtaagcaaattcaacatggggtaaacaagcttcccaagtttttaagatcttcctcaaaactgtcctaagcaaagttcccaaagtcctattaacaacttccgtttgcccatcggtttgtgggtgacaagtggttgaaaataacaatatagtgcccaacttgctccacaaagtcctccaaaaatggcttatgaacttatagtccctatcactaacaatgctccttgtgcaaccatggagtcttacaatcttcttgaataacaaatcaaccacattgggagcatcatca

SEQ ID NO: 21283 - DNA, 343 bp, Glycine max
agcttggatgcaacatcttggtcaaagatattgcatgttaagaccttcttaagttttcgacaggtcatgtaagggaagcgaattaaacgggcaagtcgtgtacccaagacttctcttctctcttctagattcgggtactgtgttcgaacccacttcaacacaaagtcatataccgcatcctctgatgcaacctgaagttcgtcactagacaatattgcttctattccagctagaggcaagcccataacctcttcctggaacctggtcatggtcatatgtgaaacttattagcgttcaaaaggaagaaaacttgttttgagattactaaaatatagaacccaga

SEQ ID NO: 21284 - DNA, 381 bp, Glycine max
  unsure (1)..(381): unsure at all n locations
tcattaaagtatttntctgtttatttggtatttggtattgntctgcacgcgcatatatatatatccatgatggtcagccaatacttgtagagagcgtaatagatgatgattgatgaggttgggcgagagaggaatctgctgcgtggtaaataaaccatgcaaagccaaacatatttggacattggcttgaagagatgggagacaaaggataaggattgagaaaggcctaaataaagagaagaatgcaagctaggaagttgcacaaattggtaaaactaagtaaactttataatagatggttattcccaaatttttattcaattganagcggtactgagatagttgttgacaacattttcactcaagatttgcaacactctg

SEQ ID NO: 21285 - DNA, 383 bp, Glycine max
agcttcttatccaaggctcatcttggtggtgaagttccttcttccaaggcttattccctagtggatggcgccgcctcttacctcttctcctttgtcttccgctgcatctccatggaggaaaatcatcattgaagctcaaagatccagcctccatagaagctccacaagcaagcttccatcatcacctccctcgaattaccttcgtatgtgtctgcctaacgtgtttctttcttttgcctctcatcagtagttcacgttccaactaagtgtggtagtatcttaaaatcatatttgaacttagagggtgtgtttagtttagaagataaaaatagatatttttaattaaaataaactggtaaagatgtggatttttatataaaaaa

SEQ ID NO: 21286 - DNA, 205 bp, Glycine max
tagtgtgaagttgactcgccagggccctgcatggtcccttgtgctgcggtgttttgagttggctgtgcacgtggaatgtgtgacatgtcttgacgatgacaatgggttctggtcacctattatatatgcccaaatatactcttgggttgtcttgagccggagggagagaagatcaatgtgaccctggccgaagatgtgtcgtgca

SEQ ID NO: 21287 - DNA, 286 bp, Glycine max
agcttaaccgagactcgcgctcccggttaaagggccaagagtttccttttatcagtttctgggccaccccctgatattggagggggaccaactgtgcaagcacaaccagagagggaggctatcatgcagctactatgcataccggggcaagatttcacccgtgccactgcaaagagacgagtgtggatcattcgcaccaacatgaccactcttacacagatataaatgacagttgtacttagcaacattctgcccaacgaccgatatgccgatctccccctgcaaa

SEQ ID NO: 21288 - DNA, 361 bp, Glycine max
  unsure (1)..(361): unsure at all n locations
aatgagaagcaaatgtttcaagatttctcanaagtagttcaagaaattctaaaagttgtaagaattatattaaaaagatattgaaatgcaagtcaaggtcttgcttttatagacccttcatgtctggtcaagaaaaccattagaagagttataactttgagaaaaacttgaaaaccattggaagagttacatctcttgactttntcttcaaaacttgtcactggtaattgattaccaaaaccatgtaatcgattacacaaagcattttatgaaaagatgtgactcttcacaatngaatttgaatttcaacattcagatacactggtaatttgataccaatatagtgtaatcgattacacca

SEQ ID NO: 21289 - DNA, 346 bp, Glycine max
agcttaagaggtatgacagagctaacaagtgttcttttacaaaggagaagatgtggaggttgtctaataaggaaaacttctttaatgtttgtctttattgcaaaaaaacttaccttcttagctaacctcttggaggagacacttacctccttaaccattaaagggtgttcttctcttctttttctattattctcctcatcccatttgaagatgcaacacgaatatactgccaagatgggtgaaggtaatctcattagttaggccattgtaaatgatcttcctatcaaattgccatggcttttctaagagagtatgccctacctccatgggaactaatatacaatta

SEQ ID NO: 21290 - DNA, 410 bp, Glycine max
  unsure (1)..(410): unsure at all n locations
ctgcgaaatgcttgtcgctggagttgaccgatcaactgtcccaattcttttagacgggtggttcctaggctcttgaccttgacttgatagaacctctttttaagcgaaggcgcttgactcgatcccatgtttactaaagtgaaacaaaacccagtgcgaatcaaaactccgacatctatcatgggtggaatggatgaatgcatggagaaatgtatatgacacagatgcaatttgtgaatacgggagcccgggaaattgtccccttcttagatacaacatttgggcagcatggcgcccgacatatgtatttaagaaggtgacacgaaccttctcgtcggttgacanagtgaggggatcaagatggaatctatgcatgatgcatatgtgaaaggcacacacggggatgtaca

SEQ ID NO: 21291 - DNA, 214 bp, Glycine max
agctttgtgaagctcctgttttagctttacccgattttactcaaccatttgaagttgaatgtgatgctagtggagttggcattggggctgttttgatacaaaacaaaaggcctatagcttatttctcggagaaattgggaggagccagattgaactattgcacctatgacaaagagttctatgccattgtgagagctcttgatcattggaatca

SEQ ID NO: 21292 - DNA, 433 bp, Glycine max
  unsure (1)..(433): unsure at all n locations
tgtagcanatgcaaacggcaantaaaatttactcggatgttcgattgagtcacgtaatacattgaaaagctcaaaattgaaaacaaaagctctgtgcaaattcaaacgacaataagtttttactcagatgttcgattgagtcacgtaatacatcgaaacgcccgaaattgagaatagaagctctgagaatatataaacgacaataacgctcgaaattgagactagaagctctgagcaaatttactcggatgtcagatggagtcccgtaatagattgagacgatcgaaattgatttccgaagctctgagcaaattcaaacgacaataacttattactcgaatgtccgattaagtcccgaaatatatcgagacgctcgaaatngaaacagaagctatgagcaaaatctaacgacaataacgttttactcggatgt

SEQ ID NO: 21293 - DNA, 419 bp, Glycine max
agctttgatgatatggtcttcatcgacgataggatcgatgtgggtctaaaaagaggcatatttagtcattctgcttggacgaatgagaaaactggggctaatgacgagggtgaggatgaaggataagcccgtgctgtgactgccattccaatacagccaagtttcccaccaacccaacaatgtcattacttagccaataacaaaccttctccttacccaccgcccagttatccacaaaggccatccctaaaatcaactcacaaagcctacctaccgcacttccaatgacaaacaccacctttagcataaaccatagcaccaaccatgaaatgaattttgcagcaagaaagcctgtagaattcaccccaattccagtgtcctatgctgacttgctcccatatctacttgataattcaatg

SEQ ID NO: 21294 - DNA, 430 bp, Glycine max
tgctctatattacattgatgtttgtatttatgagaggatgttatatgccatttttgctttaaaagtagtgtcccactggtaaaattaactttccaaatgtttgcctacgcatgaatggccccgatgaagcttgcctcaaagacgttcacgatagacaaagcggccgatagaactatttccgctccggagtacgacagtcaccgctataagagcgctgtacaaccatcacgcttctataccatcaagggatggtcgtttttccgggagcgacgcgtccagctcatggacgacgagtatactgattttcacgaggaaatagggcgccggcggtgggcaccacttgttactcctatggccaagttagatccagagatagtccttgagttttatgccaatgcttggccaacagacgagggcgtgcgtgacatga

SEQ ID NO: 21295 - DNA, 424 bp, Glycine max
  unsure (1)..(424): unsure at all n locations
agcttgtaggattatggngtacccatcacatgtggtcctaggtggcggtcgggcgatggtgcaaaacaagttttccatatccacaaagcgcgcataaacccaccatcccctgttgcccacctccatctgagctcacgtactcccacgtagcccatatcctcgtttctatcaacaccgggtccccatcaatcctgccaagctttcaaaacatccaaacaaaacgacattcaaaccgcacaagctatcacagccaagcaaaacagagcataggcagaaaactctgccaaaacaccaaccaaatcacagcttttctcacttaaagaccccagaaacaattccttcgttccggttcattaaccattggatcgactcgaaaattgtactggacatctctaatacttaagcctacattttgaccgttggg

SEQ ID NO: 21296 - DNA, 428 bp, Glycine max
  unsure (1)..(428): unsure at all n locations
cgtaggattatggngtacccatcacatgtggtactaggtggcggtctggcgatggtgcacacacaagttttccacatccacaatgcgcgcataaacccaccatcccctgtagcccacctacaactgagctcacgtactcccacgtagcccatatcctcgtttctctcaacaccgggtccccatcaatcctcccaagcttccccaacatcaaagtaatacaacattcaaacagcacaaactatcacagccaagaaaacagagcataggcagaaaactctgccaaaacaccaaccaaaatcacagctattctcacttaaagaccccagtaacaattccttcgttccaattcgttaaccgtcggatcgactccaaatntttactggaagtctatagtacataagcctacattttgaccgtggggatctact

SEQ ID NO: 21297 - DNA, 404 bp, Glycine max
  unsure (1)..(404): unsure at all n locations
agcttcaagcatccaatatgttaaaaggtgcatctttatcatttaatgaagaagtttatcaaatctcacagagtccattaagaaanaaggctaataaacaagttttcacagttcaaagtccaaagctacaagcatccgagaagtcaaaatattcatcttcatcatcaaatgaagtttattcaatctcaaaaagttaattaaggagaaagacgaatgaacaaattgttttgacatcaaagtttaaaaagaagcacaccaaagaaaacaaaattcaacatcaggtcaccagcaaaaggaaataaatacaaaaattctacttaaatgtaaaattctcggtgttttattcgtatcacttttatgtgctttaccattatgattgactattgttctttcattaaatatat

SEQ ID NO: 21298 - DNA, 416 bp, Glycine max
  unsure (1)..(416): unsure at all n locations
actcagcttagttacggtggctctacgtccattntcggagtcccatatctcatgtatcacttgtttctcacttgaattatgggtgttctcagcatcatcagaattatgatactcatgcaattcctttagagctgtcaccacagcaacgtatgcctcctctcccaaatcantttttaaagataataatntaggatcattntcatcaatttcttcctgaaaaaatataatgcgagagacatcaaattttgctcatttaattgtccatgctagtgtacatttgtgacacataattgaatcccctaccctgctgataacatgccatgttttacagaattatgccagttggttgtaacaaactctaaattggagtatacataaaatttcttacatgatcatgtgttttgggatctataata

SEQ ID NO: 21299 - DNA, 395 bp, Glycine max
agaacaagcttgtacgcacatcgttcgcgtgtatgatatccacttcacaaggtttggaagtaaaggagagcttctaccctataacgccccgtggcggacaaaaatgggcactaaacttgaatgatccttattgttaatgcggaacgtattttgcgcttcactttccatgttcacacattattgcagcttgtggttacatgagcatgaactactacccatatatagatgttgtttatacaaaccaacacatctttaaagcttacttcgcacaatggtggcctcttgggaatgaagcggtattccttcttctgatgatgcatggacacttattcctgaccccacttcatttgtgcgaaggtcggccaaaatcaacaacgataacaaatgagatgggg

SEQ ID NO: 21300 - DNA, 432 bp, Glycine max
  unsure (1)..(432): unsure at all n locations
ntagcttgttacaagaaaatntattccccacaaaaacataatacttgagctcgactaaaaaagacaatagtttgaatgacaacttcgggatgttggtgaagtcagggaatattgctagagagagagctggcatatccatcaacctaagaaaagtaagctctgactttctaaaaaccaacatttggaagcttcaaacaaatattattgaagacctaacattatttaaattgaggagacaaaattgtcatgaatagccagcaaagccaagagaagtcactgagatacatgccggaacaggacaatgacaaaataggagactgataagttcttcaccgaaaaataagtgacaagctaaaggcagtgtccggaaaacatgctgaaaagagatgacaataggataggcaacatgaattctttgctggaaaatgaata

SEQ ID NO: 21301 - DNA, 393 bp, Glycine max
agcttgcttctattcttaatgtaccttggaaaggtgcatttacaggcttcattcgtcttgaatgcgtaaattctgttgagttccgaccatcttttgacaactgaagtgcactgctactaattagatcccctttatcaatatcctttaatacagactgatcaaacagaaaagcaatctgataaaccactagacattgctgtggcatctataacaaaatatacagcaacatcaattaccagttcctcagaatttggtgagcaaagagctagaggctccaatggttcattctgagtaacagaaggtacctgcacaaattccactagtgttctacttgtatgcatatcaccaactctgtatacatcaagcagaattgtcctactatatgtaaaggga

SEQ ID NO: 21302 - DNA, 415 bp, Glycine max
tagtgcattcgatctatttgcttcagcttgcagcagagtgtgtgaaacggtttctattctggaaattacttctagagtcgatgaatagacacagactttgcagatgaatagacagagatttgggtcatcattgctctctgggagtctcactgtttcattgttactactcttaaatgtaatttattctgagatgtatataaatataggtgttgttgagtgctctttcgctcaagcatttcaccaaaatctactctgcctctaaagaaaacgataacggctttatgtgtcataaatgttttatatactttaatatcatacagctgttggataaaattacaaagcataataaaataccaacaaacaaaattctctattacctaatggtgcttgcacatacaatgtaacctgcatgtat

SEQ ID NO: 21303 - DNA, 375 bp, Glycine max
tttgtgcgccctctgtctaattccttctttttactgttctgtgtcatttgactcttttattattattcttaaggacaaggatttctattatgatatgacatcagttaacgctgtttatctttcttcctactcgaacttgcttagaatttgatcaacctacaaatgataacttgattcacgtgactcatttttgtcacatgccattttttattatttagcaacagtcatatttttctgatttacttagagcttactaacaattctatcatacttttaaaatatacgccatatagtgtcacatgtatttatattaaacacagtatgtcactttaaatacctctagtgtttgtgcgtacatactttaaatacctatag

SEQ ID NO: 21304 - DNA, 320 bp, Glycine max
atgtattaaaatgtttcattgcatcgcgatgatttctacacataattgtgtctatgatattttatggcgcgatcaccctaagagatgatcgagttgggcctaatgtaataagacagtgatcagactaagaccttgtaggaagatagtggatcagaacataatccgatcttatagggtacataatccctcagcctcaaacaagagatgtgcccagactaagtgtgctgagatggaaatacaatctgatccaagagatacacacccgcctagtctccatttgagatgtatatagactaacggtatagggattatagcacgat

SEQ ID NO: 21305 - DNA, 400 bp, Glycine max
  unsure (1)..(400): unsure at all n locations
agctngtagaatggctagacatgatacatgtcatggtttggtttgcttcaaggataaaagggatgccccacattatttccatgacacaaatgcaaaaatgatgatttggaaactttatgcaaaactggtcatgcatgtacctatgcggacactcaagtgtcaaatttttatggtcatgtgatgctagggctcacgattcatttcctctattttaaatcaacccaatgtttccaaaatatgttcttttatcaatttgtgcgttcatccgagtccatttcgggcgtccggaaaaatttcacagcattcacctttcaggtgtagacacattttccaaaaattggttatgatcagtgaattttatcaaagaaaaagttggaaatcatctcttttcataagcatg

SEQ ID NO: 21306 - DNA, 346 bp, Glycine max
  unsure (1)..(346): unsure at all n locations
tgcctcgaagaggtccaggaaagacaaagcagccgaaagaactanttccgctccggagtatgatagtcaccgctttatgagtgctgtacaccagcagcgcttctaggccatcaagggatggtcgtttctccgggagcgacgcgtccagctcagggacgacgagtatactgatttccaggaggaaatatggcgccggcggtgggcatcactggttactcccatggccaagtttgatccagaaatagtccttgagttttatgccaatgcttggccaacagaggagggcgtgcgtgacatgagatcctgtgtaaggggtcagtggatcccgtttgatgccgacgctatc

SEQ ID NO: 21307 - DNA, 333 bp, Glycine max
  unsure (1)..(333): unsure at all n locations
gagcttgaccatcagtgaaggcataccantgtttcttatatactaatttccccttaaatgtgaggctcactggccgattatgaatgaaagaatattctttatcaaaattcacgtcgggataaaatagacacgaacatttcggattatgctgtatgaatccgcttctgctcctttcaccatgtaccttttgttcagaacaacatgttagtcacatgagatttctctctctttcatatatctaattttctttctaaatataactaaaccatgggtttatccctcataaaataccgagacaagttcttaaattgtgtttatctaccccaccccccc

SEQ ID NO: 21308 - DNA, 419 bp, Glycine max
  unsure (1)..(419): unsure at all n locations
ngcctctatcagagtttaggagagaggatctactttggagtttggatagaaaaataacatcgatgaacccgcagttctggtcaattatcagttattcactaattcactgagtatttggctagttttatgaggactaattccaagggtcactctggccaaatgagggaccaattgtccaactggtcanaccaactagttgaatatggcttttactagtccatttaggtgcaacactggaatatatatttcacaactaaggaggggttaaggcccaacacaaaagctaacaagaagattaaccttactggtccaacccaaatgctttgtatttgagataaggaatattaatatgccatctaatatccttcgctaattaggaatcatacttaactcttttcataatagtgagatctaatatg

SEQ ID NO: 21309 - DNA, 275 bp, Glycine max
  unsure (1)..(275): unsure at all n locations
tcgagctttccaacatacaagtaatacaacattctaacagcacannatatcacagccaagcaaaacatggcaaaggtagaaaaactctgtcaaaaacaccaaccaaaatcacagcttttctcacttagagaccccagtaacaattccgtcgttccaattcgttaaccggtggattgactctgaaattttactggaagtctctaatacataagcctacattgtgaccgttgggatctactagcaaacattcagaaactcattctgtacttactctt

SEQ ID NO: 21310 - DNA, 433 bp, Glycine max
ctaagcttctcaggaagtttctcaacgaagatacctatgctattattacaagcatgtgtaacactagttgtagctttactgaatgagagtcttatgaaacacacttcaaagttcaacttctctccctcttacctccttcaatctcttgctccccccctgatgcaagctccattggagcttgtaggcctaggatcttcttcatcaatggatacctttgcttcttggaagatgaatggcagcggaatggagaatgaagagagagacgagacgcctcttcaaggagaatatgagtctagaacaagctcaccaccataggaggccatggataacagcttggaggaagaatgagatgaatgactggagagggagagaagagcacgaaattatgtgctccagatgagctttgaaatctgaattctaatattcgaatgat

SEQ ID NO: 21311 - DNA, 411 bp, Glycine max
agcttttgacggactataccaagctctaggaaccagggacggagaaagatctatatataggcttgctaagggtagagagaggaagactagagatttggatcacgtaaagtgtgttaaggatgaagaaggcaaagtcttagtgcatgaaaaagatatcaaggaaaggtggaaggtgtatttccacaacttatttaatgatggatatggatatgactctagcagtctagacacaagagaagaggaccggaactataagtattatcgtcggattcagaaacaggaagtaaaggaagcgttgaaaagaatgagtaacggtaaggcggtggggccagacaacatacctattgaagtgtggaaaactcttggagatagaggtcttgagtggctcaccaaactctttaatgaaattat

SEQ ID NO: 21312 - DNA, 475 bp, Glycine max
  unsure (1)..(475): unsure at all n locations
ctattacggacactatgaaactaagctttaaagaatacatatccctttctcaaaaagtatatatatatatatatatacacacacacacacacacacacacacacatgaaataagattgttaaactagctagcatgaggcaagggtctcacacgcatgagattgggccaagtgggctcaatgtagtgcaaatcatctgatcccccccacccttcgcacgtgtgaaaatgggactgtcaaaatcttttacaaaatgtttttgtcccttaattattttaccgttaaaatcaattatggtaatcagattttcatttaattattttcttaccatttttttaaacaatttaattaccatttgttcccttttattttcttatcattttatcatgttttccattccctataaataccatcttcaggcacagttttcanacacaccaaanagtgaagaacatctntgtcttcttttctctctct

SEQ ID NO: 21313 - DNA, 397 bp, Glycine max
atgcaagcttctccacttgtaacttgggcctaaattcaaatagcatggataacacttgttgaagaacttccttggccttctttgatctagcccttgccataggtcctccaagtccttctaaaggttccttgtccttattccttgccttatcctcatcactctctccctcttcaaaaggatatgtcctcaaatcggcttcttcatctacatcaaaaagatttacgtcagacacattaaatgtagcactcacattatactcactgggcaattcaatcttgtacgcattgtcatttatcctttcgagtacttgaaatggaccatccactcttggttgaagcttggattttctttgctccgaacacctctcctttctcatgtgaacccaaacccaatctct

SEQ ID NO: 21314 - DNA, 332 bp, Glycine max
tccaagaattaagagcaagattcattccagaatcaagagaatacttaatcaagataaggtttaaaaagttttttcaaaaactgagtagcacatgaatttttctcaaaaccttttaccaacgagtttttactctctgataatcgattaccagaatattgtaatcaattaccagtagcaaaatggttttcaaaaatctttcaactgagtttacaatgttcccattgatttcaaaaagttataatcaattacaatcttttggtaatcgattaccaatgtgtgtgaacgttgaaattcaaattccaatgtgaagagtcatatcctctcacaaaaaa

SEQ ID NO: 21315 - DNA, 424 bp, Glycine max
  unsure (1)..(424): unsure at all n locations
agctnttgttaatatgggtgttgtacttaataaagccatgactggtttggaaacagagaaggttccttttggtttctttgctcggaatggcaagtatgtggaatgcctgctttctgtgagtaagaaattggacgtagagggcctagttactggggtcttctgcttcttacagctagctagcccagagctccaacaagcattacatattcagcgcctatccgagcaaactgccttgaagagattaaatgcattaagttacatgaaaaggcaaatcatgaatcctttgtgtggaattatattttcccggaaaatgttggagggtactgccttgggaacagagcaganacaacttctacgcactagtgctcagtgccagcagcagcttagtaaaattcttgatgactcagatcttgatagtatcata

SEQ ID NO: 21316 - DNA, 445 bp, Glycine max
  unsure (1)..(445): unsure at all n locations
tattatttctttaattngcgggagatagtgatggtacgtttacaatctccatgcatgtgaaacaaataattgggtctatatgctggggccctacaatcatcagtgcacaggaacagaacaaaaatcctgaagaggataatggggtggtggctatgcaatcccaagtttgatcccctcgtaaaatattcatgtactagttaattaaacaggcttcataaagtttttttagttttcaaaaataattctttgcactcatataattgagtgaggaacaaaatatatttatatgcgtctgtttactattcatgtagtgattaataaaaaggcaaggacagcaaactaataaacaaattgttgattatgatcataatgatngaactgataatgacggtgttcatgaagctatataatatatagccttatcaatagacttgttctgggtgac

SEQ ID NO: 21317 - DNA, 377 bp, Glycine max
agcttgttaatccatggaagctcctaatatctcccacactatttggggtgggtcattcttggatggcctcgattttctcaagttccacttggaacccatttctaccaactacaaaacctaataaaactatattatctacacaaaaggtacacttctctatatttgcatagagggtgtttttcctaaggattgaaagaacttgcctgagatgtcctaagtgatcatctacgctcctactgtacactaaaatatcatcaaaataaacaactacaaatctacctatgaaatcccttaagacataatgcataagcctcataaaggtgcttggtgcattagtgagctcaaaaggcatcactagccattcatacacaacaaac

SEQ ID NO: 21318 - DNA, 454 bp, Glycine max
  unsure (1)..(454): unsure at all n locations
tgtagttctcgtcggagaggaaaccgacgcgtttcgccctgtcgagcaacatntccttggagcacaggcattcaaggctnggcttgaagcatgcaaaatccaccaagtaaattttgttgggtgttctcattataaattggtatgctagggttgcaaccatgcagaatggtattgtaattgaaagactaggcttcaaatggggaacatataaactagcttaggtgacaactataatcaacgtgaagaaaatgttcatgttgaaatgcttcagcattgatattagggtttgttattgcgtgagatattatttgaagttggggttatacggaggagcaacatgtggcaatatatagagaatgacttttgggggttgggcaagtgttgatgtatacggcggtgttcatgttggtaaagaaagttaatatgcaagtgtgggagttacaactcataacta

SEQ ID NO: 21319 - DNA, 380 bp, Glycine max
agcttctatagaagggtcgttcctaatttctctacaatcgcatcacctctcaatgagctggtgaagaagaatgtggcatttacctgaggtgaaaaacaagagaaagctcttgctttgctcaaagaaaagcttactaaggcacctgttctagctcttcctgacttttctaaaacttttgagctaaaatgtgatgcctctggagtgggagttggagctgtattgttacaaggtgggcaccctattgcttattttagtgaaaaaattcatagtgccacccttaactaccccacctatgataaagagatttatgccttaataagagccctccaaacttgggaacattaccttgtacccaatgaatttgtcattcctagtgatca

SEQ ID NO: 21320 - DNA, 454 bp, Glycine max
  unsure (1)..(454): unsure at all n locations
actcagctatgctganatatttacatagacctcctcaacctcagcagcaaaatcaaccacagcagagaaattatgacctttccagcaacagatacaaccctggatggaggaatcaccctaacctctgatggtccagccctcagcaacaacaacagtagcctgctccttccttccaaaatgctgctggcccaagcagaccatacattcctccaccaatccaacaacagcaacaaccccagaaacagccaacagttgaggcccctccacaaccttccctcgaagaacttgtgaggcaaatgactttgcagaacatgcagtttcagcaagagaccagagcctccattcagagcttaaccaatcagatgggacaattagctacccaattgaatcaacaacagtcccagaattctgacaagctgccttctcaagctgtccaaaatcccaaaaatgtcag

SEQ ID NO: 21321 - DNA, 379 bp, Glycine max
agcttgaggtattgactcagtagagaaccatgattgcatttgtaatgtttatgtttttttgaggtggttttgtttatttatttaattaatccctagaaacatataagaagttttatcctcgtaccacttcaaaaagttaaaaatgatatgtatgtatgaaattatgatgtcaaatagcttggaaattggaatagctctctattatgccattctttatgttgctatgtctatactagacgaaggagatgcatgccaatgctattcacttgaagattcttagcaagtgagtgcccaccttttgcatacattattgttcattattattcattaatttatggtattcattattattcattaagattctcttatttatgtttga

SEQ ID NO: 21322 - DNA, 456 bp, Glycine max
  unsure (1)..(456): unsure at all n locations
ctcagctataagaattggccaggtacaaaacaagtatgttcaataatattcatcatggaatgcttttgaatttattggcctacatattctacatgttatgcatcttaggagagtacgtaggtgtgtctattttcattcctatttgaaaaccacaacaacaatagccttatctcgttagggaggttggctatatggattacaacaatagcctgagcgcatcacttgaccaaacaccacccctttttgatactactgaaccttagttttcttcttcttcttatccttctctttctctcctaagaccatcctctccttctctctttatatatcactttggaacttggaagctttttttggtttatacccaaaggaacgtggaacttataactaanaggttntgtttcaaggatggaagctctatagtgagacttgttaggcttcaaaaatatatacctg

SEQ ID NO: 21323 - DNA, 350 bp, Glycine max
agctttgaaagattggctaagactttgttataacattttcacttaaacaatgaaggaaagctggagttgctgcacatgatgtccaacggtatgtcaaataataagatcgggctgcacactgcacaaggcaagataaagtgtctaatgaagaatagaagctgcacgattcacgatgtcagatataatgtccatgacatcctgcctgataatactggaattgctaaaagcattgaatcagcaggatccacgatggcggatacaatgtccatgacatcctgcccgaaaatactggagttgctaaaagcattgacgttgcaagatgtccgatgaccgatactatgtccaggaca

SEQ ID NO: 21324 - DNA, 458 bp, Glycine max
tctttgagaaaacttccttgagaagctagagattatctacacacacccctctcataactaagctcacctctttgagaagcttccttaagagattcctaaagaagctagagcttagctacacatacctctctaataggtaagctcacctccttgagatgagaagctagaacttagctacacaccccctataataactaagctcacccccatgacaaaaaacatgaaaatacaaaaaaaagtccttactacaaagactactcaaaatgccccgaaatacaagactaaaaccctatactactagaatggccaaaatacaagcccaaacgaaggaaaaacctattctaatatttacaaagacaagcgggctcatacttagcccatgggctcgaaatctaccctaaggctcatgagaacccttgggccttccctcggatctctagcccaatctacttggagtc

SEQ ID NO: 21325 - DNA, 394 bp, Glycine max
agcttgagacattctcgcaaaggtttatgctgggtcagaaaggttgaagagagtcaacatgcaaaccttgaagcaacaattcgagctactacagatgaatgagaaagaatgtataacaaaatacctaaatcgtgtgctgggcctgtcaaatcatatgatggcttgtggtgaaaacatgaaggattaagatcttgtagaaaaggttttaagaaccttgagctcaagatctgattatgtggttgctgcaatagaagaatctaaggatttcatagaaatgaaattgaatgagcttcaatgctctcttgaagcacatgagcaaagaatcaaagaaaaggaaacagataggtcatctgaacatgccttactcactcagagtggtagaagatacaaattg

SEQ ID NO: 21326 - DNA, 423 bp, Glycine max
  unsure (1)..(423): unsure at all n locations
tcacctagnttcatcttccgtacgttgaacagtgatcaatataatacacgtcatcacgtaattacacaactggtcttcagaactgggaattaagttgctagcttttatatgtaggggtgcttataagtggtttttgtaggtggaaatgtaccatcatcaccaacaccaaggaaaaaacattcattcttctttcagaatgccaatcccctctgagaggcacatgttccttcaagcaggaaatggttctggtgattctggactagtgctctcaactgatgctaagcctatattgaaatggacaccagatcttcatgcaagggttatagaagcagtcaaccagttagggggagctgacagtgagtactcacattagcttttggatcatcagatgtggaagaacatagaaattgagttcactaatgc

SEQ ID NO: 21327 - DNA, 412 bp, Glycine max
agcttatatttttctgcaatagcaggtgggacaaatctacctcctagaaagtggtgaggaccaccaaacttctttgcacctaattttggggctgtcaaagaaacctacaaaaaaattaagcacaacggtgggatggcatctcaatagaaacacaatttatgttgaaataaatattgaggatatattatatctaaatttcaacattcaaagaaataaatagagacacatatattcctgaaacataccaacatatcaggtttaatgcctgtaccatcaacatctccctcttcaacatgccacccagagggaatatctacagagactataactgatcttttttggccaatttgattattattattatgtaaagagacaagtctctggatcaaatcatcaaaaggaggccttggag

SEQ ID NO: 21328 - DNA, 452 bp, Glycine max
  unsure (1)..(452): unsure at all n locations
taacatatatgacaatcaagataagtaattaatatcaaaattagagactgaaataagaagattacaacatgtcaaactaaattcatgaattaaattataagagaatcaaaattgaattgttagacaaataggggaccaaatttataattttgctcttaaattactttaaaataattatttttaaaattaaaaaattaatgactttaaaataattatttttaaaatcaataaataaataaagaagattgcattacaactttttacaaatgttacatcacctcttttctatatatttaatgtagttaaattgaatgtttattattttgaagcccaactgaaaactgtccaccataacatatataaattggatataaaatcattccaaaacaagtttttaaataatataaatacatttaactntaaaaaattatagatacatttaagtttaaatg

SEQ ID NO: 21329 - DNA, 346 bp, Glycine max
agcttggagaggatgcttcaatggaggaaaagaaagagggagagaaagagagaggggggagtacaaaattgaaggaataaaagtggtagagaagtggaactttgaagtatgtctcacaagactctcattcatcaaagttacaacaagtgttacacatgcttctatttatagactaggtagcttccttgagaagctttcttgagaaaacttccttgagaagcttctttgagaaaacttccttgagaagctagagcttagctacacacacccctctcataactaactcacctccttgagaagcttccttaagaagattcctaaagaagctagagcttagctaccacat

SEQ ID NO: 21330 - DNA, 450 bp, Glycine max
  unsure (1)..(450): unsure at all n locations
tctaccttgtgagttatgcagaaaggaagtttgataaatcatttattcagaagtaagtagtacattcactcttcaacaatcaacatatttagtctcagatgatcgaatgagtactaatggacaaatgagttggagggactgatcatatggatttgttaaatcaaatttacatgatgtcaattaagcagtgaacttttgttctcttatcatcaaagtatttatgtttcaaatgcgacaaattaagaagaaaacttactagtatgaaacaagatagtatgttaccaaaacatatatataattaagttcaaaatacaagtcgttgcttataattaatcagtcaaccaacccacatagcctctttaatttgctggtgcacataagaagcttggttgatccctgcaagtgtagntttgtcactgggagacanatcatgcactcacaacattgttt

SEQ ID NO: 21331 - DNA, 381 bp, Glycine max
agctttaactaattcagagtaaacaggatatttctaagacgtgaaaggaatgagattggaattttgaaatgcttgaatgcattctacattctcattggagaagaagtccatgtctatgaacttatgatctatactggaacaagaggatacaagatttgtgtaccgtatccgttgttcttctgatgagaacaatgatgaagaggaaatggaggagggaatctcctgttcttgagccttggaatgtcgttggcttctactcgaagaacccttgcgcttctgtgatggctcacccatttgagggagttatttgaaatttcaattggttgaagtgaaagagaatgaaaaaagatgaagtttgggctttgtggggagtgatttgga

SEQ ID NO: 21332 - DNA, 450 bp, Glycine max
  unsure (1)..(450): unsure at all n locations
tgagacacctanaaagaaattgacaaaaactaatatagcatactgaaagctaaaatgaagttaatcatttagtatcaaccttataatggtaaacaagaataaactttgatacccatcaaaatgctcaaccaagtacatacttcttatactcattgttagaagcaagtattatgtcaaggtgcattgtaaattcttaggttcaaatagttactacttgtgatgtacatgacatattgagttagaaacatcattttaaagaaaatcttatatattcatactgattatagttatgatttataagtttgcatattcaaatacaattttttattaataaaatatattntttatattaagtattttagaataattataatttctctaaaatatttatcgatgataatttagatattaatgttatatcatgtaagatatntaatctctgtaatatac

SEQ ID NO: 21333 - DNA, 409 bp, Glycine max
agcttctccgaagggcatggttatttccagtttcctgaagataactaagaatctcgccaaatggcggtccttctccttcttggaaggtaccacaggatatggtacttccgcaccttcattcacagctttttctcttttcttctctctagcttgttcacttatactctcttcattcttattttttttcatctttttctttttcaacttatttttctttttcttggtcatttaattcttttttcttgaccattatttgtttttctttttcctgattgctttcacctgtctcatcatctttcttttcatcaatacctttcttttcagcagctttcttcttggatacaacactatcctcatcctctgcctccacaaacctcatactccttgtcatcacaactttgcattcctc

SEQ ID NO: 21334 - DNA, 451 bp, Glycine max
  unsure (1)..(451): unsure at all n locations
tctccagactccagtactactattatagccttatcagttatatttgaagaaatcactttntacttgcctttaaatattctcgtatcctcccttttcactcacaaattgttttcttcctcttttataactccagtagtagaacttctatgaaagttattcgctaaagttcactctttcctcgttctgaacttttgtttctctagctatacggatacagagcacttattttatttctttggatacgacattaatatgtagccgatagaaacattaaagaaggagcttttatcaaagaggagaaagaggtttttttttttctctagaaatacacattttctctcctcaaaatgcacctatctagaaaaaaatatctaattacattaatttggagcatcttagggaagtcaggtctagtcactcccacttccgtgtgatgattttttttctaata

SEQ ID NO: 21335 - DNA, 412 bp, Glycine max
agcttataataaataataatttataattaaatgataatggaaaattattttattatttttctctaaataaaatgtcaactgaaaacatataccagtacaataaaaacttcaaaaaactagaaacgtctagtgacaaacaaagtccacaccacgtggagattcgagtcttaaacttatgtaccttttgttatattattacaagagtaatattatactacaaaccatcctcaaacgggataatattattaaaaaataaaaatataattcttgttaataagggttaaatttgttaagtggtaaattttatcatttcaaaccaaacataaatatttatattttgtatataatattttgattaattgtttctatttttatttatataacaactgtttttggagtattggtgcttttt

SEQ ID NO: 21336 - DNA, 363 bp, Glycine max
gtaacagcaattaccttcttttatcttatcattctcttcgtgtggattcaatctcaacagttgcatttcgtgttcctgtgaccttatgtttccattctctgcttaaacatctcaatgctgtatttaccagatcttcatttggaaaaattttccctaaagatgcatgatgatttactatgtgtgtgaacctcttttgcatgtcttatatactttcatttgcattcatcctagataggtcatattcatgagttaatgtgtatattctagatcttttaacatctggtgtgccttcatgtgttacttgtagggtatcccacatatcttttgcactatgacaattcgatagcctaaagtactcataca

SEQ ID NO: 21337 - DNA, 316 bp, Glycine max
ggcattggatagaagactccacgacgattgagtcagagatgcaagagaaggacctatggttctcatgagccttagggtagatttcaggaccatgggctaagtatgagcccacttatctttgtacatattagattaaggtttcattatttttgggccttgtatttagggctctagaatgtaggtagggtaccctagaaatgtaaaatttttcagcccttgtattttagggaacctagactagtttttgtattaggggtagttatataatttcacatgcattaagtgaatatttgatgtgtgtgttgggaaataaatt

SEQ ID NO: 21338 - DNA, 441 bp, Glycine max
  unsure (1)..(441): unsure at all n locations
tgtaggatagttggttcacgacaatgaccattatgcacacaacccatgctgatgtagtccttgccaacaacacatactcttcaaggccgaatctaaagtacaaagtttatcaattttatttcacaaacttactcacttgatgataccaacactttgtgtcaacagtctgtaggatctctcatcataaacatagcatgtgctatacaatttatgtgtgtcaaacaaagtacaggaaataacactaccaacatgttaatagataactcactttataagaaaagtaaaatttctctgctgaaattcttgcaagcctaattgttcttctttagaatactngcaccagagaatagtagataagtaacttgtagttcgaaaactgtagacatcacagaccatgtagcagatgcaaaaaacaatcttcataatcatcatgagtatatg

SEQ ID NO: 21339 - DNA, 420 bp, Glycine max
  unsure (1)..(420): unsure at all n locations
agcttgtctctggaccctctctttaaatttgaccgtttcactttttcagctgcgctgctgaaacattgaatacacttaaatttgctcagagagcaaaacttattcaaaataatgtgagtgccattctatgatcagtctgaatttctttcaaaggaatgaatctcatcaacctatcactatacattccatatattgttcttgtaggctgtggtgaacgaagattctactggggatgtaattgctttacaacatcaaattcgacttttgaaggtggtatcagttatttcttgtagtataagttttatgtgagttgctaatttaactaaaatgataaatttttgggccaagaaaagctttctatcctcaaacgacgtcagaatgtctctaggtctttgtcattntctttgtcattattagtgc

SEQ ID NO: 21340 - DNA, 455 bp, Glycine max
tcctgatcatgagggagctaacaaaaattttcatgcaggtggaccttcttctagtagttctgacttgcagcagcctcctatccatcttccattttcacctagagcaattccaaacaaaaaaatggaagaagtggaaaaggagatcctggagactttcaggaaagtagagatgaacatacctctgcttgatgccatcaagcagattccaagatatgccaagtttctaaaggagttgtgcacccacaaaaggaagctcaaaggcaatgaaaggattagcatgggcagaaatgtgtcagcattgataggtaaatctgttcctcacattcctgagaaatgtaaggacctatgtactttctgtataccttgcattattgggaacaacaaatttgagaatgccatactagatctaggagcatcagttaatgtcatgcctctgtccatgtttaattctttat

SEQ ID NO: 21341 - DNA, 423 bp, Glycine max
agcttgtgtactgctgcattctactaatatatggagttggtcactgctttgcctaagaataacaattgattgaccacaacaacactagaggcggtaaaggacaacggtctttcaaataaacatgttgtgtgtgaacaaacattattaagtcaaacgaaccacggaagtgatcgcataattcttagactaactaccttcaatacctgagcaattcaaacacgtgactgacacatatcatgcggtgcacagaagaatcaggtggtggttgacttctaagaagaaaaaatgtcatgctttgttgtcgggacaacgacacaaggattacgtcataccgtgatgcaatgacatatctcatatatgttatatccattcacttgtccacactaacctagatcaaacagacacacacatctaagttattta

SEQ ID NO: 21342 - DNA, 453 bp, Glycine max
  unsure (1)..(453): unsure at all n locations
ntaagcttgaaatagataaataagaatattgtttaagaaacttggctataatgtcccacaatttaattattaatttaaataaatattagacaaaatctgaacttcattaaatttgtcaaatggagtactggttaaataataaatcaatctcttattgcctttcccataataattgattataaagatgttaattcattaattttttctatagtaattcatctgtaagatagtcttttttataaataaataatagaatatattatcttggtatatatataagggcagtaataattaaggattgaataattacgaatctcatacaaataatctaaatctcctactattacgatgatcttactggacaataatatatgctataaaattatttaataatcccgattaatttntaagaatttcattctcagacaagctatttatttggaaatgaaatat

SEQ ID NO: 21343 - DNA, 386 bp, Glycine max
agcatttataattgatgtgcgcacaaggtgttgtatataactatatacgataacatattggttctattgtgccaaacaattgcatatactatctagggtaccaaatgggccataaagaatgaaatgctaccaatcatgataataatagcctgtaccttgtatgttaaattaaacggagctgtattaaaccagttaactgttatacgagaaatggtcgatatcctttattctactatggcatgcaccttattgattaaaatacttgttaacaaaataactatagagcttagtctgatatccaaaccaagacttctgcaacatgctactatcaaaacataacttagccaacatagagaaaatttaatatgttgctacaaaatacacag

SEQ ID NO: 21344 - DNA, 448 bp, Glycine max
  unsure (1)..(448): unsure at all n locations
tctntanaaggatatagacttgtgcttaaccagccttgtttagaggcatttgaggagttgaggaggaggcttaccacttctctcatcatgcaaccactagattgngagctttcctttgagttcatgtgtgatgcctcaaactatgcacttggggttatgttgataaattatcacatgtcattgcttatgccttacgcgctntagatgcaacccaagttaactacaccactatctagaaggagctttcaaccattgtttttgctttagataaattcatatcttatttgctttgctcccatattactgtctttactgaccatatagctttgaggtacatgttgaagaagcctgatgctaaacctagattgatcaggtggatgcttcttctttaggagtttcatattgagattaaagacatgagcggtgtagaaaacttgngttgtgatca

SEQ ID NO: 21345 - DNA, 418 bp, Glycine max
agcttcaatattagcctaaaaatcttgccagcagcgcaaatgccaataactcacacaacacaattcctatccatatacttgtacattaaaagtatctgctttccgtatcgtattccctttcattttcaaaagttaaattatctccttcacaactcataaggtacatttaaattcctatattctttttttctttattattcgtatatataaaaggataaagtgttcttcctacaagataaatatgtttagctacatttagtacaattataatttaaagcatttcaagtaacacgagagagccagacaggtaattaacttacccatttttatacattatactattaacagttaatctttttttttaattttaatcatagttaagtatttgggagtctgttcgttatggctttctaataat

SEQ ID NO: 21346 - DNA, 411 bp, Glycine max
  unsure (1)..(411): unsure at all n locations
tgtcgagatggaaggctcccacgtggtgcanaacatgtacgactctcttgatgtgcatgtangggaatgtttttctgtgcttgttacagcggacaaggaaccaaaggattactacatggtggcttccacacgtttcaccaagactgttctaatangtaaaggtatcattcgttacacaaatggtaagggtccttgctcacccgacatncccccggctccagtgggtttgggcttggtctcttaaccaattccataccttccgttggaatctcaccgctagtgcccgcaggcccaaccctcagggttcctacaaatatggtcaaatcaacattactcgtactatcaagctcgttaactcaattagtaagtctaacggaagcttcgttatgcccttaatggtgtctcacatgt

SEQ ID NO: 21347 - DNA, 103 bp, Glycine max
agctgtaacactcactgtatgtatgtgaacatgaattatatctcaacaacagcctaacggaggaggataatgctttggaccacgctatatagataacgatgct

SEQ ID NO: 21348 - DNA, 459 bp, Glycine max
cggagtggttagattagacgaagctggatatatatatatatatatatatatatgtatatatatatatatatatacatatatatatatatatatatcatccgatcacattcttactatatatcatttactgcgatctctaaggaatcgcctttttaaaaaactaactctaaaagagatgttgatggtgagatccgattgaaccaacattacttatgtcacactgtgtccaaatgacactcttaatatatccattcacttaacgcgctatactaaacaactgatatatttttattatatgaacgctcacacatcaatgacgtgattactgccttgattttctatggaactcgatagtgcatgcaagagatctaccgaatggctagacaaacaaacttcacatgtgtgggactgcttaacacaagaaatgttacagggctcctctcagtgatagagatgccg

SEQ ID NO: 21349 - DNA, 395 bp, Glycine max
cgcgggtctgggagacaaatgtcaagtgttcgcgatatgcgaagatgatgttccgagtaccttggatttggtacgaccatgccctcctgatttccaactgcgaaattggcgagtggaagaacgcttcgttatttacacgaacaacggaatgtaaacctttactgttttaaaagctttatagttgggcctatgctatagagtattttctttagtaaggctttgtgtcttttgttttaaatttataatacaaggatctttcttcatctgttcctggtctctacccgttctcattcatttgcatgtttacttcttttttgaaacgacagatccgatgacgagttcctcgaaggtactaatacctgggacccgcctatcgactttgatcaagaaatgaa

SEQ ID NO: 21350 - DNA, 446 bp, Glycine max
tgtaaggctttgggtgggaaatgatagtgagacttaacttatataccaaccttatgctacaacaattgcagcatgacccactatctacaatgagataacaatttttgtttaaaaccttgcatcttgtatgaaagatgttctctctttgggtttggtttacgtcacaagattgaatcccatggaaccttctcaccattagaagatcaccttcttcataagggtaaacctcttcaatatgctcatcacccttggcttcaccctcacttccacttgaggaaggagaagaggtagcctcctcttggctactatagatgccttgacccctcatcatcatggttttctatgtggggcattaagaagcaatgtggcctttcctaatacatttgaagcacttactgctactagttctatcttgtgaactagcctttggagtgatttcctctata

SEQ ID NO: 21351 - DNA, 414 bp, Glycine max
  unsure (1)..(414): unsure at all n locations
agctggtgcccttctttattatgtaactatgtatacttgaatttttcatcaatgtttttgatgtttatgttacttaattattgatgtgtgctacgtgcaaattacaaagtagtccaagttgctcaaactgaaatagttttactacaacaatagctatttaaaaagacactnttctattgatgtgtcacacatgattggatgatagtataaaaactatgaaagtaaatcaaagctaaactcgataagtttcatctgattcttgaagggatttttctaaatggctacacgtgtatagtatagttttagtcacaaaaataaatgactctttgcatttactgcacatttttacataaaattcatttaattgctatgaaatctttttaaaatggtatggcttattgtcaatgttttaaa

SEQ ID NO: 21352 - DNA, 444 bp, Glycine max
  unsure (1)..(444): unsure at all n locations
ngttaaagaactgaggaaaaatcaagaacaagcttgtacgcacatcgttcgcgtgtatgatatacactccacaaggtttgaagtaaaggagagcttcaaccctataacgcaacgtggcggacaaaaatgggcagttaacttgaatggtcatcattgtcaatgcggaaggtattctgcgcttcactatccatgttcacacataattgcagcttgtggttatgtgagcatgaactactatcaatatatagatgttgtttatacaaacgagcacatcttanaagcttactccgcacaatggtggcctcttgggaatgaagcggctattcctccttctgatgatgcatgaacacttatccctgacccaactacaattcgtgcgaaaggtcggccaaaatcaacaaggataagaaatgagatggattgggtcgaaccatctgaacaccg

SEQ ID NO: 21353 - DNA, 394 bp, Glycine max
agcttgcttctacattaaatggacctagtatgacacaactcaaaaacatataaggtttagtcaaacacatttctggaggaagattgtacgggataacaatgattgaccaataagaataaggtaaagatgatgcttgaatatacagattaaatccatctgtgcataaaccgagtcacacatttcatggatcatcaacaaaatctgcatgtacccgatcaaagtgcttccatgcttcaccatcaaatggatggcgtaacatgcaagaagatcttctattctcataacaccatgacatttggcttgcagtttgtattcatgtaaatagtctctgcaaccttggtattataggaaaataaaacatcgcctttactagaaattgatttttgttgcttgt

SEQ ID NO: 21354 - DNA, 444 bp, Glycine max
  unsure (1)..(444): unsure at all n locations
tatcccatgcctccttagcagatgccgcataagatatcttctagaacgcatcatcatctaatgtttgatagatgaggaagaaaactttcttatctctatttcttgaatcctttaaagtctccttttatgctccctggttttcagtgaaacactgcccatatcaactccacatacttcttcctttctttcttttattntaattntcactgtcttcttctcctcctaccacctaaggccttaaccattttagcaaccaaaagctagctacacaaacctttacctaagacatatttccaacatctttntgaaaatttttgcaatctctatctctagtttcttactcttgctcacgtactcgatgccaatggactattaaatggatccaatgtaagaaagtctgctaaaagctattgcattgtggttattgaactaattcacttgatg

SEQ ID NO: 21355 - DNA, 565 bp, Glycine max
  unsure (1)..(565): unsure at all n locations
ctaccctcctntnntctcttctctcaccacctttgtgctctatnngaagcagcgtcatctatttatanacatcatacctagacaccggcncctttgaaatcctcatcgatcccctatccaggaacactaaagtcagctgctagctgcaatcttacccagatagtagcgtcgtctcactactgttctcaacatatactccaaattctataatcacacttccggacgcgccatacgtttgtgggtgaacagtggtataaaattacaatttaatgcctcacatgctccacatagccacccataaatggcatacgaacttctagaccctatctcataacaatgcgtccgtggcaaaccaaggaagattacgatcttccttgcaagactacattatccacatgtgaagcataatactactttttaacagcgaatcaatgaagccatattaaaaaatctatgcaccaccactaaaccgtgaattttaccataggctggtcctggcagtccctaacaaaatccaggataataactccagggtactccaaatgtggagtgatatacaatcacg

SEQ ID NO: 21356 - DNA, 425 bp, Glycine max
tattcaggcgacaattgatgatcatatacaaccagcgggagttgtctcacaataggccaatcatatctatggagcagtttctacaaacagtggcatggcctgaagctcaactccctctggaaagagcccatacggttgtttctcccgaacctgtaccatctaggattgagcctgaaccacagcctcctgtattagatccacctgcttctctggaacttgagacattgtctcctccggcaccacctctgataatcatccctgatgactcagctgatgaagctactgctcctcctgattcaccatcttgcaacatagacgatggttctgactgttcttactacatggattgctgaggaagctgtgactatagaagcaagtttcatgatggtgattcaagtatgaatcaacgagctttgatgatgaca

SEQ ID NO: 21357 - DNA, 414 bp, Glycine max
agcttaacaaaaggcatgcgaagtgggtggaattcctagagcaattcccttatgttatcaaacataaaaagggaaaaggtaatattgtagccgatgctctttctcggcgtcatgcattactttctatgcttgaaacaaaattgattggtcttgaatgtttgaaaagcatgtatgaaaatgatgaaacttttggagaaatttttaaaaattgtgaaaaattttcagaaaatggtttctttagacatgaaggctttcttttcaaagaaaacaaattgtgtgtgcctaaatgttctactagaaattttcttgtttgtgaagcacatgaaggaggtttaatggggcattttggggtccaaaagactctagaaacattacaagaacatttttattggcctcatatgaaaaaggatgtgc

SEQ ID NO: 21358 - DNA, 401 bp, Glycine max
  unsure (1)..(401): unsure at all n locations
acacggatatctgattgagtcatgtaatatttcgagacgctcgaaattgaattcggaagctctgagcaaattcaaacgacaataacttnttactcggatgtcttattgaatcccataatatatcgacaagctcgaatagaatcttgatgctctgagcaaattcaaacgacaataactttttactcggatgtctgattgagtcctgtaatatatccacacgcttcaaattgaataccggagctctgagcaaaatccaaagagacaaacactttaactcggatgtcggatggagtccgtgaatatatggacacgctcaaaattgaatcccgaagctctgagcaaattcaaacgacaataactttntactcggatgtctgatggaatctccgaatatatccaca

SEQ ID NO: 21359 - DNA, 373 bp, Glycine max
  unsure (1)..(373): unsure at all n locations
aattatccctatactacacacttgtcttaaataggactacttcattccaatggcttaacgtacgtaatagcaaaagacaaagcaaaatatcatgggagatatattatacataatatacaatagtggtgcattttgttggtatttgatgtggcgatgtaatccatgaaagcgatcaaactatttttgacataagaacaatggaagaataatacaatattattatttattttcatatcaaattaatggcttcctctttaattgcttcctcacatacacgctcctattaatgttatagtgaattgaattatttgaccacttgcatgttacatgattntcaaactacttataatggatactgcatataatgatatgc

SEQ ID NO: 21360 - DNA, 448 bp, Glycine max
  unsure (1)..(448): unsure at all n locations
ctaagcttattaaactgttgacataatacttatgtggcaagcaattaaataaagtaaaaaaaataaaacagtgtcttgataaaaattgaacgcataacatattatacaatgacaagacaataaatcactacactacttgctttgatattagttaattttataagaattattttatgtgtatcactatatcaaaagatattaattatttttttaattataaaaatttataactatacaaatttatttaatatataactatttctacttttatttcattaattctacatatttgtatttagaatattttttgtttaattttaccaatttataattaaatttcataaattaatatgtaaattatttacataaaagctataatacaccacagctcccctatttaaatattccacagaaaatactaagattttattatcnttataattacaat

SEQ ID NO: 21361 - DNA, 364 bp, Glycine max
acgatgaataacgaatgaagaacgttcaagaacggttcaaacctttgcgagattcctcacggaaaacgttacggaaacgtttcggaagcgcctcggcttatattttcttcacggaaacaatttttccaagcaaactccaaagagagagaagtgcctaaagggctgggatccttttcttcttgcattcctcccctatttatagcaaaataggggaggtggttgccgcccagctcgcccaggcgagcagggttgcttcctccagaagcaaccgccttctggaggaatcttctggagggcccaaatgggcccgggtgctattcgcacctccattttactaagtacaccccctcgtgttttttggtga

SEQ ID NO: 21362 - DNA, 361 bp, Glycine max
  unsure (1)..(361): unsure at all n locations
caatacccttatgacgatgtgccatatgttcttaagactggactgatccacttgttgcctaagtttcatggtcttgcaagtgaacaccctcataaatatctgaaagaatttcatattgtctgctctaccatgaaacctccagatgtccaaaaagatcacatctttctgaaggcctctcctcattctttagagggagtggcataggactggctatattaccttgctccaaagtccatcactagctgagatgacctcaagagagtgtgcttagaaaaaaatttccctacttttatgaccacgaccatcaganaggatatttcatgcattatacaactcattggagagagcctatatgaatatt

SEQ ID NO: 21363 - DNA, 427 bp, Glycine max
agcttgtccacaaaaataggtttttgaagtttgtcatttcaatttctcactaagtaaaatggatcattttcaaggtccaacgccttaaaatgatcacctcttaaagtaaaaaagaatcacttgataaaaaagaactacgtaggtctgatttcctcatcgcaattgaggaatacgtaggagcaaagggaaacacccttgtcgaccacaaaaagaaaaaaatatgaaaagggtataaaggatataaggacataaaagggaacataaaaaccaaagtcacgtttgcacattcgattaaaggctgccgtcccttgggacggacgtatggggtgctaataccttccccgtgcgtaaataaaactcccgaacccttcacttaaaagttcgtagatcgcgtcttttccggtttttccgacgttttcctcaaata

SEQ ID NO: 21364 - DNA, 333 bp, Glycine max
tatccggcctcccatcagcaaagccttcattgagaaatattgcaagcccagggaggcacaacagcaggaggagggccagtagcatccagccgtagatgtgtctccataacctctacaggagacaccatccctggagtccatctccgctcacatgcgaaggatagagctccagatgcacaggtatatgcagcatgtgactggccagcaggcggtcaatcattggggtcagatgcaactaaatgtgaccttcaactgatacactatgcaccataatgattacctatcaccataatgtattatctatcaccataatgtattacttctcatacccta

SEQ ID NO: 21365 - DNA, 369 bp, Glycine max
  unsure (1)..(369): unsure at all n locations
agcnttggtaatcgattacatgttttgtgtaatcgattacacatgcttaaaatactttaaaactgtttaaacataagttataactcttgaaatttaaaatcttaacgttttaaaatactggtaatcgattactaccttctggtaatcgattacaagagagtaaaactctttggtaatgattntgtgaaaacttcttgtgctactcaatattttgaaaaacttttttagtacttatcttgattgagtcttctcttgattcttgaatcttgatcttgattattcttgaatcttgattcttgaaacttgattcttgaatcttgaatcttgattcttgaaacttgattcttgaatctttggattttgcttgac

SEQ ID NO: 21366 - DNA, 457 bp, Glycine max
  unsure (1)..(457): unsure at all n locations
cggaacatataacctgaatcctacgcccncttaagggtttattcaaaatatctgctggctgatcactggagttaatgaactcagtgacaatttctttagacagtaatttctcccgaatgaagtgacaatcaatctcaatgtgtttcgttctctcatggaagacggggtttgaagcaatgtgaagagcagcttgattatcacaatatagcttcatatgcatcacttcgcaaaaattcaactcctcaagaatttgcttaacccacataagttcacacgtaaccacagccatagatctatattcagcctctgcactagatcgagcaacaacagattgtttcttgcttttccaagagataacattccctccaatggagacacaatatccggatgtggatctcttatccatatgacaaccagcccaatctgcatcacaatacctagatactcgtgtattacn

SEQ ID NO: 21367 - DNA, 357 bp, Glycine max
  unsure (1)..(357): unsure at all n locations
agcttatcaagatagagattcaaactaagttattcacttattaaatgttntttgtacctgttattaatctagttatgtgtgctatatatatatatatatattattgagatgttttcaatttctattcagtgttaaaattgtgtcttttttttttccatctacattaggtaattatttttatatgcatataaatggcaaataatcagaatatgagtggtagaggaagaggtactggtagagggattagtataggtaggggaagagggagaggtataggtactattttgccacaaccttctacttctcaactgacacatcctattgggcaaccaattcctcctacacttgagcattgtt

SEQ ID NO: 21368 - DNA, 441 bp, Glycine max
gctgcacaaatttgacagcttttgctgcacaatttggcagatttcgaaatccaacttgcccacatccaattttactcaaattggattcaacaagtcctaaatcatgtataaatcatatttaaaccaaaagcaaacttcataccaaggcaaatcaaaatataggtatccaaaacccaccaatttagtgaattctcaaggtttgaaaagtgaaaatgagaattgggtaattttggggtaaactctcatctcaatcaagtctataacattgatttaaacttgctcaaactggttttaaggtgaaaactccaccgattcaaaatttgacctctcaacacccaatttaccctagaaatggctcttttctttcacatttgtcactcatttgctctgcccaagctttcctacaagtcctaattgacattctaaactagaatcaactca

SEQ ID NO: 21369 - DNA, 420 bp, Glycine max
  unsure (1)..(420): unsure at all n locations
agctntaaagacatggattacaaacctacgcgctaacagtcaatttcttttgtaaaaagctctctgtatattcttgtaaagtttgaaaaagctctcaaaataatttgatcatctcaagagaaaatactaagtgctaagattccatatttgtctgtaagaccattaagagttagtcagtgtgcaaacaaactacaaatattttgatttgtttagtgccaacaatgattagataggacaaagatgccgagttattgaaagctttgtgataagctttgttgtaagagctagaagtagcattgacaaatacttgtaactttgtgaagttagtgaaacttggtggttagtcaagaactagacgtagtctcaatggtagagatgaactagtataaatctctttgtcttatatgcttctatttctct

SEQ ID NO: 21370 - DNA, 412 bp, Glycine max
  unsure (1)..(412): unsure at all n locations
nggcaagatggttgttgattctctctctacgtcttctttcagcttcactgtgactctntgaagcagcaagagccttagcctccatgatttcttgagcagtcatctttcccagctcggcttggagtccaaagggtgctgctgaaccgggttgaaccatgggtccaagggtgtcagaaatgatcctcagatggtggtggtgatcaagatgagaagagggaccctcgtatgcaaactgaagagaagggacaacccttctgctgctgaagaagcttgcatagggtgaaggtgttgtgggaggagggacaagaaatggtgcttgctcatgatgatgatgaaccgggtttgtgttgttgttgttgatgtagtgaaccgggttggagttgaaggagtgaaccggaggcatggaccatga

SEQ ID NO: 21371 - DNA, 423 bp, Glycine max
agcttccacaacatccaagcaaaacaacattcaaacagcacaagctatcacagccaggcaaaacagagcaaggcataaactctgctcaacacatcaaccaaaatcacagcttttctcacttaaagaccccagtaacaattccttcgatccaattcgttaaccgtgggatcgactccaaaattttactggaagtctatagtgcataagcctacattgtgaccgttgggatcgactagcaaacatccagaactcattctgtactactctttccacagccaaccacacacaagcattttctgcaccaagctaaaattctgctgcacttattttgacagcaaaattctgcataagtgcagatttcgaaaatcacacttcctctcatccaatcttgttcaaatcgaatcctacaagtcccaaatcatg

SEQ ID NO: 21372 - DNA, 457 bp, Glycine max
  unsure (1)..(457): unsure at all n locations
atgcacacatccacacacacacacacacgcacacacacacacacacacacacacacacacataaacccttactctattttctttcgtaaaataattaattccaacgacattcataatacttcataggaataaaagaagtgaagtaaatttttgtgaaaataaaaactttttatataaacttctcaaactcgttctcctttgtgaagcatacataattttctagtttgtaaacacatgttgtactaaaaaacaaataagttctagaataaataaaccatacattctcaggtgataaatatggataaacaagtctatctccatggtcaccaaatatagataaataagtttcataagtaataataaatagcaagatgtaagtgtctcaatggaaagattaagtagcatatacaatcccataatatcaattaaagagatataaagtaagtgataattgaan

SEQ ID NO: 21373 - DNA, 416 bp, Glycine max
agcttcctctaccggtgaaaaaacattgtctgtcagcgcttgtaaaaaaattgcgcaatgtctgctgaaaaacatcagttggggctgtttaactaccgatgctggctactgttttttctattccacccctgaataatacttggacgatgtcgatttggaaatgttcgatcggagtcatccggtcatgcttctttttaagacctcgatctgtcatcttttcctggccgacgtcggctagcatttttttcgatcaatatcggtgaatcatgctttttgccaaggtgggctaacgttttcgtggctgatgaaatgagagcatgccagtgtcggccgaaacacaatctcgcacgaaaaaccctagccgacctacattgtaatttttgtaggcaataccgaacagcaaaacttcgtctacc

SEQ ID NO: 21374 - DNA, 442 bp, Glycine max
  unsure (1)..(442): unsure at all n locations
tncaccttttgtcctcctcagttggtgcatgagaatacatgctctattttcatctcccactccaagtaggcctccggatcattctttcctttaaatggaggaatgttgagtttaataccatcaattcggttttgtctacgaacaccatcattccctcttctcctcctttcttcttcattatgatctctattctccatttgatccaacctctcatggagcgcatcatctcgttgtttcattaacctctccaaatgttgcatcaaagcttgcatttggaattgcgaaagccccactccatcattaggattagtacctgacatctcacacaaacaaatcaaacgtaacaagacaattatagttgctggttgaatacctcacccactcaagtgtatcacacaattatggcttttctctaatgaaacactcttgcctttaccactct

SEQ ID NO: 21375 - DNA, 390 bp, Glycine max
agcttccatcaagaaccctagggccttatcttgcatctctggcccaatcttcttggagtcttctatctaatgaccttggggggtaggattgcatcaccatatgcccacctacaagaatgtgggtcaaaattcttcgcgataagaggatttgagaagttgagatagcgatcaaatcggtgataactttctccacaagtttctatagcactatttacgttgcctttcaaatcaattgaccatagatgagtcagacccttctgcgcaacaatatcatcatccaaaaacagcactttgttgagctttggaaagatctatggcaaatagaactggaggtggttcaagatagacaaatactttggatacatattatgatactcagtatacatgaga

SEQ ID NO: 21376 - DNA, 437 bp, Glycine max
  unsure (1)..(437): unsure at all n locations
taagaacccaagcttttagtttcaatgcaaggaaacatggcttatgtctaaaaatctgaattttggttttaaaagtagaaaggcatgaaagttaggatatgcttgtgagagtttttacccaaatttgggctgccccatgaggggtactttgcacctacgtagcatggaaaatacctttcgatggtatgtaaatatgtgtgtaaatataagtagcatggaaaacacctttgaatggtgtgtatatatgtgaatatatggcataaaattccttgcacagcgggaatgagtatcacaaaaatgtcttccaacatatgcgtatgtgaggataggtagcattaggagccttttagaaaatgtacccatgtcaaaaagggcctangacgcttgctatatgaatatatgatggcctggaattccttgtcaaatgcaagatgtgc

SEQ ID NO: 21377 - DNA, 397 bp, Glycine max
agcttgaagatgtgtagcccaccatcttttttaggaaaatactggtaatgtgtctactatcattgtcatcatttctttctccgtcattgaggagccacttaagctgccaggtctctccacctttgggcatattctttagaaagattcgtgccccccttttgcacatgttctgtacttgcatcctatccgaagacattatactgacactgcctaacgaaggcaaccactatgtccttccaagaatggactcgggaaggttccaagttagtgtaccatgtaacagctaccccagtaagactttcttggaacgaatgtatcagcaattcctcatcttttgcgtatgcccacatcttccgataatacatcattagatggctcctggggcaggtagtcccct

SEQ ID NO: 21378 - DNA, 390 bp, Glycine max
tgttggatacccactctcaacgctaaggacaattatagtttttgtgccagttaaagagaacgaagcctagaggcctcttaagacaacctcaataataattgaggaaaattaacaaggctcacatatatgaaccacacatagacgaaataataagtgcaggatacaccactatcattaaaatcttagaatatagttagaacatcatccacctgaccataccaaattggacgtccagagaacatattcagtgttggatataaatcaaaaccatttcaaggcatattccttactgtatatgattcaaacatcagagatagacaactacttgatacaatatcaaagaatgcttgagcaagtgcacagggctttgatctttactgcctttactta

SEQ ID NO: 21379 - DNA, 426 bp, Glycine max
tctacagtctcattccacatgtccccaaacatgagaaagacatgtgtaatgttttggcttcaggcttagatgcttccaaagaccctttgagttcatgaaagccaaccattttccactttgagcaaggtaacaagaccatcccaatgaactttataaatatgcatgttcaagttgaaccataaccagaacgaaaccagaacatccagctaatgttcaagtttaagcagaatccaaacacaggaacacgatacaaggaaactaaaaaaaagagggtgctaaaactataagacaacaacgaagtttgaagtgtacacaaaagacaaaacagatcatcctcattcccgatacacagattcacccgtataacaggcgcagtgatctttatcaactacaaacaagtcttcccattcacctccttagatatgc

SEQ ID NO: 21380 - DNA, 414 bp, Glycine max
  unsure (1)..(414): unsure at all n locations
gcttgcacttcttcgctttcctagggactttancttctttcccacttaggccttttagctttaggagccaagttatcccttgcgtccaagacttcaaccacttgtgatagccgtcgatgacgccattgctacttcccttaagctccttatctttcctttccactgtattccacgctttatgaattctttgaagtatcttcgcattggcttcatcgatacctcacgcgatgaaaggcgcgatgatctcctccgatggcgcacctctcatagggtagcctagttgtcttatggccaacatgggattattataattatacaacccctcattcccatcaaggggatgtttgggaatccttcacccgagcataacagtcctgcctctccttctttccatcaggggaaccaactaatgga

SEQ ID NO: 21381 - DNA, 451 bp, Glycine max
tgccacccagctcgcccaggcgagcagggttgcttcctccagaagcaacagccttctggaggaatcttctggagggcccaagtgggcctggttgctatttgcacccccatttttactaagtacaccccctgcctttttttggtgattcttttttgtaaagttacggaaacttacgaatttcgtaacgatacttgttttctttccataatgttacggaaccttgtggattacataatcatcccctttttgacttacagaatgttacggaacctcactaattgtgcaacgatgcttccatttgatttccggtgtgccacggaaccctacagattgtgcatcaatattttcttttgttttccggcatgtcccggaatttcacaaattgcctaatgattggtgccaagcacctcacaaggaccaaacaaaagttgcatgtcatcaagcaaaggtc

SEQ ID NO: 21382 - DNA, 287 bp, Glycine max
caatgatattcttcatgcctcttaagtgcagatgtccaaatctttgatgccatattttgactatatcttctatggagaatatacactgtgtgaggagtaactggctttcttgagcgtgtccataagtaacagttgtcctttgatctgctgcccttcattacgacttcactcttctcatttgtcaccaagcattctgactttgtgaagtttacattgaatacttcatcacacaactgactgatgctgatcaagttcgcagtcagtcccttcaccagcagtactttgtt

SEQ ID NO: 21383 - DNA, 546 bp, Glycine max
  unsure (1)..(546): unsure at all n locations
accccgattctctccttcnccnaacttggttaactctgaacgcgtttctttattatttatcaacaactagatcagtanaattganatcgtgtgaacccntgcagaaacccgtacatcaaattcacccggcgcctcntactggcacaactaaaatacgcaagtctattccacaacgacggaaccgctatccgtcacccttcatttaaaactagctcatctcatttctctattggctaaaaagaaacaccttagttaggccctctattaggtgcttaacctacacaagcatcttgctgacaaagtatgaccaagattgcccttctttatgcaaacaagaagagtacattgggaggggaatgatgactaactgtgttaggggattgaacccatatacaacctcaaaaggggactgattggtggtacaagaaccaccctgttgcaggcaaattctacatgaggaagatactcatcccaagaactatggttgcctttcagaaataatttgctaatcaatccttgggagatgcacagctatccttcttcgag

SEQ ID NO: 21384 - DNA, 439 bp, Glycine max
  unsure (1)..(439): unsure at all n locations
tctagaaccaatcttatcctagtttttttttttgtttgtctatagatgaaataaagttcttcagctcttttatttgaaagtgttgaatatgtactacttcctttatttgaagaagagagtcttaaaatatgaaattctcaggtacttttaccttattccattgatgatcattcttatgcgtttttaggtccttttaaaccagatttgagtttagaaaggttaagccaacagttaccacaatcgaatgaagacgagcatccgatgcacttactggaaataagaactgattttaccaaacacaccacataaaattgttcgggcaatttatggtgacatatatgacttcatgcatttgtgtaggttgaatttatcatatatggacattccccttatttaatgacttcattcctnttctgggacaaacatatgctcttgatta

SEQ ID NO: 21385 - DNA, 424 bp, Glycine max
  unsure (1)..(424): unsure at all n locations
agcttcaacaaccacattcatgactacacacaaaagaagggagttaagcagtcatacatttacagatcaagagagacacacttatccaaggcatatatacggttcaaaaagttttcacaacactaatccacacatcaagagagaaataagcttattaacaacatacacctangaagataagggttcattaaggcattatcaatcaatatcaagactacttgcatcgcataacagcttgccttaatgtcctaccgcacattatggtatatcggacattaaggatacaaggcatatcacgagcatcaattagtttcatacaatcatatgaaaaaaaagcaataattccaacataaacaactaaataatcacaagaaatcacacagagtgtacaacacactggttgaaagggttgacctgctttgat

SEQ ID NO: 21386 - DNA, 408 bp, Glycine max
tcttatgtctatatgtattgcgtgcttaaatactctgacaaactgtgaatagcccaaaagcacttcctatcttttgaagtggtgaatttgatgtttggatgttcttaatgttatctttttttcgctaattaaggactatgactaattatgtgtaatcatatatgagccacacctataagttttatatatatatatatatatatatatatatagatatatgaaagatcctgatttgcagtataaatatatacatttatttattgacatggctacaacactttattatatatcgcaattgcatatatgatctatatagacttaagtatactctacaaattagtttgagatgcatgagtccagaattcttacattccaaaatatgtactcatattatcattataccatata

SEQ ID NO: 21387 - DNA, 381 bp, Glycine max
  unsure (1)..(381): unsure at all n locations
agctntgagacccagttaaagaaaaaaaacccacaaatatgatgaactcaaaaaagcttttggcccaaccattaatgccaataaggtggtgtaaaggtttttgctcctttcttgttggaatgtcttcctctcctttttgcgtggaatggtgaaatatgaaaacttgcttgagtgcgaaagtagaaattctaagtcattttctttgagaaaataaggaatcattaagggaatgtgtttgtttttgcaatctttgaaagaaagaacaaagaaaggagttaaaccttgaagtcatggactgaagagagagacatagagatagagagaggaggtagagttttgacacatgtcaacgtttaattggttaattggtnagaatatgtg

SEQ ID NO: 21388 - DNA, 453 bp, Glycine max
  unsure (1)..(453): unsure at all n locations
tcccgccaatggtatntgaggtttaatgatactattgtttccttcggatttaaggaaaatactgttgatcaatgtatatatctgaaggtcaatgggagtaagattatttttccaattatgtgtattgatgatatcttgcttgcaactaacgatcttggtcttcttcatgagactaagaaatttctctctagaaactctgaagtgaaagatatgggtgaggtaagctatgtgatagggatagaaatattctgtaatagatcacaaggattgttaggcttacctcagaaagcatatatcaataaaatactagtgaaattcaagatggaaaggtgtttaacatcacctgttctaatttagaagggagacaaatttagtctcacacaatgtcatagaaatgatatggaacgaaaacaaatggaagctattttgtatgcatcagttgttgttgcatct

SEQ ID NO: 21389 - DNA, 421 bp, Glycine max
  unsure (1)..(421): unsure at all n locations
agcnttggtaatcgattacatgttttgtgtaatcgattacacatgcttaaaatactttaaaactgtttaaacataagttataactcttgaaatttaaaatcttaacgttttaaaatactggtaatcgattactaccttctggtaatcgattacaagagagtaaaactctttggtaatgattttgtgaaaacttcttgtgctactcaatattttgaaaaacttttttagtacttatcttgattgagtcttctcttgattcttgaatcttgatcttgattattcttgaatcttgattcttgaaacttgattcttgaatcttgaatcttgattcttgaaacttgattcttgaatctttggattttgcttgactcttgattctttggcatcatcaaaataaccttggaagacattgcttccacac

SEQ ID NO: 21390 - DNA, 455 bp, Glycine max
  unsure (1)..(455): unsure at all n locations
gaacatataacctgaatcctaggcccncttaagggtttagtcaaaatatctgctggctgatcactggagttaatgaactcagtgacaatttctttaaacagtaatttctcccgaatgaagtgacaatcaatctcaatgtgtttcgttctctcatggaagacggtgtttgaagcaatgtgaagagcagcttgattatcacaatatagcttcatatgcatcacttcgcaaaaattcaactcctcaagaatttgcttaacccacataagttcacacgtaaccacagccatagatctatattcagcctctgcactagatcgagcaacaacagattgtttcttgcttttccaagagataacattccctccaatggagacacaatatccggatgtggatctcttattcatatgacaaccagcccaatctgcatcacaatacctagatacttgtgtattacg

SEQ ID NO: 21391 - DNA, 424 bp, Glycine max
agcttgtgaaagatctctaacattcatatagagaatacttagtttactatattctaagtgaatggaagtttaacaattgaaacttgaaagtatcaaaatcaatatcaccgacatcacatgaagtattacttggacctcattatatcgcttatcatctatgtaaggatatttgattaactaatgaaccttcctaatccataaatgaattaaggtttgcggtataattaacttctgatattaaggtttttactttgaaatctcaaaattcttaaattcacacaagaatgcttcttgtttagacttttgtaaatataatgaaaaatcaaatattgaaaacaatttccgctgttgtctaatgtatattaaggaaatttgttatcaaccaaaacgttatggattgaataaatttctattccttaatgga

SEQ ID NO: 21392 - DNA, 456 bp, Glycine max
  unsure (1)..(456): unsure at all n locations
nnttaactaaattgcagagttccaattgattntaaaatggtgtaatcgattacaatatataggtaatcgattaccagtgtatctgaacgttgaaattcaaattcaattgtgaaaagtcacatcttttcataaaatgctttgtgtaatcgattacatggttttggtaatcgattaccagtgacaagttttgaataaaaatcaagagatgtaactcttccaatggttttcaggtttttctcaaggttataactcttccaatggtttttcttgaccagacatgaagagtctataaaagcaagaccttgacttgcattttgaggacttgatataacttttcatatattattttacaacctttgaatctctttgaacatctttttaaacttcttcttcttcttcctttgccaaaagccttctgagttttctggtttccaaactgtgttctttcacaaaaaa

SEQ ID NO: 21393 - DNA, 424 bp, Glycine max
agcttgtatccagtcttctttgtatactggaacaatatacaaggactaaaagatcggtagtgtgatgctgcctaataggccaacttacaacagcaagccccatgagactcagcataaggatgcacaggccaaagttgagtatgtgaaaagattgtatgaccaagtgaaggtgcaaattgcaaataagaatgaaagctatgccaagcaagccaacaagaaaaggaaggaagtggcacattgaacttggtgatgatcctggacatttgagggcatatgatatccaagaaggatggaatgatgagaatcctgaaattggtctaatacaggccaaaggcccaagtggagaaggactaataccccgagtgaagaacgatgaaggcccatattgatgtgaacgcccataataaatatgttctatttttta

SEQ ID NO: 21394 - DNA, 456 bp, Glycine max
  unsure (1)..(456): unsure at all n locations
cgcttctacaccccaaggttcaaaggtccagatagaagatgaaagaatagaaaagaagagaaaaagaagctaacacattgccgaatcgtgcccgcaatcgatttctacatcattcgtcggttgttcttcattcgttcttcattcattcttcgttctacatctggttagtgtttgcttttaagcatttgagtttgatttatggacccttaggggtccctttttattgtttatgcatcttcatctccttcttcgataatcggcgatctttttctttgttcaaagcgagtttcgactggtcgttcatatcgtaatcttgtttaatcatcgctaaaataaatttcaactgattgtttatgttgtaatatcacttaatcactgtttaaatgaatntcaaccgattatttgtgttcgaatctcacttaatcattgtttaaaaaagtttcgaccgatccgtat

SEQ ID NO: 21395 - DNA, 399 bp, Glycine max
agcttctacaacatcagccagggctaaggcacttatcaaacctgaatctacagaagatagaacctaaataagaagcctagcaggccttttggtagaaaaaaggtatgtaggggttctgggtctattataacaaagaagggggagaacggattttgggatgtgtctatcccacaacctggtgaaatgtaagaccacctacataacctaacccaaaagagtgtaagcgagggattaaaaacctagttgatcacttataaagtcaagtagaaaatattattctattttgattcccaacatgcataagtacaaaaccaattaacatataaattagagtgaggtggatggaacctgatgatcttctacgtagaagggagctagagtggaagctggcgtgggaat

SEQ ID NO: 21396 - DNA, 568 bp, Glycine max
  unsure (1)..(568): unsure at all n locations
ccgttgtctcacctgncacnatcntctatacgaaacataaatnttgtccatattgacgtgcgtcntnnnntccccccaagcaagggagagnntttgaacctgtggacatacgtgacaccgtgcactactgaacctctcagcctcgtgtctcacatagaaaatgagatcagagtgtttctctgaatagaaagcttactcacgaagattttcgtgcttgtggacctgtctatagtaattctgacttaccgcaaacgcctattcctgttgcattcccacctagagcaatcccaaacgataaaatggaagaagctgaacatgagatcttgtagaacctcataaaagtaaaagtgaacatacctctgctatatgccatgaatcagattccaagatatgccaactttctgatgagatgtcaccctcaaaaagaagttccagggcaatgaaagataacatgggcgaaacgtgcacaatgaatgtaatctgttctacatactgataatgtaagaccaggactttttgatacctgcatattgggacaataatttgaaatcctgcttatctagacatg

SEQ ID NO: 21397 - DNA, 418 bp, Glycine max
  unsure (1)..(418): unsure at all n locations
agcttcanaaggatcaagatataaagtataaattatcaatcatgcttatttgcttccagcgcacgtcacttccattaactcattataaaagtgaatagacaggacagattcctatagtatttaatttaatatgccatctcatgaaccccatttttgttccagtaattcacctctgtataaattgatgagaagcccttccttttggctatgtggtcgtgtgtgtaaaattaggacagaatattggtccaaataatcataatcaagaaaagttttgcataaaatgcaactgtttgcaatttgaacttcaaatattgttaattagttggtcatttacataattacatgtacaacanattataattctgcttcctacacatccaatatctgtgcaaggatagatttataacacatatatact

SEQ ID NO: 21398 - DNA, 150 bp, Glycine max
gattaacgacactactgaaaaccactgctacatgtgatcgccaaggcagtcagacattcctccaattattgtgtctagacgatactctagcctgccacccacgaacttgcgccttcttcatgcgactaagaaacttgtgattatacactc

SEQ ID NO: 21399 - DNA, 417 bp, Glycine max
  unsure (1)..(417): unsure at all n locations
agcttgcctcanagaggtccaggaaggactatgcggccgaatgaactatttccgctccggagtatgacagtcaccgttttaggagcgcggtacaccagcagggcttcgaggccatcaagggatggtcgattcttcgggagcgacgcgtccagctcaagacgttaaagaagcgctactaggaggcaacctactaccttttaaatctctgcttgttatttgatcagctttgtttctcaagtcatagtgggacacacctagttgctcatgatcctaagaatttaaataaaacgagcacaagctcggaaggtagtcatacctcacaaaatatatgtatgcgtgtttaggtagtgaaaaataccttatgcatgtatgtaatntaggtagcaaaaaactacctcacaaaatatatatatatgt

SEQ ID NO: 21400 - DNA, 428 bp, Glycine max
  unsure (1)..(428): unsure at all n locations
tgtagaatggccagacatgatacatgtcaaggtttggtttggttcaagggtataagggatgccccacattatttccatgacacatatgcaaaaatgatgatttggaaactttatgcaaaactggtcatgcatgcacctatgcggacactcaagtgtcaaatttttatggtcatgtgatgctagggctcaagattcatttcctccattttagtcaacccaatatttccaaaatatgttcttttatcaatttgtgcattcatccgagtccatttcgggcgtccgggaaaattttcacagcattcacccttcaggtgtacacattttttttcaaaaactagttatgatcagcgatctttntcaaaaaaaagttagaagacatctcttttcaaaagcatgtcggntattcagctaaacaacttatggtttcc

SEQ ID NO: 21401 - DNA, 283 bp, Glycine max
tagcttgtactgaaattttgaatatatgattaatcatattcaatccagcattgtggacagtcttgttcatggattggcgaaatagtatgggcgttcccttgatcactatttaaagaattgatgatagtaccgaaataaaacatacttttttcaggaatcgcatgttgattatccctacccaccattcacaaccatcctatggtgtcccgattcggtacctatgtttgtatggaatctaggaattacatcgaacctacctaatgattccctatgcacataaatg

SEQ ID NO: 21402 - DNA, 433 bp, Glycine max
tgattcatttatttaagaattaaatatgttgttgatttatttaatagtagagtgtaactttgttcattagatagagaattttctgtttctgtcgatatacagttacgctgttcaatctaaaagtttggttttggattatctactgtcattttccatattaaaaatttaaaatcagaaaagaattataatggtaaaatttaattcaatttcatgtagaggaacaatgctttaaagctttaccagcaatacataagatcagctagtgagaacatttggaaaattatctcttgtgaatggtcacaagaactgcgattaaaggttttgagttttgccggccgctaaatgagtctttgccagtttgctataagtcggtaaaagatgtattggccattcatgtgaccaatatatagagaaatatggccgctacaatgag

SEQ ID NO: 21403 - DNA, 410 bp, Glycine max
  unsure (1)..(410): unsure at all n locations
agcttcaagaaaaagatggcctcagcaaattccttatttccagaagggaattctatcaatagacctccaatctttaatggagagggttaccactactggaaaacccgaatgcaaatttttattgaggcaatagatctaaatatttgggaagccatagaaatagggccttatatacccaccacagtagaaagagttacaatagatggtagttcatcaagtgaaagcataactatagaaaaacctatagatagatggtctgaagaggatagaaaacgagtacaatacaacttaaaagccaaaaacataataacatctgccctgngaatggatgaatatttcagggtttcaaattgtaagagtgctaaggaaatgtgggacactcttcgataacacatgaaggaactacaaat

SEQ ID NO: 21404 - DNA, 434 bp, Glycine max
  unsure (1)..(434): unsure at all n locations
ggctaacccatggaagctcctaatatctcccacactntntggggtgggccattcttggatggccttgattttctcaggttccacttggaccccatttctaccaactacaaaacctaagaaaactatattatctacacaaaaggtacacttctctatatttgcatagagggtgtttttcctaaggactgaaagaacttgtctgagatgtcctaagtgatcatctaggctcctactatacactaaaatatcatcaaaataaacaactacaaatctacctatgaaatcccttaagacatgatgcataagcctcataaaggtgcttggtgcattagtgagcccaaaaggcatcactagctattcatacaaaccaaacttggtcttgaaagcagttntccactcatcaccctttttcatcctgatttggtgataaccac

SEQ ID NO: 21405 - DNA, 375 bp, Glycine max
gaaatcaaacttttccactggtaatcgattacagggaactggtcatcgattaccagagacttaaaactcttgtaacttataaaatattgagaaaagctcttttgaaaaacaaaactgtgctaagtctgttttttgaaatatcttttcaatactttccttgtgaagttcttttacttccttctcttgaatcttgatatcaaacttctcttgattcttgaatcctctcgatttcttctcatgaaacttgaaaattatcttgatcttgatcttgttgactgaatcttgagaacattctctgggcttattgtcatcttactagtacttgtatcatcttgattcattatcatgaagcttgcttctacacctaacctatat

SEQ ID NO: 21406 - DNA, 439 bp, Glycine max
  unsure (1)..(439): unsure at all n locations
tgtgttntaaagtttacaacttacaagcgcgactatattaatctcttaaaaaatttagttgctaaataaatttcccaaaaacttaaaagggcatcacaataattttacaaacaatttcttaataattaaaataccatcaaattcatccttgatgcaagctccattggagcttgtaggcctaggatcttcttcatcaatggattcctttgcttcttggaagataaatggcagtggaatggagaaggaagagagagaggagacgccacttcaaggagaagatgagtctagaagaagctcaccaccatangaggccatggataagagcttggaggaagaaggagatgaatgaatggagagggagagaagagcacgatattttgtgctcaaaaagagctctgaaatctgaagttaatattcaaatgaatcaaagtgaaaaaaa

SEQ ID NO: 21407 - DNA, 544 bp, Glycine max
  unsure (1)..(544): unsure at all n locations
acctcactctnctctcccctanttacttatatctaagtanttggncactgttttaatcttatctacctttacgacgacaatattgcatgtgttgtaccactaacaacctganacttctacatttacctcggctataataggagatatatctatctggttggtgtcaccaccccccttgcatattgtgcgtttgcaaatgagagttcacttgctcttattgagactgcataagaggtggaggaaattgtccatattgcatcggaggcacgatcttgatatgtctatttacatctatgatctttatatattgcttgtcacatgaacccagtttcaacctgacatcaagtgagatatcgatttttgaaagctgcaggatggtatcgcacattccaacatcttcataaatttcttcaactttttcagtatatatgacttcagtttgtagtggaacggaggcctgctgattaagataaattaaatgtacaatgttttacactttagtattaattgaggacaaacaaactaatcagggccctctttccct

SEQ ID NO: 21408 - DNA, 410 bp, Glycine max
  unsure (1)..(410): unsure at all n locations
tcattgttaatgtcacatcagttaatgtcaaacaaccgtatcaaattatggagatcgtggtatggtattgtaagtgacatccttggccagagcggatttgattgggatggcattaagcacatgataacaattgagaatgaaaatgtttggaatgaatattgcattngaagtattctttaatatgtttctatttgttattcaaagtagattggaattgactttttcttttttttcagtcgcataaatcggctaaaccgtttcgattcaaggtgcttcaaaattgngatgatatagtggatttgtgtgctaaagatagagtcaccggtcatggagctgaaactgctatggatgctgatgaagcgatgagtagagaaacaaatgaagtggaattcatggggttaggtgctact

SEQ ID NO: 21409 - DNA, 417 bp, Glycine max
agcttgaactaaagattataagatggtactgaaacctatcttagcgattgttgttgggcttattgagtcaatcgccatcgggttgttattgaaccactagtagatgtcaagtcatgcaaacttcatacttgaaatgcccaatcctcaatgtgtaggggtgtattgaagatcccacattgattaggaatatggccaaattaaagtatatatgtcagggaaaccttcaccttacatgctagttttgtgggatttagttaggcttgaatctaaaatctaagatgttattagaacttatcatatcaatgttaagcctattaggccatctaatatcgggttgttatcaaaccacttgtagatgtccaatcccataaacttgggctcaagatatccaatcctacgtccgtgggggtatgttgg

SEQ ID NO: 21410 - DNA, 450 bp, Glycine max
cattgttgaaaggtatgttgctgaagaatgtatcaagttttgctcctattcattgaggaggtaaatttatgcttcctaaaactcgccattgtctgacacgagggggtaagggtacacgacgatacaatgttgtcacaatgacttggcactatgtctcacatgtgcatctatatatattaaacaacacaacagaggtcattacatacatagatgctcacaataaaaaagctcatagcaataaacccgaaaatgaacatggtgaggggtttgccagatcacaatagaactttctttaactggtttagagaaacaatatttcttgatgatggtgctttcaaaacattaaaattgttagttgttggggcaaatctcaatgtaccgacttggaaagggtatgatatcaactattattccttctacaccaagtcccaagatgacaaaagctcgatg

SEQ ID NO: 21411 - DNA, 375 bp, Glycine max
agcttgttgaaattgccatgtttggatgagttagacatacccattctgttttagggtttttgtgatgatgtttgtgatgtttatatgctgagatttcttatggaaaactgttagaggtgaagggtagagttaacttagggttagaaagtgagaatgtgatgttatgagtggaaaaagagtgacgctttgagagttggaatgctaagtctgaattctgtggtaaatggaggttaaagtgagttaatactagcttgaaatgtcatttaggacttgtgctagagagaaaaacaaatgatcaaagtgaacacagagctctttctagggcaaaattaggtgttgaatagtcaaattttgagttgctgcgattttgggtgt

SEQ ID NO: 21412 - DNA, 454 bp, Glycine max
  unsure (1)..(454): unsure at all n locations
tcttacatagtccgcctntgcttgaccttctttatgcttaataacagaaacattaggcataggcaaaagatcaagaggagttagtgggttaaaaccataaacaacttcaaaaggagaacaattagtggtgctatgaacagctctattgtaagcaaattcaacatggggtaaacaagcttcccaagtgtttaagttcttcctcaaaactgtcctaagcaaagttcccaaagtcctattaacaacttccgtttgcccatcggtttgtgggtgacaagtggttgaaaataacaatttagtgcccaacttgctccacaaagtcctccaaaaatggcttangaacttagagtccctatcactaacaatgctccttggcaaaccatggagtctcacaatctccttgaaaaacaaatcagccacatgggaagcatcatcaactntcttacatggaataaaa

SEQ ID NO: 21413 - DNA, 417 bp, Glycine max
  unsure (1)..(417): unsure at all n locations
agcttgtacgaatataagaaacatcttcttcgaccttggtgattcttgactccatctcattgaagcgcatgtccacttgtaactccaaagtatcaaacctttcaccaacaaaggtttgaagaccatggaacctatccaaaatcttttgaagaagagaggaatcttctctaccatgtccttcttcattaacaggtcgagcaccctttttcacccaagagccatcatgctctntttgataaccaaaggatgcaatgatagtcgcgcctattagaaaggatctcttgattggaacataaggttcagaatcaagagggatgttgaagtgttgaacgaagagcgtgactacgtgtggatatggcaatggagcatttaatcgcaatgccttatgcatgcgatatctgactaagtgtgcccaat

SEQ ID NO: 21414 - DNA, 585 bp, Glycine max
  unsure (1)..(585): unsure at all n locations
caccctctccncttctcactctctctcattactacataggtgtgtattctacttcatctgtgtcntgtctngtctacnctaagcntcnatgagnnnctttgatagtgtgctacttagcgacactctanaatactcaagccttataatcgcgggtctcggagacaatggcaagcgtcgtgtattctaaatgatatcctagtactttggatttggactaccatgccctcctgatgtccagctgggatattgtcgagtggacggacccctctgcatttactcaacatgcataatgtaaacctttacttgtttaagagctctatatttgagcctacgcttttcagttattcctattgttaaggctttatgtctttttgttttataattatattactaggatctttctttatcagttcctgggctctacccattctgattcatttgcatgtttacttctttatctgaanccgcagatcctatgactagttcccccatggtctcttacctgcgacccgtttatcactacagcaagaaattcatcgactgcttatgaatgaatgacgatgtgggacttcctcttgactagaa

SEQ ID NO: 21415 - DNA, 401 bp, Glycine max
  unsure (1)..(401): unsure at all n locations
agaactacgtaggtctaatttcctcatcgcacctgaggatgcataaaaacaaaggcaacacccttgtctaccctaaaaaaaataaaaatataaaacgggataacacataaaatatacaaaaaatgaaaatgcataattttgaagtcatctcttgtacactcgattaaaggctaccgtcacttgtgacgggcgtgtggggtgctaataccttccccgtgcataaacaactcccgaacccttatcttcaaaatccgcagaccttcgtctntttggtttttcttactttttcctcaaataaacgttggtggcaactccacgtgttttcttcacgagaagatgcacttttaactttcgcctcactctcctgctgaatggaacgttgcgacagttggctactccac

SEQ ID NO: 21416 - DNA, 455 bp, Glycine max
ctttgaagcatcaagaacttaaaggtcaacctcgagcttttgtaaaacttaatgatgaaataagaaccttaaagactacattatccaattttgacaatggattagacaatcttaacatgttgttaggatactgtagaagatgtactgacaaatctgaaaatgaatataagggaaaggtatatgttcatgatgaagatacaattgtatgctacttctgtggaaaaattggacacatgatgtccagatgcaaggatcgtcctaagaagggttcacctaaccccttcatgactaacataaaagaacccaaaaagatttgggtacctaagaaaatatattttcctattacaaatattcttgatagaagtaaacagtcacctatcatggtacctggacaatggttactcgcgacacatgataagagaaaagcctatgttccaatgcctgactccctattg

SEQ ID NO: 21417 - DNA, 381 bp, Glycine max
agctgtagtgctgtgatttaatagtgtttcattgttatgtaacctttggctatgataacaagttgagaggccaaattctttattgaagttggtgtcagatgataatagcaccgataaaaaaaaatataaatgaatatattggataaatacttgatttgattcttgaaaattaaaattttatttctaaatttataaaaagtgggacaaattcttttgtggtttcttctccgttaactcaaatcgaagtccctaggtggtaccttttgacttatttgtcattagaaagaatgcctacctgtggcgatggcttgatgcgattaaattgtcactagtaaaatttgttttttactatttttttaaaagattttctttctctctact

SEQ ID NO: 21418 - DNA, 451 bp, Glycine max
ctggtgtggctggcacagcctcacctagactcaatattgaccagctctagggttgggaaagacaggtgggttgaaggttggtagtgaaaaacaggtgagcatcttttaacatagaataatttgctttctatttttttgcctgctcagttccattttaaaattattggttgagccttgaccctagatattattattgcagaggttataacattaacagaatttcaccctacacattgtaatacgttggcatatagcagttcaaagggttcaattcatctagttgacttggaacaatcagcattatgtgattctcatgctaaactgtaagtacattcttttgttgtaatcttgttggttcctgacaaataagtatcccattcctcccataaggctttcagaatttaacaaatgtttaaacagttgacagaatttctggataggtcatctgttt

SEQ ID NO: 21419 - DNA, 407 bp, Glycine max
agcttctgttcctgagaaactggttcccataagacaacagggagtgaagattgctgaaaaccctagccttgcaacaagtcctagggaagtagacacggagatggacaagaaaatccgcagtattgtgagtagcattctgaaagatgcttctgtgcctgatgctgagaaagatgttccaacatcgtccaccccgaatgtttctgtgcctgatgttgagaaagatgttccaacatcttccggtccaaatgctgaagtactctcttcccccagcaaagagagatcaacagaggaagatgatcaagcgacaaaggagacccctgcaccaagggcaccagaaactgttccaggtgacctcattgacctggaagtagtagaaattgatgaagaacccattgccacagttggca

SEQ ID NO: 21420 - DNA, 375 bp, Glycine max
  unsure (1)..(375): unsure at all n locations
ctttgaagaaatttcaactttagaaactttcttctcactcatatatgatgatgcacgatgcacaaatgatatgatatatactaagatgccacattcaatataacaatcaatatagatgccccttaagagagtctgtcatgttaaagataaaacttcttcaggcttcaagataattgtgttgctcatgttgctccccctatctctaacaaatctccccctgttttcctttgatgatgacaaacttgaatatgttaatgagtgcatttggaggtctgagtcttgagagtagagacttgcttttcttagtcaatcctgacaatcttaacacttaagagaanaatcaattcttatcatcatcatcatcatatatcatac

SEQ ID NO: 21421 - DNA, 415 bp, Glycine max
agcttcaaccctttcccaaaactcggcaagggacgcgaaatgttattcccactcagatccaacaatgtcaaagatttcaaactagtccaattactcggtatcgtaccactaatatcattacctcccaaccttatctcaacaagagaatctaacttggcaacagaaggactcaaagtcccactaagattaaacttttccaaaataatcatgtccacctttccgtccccattgcaccttatccccaaccatggcccgtgacaagggtcatttccactccaagaatcaaccaaaatccaaggataccccaaccctccaagaaactccaacaacaccatcacttcaaaagcacacataaccccggcctttgcctcacaaaattcattgttctcataactcactttactcgctgcaaatt

SEQ ID NO: 21422 - DNA, 435 bp, Glycine max
  unsure (1)..(435): unsure at all n locations
tgtctcanacttttgcacacgtaagagccaatttttttaactgtaaagagcaagttcaaattgtgtaatactaactagaaggcaaattgccccaaatgaggttcttttacaaactatttctctatttagggttgttttaaaagaattttcacgaaggtgttcttttgaacgtatcctgcatgaaaatattatgcaaaacgccagcatcattggcgcatcgcctatggctgcgacacgtggtagtggtgccactgtcactagcgacacatgtggtatcgccacctgtactagcgctctggccatgcatggtggagtgcctggtcaacctgacaatntacacgaatcaggctagggtttagcttttcagctcttcaagtggatggtagtagcttttcagctttatggcagtgtcccagtgtggatgacagtagcttt

SEQ ID NO: 21423 - DNA, 415 bp, Glycine max
agcttctagcgtacccgctattggtgctcataaaatcccaaaaacaaatccctcttattactagctattttgaattctttagttcctgaatgtacaaccttcaaattgttgctcgttcccgtatttgttttttgcaaaaaagaaaattaatctgaaacacttcacgctgaattgttatcgttattattactcgaaccataaggaataacagctaaacaagtaatttaaaatgtaacttttaaattatgtggtatttttttaattacaattctacttcaatatctaattttgttaatctacttaggtcgttttttaaatataaatatgacattaaaggtgatctactgataatataaagtacttgctaatcacaaattatgatacgtatcattttaaaatttaacttaattctata

SEQ ID NO: 21424 - DNA, 450 bp, Glycine max
  unsure (1)..(450): unsure at all n locations
tagtccttagtcatcaaatntctgttcggtcgctaaagcttagtccttagtcatcaaatttcaatttggtcgctatttagcgactgcataagtcaatcgcaagataataaaattcgatcactacatatatggtttctatttgtcttgggaccaattcagcaacccaaattgtgagtcactaataaataataaaattttaaatttaaaataaattaaaataacattcgttcactattgaataattaatttaaaatataaaataaattaaaataatattaggtcggtatttcgggtgctaaagaataattaattnntaaaataaattttttaaaaatttctttcagtttctagtttagtcgctagttaataattaattttagaatgaaatgtacgattgctaatgtggtcactatttaattnttaaatataaaataattaacaatataattc

SEQ ID NO: 21425 - DNA, 420 bp, Glycine max
  unsure (1)..(420): unsure at all n locations
agcttatcaataattaaataatcttatcacatgagtaataaatatacatgtgttagtcaacattaatgaaatacatacacaatcaaagtttgaaattggtcatagattaaaatcactggatttttaaatatgagagataaaatatttcaattaaaaaataagagactaaaattacatattntagaaaatagagaaacaaaaattacattttaaccttttaaaaatcacaatctactaaatatctaatcaactatctgtaatggataataataattaatagctaaaaatgtaaactttacattatttggttaaaataaatcaattttttaacagtaaataatctctaacgcaaatgttaagaaaaaattacatatataagatatttatganaattcacaaataatgttcacatgtgcatga

SEQ ID NO: 21426 - DNA, 434 bp, Glycine max
gttgtcactacacctatatctggccttgacattaactagacttaacaccaccgacaacagcgtcaaggaattcttgcaccccaaatacaaaggcttctctgaatcagttagcaatgtatcatacacaggggcatgtgcttgctgaaaagactcttgtccaaggtcacgaatcatatcctccaagtgatctcccatttctacatcaaatggtttatattgggacccactctgcatgtctgtcaattcaccatgccatatccatgttgtataattcttcttaatcccatcatgcaacagatgctcccgtatgtcatccaatatttttcgtctcccgttcaaactatttatacaaggacaaaaaaaattattgtcctcgtacggtcgacttctttcggaggcaaattgcaagaactcttcgatggcttcctcatatg

SEQ ID NO: 21427 - DNA, 419 bp, Glycine max
  unsure (1)..(419): unsure at all n locations
agcttcacaatcagaccttaaaacggccaatctgaatactaagaaaactgaaaccacagtatatatatagaggagtaacaaaatttactaagcaaaccaaagtattgcataaacactaatggagtcaaattggggttatttgctaactctttataaccattaagacttacaaacgcataaccaataaaatatcatcatcagtgctgagacttgcagaattttcattgtagatgatgattatgtgtgataattgcgattacaagaagccaacaccaggagactcatacatttgcactcagtatcagcagaaacgtcacagtttcactgacaaatatcgttttcattgatgctgttccatcttgacttcagcaatntgaactttaagacataatattaacttgtaaacgcaaatctcctaa

SEQ ID NO: 21428 - DNA, 449 bp, Glycine max
  unsure (1)..(449): unsure at all n locations
ataccacctgtcatttgcatctgcatctctgtggatcagataatggaacttcatcttcagtcagctaaacccctgagtccatagggatccccttcttcgagtacataacctcaatccctaaaaagtacttcaaggcccccaagtctctactctgaaactgagtttgaagaatactcttcaagttgtcagtacctttattatcacttcttgtaatcacaatatcatcaacatacaccacaagtaagatgctgccaaggttagtatttctataaaatacagtatgatcactttgactcagcttcaatccatatgcaatgaccacaccactaaatctcccagaccaagatctangtgattgcatcaagccatataacaacttccttaagcggcataccatgccaaactgccncatagcaacaaacacaggtgattggtatatatacacctct

SEQ ID NO: 21429 - DNA, 364 bp, Glycine max
taaaccatatatattggagacacgcctatacgggttttgaaagcagtactgtcagcccatattgcatcatccatcttgcttgacacaatccttccgagtggaggccataattatctccacgaacttctttagttccctgttggagacaatcagcattgaccgattagcttgggggtgatattttgaggctactttgtgtgtgacatgacaatggcctaacaccttttgcaaataactgttgcaaaagtgagagcctcatcactgattacgctactttgtgtgtgacatgataatggcctaccaccttctacatatgactattgacaaagtgagagccctatcattgaatatgacccttggcacc

SEQ ID NO: 21430 - DNA, 386 bp, Glycine max
  unsure (1)..(386): unsure at all n locations
atatcctctatattctgtactagtgaagcatgaagtaagatcctattaaaccatccacacgtcgaacaatcattaatcattgcctgtttggattgtcagatagcaagaaggaagcaattgatgtgttactcaaagcatcatgatacctggagttctgtgtaacggatgctcttactcggatacctgctgaaacaaagtatgtttctcaataaattcttagttttggacctgcattgatcaccctctaataaactacattcaaacaacatccaggaaaacttttccccacgacttacaggaaggtgtattggatgctatagctattcaaacactangccaaggacttggtgattctcatagcgaacaatttacgtatgtaattctta

SEQ ID NO: 21431 - DNA, 369 bp, Glycine max
aatggataatcaagagtgtcagatgtcatcacacttgtcttgcgccaatgctcaaactagatcataggcaacttgacatttcttctcctttgccatgttgcacaaaatttccttcgcgataacccgaactgctcacatttgaagaaatcactcatacagagccgaggagaatcttcaatattttaatttttcgctaaactatattttaattcaaacttattatattaaatgaatatatacaggacacgcatacacggagaagatgcaccacgacatcttgtgggtatatatgctaataagacaagcgtccttgaatgactcgatcgatgagagaaaacattgaagacctatgactactaattcttttaa

SEQ ID NO: 21432 - DNA, 374 bp, Glycine max
gagcccttacaactttattcttaacatctatggaaatcttcttattgcttatttgtcgtctataaaattatggagactgcatctgctattcctaatacgtgtgtgtatttgactagatgaaaccaaaaggaagttgctatattggcgaaaacgtttccacattatcagtggcattacttgaggacatctttatcttcatcaagactctatgttaaggattattcacagagatctaaaaactagcaatattttactagatgccaatttggatcccaatatatcaaactttggcctggctcgatcattcttccgagatcatgtggctggaacatagttagcttctatctaattatgactctttgatattgctgtat

SEQ ID NO: 21433 - DNA, 419 bp, Glycine max
agcttctagtctcaattgtgagcgtctcgatatattacccgattcaatcggacatccgagtaaaaagttattgtcgtttgaattccctacgagcttcccttttcaatttggagcgtcttgatctattacaggactcaaccggacatccgtgtaaaaagttattgtcaattcaattttctcagagcttcggatctaaattttgagcgtctcgatatattacgggactctatcagacatccgggtaaaaagttaatgtcgtttgaatttgatacgagcttccgtattcaatttggagcatctctcgataaattacaacactctgtcgggcatccaagtaaaaacttattgtcgtgtgaattttctaagagtttccgttttcaatgtggagcgtctcgatatattacgggactcaaccgaac

SEQ ID NO: 21434 - DNA, 432 bp, Glycine max
  unsure (1)..(432): unsure at all n locations
ctgtagggaattcaaacgacaataactntntactcggatgtccgattgaatcgggtaatatatcgagacgctcaataatgagactagaagctctgagcaaatttaaatgacaataactntatacacggatgtccggttgagtcccgtaatatatcgagacgctccaaattgaaaacggaagactctagaaaattcaaacgacaataactttttactcggatgcgcgacagagtgtcgtaatttatcgagagatgctccaaattgaaaacggaagctcgtatcaaattcaaacgacaataactntttactcggatgtctgattgagtcccgtaatatatcgagacgctcaaaatttagatccaaagctctgagaaaattgaattgacaataactttatacacggatgctcggtagagtcctgttatatatcga

SEQ ID NO: 21435 - DNA, 420 bp, Glycine max
agcttgtctcagcgtctatgcgagacagaaaccaacatgctagctatcatcgccaagtaccaagaagagttgggtctagccacggcccacgagcatagaatcgcggatgagtatgcccaagtatatgcggaaaaagaggctagaggaagggtgatcgactctttacaccaagaggcaaccatgtggatggatcggtttgctcttaccttgaacgggagtcaagaacttccccgattattagccaaggccaaggcgatggcagacacctactccgcccccgaagagattcatgggcttctcggctattgtcagcatatgatagacttaatggcccacataattagaaatcgttaggaaacttgtatggtctctcagaccttgactagatatgatttctttttttgaaataaaatgagttgg

SEQ ID NO: 21436 - DNA, 384 bp, Glycine max
cgaatcggacatccgtgtgaaaagttatgaccatgtgaatttctcaagagcttccgctggtcaagttcgatcctctcgacatattatgcacccgaatcggacatctgtgtgaaaagtcatgatcatatgaatctctcgagagtttccgatgttaaatttcgagcgtatcgatatatgataaccctgaatcggacctcagtctgaaaagttatgaccatttgaatttgacgagagctttcgctgatcaacttcgagtgtcactgtatgtgatgcgccaaaattggacatccgagttaaatgttatgaccattagaatttctcaagagctatccttgttgaattgtgagcgtttctatatgagatttgcctgaatcggacatccgt

SEQ ID NO: 21437 - DNA, 420 bp, Glycine max
agcttcagtagtagcaccaaaaattatgtcatcaacataaatttacacaagcaacaacttattgtttgatatcttgataaacaatgttttaacaacttgacctgttacaaaagattgtctaattaggaaattgctcaatctttcataccaagatcttggtacttgttttaaaccatacagtgcctttttcaacttataaacatgattaggatgttcgaagtctaaagtccttttcaactagatgattaagattatgcatgtttacatgtgcagttgtatgatgccatagccaagaatcattaatcttacttaccaagtaaggctaatgaaatgatgcatgttcaatattcaacatataaatattacctattcttttacctatgtgaacaacctcactagtttttgcttcataaatgaaac

SEQ ID NO: 21438 - DNA, 437 bp, Glycine max
  unsure (1)..(437): unsure at all n locations
tggctactntcttgatgctntctaaatgctgcttgctagctgtctcagcagctntagtgcttagatccctctcaattgttcggatntctagctcttctgattgaactaggatctcatgcctgagagccaggttctctttctccaaatattcaaccttttgacacatatcaaagtcaatagaagaagacttggcttctgaagcatctaatttgttctggagctcagtgagtttgttctcaagtntaattttagctgattccaattcctgtgtcttttttccaacagcatcatagatattntcttcctgctcttctcttgtctgccttagctgcctaacacactccttaagtgctccatctagatgagtgactcgatcttccagaactgaattcctgagaatgacgggtgtcaagtgcttctttaaaacagccacttca

SEQ ID NO: 21439 - DNA, 422 bp, Glycine max
agcttaagctccggagagaggaaagggatcaatcacgagtagacagttcgatgttgaaagatgagttaaggggttgctcaaggtccaaaagaaacttgtatcagcgattatgcgaaacagagaccaacatgtttgccatcatcagtaggtaccaagaagaactaaatctagccatggcccacgaggatagagtggcgggcgagtatgcccaagtgtatgcggaaaaggaggctagaggaagggtgatcgactcgttacatcaagaggcaacaatgtggatggaccaattttcttttaccttgaatgggagtcaagaacttcctcgattgctagccaaggccaaagcgatggcggacacctactccgcccccgcggagacccacagacttctcggctattgtcagcatatgatagatctaatg

SEQ ID NO: 21440 - DNA, 436 bp, Glycine max
  unsure (1)..(436): unsure at all n locations
ntgagccaaaatcctgactcaccataaaccttgacccagggtgagaatgccaatccttaccctcggaagcaaaaaaaaagaggaggaggaaaatttccaatcaaagaggaagcaaaaaaaaggagagaaggaaaatttccaatcaaaggaaaaagagaggaaaggaaattcccaatcaaagagtgggagaaagcaaaaagaaaagaaagaaaaattctcaatcaaagaatgggagaaagaaaaaaagagaagtaaaaaagaagaaagctcctggtcgaagaaaccagaagaaatgtgccgagaggtccttggaccagacgatgtctgaacaatacagaattgtcaccaaatgaacaaaagaaagaaaaggaaaccatgacctataagtggtcttctccctttaattaccaaccaaaatcctgtgcgctagcaactt

SEQ ID NO: 21441 - DNA, 587 bp, Glycine max
  unsure (1)..(587): unsure at all n locations
tctctacagtcttatctctgcccntccacacacnannnngctactcnngctctcagtctctctcttctcccttantatatcntttcatatataagcgtcatttggaatttgaatgcccttcgcangacccgctatattntacctgtcggactgcaagcatgcaatcttacaaacggagtgtgatgtgggcggtatgacgcgctttaacacggtatgtaagccgctatctcatgcgaataaaagataaagtgaacgccacccgatcttgggtgatgcgatcccatgtaatcacgttgacaaatgagatcgaatctgaacggtctcgacaataccgtggacaaaccaaaaaatgntgaagaatcatatataaatcggcataacttgaaaaataatagtaacattaccacgaacgtttgaattaacaaaataacaaaatgcgtgggacgtatatgctttcgctagatatccttgaatgaatgtgaaaaacaaccaagggggaaactaggactaatagtgactgccaaatcaagcttcgaccaataaacactcaataccgtggtactgctcacgactgaaaggtcctattn

SEQ ID NO: 21442 - DNA, 434 bp, Glycine max
taaacgtaagaatgaggaggcatcttccacagatgtaatagattcatagttcgtattgtctctaagtcttggcaataacaaaatggttggtgaatcctcatctaatttcttatgcaagtcattgaaaagccatcaggagtcaccaggttttgcttcaaaacttgtggaaaacatcaataatcatgtgattatgcctaagcagcgccaattctcctgcaagttttgtgataagaaattttcaagctctcaagctttggggggacaccaaaatgctcacaagcgtgaaagagttatatcaaggatggataaagacatggaaacttttggacttggtgctcacatgtgctcatactcatctattcctcatcatcacccctttcatggaccaacacccctttattatggggctaacatgcaccccatggctcacatgt

SEQ ID NO: 21443 - DNA, 411 bp, Glycine max
agcttgccgcatcagcacctggaatgatttgattaccgccttccttaggcagtattagtacaactctgacatggctcccgaccggactcaactgcaaaacatggttaaacgggaacacgagtcttttaaagaatacgctcagcgttggagggacctagcagcgcaagtagcccctcccatggtcgagagagaaatggttactatgatggtggataccttgcctgtattttactatgagaagatagtgggctacatgccctctagcttcacggatttggttttcgccggagaaaggatcgaggtgggtttgaagaggggaaagtttgattacgtctccctggtaggtgccagcagtagaaggaccgaaatagttggggcaaagaagaaagagggagatgcccataccgtcac

SEQ ID NO: 21444 - DNA, 430 bp, Glycine max
  unsure (1)..(430): unsure at all n locations
tgccacccagctcgcccaggcgagcagggttgcttcctccagaagcaacagccttctggaggaatcttctggagggcccaagtgggcctggttgctatttgcacccccatttttactaagtacacccccctgcctttttttttggtgattcttttttcgtaaagttacggaaacttacgaatttcgtaacgatactngttttctttccgtaatgttacggaaccttgcggattacataatcatcccctttttgacttacgaaatgttacggaacctcactaattgtgcaacaatgcttccatttgatttctggtgtgtcacggaaccttacggattgtgcatcaatattttcttttgttttccggcatgtcccacaatttcacaaattgcctaatgatgggtgccaagcacctcacaaggaccaaacaaa

SEQ ID NO: 21445 - DNA, 418 bp, Glycine max
agcttcattggccaattctcaagttcatagttgtcataagttcatgaaagaagcatgaaaaagatgcacttcgagaagaatcagttagcaagaatgacaagtcacacggaggattcaccaagcttcattcctcacaaggctagtgtttctctcaattgcacaagtgtttcggttgtaagtgtttcaattacaacaactaaatagtaaaattcccaactttgcacatcatctcagtcaatgcaatcatacatgcacaatgtggatcactaagggctttatcaagcttgtaacgtggctaggctaacaaagaaatcatggtttttcatggattcaaagtttaggatctagaagagcattcattccctaattcttgacaaatcataacacaaaattttttcactacaccaaccatattgtt

SEQ ID NO: 21446 - DNA, 448 bp, Glycine max
  unsure (1)..(448): unsure at all n locations
agcatggttagttaatgatcatgaaaattgtcatgttagtgctttntgctatgctgntaaaacttgccctggttctgttggtcgggcaattgggaaaattgtggttaattgattttcttgatgttttggactttggtctggttggctttaacgagtttgatgcnttccttcaattaatttatagtacacctgttattttctcctgtctatttatttgcacatggagtgttgaatgaagtctggatgatgcagaaaagcaatataattaaaattgatgtcacttttcctcttttgtttgtgtagggttgctactgtgggaggaacgtcacttgatctacatcngccttttgtcgaagttacatctcgtggtgggattgaaaaggttgcattgcgtaaatcgttctctattaattgtagaaaatcagtccctttgtgtctganacaaatg

SEQ ID NO: 21447 - DNA, 410 bp, Glycine max
agcttgagacattcattcataggggactgttaagagatgggatgttcacattcaaggttggatgatgaagaggcagttcggctttgtaaagacagaaagaagtttatcagacaagctgttgaacaaagaactcaatttgccacgggacacatagcatacatagaatctcttaaaagggtgtcagctgcacttcgcaattacattgaaggcgatgagcctcgcgagttctcattagacacagtcatcaccccacctttcacgcctgtgaagaggaaaactggctcatgattcattcccatatcagcaaaaccctttgctacaacaggagcaattgagtttgggatcggaccacactctactttgaaagtgaattaccttaggcctggtggtaacccaacaatttcagttga

SEQ ID NO: 21448 - DNA, 431 bp, Glycine max
tgaatatgagggaagaagaggttggggatgagaggtgaccgggaagacaactaagggacttagggtggattacaggcttaggccttgggaaggagatagttcagtgcttcaccaatatcagttcttttttattctcatactgatacagaagcagtgtttccagtttttcatactgatacattattaatattagtaaatatcacttttctccctcagattttgtctacagtataactgatgttggattatgtgtctttcaaaactgtatttcatccttgttttgtagtttttcattgaccatcatcatcattgtttagaactgggatttattacttacatttttcattagtgtcaggttgatcaaactagcatctatttcaatactaatcatgtgtcacttgagcttaaatcatgtatgcagagactagagc

SEQ ID NO: 21449 - DNA, 414 bp, Glycine max
  unsure (1)..(414): unsure at all n locations
agcttgtagaaactcttagaagctgtcctgtaatctgtcaccataggctaggctgtagctntcagtatgaattattttttgtactatctatcaattctcatatatatatatgcatctctcagcaaactaaggctgaggatcctttttgtgtgcttatttttgcactcaaacatttcaagtaatctaaattgattctttgcaatccttgtttattttcttaatctaagctcaatcaccttttttcataatttcaaagtgactcgtgttttatccttttgcaatttactcaattttgaatatctttcttattcttaaatacaggaaccaaaggtaaaataaggttataatcatccatgatttggtttcatatcacaagacataaattgtgagccagtgatttttatttttcattaa

SEQ ID NO: 21450 - DNA, 407 bp, Glycine max
tgtccacttcttttctaaccagtttgcatcgttcttctcccatcttcatcttcttttgtgacacggatttggcctggggacaaatggtgagcttgtggcatataatgttggggtggatacccaacatgtcaaatggctgtcacgcaaacaagtccatattcttgtgtaggacatcaactatacatctatgttcatggctggtgaggtctcgactgagttgcatacactgcccgggtatgggtccaagttgcagattgacaagttcttcaataggctttaggcctctatcagtaatgtcatcgcgtggatctatatcaaatacattgtcgaagcttgctaggtaaatgatcaaggctcggactggagacccttcatccacactcatgacttatgtaccaccactcatt

SEQ ID NO: 21451 - DNA, 415 bp, Glycine max
agcttgcccaaaataaacagttttgccactagagagcaagtataattggtcaaatagctcaaacacttcactgcttggctgatgaatagaggctatcacggttcttccatcccttgccaaggcacgtagtgtctgcgtcacaaagaaagctgaagcactgccacaaaagacaaaaatccaaaaaaaatcaagacatatgttcagcaaaaagagatgttcctactttacaaatatgaacaactggggacataacaaacattctccaacaaaaatactattatttatagaatattgtaatctccctttagaaggtgcacacaaattgatgttgtgactatgtagaacaacaaaaagacgaagacataacttccaaattcattttatgaaatcgtatttggttgtacaatttttttat

SEQ ID NO: 21452 - DNA, 444 bp, Glycine max
  unsure (1)..(444): unsure at all n locations
tactttaagtatatctagaatttccttcttggcaattcttttatattgcttgatggcagattcccattcttgtatactttctccaaccaagtgggaacctattacttccaacgcccatggaagaccagaagcataagttactacgcgatgcaagacctccacgtaagttggatcagctntttcttttttaaaagcttgccatgtaagcaactgaagagcatggttctcatccaattccttcatttcatatgttttattaacttcatgagatgctagcaattgtttgtcccgagttgtgatgatgattttgctgccgcgaccaaaccaatcaggtcttccagcaattgcttgcaattggtcgtgtgtgtcaacatcatctataatcaagagaaccttctttcccttgagcctacactgtatgaatgaaattcctgttgcttactt

SEQ ID NO: 21453 - DNA, 126 bp, Glycine max
ccatattaatttttttatacattgtcagtatgtttcttcgagtgatataccgttaataataacgcaacggacacttacagagatgcctgatgaagacttggagggatcaactatataaataggggg

SEQ ID NO: 21454 - DNA, 419 bp, Glycine max
  unsure (1)..(419): unsure at all n locations
tgagatggcaatgcaagagatatgagaatgaactatgataaattggctgagtattaaagctgagtgctctgcttttgtttgacatctctaacttgatggccaacaacaccacacaaacgtcagaatacaacatgaatctatcttacaaatatataattctacaaatnttaaaacatggcaaaatttggtaataaagaaagcatatgaaatcacgcaccagacctgcctccctctttcgacgacgtgtaccaaccccgccacccttcttcgacgtcgcgcaccgtctgcacctccagatctgatcgcgcgcgaccctttcgccttcaaacacatgcacccttgcaccttcaacgacgccgccgtgccgcctgcaccacctcgtgcgtttctatctctttttcgccatctctatgttctat

SEQ ID NO: 21455 - DNA, 412 bp, Glycine max
  unsure (1)..(412): unsure at all n locations
agcttccacaacatccaagcaaaacaacattcaaaccgcacaagctatcacagccaagcaaaacagagcataggcagaaaactctgccaaaacaccaaccaaatcacaacttttctcacttaaagaccccggcaacaattcctttgttccggttcattaaccgttggatcgactcgaaaattttactggaagtctctaatacttaagcctacattttgaccgttgggatctactagcaaacctccagaactcattctgcactactctttccacagccaaccacacacaagcatttttctgcacaagccaaaatcctactgcacctattntgacagcaaaattctgcataagtgcagatttcgaaaatcacattttccctcatccaatcttgcccaaatcaattcctacaagt

SEQ ID NO: 21456 - DNA, 377 bp, Glycine max
  unsure (1)..(377): unsure at all n locations
gtaagagcaattcctttctttttcttatcattctcctcatgttgattcaatctcataaattccatttcatgttcctataactntctaaacaaagtagcaagagacatgctagataaatctcgtgatttagtaacggctgttaccttgggttgccattccctgcttaagcatctcttgacatccagttgtgccttcatgggttacttgtaatgtatcccacatttcttttgcatttttacaatttgagactctaaaatattcatccatgccaaatgcagaagtgattatatttttggcctttaaattgtattgaacctttcttatttcatcatcatcccattcttctctaggtttttctatagttgcatttcccacta

SEQ ID NO: 21457 - DNA, 418 bp, Glycine max
agcttgtttcaatccatagatggacttattaagcttgcagactaagtgctcaccaacactagataagaatccctcaggttgtttcatgtaaacctcttcttctagatcaccattcaggaacgccattttcacatccatttgatgcaactcaagatcaaaatgagctactaatgccaaaattactcgaagagagtctttcttagatacaggggaaaaggtctctctgtaatcgattccttctctttgagtgaatcctttagcaacaagtcttgccttatgtctctcaatgttgccttctaagtctttctttgtttcgaagacccatctgcatccgatggcttttacaccaacagacaactcaacgagatcccaaacttggttagatgccatagaatccatctcatccctcatagcattg

SEQ ID NO: 21458 - DNA, 466 bp, Glycine max
  unsure (1)..(466): unsure at all n locations
tattaggaccttaaaactcagcttttatccaagctcatcttggtggtgaagctccttcttccatggcttattcccttgtggatggcgcctcctctcacctcttctcctttgtcttccgctgcatctccatggtggaaaatcactattaaaggacctcattgaagctcaaagatccggcctctataaaagccccacaagcaagcttccatcaacttggttgttcaaagagaacaagggagggtacatcccttgtggatcttttgcttgtaaaggattttacaaggttgaaagaaatctcaagaaccattggttgcttggggactagatgtaggcacagattatggctgaaccagtataattcttgtgtttgtctttntcttccctacactctntaattntcgttgtgtacttttaattgtcgcttttacttttggttaagttattgtttctattctttactttctta

SEQ ID NO: 21459 - DNA, 495 bp, Glycine max
  unsure (1)..(495): unsure at all n locations
tcacgacaaatgantttgtctccntgctgggacccggtgaagctctagatgcgagcatgcaaggctgatagacgtatatatgactgactatgatctgtaacgccggtacctattatcgttgaatgagcgagttgaagaaggtgaattatttacatgcgaagcatgctattactcctgatgactcgtgcaacgaggcgaagaacactatgagaaaaggattggtttgacaaacatcttctccaagagatatcttattgatgcatgtgatcacacttgctacagatggtctgatgttgctcacgcaattagaatattgtagagaaactgacgtattaagcgatgtagagaagatgtagtgaatctgatcacacccatatgacaagtggacttgcctctgtgagaagcttttgtgacttactatgacatatctacacacacattattttctacacgcacgcttatgccattgatactgatactgcttctctgcacgcn

SEQ ID NO: 21460 - DNA, 449 bp, Glycine max
tatgagatatccatgaagcttgcacaccatatcaatgaataactgagctaccttatgtgctctgaaatgggtagaaagcatgccgaaatgggactcccttgagaatcgatccacaactaataaaaccacagtagctccttggaagttaggcaaccctgtaatgaaatccaaggccacgtcctcccacagaatagatagagggggaattggttgaagaatccttgaatgttatttagggatatactttgtaagttgacaatcagaacaccttagtgatgtagcttctatggagcttgtaagccttggatcttcttcatcaatgaagtcatttgcttcttgaagtttgatggtagcggaatggagaaggagaaatatgattggagacgccacttcaagaagaagatgagtctagaagaagctcaccaccataggaagccatggataagagc

SEQ ID NO: 21461 - DNA, 422 bp, Glycine max
agcttgtagacctaagtgaagatctttctataccagttacttgcctgcctcccccttgtgagtatcgggggtaacttctatatttgatgaattaattgtgcactgaaagtaacattagaaacaccaagcaataaccatctaatgatcagttacagctacattattacacttgaatatctgaattgtatattctaaatgcctaaagagaatgtccccatggctgtttatttatagtaatcaatgtttaattacagtaataatctaatcccttaattgtagggataataatcaagttaaatcaattacaagaagatagtaactaactaggaaaataaattaataatgtaaataagaaaacaatcctgatgtaaacaccgaaacaatcctatcagaatgatatcttaacacatatcagaatcata

SEQ ID NO: 21462 - DNA, 442 bp, Glycine max
  unsure (1)..(442): unsure at all n locations
tctacttatgtggcagggcgggcttccttcactttcttgtctccaacgcgagctntgaccactgctcttccttcccacgatgcttcttttcatatccgcctgagtgggcttatagcctaaaccatacttcccacgatttcctttggcatttatcaggctagttatgccgccgttgtccttgcctaaacccattccgggttcgtaaccgttccctaacataactcgggccatcattactgctgcatcggacaggcaaggctgcccaaagaaggagtccacggaggaaatgctgaccacctcaaaagactggaaagcagtttctaacgattcttctgcggcttccacataaggcatagaggattggcagctcaccaagatgtcttcctcgcctgacacgatgaccaagtgcccctccactacgaatttcaacttttggtggagt

SEQ ID NO: 21463 - DNA, 423 bp, Glycine max
agcttcagtatcatcattcatcacctatgagcaactccttccatggccaattctacgagcatttgttcatagagtcttcatcctacctttaactcaaatgaatcaaaacttcattacctcacaaatccttcgtcctgatgaactaattttactcattaatttggtccatggataaaactagaacatgtcatgcatcgtcatttcagtaatatagaaaaaggaaatcaaaattatttgaatataacaaaaatctgacaattgtacaatcaaaaaccttgggcttagactctgatatcgtggaaggaaaagtgcaacattaagcctttaaataaaaaagatatatattgccgtatatggatgattaatttattttgctatgaaaaggtgaaaagaaacgaattaagagtccaggcataaccttat

SEQ ID NO: 21464 - DNA, 435 bp, Glycine max
  unsure (1)..(435): unsure at all n locations
taacaagtggaatcagaggaaagtctctatggcaggcagaattactttaattaattctgttttgacagccttgcctttattttatctgtctttcttcaaagctccttcagcagtgttagtgaggctgacttcaatccaaaggaattttttgtggggaggaggtgctgaagggaaaaagatcgcttggatggcttgggatcatatatgtactcctagaaatcaaggaggtttgggtatcaaagctatcaaggatcttaatagagcccttcttattaaatggaagtggctgatgttccaccaatcagaccaattgtggtgcagaatcctcatctcanaatacaaaggatggagagggttggaagagaattcccacaggcagtctcattccttttggtggtcggaattgaaggctgttttactccatagcagcatgga

SEQ ID NO: 21465 - DNA, 341 bp, Glycine max
agcttgtaatcgattacacagtaaggaatttttcaaaataactcccaagagtcacaactgttcaggaagtttttgaatggccatcaaaggcctttaaagacttgggatacgaaattccttagaggttttctgaataacattttcttatcctctcaaaaccaaattgtcttatcattctcaaaatattccttggtcaaaacacttgcaaattcaataaggaatcttgatcgatcttcaattgtaatatccttctcttaaagagagaaaattcttcttcttcttattcaaacagatctgtataagagaccgaaagtctcttcagttgtaaaggatatttaaca

SEQ ID NO: 21466 - DNA, 428 bp, Glycine max
  unsure (1)..(428): unsure at all n locations
cgcttntgaacgtgatcagtatattcattggcatagaataaaggatgaacacgtggttcgtgatatcttttggtgtcaccctgatgcagtgaaattagtcaacacatgtaatctggtgttgttgatagacaacacctataaaacacaccggtacaaactcccattgcttgattctgttggggtgacaccgattgtgatgacattctctgctggttttgcatatgtggagggtgaacgcgttaataatttggtctaggctttacaacgattccgaggcctttttttaaagcgtgatgccctccctggagttattgtcactgacagagaccaagcattgatgaatgtagtgaaggctgtattccctgactgtacaaatttgttgtgcagctttcacataaacaagaatgtgaaggccaaatgtaaatcac

SEQ ID NO: 21467 - DNA, 553 bp, Glycine max
  unsure (1)..(553): unsure at all n locations
cttctcctattgtcgttcacccattcttattctaangaacgtggtatatattatatatctaataccataatctaccgccatgtgaattcgtgtcgatcccgggacctgtagatcgaccagcagcatgcaagctggtaacaatcaatgcagacatgtattttgcttgtactcataaccgctcatgaacgcgtgaaaaggattaatttagtcgttgcaaggcaacctattattcaagatcacctgttaggaaaggcatctaccaatctggaagaaggcacgtaaggaaaaaattattcactaaggatataactatcggagaagagtttaacttagattcaggcgaaaaggtgtttctgacaaacataacttatctgtgagagaattccttaacaacctgtgttgacaaatggatctcaatgatgacccaacaagcttgctttgtaactaagatccttgagaagccgtttgcgtaacaccaacagacacactcacgagataccaaactaggtgaaatgccatacaattcatctcatacctgcttagatcgaacccn

SEQ ID NO: 21468 - DNA, 419 bp, Glycine max
  unsure (1)..(419): unsure at all n locations
nntgtccgcgaaaggtcatttgaaactgttttaatgtccaacgcctcaaatggtcctcttttcttttatcggttaaaatggaccattcaaaagtataaaatcaacacaccgcataactttagttcttaaagaactacgtaggtttgatttcctcaccgtaattgagaatacataggagcaaaagcccgacttttgtcgaccccaaaaagggagagaatgttaaaggtccaacgccttaacgtttctcttcttccataaaaatcaagagatcgttaaaggtccgacgccttaacgattctctcctttaaaatcaagagattattaaaggtccaacaccttaactgttctctcttttcanaaaccaagaaatcgttaaaggtccaacgccttaacgtttctctcctttcgaaaacaagaga

SEQ ID NO: 21469 - DNA, 404 bp, Glycine max
acttgttgctctattttatatcctcaatggcgtgctgtcaaaggcgattctctttcctgtgcgatgcatgctcattacttcatgataactcgtgcttaagaggcgtcctccattctggactaagtcttggaacgacgaacataaccatcaagagattgcatattcattgcaatatatgacacttgtctaggacggtcttatgctgcatactcaatgaggggtattgtgagaaacttacttgataagctttgtagacaagtctgagtttatttgcacacacccactgacatgttaacttatctctttgagatgctttcgtgagtaactatagctcttcttctgcacccttctaatatctcaccttcccctctgaccatgtttctgataatgcttatcttctcact

SEQ ID NO: 21470 - DNA, 435 bp, Glycine max
  unsure (1)..(435): unsure at all n locations
tcattcttacacctgaaaagaggatgagatagttgcacaaaagagaaagctttatgatcaggagggagctaacaaaaattttcatgcaggtggaccttcttctaatagttcagacttgcagcagtgatgtgccattattttatcctatttcttaacccttttgcaccattttaattagtgattagccttaattgtcaaattaattatgcagttttatcatttgggcctactagattaattttgtgtttttaatttaatttcaggagaattctaagcaattgggcttgaatctagaattgggcttggacttgaagagagtagactattttattctacaaaaatgtatcttatctagattntatcttatctagatattatttagaattgatctcatctagatattatttcatctagatcttatcttaacttatctag

SEQ ID NO: 21471 - DNA, 418 bp, Glycine max
agcttgtaggattatggggtacccatcacatgtggtactaggtggcggtcgggcgatggtgcacaacaagttttccacatccacaaagcgcgcataaacccaccatcccctgttgcccacctccaactgagctcacgtactcccacgtagcccatatcctcttttctctcaacaccgggtccccatcaatcctcccaagctttcccaacatcaaagtaaaacgacattcaaacagcacaagctatcacagccaagcaaaacagagcaaaggcagaaaactctgccaaaacaccaaccaaatcacagcttttctcacttaaagactccaataacaattccttcgttccggttcattaaccgttggatcgactcgaaaattttactggaagtctttagtacataagcctacattatgacc

SEQ ID NO: 21472 - DNA, 427 bp, Glycine max
taacataaggcatgcgaagagggtggaattcctatagcaattcccttatgttatcaaacataaaaagggaaaaggtaatattgtagccgatgctctttctcggcgtcatgcattactttctatgcttgaaacaaaattgattggtcttgaatgtttgaaaagcatgtatgaaaatgatgaaacttttggagaaatttttaaaaattgtgaaaaattttcagaagatggtttctttagacatgaaggctttcttttcaaagaaaacaaattgtgtgtgcctaaatgttctactagaaatttgcttgtttgtgaagcacttgaaggaggtttaatggggcattttggggtccaaaagactctagaaacattacaagaacatttttattggcctcgtatgaaaaaggatgtgcagaaatcttgtaacatt

SEQ ID NO: 21473 - DNA, 403 bp, Glycine max
agcttctccttccattgcttattctctagtggatgacacatcctctctcctcttctcctttatcttccgctgaaactccatggttgaaaatcactattgaaggaccttattgaagctcaaagatccagcttccatagaagcttctcaagaaagcttccatgaagtggtatcagatgacaagagtttcaagtaggtgctccttaaacctccattaattttcaactttaccttctcctacattgttgtttcttcatttttctccatgtatctcctcacatgtcttgtgttgaatgttgctagcatgattttttagaatttccactgattaagattgctacaaaagctagatttgatttttatggttcaaatttcttattcttgttcttgaaccatgaatcgtgtt

SEQ ID NO: 21474 - DNA, 435 bp, Glycine max
  unsure (1)..(435): unsure at all n locations
tcggcagtggccatgttgacatccctcaactcgccatactctntcctgaccctagtggctgccatcttgaacttttctttgaccactcttgttctttcaagtttttcctttagggcttgcacttcctcgcgagcaggaacttcagcttctcccccacttgaaatctttagctttgggagccaagctatcccttgcgtccgaacctttaaccatttatgatagctgccaataacaccattgctgcttcctctaagctccttatcttttctatccacggcattccacactttttggactctctgaagtatttttgcattgctttcactgaaacctcgtgcgatgaaagggacgataatctcttctgatggcacccctctcacagggtagcctagttgtcttatggccaacatatgattataattaatacaacctctt

SEQ ID NO: 21475 - DNA, 289 bp, Glycine max
  unsure (1)..(289): unsure at all n locations
agctttgatgtaacatttggagaggttaatgtaacaacgagatgatgcgctccatgagaggttggatcaaatggagaatatagaccatatgaattgctcaagagcttccattgttcagttgcgagcgactagatatataatgcgcctcaatcggacctccgagttaaaagttatgaccatttgaaatgctcagagcttccattgttcacatttgagcgcttcgatatattatgcacctgaatcggatctgcgagtgacgacttatgaccatntgaattgctcaagagct

SEQ ID NO: 21476 - DNA, 384 bp, Glycine max
  unsure (1)..(384): unsure at all n locations
ctngagcaattcacatggtaataacttttcactcggatatccgattcaggcacataatatatcgagacgctcgacactgaaaatccgaagctattgagcaattcaaatggtcataactattaactctgaggtccgattgacgtgcataatatatcgatacgctcgaaattgaataatggaagctctatgatcaattcagatggtcataactattcactcggatgttccaataccgtgcataatatatcgagacgctcgaaattgaacaacggaagctcttgatcaatacaaatggtcataactttatactcggatgtcggacttatgcgcataatatatgcatactctctatatgtacaacggaacctcttgatcaattcaaat

SEQ ID NO: 21477 - DNA, 354 bp, Glycine max
agcttcaatctaaacctcctctttcgtaaactccactatgtggcgattgaccacatcgtaccctgtctcttatgattaagactcctaactaaccctccctcaatgcaggtagatccctaaatcaagaccaagaaacaaaatctcggaagaaaacccttatgatactgtcactagcaggaaactagcttagcaacatgaaggcactcattcgtcatgcaagattaagggacttcttgatatacttgatttttacatatagagaaaattcatgttgtcttgccaatgagtctgactccatttgcatatattatatgcatggtactaagtcttgacttattattatgcttggatatt

SEQ ID NO: 21478 - DNA, 428 bp, Glycine max
  unsure (1)..(428): unsure at all n locations
cgacctantggatcattatcagntgtcaagataatgcgaactgcctacaaaaacaaagagaggaaaccaatctactaagcagttcacttctgtgttagaaagatccaattgaatgggaagagaccaaatgtgtgtaccttatccaagtactctttgcagtttcacaggtatcagaatgcagtgtcctgacttcatagagacaagcacacacaaattaacatattataaaagctagagtaacataaacagaatttatacataatggcaatataacacatcttcaaagaagaagcgagctatatttggacaattttgctataaaggaaatttgctatgattagtacgtacaaagaaaaaacagaaatccgtttagatagaatcttcttttcaaaattagaattataacttataatgtttcttagaatgaa

SEQ ID NO: 21479 - DNA, 416 bp, Glycine max
  unsure (1)..(416): unsure at all n locations
agctngagttcgttgttgctgcctcataatacccctcataacttggttcggccctattctccttttcagccctctttatttctcattttaatgcttcnggtatggccacattgacgctcctcaacttgtcatactctttcctggccctggaggctggcgtcttgaacttttccttgaccattcatgttctttcatgttccgctntcaaggcttgcacttctntgctctcctctaagacttcggcttctttaccacttgaaatctttagcttcgggagcaaagttagcctttgcgtctgagccttcaaccattgatgatatccaccaataacactattgccgcttcctctaaagctcttatcctttctttgcaccgcattccatgcatttcaaatattttcaagcattttttcattg

SEQ ID NO: 21480 - DNA, 429 bp, Glycine max
cttggtctctacagatcttcacacagtaaaatctctcattactctctagaacttggacctttctctctctggaatcactagacatgcaaagcttcaactcttagccccaaactcccctcacaaaatctgatttcaggcttaaataggaggccttgttagtgctcgtgcgcttagcgcaattctgcaccgcttagcgcacattagtgaattttggcttagcgcgtgcttttctcgcttaatggatggattgaagtggtgcacttagtgagatgaagcggtgcgctcagtgaacctgtacaactcatcttcttccagattcttccttgcacttagcccatgagtgttgcgcttagaaggtgaaaatggcatctttcaaagtcgcctaattaacctaaaattaagagaaaatgattatctaacacacaaaat

SEQ ID NO: 21481 - DNA, 405 bp, Glycine max
  unsure (1)..(405): unsure at all n locations
agcttgtgttgatgagaaataacgagctatatgattgatggcagngcttctattctgtcctcgatgctcttggtgacaatttgtgcatagtacagtgattaagttttgtacatttggttattgattntcttataattatttagattttaacattattatacaattattctgttatgtgattcgtaaagggtactaatagactgattgataggatgtgtttcccctttatattttctacaacaatgcctttttttattggtagagtagatttttattttcatgttaaatgtctttntattgaaataacatcaaggacgagctcataaacaacttatcaacgacctcattcttgatcacatggataatgttgtaaggtacagttatatatgctacgaacttgtgatt

SEQ ID NO: 21482 - DNA, 122 bp, Glycine max
aataatgtattggctaaagatcaatgctatgtttacttcagatgctgggttcttgcctacatgtcaggctcaatgagactttgagccctctaaaaaacttgaatgctcaagatacctttagt

SEQ ID NO: 21483 - DNA, 410 bp, Glycine max
agctttataagcgcgggtctgggagacataggtcaagtggtcgcgatatgcgaagatgatgttccgagtacattggatttggtacgaccatgccctcctgattttcagctgggaaattggcgagtggaggaacgccccggcatttacgcaacgagcataatgtaaacctttacggttttaaaagctctatagttgggcctaggctttagagtttttccttttgttaaggctttgtgtcttttgtttttgaatttataatacaaggatctttcttcatctgttcctacgtctctacccattatcattcatttgcatgtttacttctttttctgaaacggcagatccgatgacgagtcccccgaaggtactaatacctgggacccgcctatcgacttcgagcaagaaatgag

SEQ ID NO: 21484 - DNA, 283 bp, Glycine max
  unsure (1)..(283): unsure at all n locations
tcttagtctcgactgatgaagatgaatntgtggctacttcatgcactcctctaatgacaatagcatcacttctagcactaaattgctgggagtttgaagccatcttctcaattaaatttcttgcttcaacaggggtcatgtctccaagggctccaccactggcaacatctatcatacttctctccatgttactgagtccttcataaaaatattggaggagaaactgctctgaaatctggtggtgagggcaactggcacataattttttaaatctctcccatat

SEQ ID NO: 21485 - DNA, 405 bp, Glycine max
agcttagcctatcatattatggttataactaagcctaacaaacttttagttagttagttaaaacagaaaattgaacagagagcaactaggtagaacccagtgcgtacactgtcattcccccgtcaaactcatggtggattcagctaaaaggggatgctaattcaaagtttttctcaggatggcgttagggaaaagaaggaagaattcaattgagatggatctggaagatggagtctatttagggattctggggttattgcttttgaaatttccagaatttatatggagatttttcataggagggatcctctaggccatttttagaggggctggattgaaatcccattttgtcagaaaaggctacatcgttagaaagacctttgtatgtctgtttttcttttggat

SEQ ID NO: 21486 - DNA, 434 bp, Glycine max
tactcagcttgaaaacaatattgtaatatcaatcagtagtgttgtgatgtagaaatttattggctgttgaagtgcatagttgtagtttttattttttgttgtcatgtttgaatagctgaatgggatagttgactttggcataagatagacttaatatgaacttgtctgaatctataaatccctaacgagaataatttatcaagcaagtttaatatgcaaattgcatgtgcccccaacaaggatctctcttctgaacaaaggaaaggaactattttcctataatatgtgcatgtttgggaaaaaaattctgggagaatttacttctttttttttaaagctctctcaagtagatggcaaaagtgggcgataatttcttcaaaataagttaaaccaaacctgcatttagcctgctaatcccaaattctgaatacatc

SEQ ID NO: 21487 - DNA, 413 bp, Glycine max
  unsure (1)..(413): unsure at all n locations
agcttgngttcctaggcctagaattgcattcgggcactcattttaaatcatttatgctgtccctatacatataaaacagtcccacaacccaaagctcacaaaaccatgctcatatctcgttgaggcatttcaccgagcacttggtgggcgcatgtttaggcacgaatatcaagagaatggggacaatgtggcatgcgccatcacttcagaatacaccctaggccaagaccatcccttacaacccctcaatttaacaaaaacaagcaacaatctgaggataaatccctcacgtttcttagcaaacacatgcaatttagagcaccaaaatacatcaatggaaagctagaaagcccaagaatgaggtacttacttgttggagacgaataatagagcaaaacggaatcaaaaacgca

SEQ ID NO: 21488 - DNA, 427 bp, Glycine max
  unsure (1)..(427): unsure at all n locations
tctccccaattntctataatagggggagaagtgatgtgaaaaagggttcagccccttaagcacttctctctctttcgaatttgcttagaaacattgtttccgtgaagaaaatccaagccgaggcgcttccgtaacgtttccgtgagtgatttcgcgaaggttttcgaccgttcttcgacgttcttcattcgtttttcatcgttcttcggtcttcaacgggtaagtacctcgaaccaagcttttcgattcattctatgtacccgtggtggtccacattgtgtttcgcgtattttccttctcgttttcatttactttccgtaccccttttgacgtgcttaagccattttttttaagtcatttctcgcttaacctaaaaataaaataaatttccaccgatcgtttgaatagtattatccgttaacttcgt

SEQ ID NO: 21489 - DNA, 381 bp, Glycine max
agctttgacttgagtcatcaagagattataaatatgtgaccatggcataaatttaaaataggaatctatctttcaatcttctctcaacatcattcaatatctttcaactctttctacagaattttctgattcatttctcttcatctttctaaaagtttttgttcaacactttctcttcaaagaaaagttctttgttcaaaaacttgtgctattcatctttttcattctcttctccctttgccaaaagaacaaaaggactaaccgtctgaattcttttgtgtctctcttctcccttacaaaagattcaaaggactaaccgcctgaaaattcttttgattcttcccttacccataaggaaaagatttcaaaggactaaccgcc

SEQ ID NO: 21490 - DNA, 361 bp, Glycine max
attggagaaagaaatgaatacagatagatgatgtacgattcacagattagattaactgccttaattaagagacaaaagaggttaaaacaatcaagctcatcaatacaagagagttgattatgcttagcagtataaaaagtatcactaattttagtatcaagttctttgaattagattataccccaccaactaacctttctatttaggagtcatgctctgtactaacaactatggcatcaccagctacaatgtgagatggtacctgtttcatacaaaactcatctctcaaattttggtaacctcattgtaaagggacatctaaataaacccatgtgcaataagtaacataaaaaaaattccc

SEQ ID NO: 21491 - DNA, 398 bp, Glycine max
agcttgctcaatgttgattgttggggttgagttcatgtatgcttggagggtgcagtttgtgtcttatatggatgttagttcaaggtggtgaattgttgggttgtgactaaaatccatatgaaagtttattctgttatttttttatgttttgtcctctgcttatataaggcaaggatgtcctgtatttttggaagaagctttcacttgtatactgcgtcagtaataaacagctttctattttccctcccgtggatgtagccttactcaaggtgaaccatgtaaatctggttctgtgttctttctctcttcaacttctctttcattatgcagcaacattggtatatgacatttctgttccgctacatctactgctgctgttcttgcttgttcttcatcac

SEQ ID NO: 21492 - DNA, 241 bp, Glycine max
gaaactcagcttacaagagattcgactgctaccatgaaagaatgtgaaattttataggagttggggcaaccttgattgtgtcaccataacgaacacctatggataaaccattgtcgagagtataaaggtgagcaaaacactgtgcgccatgataggataatataacaattgttgtttgtgctttacaggaatccaatggcataagtgttcttactatcgatgagttgcatgggaattcact

SEQ ID NO: 21493 - DNA, 399 bp, Glycine max
agcttttgagcaattcattatggtcatatttagtcactgggaggtccgattcatgcacataatttatcgagacgctctaaattgaacaacggaagctctcagaaaatttaaatgctcataacttttaactcggaggtccgattcaggcggataatatatcgagacgctccaaattgaacaatggaagctgttgagcaattcaaatggtcataaatagtcactcggaggtccgattcaggcacataatatatcgagacgctcgaaattgaacaacggaagctctcaagaaattcaaatggtcataacttttaactcggaggtccgattcaggcgcataatatatcgagacgatcgaaattgaacaacggaatatctcaagcaattcaaatggtcataact

SEQ ID NO: 21494 - DNA, 418 bp, Glycine max
tgcatttggaattgcgaaagccccactccatcattatgattagtacctgacatctcaaacaaacaaatcaaacgtaacaagacaattatagttgctgtttgaatacctcacccactctcaagtgtatcacacaattatggcttttctctaatgaaacactcttgccttttaccactctaattccccttgagttcttaggcaattcaagagattatggccacaacaaagaacaattcaccaatatgtgtaaggtaaggctagagagacaaggaaaaggttaaccaagaaaaaggctaacaatgtttttaggcacaaatgaaggaaataaaattcagaatttatgaattcaagtaacaatccttcatgcaaccaatatattaccttaaagagattttttttttaaagttcttcaagcatg

SEQ ID NO: 21495 - DNA, 399 bp, Glycine max
agcttcggtattcaatttcgagcgtctctatatattaagagacttaatcagacatccgagtaaaaagttattgtcgtttgaatttgctgagagcttcagcattcaatttcgagtgtttcgatatattctgggactcaatcggacatccgagtaaaaagatattgtcgtttgaatttgctcagagcttcagtattcaatttcaagcgtgtcgatatattacgcgactcaatcaaacatccgagttaaaagttattgtcgtttgaatttgctcagagcatcaacattcaatttcgagcgtgtcgatatattatggggctcaatcagacatccgagttaaaagttattgtcgtttgaatttgctcagagcctcagcattcaattttcagcgtctcgatatat

SEQ ID NO: 21496 - DNA, 358 bp, Glycine max
acacataaaactcaagctttttgttcggtattgcctaaaaaatttgcaatgtatttcggctatgtttcttcgtgcgagctcaaccgaagttgtatttcggccgacgccggcattttgtcggccagtaaaacattagcccacctcggctaaaaaaaaacatgattcaccggtattgacagaaaaaaatgctggccttattcggccaggaaagatgaccgatcgaggtctaaaaaagaagcatgaccggattacgccgatcgaacgtttcctaatagatatcctccaagcattattcagggattgaatggaaaaaacaatagccgacatcggtatttaaacagctcgtgacgattttttt

SEQ ID NO: 21497 - DNA, 386 bp, Glycine max
  unsure (1)..(386): unsure at all n locations
agctntaacactcaactttcatggaatagtcgtttaaagataacagagaaagtaaagcttcaaggtaataataagataaagataaaatccagaacccctcacttgcccttctgttaactccaaaagttgtggcaacaactcttcatccctcattctctcaattcgtttcgatattgaatcaacagaatatatagccactgttaagcgtgaatgcagatccttcacaactgaccgggtcttgtcaatcacatgagtgccttgatctttagcaaattgatgcctaagctggtgacattttcggccatagtccttccttatggattcactagcctacagatagccgaacaggaggtcaaaatgatcgatgattgataacacaaaatttg

SEQ ID NO: 21498 - DNA, 347 bp, Glycine max
tgtccattggtcaagtagaatgatatctctgatatgttgttagccttcccctggctgtttctgccaagatgactagaatccaaatctataaagttattaactctctatctttcctccttttgcattttaatacttttcaggagctaaaaagagagagagcaaaagcatcccttgctatcaagtcacttctagaaaagatggaagagaaactgaagacagaactagaacaaaaggtgcacatttagtgttttgttgggtttacacttactgatttcccactttctcgacatgtatgctggtagtgttatcagttactatatagtatttgttaaataaaatgtatcttt

SEQ ID NO: 21499 - DNA, 397 bp, Glycine max
  unsure (1)..(397): unsure at all n locations
agcttaagataattatccctatactactacttgttcttaattaggtctacttcattccaatggcttaaggtacgtaatagcaaaagacaaagcaaaatatcatgggagatattttatacataatatacaatagtggtgcattttgttggtatttgatgtggtgatgtaatccatgaaagtgatgaaactatttttgacataagaacaatggaagaataatacaatattattatttattttcatatcaaattaatggcttcctctttaatttcttcctcacatacaggctcctattaatgttatagtgatttgaattatntgaccacttgcatgttacatgattttcaaactacttataatggatactgcatattatgatatgcttatttgtttctac

SEQ ID NO: 21500 - DNA, 398 bp, Glycine max
tatataaactgttgacataatacttatgtggcaagctattaaataaagtaaaaaaaataaaaaagtgtcttgataaaaattgaacgcataacatattatacaatgacaagacaataaatcactacactacttgctttgatattagttaattttataagaattattttatgtgtatcactatatcaaaagatattaattatttttttaattataaaaatttataactatacaaatttatttaatatataactatttctacttttatttcattaattttacatatttgtatttagaatattttttttttaattttaccaatttataattaaatttcataaattaatatgtaaaatatttacataaaaagctatatacaccaaagctcccctatttaaata

SEQ ID NO: 21501 - DNA, 388 bp, Glycine max
  unsure (1)..(388): unsure at all n locations
agctttataagcgcgggtttgggagactatggtcaagcgttcgtgatatgcgaagatgatattccgagtactttggatttggtacgaccatgccctcctgatttccagctgggaaattggcgagtggaggaacgccccggcatttacgcaacaagcataatgtaaacctttacgattttaaaagctctatagttgggcctaggctttagagttttcattttgttaaggctttgtgtcttttgtttntgaatttataatacaaggatctttcttcatctgttcctggtctctacccattctcattcatttgcatgtntacttctttttctgaaacggcagattcgatgacgagtcccccgaaggtactaatacctgggacccgtctatc

SEQ ID NO: 21502 - DNA, 389 bp, Glycine max
  unsure (1)..(389): unsure at all n locations
aaaactaagcttgaaaaatggatctcttttntaataagatttcacattaaagatcgttagcataaattcattttagaatgattcaaatcctccaacaacatccacttactgatcctcctgctcaatataaaaagtattgatattttcatgtttctaatacattaaatagattaatantttttaataaagtatgaggaagatttattggaggatatatgttagacaagccagctgactcctcctaagatcaagagctgntatgcttatcagtttgttatcaacctgaaatgtatttgctttgaattgtagatagcattaatcaggttgttactattttaaatctaaatgtgctaaatcttatctttgtaatgcttctgatatatacactt

SEQ ID NO: 21503 - DNA, 421 bp, Glycine max
agcttgtattgtcactcagatcttgactagttataactttttgaataaaatgagtttatcccgcgtttttactccaaagatcaatgcgaatcaaaacactcccgcattttatctctagcatgcattcatatcatgcattgcataagcatctcttcatggcatcataatgaacatatcattcctgcatttgtccgttatcatattccaacatcacattttgcatgagtcattgcatcatcatgcatatgcgttcaacatacttcttgatctacaaactgcataccttttgttttcatgttcgatcatgtgtgatccttgcattttcctctacaaaacaaaaacaaaaagggaagcatgaaaattcatgatgcattcttagttgcatatattcggtaccatgagccaaccatgttgggatcat

SEQ ID NO: 21504 - DNA, 452 bp, Glycine max
  unsure (1)..(452): unsure at all n locations
gggtcgagnaagaattacctgcattcgtgacaccttaatctcaagcttctaagtgaaatcaggtgcagccgnctncctatgagtcctctctcgaggtggnaggtgatccatgttctcagtctaaaatatatttgtggaatgctcaaaatcagaattttcagaatcccccttcaaagagggcttgaaatttaccggagggaccggtatgcgcactatctctaactggtctgtgaagtgggggctttattttttgcccaaggggttgaaaaacactatttgtgccccaagattgctctttttgaaggaaaattggtttcctcaccccccccccaggggggggaatccacccttctctcccgcctttgaaaaactttcgatctttgcggggcccccccctcttttttaaaataaacactaaattttctatttaaatacgttttcttttcaccccc

SEQ ID NO: 21505 - DNA, 422 bp, Glycine max
agcttatattctaaatccaatcgctatatatctcaatggtaacaaaaaaaatactttaaaccccgtgaatagtgtatttggttaaaataaggtaaatttgaaatcgcaaaaatcttgatgctaagctattgaaagttataaggactaaaaccaagtccaaagaataggggccaaatttatattttaccctgacaggaaacatctggtcttggatttattgaaggaaaaaagattcactacaggaatagcaacataagcggtttctcatatccccactctttcagcaaagggtttcttcattcatccttcaggtacttttcaaggatcagagttaaaatttaacttcagtaatctacattaatgtttaatgcaaacttctatcatatgaattacagaagtaaaactccaattctaattggaaa

SEQ ID NO: 21506 - DNA, 406 bp, Glycine max
acagctgattaactacaaccaatattggtgatttatctaagcaactaaaagaagaactatcgtggggatgctctatatgcaaccgttgatggatagtttgaggacttgagaggaggagacactgccttgctttcttgacccccaagctctctgtcaagcaacttagctgcccttggatctgttagtagtgtcttctggaaggactgtgagaagccagttgcaatgatagtcacatgaatctccccattgtagcgatcatcaacaacggcaccaaatataatattggcagaagggtcggctaaacttgtcaccacctacagcagttatgaagttttgaaaacaggatacaaatgttcacaacaaattcataagatcaaaagaatgctgaaatgttccttctgacaat

SEQ ID NO: 21507 - DNA, 412 bp, Glycine max
  unsure (1)..(412): unsure at all n locations
agctntaaaagattggctaagattntgttaaaacataagcacttagacaatgaaggaaagctggagttgctgcacatgatgtccaacgttatgtcaaagaataagatcgggctgcacaatgcacaaggcaagataaagtgtcaaatgaagaattgaagctgcaggattcacgatgtcggatataatgtccaggacatcctgcctgaaaatactggaattgctaaaagcattgaagctgcaggatccacgatgtcggatacaatgtccaggacatcctgcccgaaaatactggagttgctaaaagcattgaagttgcaggatccacgatgtcggatacgatgtccaggacatcttgcccgaaaatactggacatataaatctgttatatctttaacagattattgtgcagtta

SEQ ID NO: 21508 - DNA, 444 bp, Glycine max
  unsure (1)..(444): unsure at all n locations
cgtgacctatgaaactcagcttcntgagagaacttccttgagaagctagagattatctacacacacccctctcataactaagctcacctctntgagaagcttccttaagagattcctaaagaagctagagcttagctacacatacctctctaataggtaagctcacctccttgagatgagaagctagaacttagctacacaccccctataataactaagctcacccccatgacaaaaaacatgaaaatacaaaaaaaagtccttactacaaagactactcaaaatgccccgaaatacaagactaaaaccctatactactagaatggccaaaatacaagcccaaacgaaggaaaaacctattctaatatttacaaagacaagcgggctcatacttagcccatgggctcgaaatctaccctaaggctcatgagaacccttgggcct

SEQ ID NO: 21509 - DNA, 419 bp, Glycine max
agctttgagccaaaatcccaactcaccatataccttgacacgagatgagaatttctatcgtcacccttggaagaaaacaaaaaaagaaaaataaagttcccaatcaaagatcggaagaaaacaaaaaagaaaaaagttctcgatcaaagatcggaaggaaacaaaagaaaaaaaaagttcccagtcaaagatcggaagaaaacaaaggaaaaaagaaaatccccgatcaaagatcggaagaaaatgaaagaattatacagaagggtctttggaccagacaaatatccaaacaatacagaatagtcacaacccaataaggaaagaaaggaaaccatgacttgaagtggtcctctccctttgattgccaaccaaaatcttgtgcgctgatgactttctcgccccgcactaaacaaaaacag

SEQ ID NO: 21510 - DNA, 425 bp, Glycine max
ggtgcaaatcaaatcactcctacatttcatctctagcatgcattttctttcttaccccctcctcacgtttggtttttttagggaaaaacaccataactaaacgcgccgcaaggtatccctatcgcaccagatccaaatctagaacgatgggtgatcaagaggagacgcaggaacagatgaaagccaacatgtcggctctgaaagaacaaatggcctccatgatggaggccatgttaagtatgaagcagctcatagagaagaacgcggccaccgccgccgctgtcagttcggctgccgaagcagacccgactctcttggcaactgcgcaccatcctccctcaaacatagtaggacggggaagggacacactggggcacgatggcagccctcacctgtgatacaaccgagcggcttacccttatgga

SEQ ID NO: 21511 - DNA, 419 bp, Glycine max
agcttgcttctacaatctccccctttttgatgatgacaaccctgaaatcaagaaacacatacacattttttttcctagtcgatcactcacttaattctccatattctccccctttgtttttgagtttaagattcacttgaaattaagttatttaattatatgatttcttgatttaatccctattttctctccccctttggcttcaataaaaagccaaagtctgtaaaaaatataaaaacatacataaatgactaatcatacaagagaatagaaaagaatcaaacaagataacttaaccattcatcgaaatagaaagataatacttcataatatgtcatataatccagaaagtcattcataataaccaaataaaactactaatgcaggaagaaaaaatgctagtaagtgtttttaagaca

SEQ ID NO: 21512 - DNA, 439 bp, Glycine max
gtgacactatcaatctcagctttgcaagctggaatcatttatcctatctccgacagccaatgggtgagtcccatccaggtagtcctgaagaaaaccggcctcactgtgataaaaaatgagaaagaggagctgattcctactcgggtgcagaacagttggagagtttgcatcgactataggaggctgaaccaggttaccaaaaaggaccattttcccttgccattcattgaccagatgcttgaacgcctggcaggtaaatctcactactatttccttagactttttctaaacaacattgtctgatcctctcaaaaccaaattgtcttatcactctcaaaatattccttggccaaaacacttgcaaattaaataaggaatcttgatcgatcttcaattgtaatatccttctcttaaagagagaaaaatcttctttttctta

SEQ ID NO: 21513 - DNA, 410 bp, Glycine max
  unsure (1)..(410): unsure at all n locations
agcttgcctcanagatgtccaggaaggacaaggcggccgaaggaactagttccgctccggagtatgacagtcaccgttttaggagcgcggtacaccagcagggcttcgaggccatcaagggatggtcgtttctccgggagcgacgcgtccagctcaagacgttaaagaagcgctactaggaggcaacctagtaccttttaaatctctgcttgttatttgatcagctttgtttctcaagtcatagtgggacacacctagttgctcatgatcctaagaatttaaataaaacgagcacaagctcggaaggtagtcatacctcacaaaatatatgtatgcgtgtttaggtagtgaaaaataccttatgcatgtatgtaatttaggtagcaaaaaactacctcacaaaatatata

SEQ ID NO: 21514 - DNA, 250 bp, Glycine max
  unsure (1)..(250): unsure at all n locations
tgtagaatggccagacatgatacatgtcaaggtttgtttnggttcaagggtaaaagggatgccccacattatttccatgacacaaatgcaaaaatgatgatttggaaactttatgcaaaactggtcatgcatgcacctatgcggacactcaagtgtcaaatntttatggtcatgtgatgctaaggctcangattcatttcctccattgtaatcaacccaatatttccaaaatatgttcttttatcaattt

SEQ ID NO: 21515 - DNA, 405 bp, Glycine max
  unsure (1)..(405): unsure at all n locations
agcttgcattnggaattgcgaaagccccactccatcattaggattagtacctgacatctcaaacaaacaaatcaaacgtaacaagacaattatagttgctgtttgaatacctcacccactcaagtgtatcacacaattatggcttttctctaatgaaacactcttgccttttaccactctaattccccttgagttcttaggcaattcaagagattatggccacaacaaagaacaattcaccaatatgtgtaaggtaaggctagacaaggaaaaggttaaccaagaaaaaggctaacaatgtttttaggcacaaatgaaggaaacaaaattcagaatttaggaattcaagtaacaatccttcatgcaaccaatatattaccttaaagagttttttnttttaagttc

SEQ ID NO: 21516 - DNA, 392 bp, Glycine max
  unsure (1)..(392): unsure at all n locations
cttgttctttntataaaatgagaagttatggactcatctcgttatctaaaaaccttggggtggatccaagtgctccgatcatccatttgcatactcatgttttggtggcatactcaccgttgtttatttctttaggaaattcatcataactaagaaaacaccaaggcacccctataacactcgatccagaaaaatggataatgaagagggcgtgtaggaacagatgaaggccaatctatcgtccttaaaagatcaaatggcttccatctcggaggtcatgttaaaactccagaaaaccatagaggacaaagccacggcaaccgcctccagtgcggttagggaagcggagccggtgctgcaacccgctttaaatccgggccgagaaagaaaca

SEQ ID NO: 21517 - DNA, 403 bp, Glycine max
agcttgcccccttctttcataatttacggaaaagttacggaagtatataggacttgcttttcttcttttttctcttccttcccacccatattaagtgaaatatgcttatttagggttatgggaattttacggaagcactacgggtgtcccggaagccccgaaagcccattttttaacaaaacgggggaggtggttgccaccttaagcaagaaaatgcccagaaacctggcccaaatttgaaaattactatttgcaccccccattttacaaaatacaccccttttgccccttttttccataacattacggaacctcacgaattacgtaacgatacttgttttctttccgtaatgtcacaaaactttgcggattacgcaaccatcccctcttcggcttatggaat

SEQ ID NO: 21518 - DNA, 406 bp, Glycine max
  unsure (1)..(406): unsure at all n locations
tctaaactntatacaagaatgaagctctgataccacttgttggacaagtggccttagatatcttaagaaggggggggggttgaattaagatattacaaactatttccccaattaaaaattctatttaactttctattcaagttataaattcccttaataatgaatttcttaaataatgattcaaatagaacaatctgaatgtgaatataaaacaataataaataaaggagttcaagggaagagaaagtgcaaactcagatttatactggttcggccacacccttgtgcctacgtccagtccccaatcagcccgcttgagagttccactatcttgtaaattccttttacaagttctaaacacacaaggacaatccttcctttgtgtttagaattctttcacaacaag

SEQ ID NO: 21519 - DNA, 402 bp, Glycine max
agcttatgagaggtgatgagggtagcacccagcaataagaatgtgtcagatcaaatggcaaatttctttctgctttttgaaacttgtctttttctttcttccactccaagacttatgtcctgttactatgctaattaattatcctttttatgaaccatcctacttaggagtgttaagtgttaagttgctgattgaattgaatcaattctgaaaagaaaaattatatgatctaattacttcaatgctctcaattaatcatccaatcaacttggttaaaaatttaaactcagtttaatttaaaatggtttggatcaaatcaaattggttttcaattttaatcttatttttaattttccttggaaaaaaatattaaatcaatgattttttaaaaaggctaaatca

SEQ ID NO: 21520 - DNA, 411 bp, Glycine max
cgttacaaatataatcaacacgagatcccttgagagatttagtgaataagtccgcgatcattggagcggacaaaatcggtggtgacttttcctgagagcactttctctctcacaaagtgacaatcgatctctatgtgcttagtccgttcatggaataccagattagatgcaatgtaaagagcagcttgattgtcacaaataaacttagtgtcctaagtgtctccaaattgtaactgttggagaagttgcctaagcccaataatctcacatgtaactactgccatagcacggtattcagcttcggcactggatctggctactacattttgttttttgcttctccatgagatcaaatttcctccaataaaaacacaataaccaataatggaccttctgtctgacaatgagcct

SEQ ID NO: 21521 - DNA, 340 bp, Glycine max
agcttaagacggactatactatgctatatgaagcacggactgaggaagactctatttataaggtcgctaagggcgtagagacgaagaatagagctttggatcacgggagatgtgttatagatgataaacgctaagggtgcatgcatgagatatatgtcgaggagaggtggaacgtgtatttgctcaacttatttaatgattgatatcgatgtgacactagcactctatactcatgatatgacgtccggaactattggctttatctttagattcttactcacgtactagctgatacgtatgatataatgagttacagtattgcggcggtggcatactacat

SEQ ID NO: 21522 - DNA, 247 bp, Glycine max
tctcagctttatagactgtcgtcttccttcctctgtgggaatctattatatatagtatacacacacacacacgcgctcgctcacacttgaactcatatcgtattactcgctgacatgacgctagggtcttacactcctgacattgagcttagtgggctctatgagaagcatattatgtgattcaccctatccttcgatcttgtgaatatgggactgtctaaaaatgtatcactatgcatatgtatct

SEQ ID NO: 21523 - DNA, 336 bp, Glycine max
  unsure (1)..(336): unsure at all n locations
agcttggagcgctatccgcagactcagtagaagtcagttgggaaagaaatcagactatgtgcacgaatcttatacccagtgggttattgataggaccaagagctttggcctaccctaccgcttacctagatacctatcgtccaccatcccaccatcatccttgcctatccccttcgacaccaaggaagagtttcatgaacaattaaccaaagaaaggcaagaaaaagaaacttggaagaggagatgccaggaactcgagcaagagaatgagactttgaaagggaagatagcccaacagagccgtgagctttntatccanaaccagaggatgattga

SEQ ID NO: 21524 - DNA, 146 bp, Glycine max
gtcttcagccctcttatgttgcttgccacgctgtattgaatgtgcacattttcaacaccttttcacatctaatagtggtgcatggaccattgtcgccgatgatcgtagccatgctccttttctttaaagcgacaattctcttgcta

SEQ ID NO: 21525 - DNA, 369 bp, Glycine max
  unsure (1)..(369): unsure at all n locations
agcttttcaagacgtagattatgcattcaaagctatttagaagttgaaaaggtagtcatgttttttgggttagaagttttgtatgattagaggcatgatgcgggggtagtttaagtcaagggatagatatcagaaactacacatgactttaataagtttcactgcatagatggtcagtgaagataggcgtgtttaaccatcaagaagtacacaccagttgaagacatgcatcagtgctcgaaagcactaattctaaagctatgagttcttcattatccttgatgattctcaattaaaggaaatcaaagaagacaacatgtccctagttaaagaacaagtaactagtcgaatgaagatnggagcacattg

SEQ ID NO: 21526 - DNA, 409 bp, Glycine max
tatgtaaaagcacttataagagaaggaaataagaagataaaaaatgaaataaacttttcataagctacaattagcttatgcataagttaaaaatcatatttttaaaaaaattatatgaaagaacttttacaaattatcttgtgcataagttgatttaatatttatttacgagaaaaaaaaaatcctatcttcaagtctcaagcatcacaaacggcatgataagtctcaatgagaatatttattaatttaaaaaataggcatttgattatgcctatctgaattgaaatttgattatatacaaattgaatgtagatacatatatatgaaatagttagaagtgtcatattcacacaataagtgaatgaaacaagatagattgatttctttgaccattacaggggaatcatgt

SEQ ID NO: 21527 - DNA, 410 bp, Glycine max
  unsure (1)..(410): unsure at all n locations
agctntgaagtctatataaagcttgaatatgttcttaatgatgttgncaaataactagagaattatctaagtcaaaatgaacaaagtgatgtagcattgtcagtttagttggacaaaagaaacttaagcaaattgagtgaaccttaactctgctaagttagcaagttttcattgtattcgagcttactgtgtaaacactctntgagttattagaatacatattctatcaaacatctattgtttgtgaaagcctggagtggcttcgtgacaaaaaatacttcggtcttaatcttagggggagattaagggtagtgccagtcgtggcctaaaatgtacttgttgtatctagaagtggcatagagaatacttggttgtgattaaagtnttgagtaatgtcacccttcaagttt

SEQ ID NO: 21528 - DNA, 303 bp, Glycine max
tgtcaaacagatgtgttacactccacgttttatgcttggcgagcaatgctcgagtagggctgaactggtatggattgaaatttcgatggtcacaagttaatgttggcttaaaagatccccacaatgagaaaatgaaattggacaggttaagtgttgaaagatttattaaaaaatataatttgggataatgtattgtttagccgtcgaatgataattatctatattgaatgttttctagtcgctggaagttatttatacgttttaaagttgttagcagttgtgaagtcaatcaatgttttatag

SEQ ID NO: 21529 - DNA, 418 bp, Glycine max
agctttcataggtgaaatcaggtgcagtcatttcccttatagtcctctcacgagatggaggttgtgccatgttctcagaatgtgcaaaatcagaatgctcagaatcagaatgctcaaaattataatgctcaagatcaggatgttcaaaatcaccaataacagaatgcacagattcaccagttatggaatgctcagaatgatcaaaaggtataaaatgatgcctaattaatctatgaaatgtcctatctatctcaggatcaaatggttgtaagtcagatggattgcctctagtcatacactacattcagcatgcacacaactagttgccttgtcatgtaaataaaggtgtaggtttgcactacagctaccctcaaatgatatccaaatgacttgaaattttgtgagcaaccttataaaa

SEQ ID NO: 21530 - DNA, 429 bp, Glycine max
  unsure (1)..(429): unsure at all n locations
agctctaaatntacattgatgtttgtatttattggagggggttgtatgccatttttgttttaagggtagcatttcttggtaaaaactaactttccaaatgttttccttcgcaggaatggccccgaggaagcttgcctcaaagaggtccaggaaggacaaggcggccgaaggaactagttccgctccggagtacgacagtcaccgctttaggagcgctgtacaccagcagcgcttcgaggccatcaagggatggtcgtttctccgggagcgacgcgtccagctcanggacgacgagtatactaatttccaggagaaaatagggcgccggcggtggacatcactggttactcccatggccaagttcgatccagaaatagtccttgagttttatgccaatgcttggccaacagaggagggcgtgcgtgacat

SEQ ID NO: 21531 - DNA, 399 bp, Glycine max
agcttaattgttttaggactactgctacataaaataataaaaattacacaaaggcgaccgtaataccagaagaactaacataccgaaaaagaatggagaacttaactcgatgcttccctctaaccagcttctatctaggacaatcaaacaaaaagaattgtagaacagaaaatatctaaaatatcaagatgagctcctataatacaaaccaacaaaatcatagaatttgaaaacttagaagtctagaacagatttcatgagtatctcaaattttgtgaaaccacgagattgtgaagagaatgaaaaccatagccatgggagaaattgagatgcaagcaattcaattaggagagatgaaacatgcaagtaagggtttaatgagaattccatgtttttttt

SEQ ID NO: 21532 - DNA, 421 bp, Glycine max
  unsure (1)..(421): unsure at all n locations
ngaacaaagggacgataacggttctcatgtggaccaagcaaaaataaagcaattatctttgtttctaccaaaacaaacaaacaaagaatcaataaaacacactcatgaaataaggtgaaagttaaagtgccacactttccattgttttctcccatatgaacaaatttgatacacgaaataggaaaattttgaaatgactaataaaggacaaatttctctaaaaaaaaataaaaataaaggacaaataagggtcaaatgaaatcgttaacttatttaaaaagatctttatacgcacctttccttcttacctctacctttttctctactgaagcattaagcaacaaagcaatgacagctaaaccgagcaaattgggagaggttctattttttcatgtcttgatattatctacatatacacatt

SEQ ID NO: 21533 - DNA, 394 bp, Glycine max
agcttgacaacagaaaagtcaagaaaaaccaaataaattctagaaccgaatatttattgtttgaattaattttgatagatcaataaaagatacaagagtgttcataagagaagtaaaattacccaatattttatgacaactcatattctcaaagaggacaatgattgtgtttacaagttagtttcttatggggttgtaaatgttggttatatttggtgggatttactatctagttttattggtgatgattttaggggtaaaagatagatttgcctttttatcgatttagttgaatgcttctgtatgggtttagtttggccccctctgttcctcttgtttggtctttatattattaataatacttggatttgagtgtgtgatgggtagttttttt

SEQ ID NO: 21534 - DNA, 415 bp, Glycine max
  unsure (1)..(415): unsure at all n locations
agagaggcttatgtactacttggactcgacaagcctctatttggtggttagcctattagacaactcggattcagagaatctagtggatttaattaaggtaagaggaaaactctatctcctaccagaaagatagagatatcccctaaaatcatatattatctattattataggaaagataagataaaatatattttcccctatttttcattatcttagaaaggaaattgagatcttatcgtccaatttcatctctataaaagggaatcatcaaggttcaggcaaatcaactcttaatccaacctatattctaatacatgtatacttttacgtcgttaacttgagtgtcagagtgtctttgcaaatacaccccattatntatggagaagctcagagaagaacgccactgtgagaaga

SEQ ID NO: 21535 - DNA, 415 bp, Glycine max
agcttagagatcttcaaaaactcttatccaagattcatgtatgaattccacgctttcggtatgtatgctcataaaaagctttcatgctcatcaatcataagagatataatgtgcatattttgcattgtaatgctttccttttactttcatctttatcatatatctgtatgttatgttctttttcttgttagtgatgctactaaagtgaaaaatggtgccataatctgttttagatatttgccaaacaaaagcaacagacagatgtggagattggagaaagagataaactcaaagatatcaaagctcataaaacaacgccaggaggaaactcatgagcatgatctattacaaatgatacttgagggcgcaaagaattgcgagggcagtgatggcctattatcacactccatctcat

SEQ ID NO: 21536 - DNA, 399 bp, Glycine max
ctcaagctagacgctcattatctctccatagtgtgtagcaaagttttgccatttgtgaattccgctctcagcattaccagcattgctaaggtaggtacacatacacaactattataaatgtcgagttatgaagagatcagttccattgttcatttcaaaaattatattgtaaaattaaataggataacttttcatccttacactctgatgtttatgaaaaggataacacttctctaaagtatactactcattttagatgataaatagagtaaatctatcctaatactagtcattgagatagtttcatatactacatacactatatttctcctttatttttattcttccactaactccttatatatttgaaaaattaacaattgaaccaatcaaaccctg

SEQ ID NO: 21537 - DNA, 403 bp, Glycine max
  unsure (1)..(403): unsure at all n locations
aagctaagtcccgttttttgcggatttgagagaaaaaggtttatgctacttctgttctgtgatgaagttntttctcctgcccatagtcagacacataagaaacttcagctacaagttctggagattgatgatgctgaccctactcctatagaacttgaagaggcagtaattcctagtgagtcagatgtttctgaacctcaaatctcaatgaatgctcttactagtgttgctaacttcagaactatgcgtgtgactggttatcataagaagagggctttgcacatacttattgaccgcagaagtacacataacttcctagatatcaacatggcaaagaagttgggttgtcccataacttccatggatgttgtgaatgtggtggttgcacatggcacaaagttgc

SEQ ID NO: 21538 - DNA, 380 bp, Glycine max
  unsure (1)..(380): unsure at all n locations
tctaatattatgtnggattggagtttcatgtgtgtgttgacgttcataatttcctgtgcatatgattttactctttgcaattacctcacattttatatatgtttaagatatattatattatatattgatgctgatatttacttttattttagtttctaattcttttttctttcttttttcctttcatcctcttttcttcaatgtgtagaggattttgtttatgaaagcaagagattgaaaggtttaggcattggtgctcctaagggtcccgtatctctacatgatttttgaagtcttcaaagatcaaacatggtgtgtttacttagaagcactgcagtattaataggcattgtaaaaaaaaaattctatctttaactgta

SEQ ID NO: 21539 - DNA, 402 bp, Glycine max
agcttcatgatgatgaatcaagttgattcaagtagttttgataatgacaaagatgatgacaaaaagcctaaagaatgatttcaatattgagtcaacaagttcaagatcaagtttaatttcaagtttcatgagaagaaatcaagaagattcaagaatcaagagaagtttgattccaagattcaagagaagatgaattaagtttcaagagaagaaatcaagaagacttcacaagggaagtattgaaaagatttttcaaaaacaaacatagcacagttttgtttttcaaaagagtgtttctctaaatcttctaagttaccagagtttttactctctggtgatcgattaccagtttcctataatcgattactagtggcaaagtttgatttcaaaaagctctcaact

SEQ ID NO: 21540 - DNA, 382 bp, Glycine max
ggccgcccagctcgcccaggcgagcaatgttgcttctctccataagcaacagccttctggaggaatcttctggagggcccaagtgggtctggttgctatttgcacccccctgtttactaaatgcacccccatttctatttttttgtaattctttttccgtaacgttacgaaactttacgaatttcgtaacgatacttattttccttccgcaaggttacgaatccttacagattatgtatttactctttttttagctttcgaagaagttactgaaactcacggattgcgcaaaaacacctcttttcgattttcgccacattacggaattttacgaatcacgcaagcctgcttccttttgattttgagacgtctcggacttaat

SEQ ID NO: 21541 - DNA, 385 bp, Glycine max
agcttcttgcgtagcctctcttggtgctcagaaaatcccaaaaacaaatccctcttattactagctattttgaattctttagttcctgaatgtacaaccttcaaatttttgctcgttcccctctttcttttctgcaaaaaagaaaatcaatatcaaagaaaacatggatgaagtccaaagaaaatcaatatcaaagaaaacatggatgaaatcacaattaaaaagcacaactaccaatttttcagagtcctttggttaatttgtcttgtctccttatgtggtggggttttgtttaataatattatacttttgccttccaaaaaaaacttatgactgatcctcttttcattaatcctattttgtatgttattggataaaagatcat

SEQ ID NO: 21542 - DNA, 124 bp, Glycine max
acatgtgcatctgtgaggcgggagggcgattgcgcacacgcggaatgcacgacctcaatatgatcctgagcccactatctcttgctggacacctaccaacgatctcacgtgctaccacataacc

SEQ ID NO: 21543 - DNA, 400 bp, Glycine max
agcttgttagaaaaatgtaggtaaaaatattattgagcagataatgagggctggaagaattaccgaatacggtgttgatggggttcatggcgacctggttcttagtggcatcttcgatgagtctttcggtattgatgaaggcgacataaaagggtgtggtacggttgccctgatcgttggtgatgatttcaacgcagtcgtgctgccagactccaacgtaggagagaacctgtggattttagagaaaatgagtttagaaacctagggcgattcaaatcaagttcaaaacgtgttcaaacttgtgagaaacctatgagaaccactttgaatctatgagaatgacagagatgcaaagtgaatgagagctacaacggtgttgaaggagaatgaagtgtgcaac

SEQ ID NO: 21544 - DNA, 414 bp, Glycine max
tcacatgttttctcttattctcaaaggtgaagtaaaataatggttgaagcgtgcacaaactgacttggttgccacatgggccttgtgttgacaagccttattggatagattcttccctccctcaaggactaaagagttaagaaactagatcaccaacttccaacaagaagatggtgagtcaatatatgaggcgtgggagtgatacaagggttacttgtaagaatgccctcaacatgggttaagcaaatcattgacgattcaattcttctttgaaggactgaaccaccaaagcgtgtcaaccttagactccagagttggcaaatcattcatgagcaagccaatcaatgaatgcaagactatccttgaggttgtagctttaaaatatggtcaatgggaaaagaaaagtgataatcg

SEQ ID NO: 21545 - DNA, 395 bp, Glycine max
agtcttggtttgggcaatagaaccctacttgacgtccccaatgtctcctgctcctcgcgacatatcctcaggtaccactctgtggtcaactaataaaagttggaagactgaatcttccacgctttctcacacagggcttattgggttatggggcacccatcatatgtggtacttggtagcgatcgggcgatggcgcaaaacaactatcccattttcacaagcccagacataagcacaccatccccagttgcccacctttaaattgagctcacgcacacgtacgtagcccttctcctcgttcctctcagcactgggtccccatcaacccctccaagctttcacaatgtcaaatcaagtcaattccatttgtcatgaaactacctcggaaaataaca

SEQ ID NO: 21546 - DNA, 391 bp, Glycine max
  unsure (1)..(391): unsure at all n locations
ntanagtgaattgtggtcatatcaaaacaatctcttctaaacattaatcattagaagaccggttgatatttttttaataggtttaattgatataatgctcctaattaattatgcattgcgatatttggttactttaatacttattgtacttggtagtcaatctcaatgttctctttttcttggtaatgcatcactgttctattgcttacagaatctctaattttttggcaacaaaatagaaacatcatctctcgctcctaagttgtacattttttttgctacataattagtacgatacaattcaataaaaaattaaaattgatttcttacatgattcaatgaataattcgtaattatcaataatgcaggtttgataacttgctgtctaccg

SEQ ID NO: 21547 - DNA, 389 bp, Glycine max
agcttcatgcttaactatgtatggcaaaacttcattattgttgttcaagacatacaagtgagcttgtaacaaatcttctacacttggagtgatcacctgcagtcctcttgaacccttaccacccactctgtcatcatgccgacactcaggaagcccaataggtttagccttctctaagtattctgaaaaaaattcaatggcttcttctgcaatgtacctctcaacaatagatgcttctggacgatatagattctttgtataccctattaagatcttcatgtatcgctcaaccgggtacatccaccgtagataaacaggaccacaacatttgatgtctctgaccagatgcacaatcaagtgaatcatgatgtcaaagaaagcaaggggaa

SEQ ID NO: 21548 - DNA, 398 bp, Glycine max
aatctcagcttcacaagcaagcttccatcactggggttattgttacaaacaaagatttgtctttgatgaatgcagtgaaaactgtattcccggatgctacgaacttgttgtgtcagtttcactttgataaaaatgtgaaaacaaagtgcaaaaccctggttgttcaaaagaatgcatgggattatgtgatgaaggcttatggaaatttggttgactgtccatgtgagagttcttttgatgagtaccttaaaaactttgaaatagcttgctcttcgtggcctatgtgtgtggactattagtgttcaacatgggtgattcccacaaagaaaatttgtgaaactggaccacaaagtgagcttttacaacatactcttacagtcgaattttttttgttggtc

SEQ ID NO: 21549 - DNA, 393 bp, Glycine max
agcttcgatggaggaagagaatgagagatagagagataaattgtcatggaaaattgaaggaagaaagggagagaagttgaactttgaagtgtgtctcacaagactctcattcatcaaagttgtgataagtgttagacatgtttctattcatttcatgtgaatctaagaggaatattccaaggatttgccaaaggcacattagcatatttcaagaatatgccaaaggcatcttagcatattctctttatatgtcaaagatatcttagcatattccctttagatgccacaagaataaaaggtgtgactctagtacatgggaaaggaatattgcacaagaatattccaagaatatgccaaagacatcttagcatattccttgagaatctagagggg

SEQ ID NO: 21550 - DNA, 398 bp, Glycine max
cgacacttgaatactcagcttcataagaataatcatgaatgtcaacatgtcaatgttatatgctgctctttttgtttaaaaaacaaaagcacaagcaacttctagaagtaagtcctagctagcttattgtgtaaggtgagaacagcgaatcctgaccattgactagaataccaaaaagtcacatgatacaaacctcagacatacactcgaactgaacatatagatatctctattttatttattctttaaagtataaataacactaagctaagccttaatatgtctagctcgtaaatttgatgtcattgttgaaataggttcagacactctcactgtcacatttactttttctaagaagataaagaaatactcaactgcgtgtcgaggtacgaaaagcc

SEQ ID NO: 21551 - DNA, 399 bp, Glycine max
  unsure (1)..(399): unsure at all n locations
agctnttcctctagttgctctattaggatttccaagcgttagagtgaaagagaagggattgaaccctcattttactatctctgtgcgagggaaatttctctctctatagacatcatatagaaaatcccaacggtggaggtgtgctaacatgaactacaaacctggcctataaatatcacaatgatccaatggttaacgagtacaagagcgtagttttacttaaacaagtttgggtgtatgcgagaaaaagaaagctacgatgcgaatgacatttctctcacctcagacatttttttcgcatattccaacggtaaggatgtcccaaaattagttctagacttggttttcaaatttgacgatgatctaatggtgaacgagtttgggattgtcattttactg

SEQ ID NO: 21552 - DNA, 427 bp, Glycine max
  unsure (1)..(427): unsure at all n locations
ntagtgactgtgtgcaaccaaagagtttatattgagtgtcctcattgatatgttctataattgattttgcatgaatttctaattgtcataacatatgattgataacaaatgtcgaatcgttccaaaaacaaataaaactaggaatttgaagtacataattatctaggtcaaactcagaaatatgcttcaatatggttcctacattcattcacttataaacaaaaaggaaagaattttatcgaatagtttgtaagaaactataaaggaatgcaaaaacacacaaaataaaatggaagaaacataacacaaatcaagtttgataacatcaatccaattcaccaaaccaacacaaatcgaattatcacaaatactatgaatgatgttcagtctgaaagttcagtcaaatgcattagagaaagttcaatcg

SEQ ID NO: 21553 - DNA, 417 bp, Glycine max
  unsure (1)..(417): unsure at all n locations
agcttagcaaatggacctgngtgttgcctagtttcatcatatcttccataatactcatcacctctatcatatctaataattttcacatttatgtctaattgcccttttatttcattgtagtaaatttctaaggcatccattgcctaagaaatctcgggcagtaagtagacataaccgtaacgtgaataatcatcaataatggtgataaagtatctttcctttctgaaagaactaacatcaaaaggtccacaaatatcagtatgcacaatttcaagaagttgagtgcttcttgtagctcctttctttgtatgttttgcttgttttcccttaatacaacccacacaaatatttagatccgtaaaatctagataaggaagaatttcattctttattaatcttttcatcctttctctagaa

SEQ ID NO: 21554 - DNA, 418 bp, Glycine max
tctttgagaaaacttccttgagaagctagagcttagctacacacacttttctataataactaagctcacctccttgagaagcttccttaagaagattcctaaagaagctagagcttagctacacatacctctctaatagctaagctcacctccttgagatgagaagctaggacttagctacacaccccctataatagctaagctcacccccatgacaaaaaacatgagaatacaaaaaaaagtccttactacaaagactactcaaaataccccgaaatacaaggctaaaaccctatactactagaatggccaaaatacaaggcccaaacgaaggaaaaacctattctaatatttacaaagataagcgggctcatacttagcccatgggctcgaaatctaccctaaggctcatgagaac

SEQ ID NO: 21555 - DNA, 396 bp, Glycine max
agcttctctaatggcttctggtccttttcaacctacaccattccccacggtttcgccaactggtgtcaattcttccacttctattccagcttcaccaatgaattcctcttttcacagcaatggccgtggaggtggccgcattttctcttgcggtggccatagtggtggtcgcggctatggtgatggccatggtggtagattgataggaattctgctatcaactggaacaagcctttccaagtgtattcgcgtgggcccaagcccaataagtcctaatcgtatctggttggtttgtgtagtgaaagttagttaggggagagagaatgctgagtgtgattgttgctatataggaatggggttagtatttgtaggggtatgggggatctggaaatagaa

SEQ ID NO: 21556 - DNA, 426 bp, Glycine max
ggaccacgatcagttggaggctcatgtcagacgcccccagggtgactagcactctgctcatacattactctgagtgcacctgatcagtagttctgttggcccggtcaatagaactttcagagttcaatatcagtataaacccctagccccataaagacacaattcatggaagacattctggtagaatttgttgggaatgaccaaaccaccacagactggtggaacctttatgttgacggcgcgtccaacatgaagggaagtagggtatgaatcatcctcgaaggacttgataatgtaaccctagagcaggccatcaagctcaacttcaaagcctcaaacaatcaggctaagtacgaggggctcattgcaagtctaaaactagcaagagaagtcggggccaagaagctatgatgctacatagactcg

SEQ ID NO: 21557 - DNA, 449 bp, Glycine max
atttactacattttctcattctgtttcatggctgttcgtgacggatgtgatgtgatagttcatactgactgacaattgtcttatgtgaaacactgattagaggatgacacgtgtcagagtctaaccataggagtgttataaagatgaacattagtgatcgttactgcagtggcaaaagtgatgtgtctgctcatcaacacgaaggatagtgacaattctttgaagtctctgtcggctcaacaggacggtaagaaggagagtcccacgcctatccttcgtaacagataatttatcgacttgatgataattccatgtactagtgcttgatatatatactcactcgatctactacgatctttgtatctattatatcgatttattacggcggcgataagctataaattcgtagcggagatacatcctgcgctaactccgctcctacataatcg

SEQ ID NO: 21558 - DNA, 424 bp, Glycine max
  unsure (1)..(424): unsure at all n locations
ntntggagtagaaacatgggaccaactcattttattttataaaggatgtcgtatctagtcaaggtctgagagaccatacaagtttcctaacgattttctaattatgtgggccattaagtctatcatatgctgacaatagccgagaagcccatgaatctcttcgggggcggagcaggtgtctgccatcgccttggccttagctaacaatcggggaagttcttgactcccgttcaaggtaagagcaaaccgatccatccacatggttgcctcttggtgtaaagagtcgatcacccttcctctagcctctttttccgcatatacttgagcgtacttatccgcgattctatgctcgtgggtcgtggctagacctaactctccttcgtacttggcgatgatagctaacatgttggtctctgtctcgcat

SEQ ID NO: 21559 - DNA, 403 bp, Glycine max
  unsure (1)..(403): unsure at all n locations
agcttatatcactttgtcataaattgttaactccttgtgagtatcccctttggatgtcagttttttgctgttttgatggttgctatttattccatgctgtatgcttttgagaactgttgataattgggaacctaggtgcataaaaatttacaacaattagttatgtcttcatgtcttgctatatttgttttgcttaaaatttgtgcctgtttgaatctgtgcactgtgtattaacacactatttttggttaaagaaaaagatttcttttgcagaaagatgttaaagttgtcatttcttttcttcaaaaccattgttgtttggatattaatggcaagtgctcattttcttgaatctagacaatanttagtaacgagttacttttgcactccctttctggatcca

SEQ ID NO: 21560 - DNA, 352 bp, Glycine max
  unsure (1)..(352): unsure at all n locations
ntgagtccttacctgaagatcatcttcctccctctcttgcagtactcagtatgcgggagtgtcctttactggaagcaaggtatcgaagtcagaacgggaaatactggtctaaaattgctcacattcctgcaatccagataaatgaaaaagtgataatatgagctgttgcatgaataagaatcctctaaaggtaaataaacgcttcaattattttgaaaaagtatgctgttagtcttatgccatttttatttttatttcttctgctccaagagaaagaaatttgtaggtcaaacttatggttggccaactaaataattctccatggatggagcatattttcgaaccatttgga

SEQ ID NO: 21561 - DNA, 388 bp, Glycine max
  unsure (1)..(388): unsure at all n locations
agcttctcccctatntttctataaatagggggagaagtgaagaagaaaacggttcagccccttaggcacttctctctctttcgaatttgcttaggaaaattgtttccgtgaagaaaatccaagccgaggcgcttccgtaacgtttccgtaatgtttccgtgagtaattacgcgaagattctcgaccgttcttcaagattcatcgttcgttcttcgttttcttcagtcttcaacgggtaagtacctcaaatcatgcttttcaattcattatatgtacccgtggtggtccacattgtgtttcatgtattttcattctcgttttcatttactttttataccccctgttgacgtgcttaagccatttatgtaagtcatntctcgcttaatct

SEQ ID NO: 21562 - DNA, 422 bp, Glycine max
tgaagggacacccatatttcctaatgtcattatctcttctaacaaaatcttttttcctatacctatactgatcactcctttcacaaccaattaacacaaatgaagtccttcctctcataccagtgtttttgtctgatctcataattaccgccacaaatccaatttcatgagcgactgatcgagcccactgcaaaacatcatctcaagtagcaaacacctacaatgcaagccacacaattttagtcttcaaagggacattccttttattaatttaataacaataaatcacattattacctgagaagtattgaacgccttagaacaatcaacatgttcttcttcattcacaccagcatcgtcttcattttcatcatttatatcaacttcttcagacattatactgtcatacatccattgatctt

SEQ ID NO: 21563 - DNA, 405 bp, Glycine max
  unsure (1)..(405): unsure at all n locations
agctnttaactcaatttaagctgaggattcttattcaatgattattgttaattgcttttggtcccaaatctttgaggttgttttttccaataaacgttggttatatttctctttatgttatttgtaaagttgataattaacaatgatgaaattagtacattagttttttttaaatccaataaaaccatcttatttacctacttttattagtttgtgtaattatgttaaaaatgctttgtaataaaaaagaccagatgaagtagtaaatataaatacatttttaagcaaaaattcaaaccttagtttgtttttatcgtaatattcgaaaattaaccgtacattagattcaactctcctaggttacaattagtttttttttggcatttttgtggcctagattttttt

SEQ ID NO: 21564 - DNA, 421 bp, Glycine max
tccactagatatttatatgtttcctttaaacaaaaattacgactctaagtttcaagatatatttttttactcaaatttgatgaacacagcgagtggcttggggtaggagagttttgtgattttaattcattgctttgttcccccgtcaacgagggtactgattatttcttctctctcaattgttaaattggttcaacttccaccaacatcacatgcattgacttgtggtgggtcctttttgtgttcactttgagacctcaatccatcaagacgacttttgaaactataaaattgttggcaaatgccttgcattgcataatcaattgcctgatgtactttgatccactcccttctcttaatatatgtgttgaggggtagtgaaatgaaaaggaaaggagggatcctaaatttgaatcttctg

SEQ ID NO: 21565 - DNA, 406 bp, Glycine max
agctttcatcactcatacatctacgtgatcaaggtaaaggcatggtagaatgaagttctgatagcatagtgaacactcaaaatatcattaaatagataaaaagatatttacatcaagtacctagaaggaagatccaacagaggatttagctttccataactgggaagctttatttacaacaaagaaaagagaaagatgaaagattgcagaaatacaagtggtggggatgtctcctccacctctaggacctctcaatcactcatatactcagctcacgctctcaggacgacttccttttccactactgatcttcacacaacaaaatctctcaaactctctagaatttggacctctctctctctctctctagaactgaagacatgcaagagctccttaagaaaaatgg

SEQ ID NO: 21566 - DNA, 417 bp, Glycine max
tgactaacacccagcattctttgtcctaccaaaccattgttggctatatatacatcaaaatagatttatggttgatgtttagtcagagactaaatataaaattgtcttatagacatatatacaatcaacactttctctttttctcccagtatgtttaaggtgttttgagagttgtttctaaactttacaagaatatacaaaagctttttgcagaaagaatgatgaatgtttttcacacgagattcttattctcagtcttcaaaacttttggtttatataggcctcattttcaagtatcaattgtctcaataaggtaaatttcttcacttaatcttcgtctgatgaatatggtcgttgggaacatttaatgtttgcgttaaatgtacgtcctttcctcatgcagagagtccactctta

SEQ ID NO: 21567 - DNA, 402 bp, Glycine max
  unsure (1)..(402): unsure at all n locations
agcttgttgatctcttcaggatgatcaacacaatattgcatttgctgcttcaattttgggctgcagatttcataagcaatgcatttagtatgtttacttggtaggtttaaattttcaataaaagtaattaatttttttagaatttaattttttatgcaaggtcaatgtgagttcttgttacacaaatgtaattcattttattaccatattacccaattcattaatatgatgcagtgaatttgtattaaaaaaatatacttttaattatatataatatagaagttttagcatttagcaactcactctttaacacatttttatataagaaattntattatacgttaaaatttattaaaaaatataaaagaaaaaagactcacaaaaattatgatttttaattaa

SEQ ID NO: 21568 - DNA, 390 bp, Glycine max
ctcagctatgctgcaacatttataatagaccctctcagtagctaaaccaacaacaatataataattatgatctttcaagcaacagatataatccaggttggaagaatcatccaaatctgagatgggcaagtcttccacaacaacaacagcctgtccctcctttccagaatgctgctggttcaagcaggccatatgttcctcctccaatgcagcagcaacaacaacaacaaagacaacaagcagctgaggccccttctcaaccttccttagaggagttagtgaggcaaatgatcatccagaatatgcaattttagtaagagacaagagcctccattcagactctgacaaattagatagggcagatggctacttagttgaaccaagctcagt

SEQ ID NO: 21569 - DNA, 397 bp, Glycine max
agcttcaagagaaagatggcctcagcatattccttatttccagaagggaattctatcaatagacctccaatctttaatggagagggttaccactactggaaaacccgaatgcaaatttttattgaggcaatacatctaaatatttgggaagccatagaaatagggccttatatacccaccacagtagaaagagttacaatagatggtggttcatcaagtgaaagcataactatagaaaaacctagagatagatggtctgaagaggatagaaaacgagtaccatacaacttaaaagccaaaaacataataacatctgccctgcgaatggatgaatatttcacggtttcaaattgtgagagtgctaaggaaatgtgggacactcttcgattaacacatg

SEQ ID NO: 21570 - DNA, 329 bp, Glycine max
tgctaacccatggaagctcctaatatctcccacactttctggggtgggccattcttggatggcctcgattttctcacgtgccactcggaccccatatctaccaactacaaaacctaagaaaactatcttatctacacaaaaggtccacttctctatatttgcatagagggtgtttttcctaaggactgaaagaacttgtctgagatgtcctaagcgatcatatgggctcctactatacacttatatatcatcaaaataaacagctacatatctacctatgaaatccctttagacatgatgcgtaagcctcataaacgtgcttggtgcat

SEQ ID NO: 21571 - DNA, 345 bp, Glycine max
  unsure (1)..(345): unsure at all n locations
agcttcttatccaagggaattcttggtggtgaagctccttcttccttggcttattgcctagtggatggtgcctcccctatcctcttctcctttgccttccgctgcatctccatggtgaaaaatcaccattgaaggacctcattgaagctcaaagatccagcctccgtagaagctccacaagcaagcttccatcaagtggtaatcagagcacaagagcttcaagtaggtgctccttaaacctccattaattttttttctttaccttctcttccattgttgtttcttcattnttctccatgtatctcctcacatgtcttgttctanatgttgttaacatgattcttt

SEQ ID NO: 21572 - DNA, 285 bp, Glycine max
agaatcggacctcagtgttaaaagttatgaccatatggatatctcgagagctatcgcgggacagcttccagcatctagacgtaagatgcgccataatctgacttccgtgtgaaaagatatgaccatatgaatatctcgagagctttcgctgtagaacttcgagcgtctaaatatatggtaagccagaatcgagactccggggtgaaagttatgaccagttggatttgaccattgcgatcttggttcaactcccagcgtctagtcatatgctgtccccgaatctaa

SEQ ID NO: 21573 - DNA, 416 bp, Glycine max
agcttgagcttctagtgcccggtttgactcatctacccctctagccacaaggatcatcaagtaaagtcattgtgttatgacaaaaataaagttttcacaaagaccatttagattaaagtcaaaccaccatacacaagatttagtcatgtattcctcaataggtaaactccaaccttctattgaatacactcattcatttataatcttttcttttcttgaacaactactcatccaccacaatgcttatgcttgtggtggcacttcagaaccacaagcaatcactattcttatgcttgttcaaataaattttagcacatgtacgcttgctcaagtttatttcatcctttggatttcttaaatctcagaagaagaaaaagtcaacacatagattattagtttatcacacacacagtcta

SEQ ID NO: 21574 - DNA, 414 bp, Glycine max
agcttgcatgaaacgccacatgcataaacacaatatgtgtttcattttcattgacactgtcacattgctagactcggaagagctagaattcttcatttagtaacctgtaacaataggattaaatgaatgatacagtaaaaaaacacatttaattttgcattgaggttttaacactattaaataaaaaacaaacacatacaattgcaatttttatttatttaataaaacatattttacaactaaacatgtacagtaaaccaagaagcctatccaaaacagatcaaatccaataaaaatccacagaagcggagaaccttctaagaactaatacacccaacaggctctgtacaccaactcgaaaacaagagaccgagcttacacttcccaagtagtcaactttggtcatagatccta

SEQ ID NO: 21575 - DNA, 409 bp, Glycine max
taacacaattgttgtaaattactaaactgatctaagaaatataaatatttaaaactaaaataattgcattctttgtggtttgatttatgtccatatattataattatatcgattttgcccattgtatctttaacattttgaagttatatatattttaaatgtttaatattatgtagtatcattttgatcttttaaaagtaatatattttttgtaatatgtagtttttgttgctctgttagtaataaacattatagtaatttataacattttttctatgtaattaattgaggtggaaaatttacttttgtatattattgaaataatgttctgataatattgttaaagaatagtacttaatattacgtggtgtacaatttattttgatgttacaaaaaagtagttcatgtt

SEQ ID NO: 21576 - DNA, 411 bp, Glycine max
agcttggtgatctttgctgttggttaacactgagcttgcccatcctaccattactaagcacttcactgttaatagaagatgcaatggatagcttttcttgcatggtgaatagttatcagagttcatgtccacattccccccagtccttatttttggggagcttgttgatcttgcttttgcttttgttgattctgttgcagccatgtatgctaaagttgcaggagagcttaaaaatgagtggtcctctcccactgaacactgcctcctatgaggaaaaaaatcttcttgtctctgaatattacttctcagcttaagtttccttcctccatattcctccccagctctagaatgtgagctaaaaactgagtctaaatcttcaagctctttactctgtgaaagttgtgtatctac

SEQ ID NO: 21577 - DNA, 410 bp, Glycine max
tctagacaatgcatcagaagggatatttccctacctggtttatattgtatggagaaatcataaccaaggaatttgtgtaaccattggtgttgttccagagtctgcaatgtttgctccaacaactccttaaggcttttctgatcagttctaataatgaacttatggcctaacaaataatgcctgaatttggccatggctgtgatagcatagaattccctagtataagtagattgcttctgcattctaggggacaacttcttaaagaaataagcaataggatgttgagattgactcaataatgctccaatacccgaaccagaagcatcagtctcaagtacaaatggttctctaaaattaggaattactaacattggagttgaagtcatagctttcttgagttgcaaaaatgc

SEQ ID NO: 21578 - DNA, 413 bp, Glycine max
agcttgaacgaatataagagacatcttcttcgaccttgttgattcttgactccatttcattgaagcgcatgtccacttgtaactccaaagtatcaaacctttcaccaacaaaggtttgaagaccatcgaacctgtccaaaatctttgaaataagagatgaatcttctccatcatgtccttcttcaccaacatgtcgagcaccctttttcacccaagagccatcatgctctttttgataaccaaaggatgcaatgactgaagcgcctattagaaaggaccccttcattggaacatagggttcaaaatcaagagggatgttaaagtgttgaaggaagagggtgactaagtgtggatattcatccattcccaaggcagatgttattatgtttttggcttttagattgtatcgaact

SEQ ID NO: 21579 - DNA, 433 bp, Glycine max
  unsure (1)..(433): unsure at all n locations
ttcaaactcagctattaancagcctttntagataaaaaggtcaagctcatactataaattaaacttattaagcttgacaagccggcttatttaactaattataataataataataactttattttatcaaatcttatcttatccagatgttattctatctagattttattttatcccgattttattccatctagattttatttcgtctagattttatttcatccaatcttatcttatcttgtccagattttattttatttcgtttatgggcttggacttaaaatagatttgtaagctttggggctgaagacctatataatagcaccaaggttttagtttagagagttttttttttcggaaaggagaataattctaggattttagaattctagtttttattactgttcatgcacactgttcacgtagaataaaa

SEQ ID NO: 21580 - DNA, 417 bp, Glycine max
agcttgttcagttcatcaaacaatctctcttttcttagtttgaagagtaacaggttgaagggtccatttccactttcaatccctagtgtcatcaccctaactgaaattgacatgtcatgcaatcaaatatcagggagattgcaagatttaactgatttgagtagcttggaacaactagatttaagggaaaacaggttagactctaaactacctgcaatgccaaaagggttgataagtcttttcctcagcagaaactctttctcaggtgaaattcccgagcactatggtcaactagataggcttcagaagcttgatgtttccttcaattcactcacaggcactgctcctgctgaacttttttctttgcctaacattagttacttgaatttggcatccaacatgttgaatggaccactc

SEQ ID NO: 21581 - DNA, 439 bp, Glycine max
  unsure (1)..(439): unsure at all n locations
gactcacgcttatcattataagttgctttntaatatattctaataaatttcttaacctagtttataacataagcacgttgctaaattattcatctaaggacacccttaattttagactcacaaaaagtttgtacaacaaactagagtctgtaagccggtttggtagaagtgaaattgatttgaaaattttagtggatccccgattttatcattagtgagcagcaagttcttatttttgtacccttattaatacaatacttccattttttatcttttagttttttataattagtgagcagcaagtttttgtttttgtacccttaatacaatacttccattttttttaatctttagtggatactttgactaaataatcttactttattattttgtcaatggcttgcttatntctctcaaatcagacaaccaagcattctat

SEQ ID NO: 21582 - DNA, 394 bp, Glycine max
  unsure (1)..(394): unsure at all n locations
agcttgtcggccgcgattgacgnaaggcacagaagacgacgttagtctctgcgtgctatcaggcttttcgtcttacagatagcaaaaaagaatgtttatacggataaccacttgggtatttccgcccgtcaacgtgactcaaatgtcagtatgacaaatcttgtgagcgtggaagatgacgtaaatcttcgcgtgtcaacggtcttgtcggccgcgattgacgaagggcgcagaagacgacgtcagtctctgcgtgctatcaagcttttcgtcttacagacaacaaaaaagaatgtttattcggatatccactcgggaatttccgcccgtcagcgtgagcgtggaagatgacgtaaatcttcgtgtgtcaacgggcttgtcggccacgattcac

SEQ ID NO: 21583 - DNA, 568 bp, Glycine max
  unsure (1)..(568): unsure at all n locations
tcgtcgccgcgctcngatctcatgggtggtgantacantcgcgtgggtggtctanttatatcgtnntctggtannaaagannnangagtgggnnnnnattgagaccttgtatgagnactntagagatctacgcgagaccaaccacgagcgtagcgatatatgctgcgcgtgaagagaaccttgtcgtgcaatatttagactctattaatatatcgcgagcactcttggtttagttccaacctgctctacttatgacgcgccgggaaatggacctccggatgaaagccccgacctttacacttcgtgcagagcgtacaccgttaaagttttagcagctctatatatggggcgccgcaatatagcctctccgttagaaagagctacgagtttaatgttttcgaatgtttacttcgatgatctttagcgatctgtattctgtatgctccccatntctatccctctggatgaaagattcgactctttgaaatcgtcgaggacatgaccgtttccttaaggggtcattattgggagccccttaaattcaccgccgaaaaaatcagaacctcgg

SEQ ID NO: 21584 - DNA, 157 bp, Glycine max
agcttggattgattcggtgattgaggacttacccaaatcaaataaacaataaattaaagtatctaggaagtgatcctaggtcatctcccagtgagcaatgatcaaacaaacgttcataacatgtaataataaaacagtaacgaaatggggggggggg

SEQ ID NO: 21585 - DNA, 419 bp, Glycine max
tgtgtaaattgtatcaaactcctcctatgcataggtatttggtggtgtcgtgatcaatttttgctaaggatacgttatacatacttagtacttccattctgtgtgtgataataatatgtattctctcacttttatgctaattacgcaagttttgaaaagctgattttcaccctctcactaagccaatcttctggcttagcgagccatccgctgagtgcaacacatctcggctgagcgtaaggaacaatctggaagaaggatgagatatgcatattcgttgagcgaagggtcattccgctaagcgcactgcttcagtccatccgttgagcgagaaaagccacgctaagccaaaattcactaatgcgcgctaagtggttcagaattgcgctaaccgcttgagcacaaacaaagccacctat

SEQ ID NO: 21586 - DNA, 400 bp, Glycine max
agcttgtacaagaaagtgtcattcatctgttcgaatctcggtagatcttgaagctggtaattaggctgatcgcatgaaaatgctgtctgttgaaaagattgctcatgcaatcccccacatacacttgaactgctagaatgatctttatcatgcagagatggttcaagctcaatttgattattgaatctttcttcaaagaaatccatgataaaaagatttttaggtgaattaaaaccttcagttgcacttattccccagtttgaccaatagtctggtgaaggatgcctgtccaataaatcctgatctctgggaaccagataatcattaatgccgttcccatagtaccaatccatgatctagtatctgcacatcacatatgatcacagaaaatgaagattag

SEQ ID NO: 21587 - DNA, 399 bp, Glycine max
tagtttactctcagaaccaattaacactcttgctttctcttcaaggattgaacattggtggtcttccaaatctctaggcttttgcaaaagagggtttgcctatcaagctacaaagttttattgtttgtagtcttgggagtttcttgacaacaactatcagtgattggggtttgcaaaggctcacttgtctttcaacattatgtattggaggtgatggaattttgaatgcacttatgaaaatcaaagtgccattgttgcccacttctcttgtgtccttatgcatagataatctttatgatataaaatgcttggatgggaagtggcttcaacatcttaaatctcttgaaaaccatgagatttcaagttctcaccaacttaaatccttacctatagagggat

SEQ ID NO: 21588 - DNA, 395 bp, Glycine max
  unsure (1)..(395): unsure at all n locations
agcttgtccacaaaaataggattttgatattttatcatttcagtttcttaccaagtaaaatggatcatttttaaggtccaacgccttaaaatgatcacctttcaagtaaaaagaatcacttgattcacgcataagaaagaactacataggtctgatttcctcatcacaattgaggaatacgtaggagcaaagggaaacaccctcgtcgaccacaaaaataaaaaaatataatatatataaaaagggtataaaggatataaggacataaaagggaacgtaaaaatcaaagtcatgtttgcacattcgattaaaggctgccatcccttgtgacggacgtgtggggtgctaataccttccncgtgcgtaaatacaactcccgagccttttacttaaaa

SEQ ID NO: 21589 - DNA, 416 bp, Glycine max
  unsure (1)..(416): unsure at all n locations
gtgtataggcaagaacccnctctgttaattaaaggagttgacatttcttcaaggatggaagagataaatcagttgagtagagaaagggatgaattattgtaggagttgaggagtaacctacttaaggctcaggatcagatgagataatatgcaaataaccatagaagagaactgatatttcatgagggagattgggtttttttgaaattgcaaccttatagaatgaggtccttagcaaggaagccaaatgagaaactgagtccaagattttatggaccctacaaggtgatacagaaaataggggaggttgcttataggttggaacttccagaatgaaagcaagatacatccggttttccatgtatctntgctcaaaaaggcagttcaacccacttgtttccctcagacattaccta

SEQ ID NO: 21590 - DNA, 398 bp, Glycine max
agctttaaaaggcctaaaaagtagtgctatgtgcagataattgaattaacacatacatacatacctttgaaaactccacatctagaacttgtaactttttctatattcgctatttgacatcagctaattctcactgtcatatataacaaataaaaaaggatccccaaaattctaattttggaactgtatatcatttggtttaatgtctgcattgactaaacaaataaaaaacttgaaatttgggagaaaaaatgttgaatctcaagtacccgtgaaatgtgcttgttctaaaaaattgaaactttttggggcaaaactccccatccagcaacacccaggccattaatcatagttgtgtgtgaatcagttcccgtcatttgtgttgaacactactctac

SEQ ID NO: 21591 - DNA, 350 bp, Glycine max
  unsure (1)..(350): unsure at all n locations
ntgaaaagtgttgtttntcaccttctcgctaagccattctgctggcttagcgagcatccgctaagcgcaacactcctgggctaagcgcgaggaagactctagaagaagatgagctgtaaaggttcactaagcacaccgcttcacctcactaagcacaccgcttcagttcatccacaaagtgagaaaggcacgcgctaagccaaaattcactaacgtgcgctaagcgatccataagtgcgctaagcgcacgagcacgaacaaggccatctatttaagcctgaaatcagaatttagagggagagnttggactgggattcagagncttgcatgtctagggtttctagagagag

SEQ ID NO: 21592 - DNA, 391 bp, Glycine max
  unsure (1)..(391): unsure at all n locations
agcttgtaggattatggggtacccatctcatgtggtactaggtggcggtcgggcgatggtgcacaacaagttttccacatccacaaagcgcgcataaacccaccatcccctgttgcccacctccatctgagctcacgtactcccacgtagcccatatcctcgtttctctcaacaccgggtccccatcaatcctcccaagcttccacaacatccaagcaaaacaacattcaaacagcacaaactaccacagccaagaaaacagagcaaaggcagaaaactctgccaaaacaccaaccaaaatcacagcttttctcacttaaagaccccagtaacaattccttcgttccaattcgttaaccgttggatcgactcgaanatttactggaaatct

SEQ ID NO: 21593 - DNA, 409 bp, Glycine max
  unsure (1)..(409): unsure at all n locations
tgagcacctcttccttcattgatgggtttaagcttctcttgggctgtctgactggtttgtaatcttccgccatcattatgttgtgcatatagtagacagggttgattcttttgagatctgatatgtgccaccttattgctcactgtcaatgtacatccccttcttggtgaagatgtccttcatgaatttggcgtagagtggcatctactgcaaggcttccccaaatggcatggttatctttagccccttgaactaaaggatatgggggctcctttagaggggctgatggctcttctttcctagccactcgagctagctggcttttggtcttagaggttaagaccttanttctcttcttccttcttatcttgttcctttttctctccttctttgtctacctttccttcct

SEQ ID NO: 21594 - DNA, 385 bp, Glycine max
agcttagcaaccaatttcaccatcaagtattatgatcatctttgggcttcaagtacaaagtgtaatcaatatccaacttctaaggcttcgaggatagggaaaataacttacaatttgtagcatcatcctcattcattcccagaaataaagcagtgtctttaatgcttatcgtagaataagcagagagaagcagctgaaacatctcctttgtgtaaagttctggaaaaagtttattggtattaaaatttttgctgaactaaacatctttgaataaaataaaggtgcacaagacttgtgaactcaagctatatggagaagcaatccaaaaccaagaatcatatttaataaaccaattgcagaagttaccatggaagtagtacattac

SEQ ID NO: 21595 - DNA, 410 bp, Glycine max
tgccgaagcccagcaagctaatccatcatagtctttttccactcatttaacacagcatccacaaattttcggtcaaatagcttcaacaaatacagaatgaatttcatttctttaggaaacatcaaattaaagccataaaaaagttgtacgtttgataaaggggtaaaaaaaacttattcttgtataaaatgaataaataatatttctaacctcttcaaaaagtatccgtctcctaaacaagcccccctcatctccctcatcaccatcatcgaagtcatcaaagtaatcgtcatcgtccccatcatcatcacctccatcaccaccaccatgattgattttctttccgatatctcccccacctcccccaatgtctagctgcaaacaaaagcatgaaaatgaatttccaaata

SEQ ID NO: 21596 - DNA, 415 bp, Glycine max
agcttcctcggggccatttcctgcgaaggcaaacatttggaaagttagttttaccaagaaatgctactcttaaaacaaaatggcgtacaacctcctccaataaacacaaatatcaatgtaaatttagagcaaactcatgcacatacttccttacgagtattcactcgcacaagatattcttctaactaagaaaaatgcacccatgcacaatcaaagcaccttcgttacccagatcatttatatgtacttccaaggtgtatttgctacctacatcacatgaacttccttggctaaatttacatgcacgcatactcaaagcatcttggctaccaaaaattgcagacatgcacattctggtatttctaatacctatgcatatacaaactttgtgatgaatcttggctatctacacaat

SEQ ID NO: 21597 - DNA, 425 bp, Glycine max
  unsure (1)..(425): unsure at all n locations
ctattgngccataaaatntctgaactntgatgaagccgcatctagagaccaaaggatgatacaactattggagttggaagaaatgagattgattgcatatgaatcttcaaggttgtattaagagaaggttaaaacttaccatgataaaaagttgctaaagaagaattttcaaccaggacaacaggtgctactattcaattcaaggctgaaattgttccctgcgaagatcaaatctaaatggtccgaaccatttaccatcaacaaagtcagaccatatggagcagtagagctttgtgatcctcaatccaaggatccagacagaacttgggtagtgaatggacaaaggttaaagttgtaccatggtggaactattgaaagattaaccactgttctatccttccaagaataacaatgaactatgcgtc

SEQ ID NO: 21598 - DNA, 414 bp, Glycine max
  unsure (1)..(414): unsure at all n locations
agcttgaagganaactggatgcattggttaacttggtaacccagctggccttgaatcagaaatctgtacctgtcgcaagggtttgtggtttgtgctcctctgctgaccaccatacagacctttgccctaccatgtagcaacctggagcaattgagcagcccgaagcttatgctgcaaacatttacaatagacctcctcaacctcagcagcaaaatcaaccacagcagaacaattatgacctctccagcaacaaatacaaccctggatggaggaatcaccctaatctcagatggtctagccctcaacagcaacaacagcagcctgctccttccttccaaaatgctgctggcccaagcagaccatacattcctccaccaatccaacaacaacaacagccccagaaacagccaacag

SEQ ID NO: 21599 - DNA, 412 bp, Glycine max
gctcctaaatgacatttcaagctaggattaactcactgttatctccatttaccacagaattcatacttaaccttccaactctcaaagcctcactctatttccactcataacatcacattctcactttctaaccctaggttaactctacctttcatctctaacagttttccataagtaatttcagcatataaacatcacaaacatcatcacaaaaaccctaaaacagaatgggtatgtccaactcatccaaacatggcaatttcaacaagctttcaacaagtgtcttcacaaatagtcatcacacagcagaaaactaacaaaactacccatcatatctcccaaaaccccatacccacaaaaatcaaaggagagagaagtccacctcaacctgatatttcgaagtcccactcgt

SEQ ID NO: 21600 - DNA, 409 bp, Glycine max
agcttctaatatttataggtcttcatcttcaagtattcgttgtctctaaatggatataattcttctcttaagcttttatcttatatttatggtcgttggagcatttcattaaatacacgaacttcttcatactgaaaaaccactttgattggctttcatgttgagcactacaatagaaaaaccactaaggtcgtcttttaatgtcgtttgaaaattattagaacttaaacttcatttattcttcataggattcaacagattctaggagaattcttgtgagatagttcgaacaatatctcagacgtagagtattaaatgaaaactcagacacaggattatgaagcatagtctgataatgcatacgacataacttttaacctttgtatttatttgtatttaatcaaaataa

SEQ ID NO: 21601 - DNA, 447 bp, Glycine max
  unsure (1)..(447): unsure at all n locations
cactatacaatactcaacgcttgcagatntagtgtttgctggctagaggatcgaagtgtttttgagaagaggtgaatttgattatgttgctttgatgaataggaagcctgtggcaaatggagagaataaaaaggagggagaaaccagtgttgtgacaaccattcctacatggccaaatttttcaccagcttatcaatatcaatactcagccaatatcagtcattctcattacccaccaaccagccaagaacacccaatcatccataaaggtcacccctaaatcagccacaaaactcgcctgttgcacatctgaggccaaacaccacccttaatatgaaccaaaacaccaaccagggaatttattttccagaaaagaagcatgtagaattcaccccaattccggtggtgtatgctaacttactcccatatctactcaataatgcaatg

SEQ ID NO: 21602 - DNA, 410 bp, Glycine max
  unsure (1)..(410): unsure at all n locations
agcttgaagttgttcataatgaatttgtcaaatcactagagaatcatttgagtcaaaatgaacaaagtgttgtaatgttgtcagtttagttggatgaaagaaacttgagcgaattgagtgaggcttagctctactatgttagcaagtttccattgtattcgagcttattgtgtaaacgctacttgagtgattagaatacatattttatcaaacatttattgtttatgaaagctatgagtgacttcgtgacaaaaaatatttaggtcttaatcttagggggagattaagggtagttccagaagtggcctagagagtacttgttgtagccagaagtggcatatagaatacttggttgcaatncaaagtttgattactagaatccttcaagttttgaagcagaactagacgta

SEQ ID NO: 21603 - DNA, 426 bp, Glycine max
  unsure (1)..(426): unsure at all n locations
tctagcgtacccgctattggtgctcagaaaatcccattaacaaatccctcttattactagctattttgaattctttagttcttgaatgtacaaccttcaaattgttgctcgttcccgtatttgttttttgcaaaaaagaaaattaatctgaaacaattcaggctgaattgttatcgttattattactcgaaccataaggaataacagctaaacaagtaatttaaaatgtaacttttaaattatgtcatatttttttaattacaattttacttcaatatctaattttgttaatctacttaggtcgttttttaaatataaatatgaatttaaaggtgatctactgataatataaagtacttgctaatcacaaattatgatacctatcattttaaattgtaacttaattntataaatattaataaattt

SEQ ID NO: 21604 - DNA, 413 bp, Glycine max
  unsure (1)..(413): unsure at all n locations
agctttcaacaagtttcttcacaaataactatcatgaagtagaaaactagcaagactacccatcatatctcccaaaaccccatacccacgaaattcaagagagaaagaagtccacccaaacctgaatttttgaagtcccactcgtagccacgcacttcacgaacccgaaaatgccctcctttcgcgatttggggcagaaatgatggccaaaggttgaagctttgcttggagcttcaatggagaatgaagaagaagaaaatggcaacgtgagggagagagagagagttgtctgaaaagtgtgggggctgagtgaagagagagaaaagctttttggttttaaataaaagggttttctctttttctattattttatttaagcaatgccacatgtctccattngagtggagcaaaaa

SEQ ID NO: 21605 - DNA, 407 bp, Glycine max
tcattgcctaacaagccaacttacaacagcaagccccaagagactcttcataaggatgcacaggtcaaagaagttgagtatgagaaaagattgtataaccaagtgaaggtgcaaattgcaaagaagaatgaaagctatgccaagcaagccaacaagaaaaggaaggaagtggtacttgaacccggtgatgatcttggacatttgaggacaaatgttttccaagaaggagggaatgatgagaatcatgaaactggccaaatacaggctaaaggcccaagtggagaaggacgaaggcctaagtggagaaggacaaagctcccgagtggagaaggacgaatgcccaagtggagaaagatgaaggctcaagtggagaaggatgaaggcccacaggcagagacactatcaag

SEQ ID NO: 21606 - DNA, 405 bp, Glycine max
agcttcattggccaattctcaagttcatagttgtcataagttcatgaaagaagcatgaaaaagatgcacttcgagaagaatcagttagcaagaatgacaagtcacacggaggattcaccaagcttcattcctcacaaggctagtgtttctctcaattgcacaagtgtttcggttgtaagtgtttcaattacaacaactaaatagtaaaattcccaactttgcacatcatctcagtcaatgcaatcatacatgcacaatgtggatcactaagggctttatcaagcttgtaacgtggctaggctaacaaagaaatcatggtttttcatggattcaaagtttaggatctagaagagcattcattccctaattcttgacaaatcataacacaaaattgtttcactacac

SEQ ID NO: 21607 - DNA, 394 bp, Glycine max
  unsure (1)..(394): unsure at all n locations
ngcatggttagttaatgatcatgaaaattgtcatgttagtgctttttgctatgctgttaaaacttgccctggttctgttggtcgggcaattgggaaaattgtggttaattgattttcttgatgttttggactttggtctggttggctttaacgagtttgatgcttccttcaattaattttatagtacacctgttattttctcctgtctatttatttgcacatggagtgttgaatgaagtctggatgatgcagaaaagcaatataattaaaattgatgtcacttttcctcttttgtttgtgtagggttgctactgtgggaggaacgtcacttgatctacatcgcctttttgtcgaagttacatctcgtggtgggattgaaaagttgcattgcgta

SEQ ID NO: 21608 - DNA, 398 bp, Glycine max
agcttgagcaaattcatacgataataacttttaactcggatgtccaaatgaaacccataatatatcgagatgctcgaaattgaaaaccgaagctcgtagcaaatgcaaaccacaataactttttactccgacattcgactgagtcccttattatatcgagacgcttgaaattgaaaacagaagctcgtagcaaatgcaaaccacaagaacttttaactccaaaattcgattgagtcccgtaatatatcgagatgctcaaaattgaaaacagaagctctgagcaaattcaaacgacgaataaatttttctcggatgtccgattgtgtcccgtattatatcgagacgctcgtaattgaaaacggaagctcgtagcaaactcaaacaacaataaattttta

SEQ ID NO: 21609 - DNA, 419 bp, Glycine max
  unsure (1)..(419): unsure at all n locations
ntgagcaaattcaaacgacaattactttntactcggatgtctgaatgaatcccgtaatatatcgagatgctcgaaattgaaaacagaagctcatagcaattgcaaaccacaataactattaactcggatgtccgattaagtcccgtaatatatcgagacgctcgaaattcaaaacagaagctctgagcaaattcaaacgacaattactttttactcggatgtcggaatgaatcccgtaatatatcgagatgctcgaaattgaaaacagaagctcatagcaattgcaaaccacaataactattaactcggatgtccgattaagtcccgtaatatatcgagacgctcaaaattgaaaacataagctctgaggaaattcaaacgacaattactttntactcggatgtctgaatgaatcccgt

SEQ ID NO: 21610 - DNA, 405 bp, Glycine max
agcttcagacaattagcaatccttggttgcaaaaaattatctgaactaccactatcaagtaatatttgaaccaccatgccattaattgtaccactaaacttcatagttcctaggccaaaggaacctttaagggcattataagatagatgatggtctaaattcaaatttcccatggtttcctcaattctaggaggtggttctagttgcacttcaacattttcatcctcatccatttgcaatagtaggtattgccgattaggacacctatgagaagaagtgaaattctcatcacatgtataacatagccctttctcccttcgaatctgcatttccgctggtgacattcttctaacatttcctggttttggaaaattggagttgtaattcattttggggcttggaagg

SEQ ID NO: 21611 - DNA, 410 bp, Glycine max
  unsure (1)..(410): unsure at all n locations
ngatattgaattaatcttgaagcaatgcttgtttgttgaagcaaccttgtattaatcttgaagcaatgcttaacctttgaatgtttttttgaagtaatcttgaaagcaaccttgtttgattattctttggcatcatcaaaaccatgtattcatacactcacattctccccctttttaatgatgacaatcattatcaagtgaattctttctggaatcatcaaaacctaaaacctacatgattggcattctccctctttttgatgatgacaatcattatcaagaaaattctttttttttttacatcatcaaaacctgcatgattcacattctcccctttattttatgatgacaaccatatgtacgttaggagtaaaaacaaaataatatctatctgtatagtttactccccc

SEQ ID NO: 21612 - DNA, 383 bp, Glycine max
  unsure (1)..(383): unsure at all n locations
agctntgatgtaacatttggagaggttatatgaaacaacgagatgatgcgctccatgagaggttggatcaaatggagaatagagaccatatgaattgctcaagagcttccattgttcaatttcgagcgtctagatatataatgcgcctcaatcggacctccgagttaaaagttatgaccatttgaaatgctcaagagcttccattgttcaatttcgagcgtcacgatatattatgcacctgaatcggacctgcgagtgacaacttatgaccatttgaattgctcaagagcttccattgttcaattttgagcgtcacgatatattatgcacctgaatcggacctgcgagtgacaacttatgaccatttgaattgctcaagagct

SEQ ID NO: 21613 - DNA, 401 bp, Glycine max
  unsure (1)..(401): unsure at all n locations
cttgagcaattcanatggtaataacttttcactcggatatccgattcaggcacataatatatcgagacgctcgaaattgaacatcggaagctcttgagcaattcaaatggtcataacttctaactcggaggtccgattgaggtgcataatatatcgagacgctcgaaattgaagaatggaagctcttgagcaattcaaatggtcataacttttcactcggaggtccgattcaggcgcataatatatcgagacgctcgaaattgaacaatggaagctcatgagcaattcaaatggtcataacttttcactcggaggtcggattcaggcgcataatatatcgagacgctcgaaattgaacaatggaagctcttgagcaattcaaatggtcataacttttcact

SEQ ID NO: 21614 - DNA, 407 bp, Glycine max
  unsure (1)..(407): unsure at all n locations
agcttcacaatcagaccttataacggccaagctgaagactaataaaactgaaaccacagtatatatatagaggagtaacaaaatttactaagcaaaccaaagtattgcataagcagtaatggagtcaaattggggttatttgctaactctttataaccattaagacttacaaacgcataaccaataaaatagcatcatcagtgctgagacttgcagaattttcattgtagatgatgattatgtgtgataattgcgattacaagaagccaacaccaggagactcagacatttgcactcagtatcagcagaaacgtcacagtttcactgacaaatatcgttttcattgatgctgttccatcttgacttcagcaatttgaactntaagacataatattaacttgtaaacg

SEQ ID NO: 21615 - DNA, 397 bp, Glycine max
tttccacctttcattagcatctgcatctctgtggatcagagaatggaacttcatcttcagtcagctaaacccctgagtccatagggatccccttcttcgagtacataacctcaatccctaagaagtacttcaaggcccccaagtctttagtctgaaactgagtttgaagaaaactcttcaagttgtcagtacctttattatcacttcttgtaatcacaatatcatcaacatacaccacaagtaagatgctgccaaggttagtatttttataaaatacagtatgatcactttgactcagcttcaatccaaatgcaaggaccacaccactaaatcttccaaaccaagatctaagtgattgcatcaagccatataacaactttcttaagcgggataccat

SEQ ID NO: 21616 - DNA, 380 bp, Glycine max
  unsure (1)..(380): unsure at all n locations
agctnttagggggagctgaagcaactcatatctatgataacaaatgaagtttggtggctagtatgggatttcaatgctataacgaggaggaaggaaatgaaaggaaggaatgtgttgtcatcacgagggagtacataaattcaagagttcaatgaatttattgaagatacacaactgtttgatagggtttagggtttacagtttacgggttaatgtttacgggttagggtttagggtttagggatgcgacatacatatacttggtttagtgcggngggcaacactgtgaatacgattgatagatgcttggtatctatggagtggctaaataagaagctaaatggaacataatatgtattgaaccggagtatctcagatca

SEQ ID NO: 21617 - DNA, 375 bp, Glycine max
  unsure (1)..(375): unsure at all n locations
ngttntgtgcagaattagggtacaatgcttagtgcacagaattccacaacacaccatagtgcctatttcgggaaaagagctctggaggcagcaagaggagcaacttttgcagagatacctacgatttgtaagcttattattgttagggtttcttctgtaatggctagctaaacacccttgttggggatttctactgaacagttgatgtaattattttcatatctaattgattgtgtttcttgtgttgaatgcttctttcaatgcttaaattttgtatgctcttggtctgatcagccatttgtgtgcgtagttaggtgattctaacattggaaaatgtattgttgccttataacttgtatgaagcagaattgaaac

SEQ ID NO: 21618 - DNA, 316 bp, Glycine max
agcttatcccatgcttctttggccgtctttgcattagatatcttctcaaatgtatcttcatccaccgattgataaatgagaaagagagctttcttgtctctctttcttgactccttcaacgtctcctttacaccttgacttagcgaggcttcatcttgctcctcgaagccattctctacgatatcccacacatcttgagctcctagtagcgccttcatcttgttactccaattatcatagttgttctttgtgagcatcggcatttggaaaggaaaacctccattcgccatcttttgaggatcttgaagctctgata

SEQ ID NO: 21619 - DNA, 410 bp, Glycine max
tgtaattgattacatcatttgtgtaaccgattaccatatagaaaaattcaaatttcaagtctgaatgtcataactcttaataaactaatcgtgtaatcaattaccacatttatgtaatcgattactagtaaggaattttcaaaaataactcccaagagtcacaactgttcaagaagtttttgaatgaccatcaaaggcctataaataggtgatttgggacacgaaattgctcagagtttttctgaacaacattgtcttatcctctcaaaaccaaattgtcttatcactctcaaaatattccttggccaaaatacttgcaaattcaataaggaatcttgatcaatcttcaattgtaatattcttctcttaaagagagaaaactcttcttcttattcaaagagatctattta

SEQ ID NO: 21620 - DNA, 91 bp, Glycine max
agcttgtaggccttgaatcttcttcatttataaagtactttgcttcttgaagtttaatggtaacggaataaagatagaagatagtatgatt

SEQ ID NO: 21621 - DNA, 337 bp, Glycine max
agcttgtggagtttctatagaggctggatctttgagcttcaatgaggtcctttaatggtgattttccaccatggagatgcagcggaagacaaaggagaagaggtgagaggaggtgccatccactagggaataagccatggaagaaggagctttaccaccaagatgagccttggaaaaaaaagcttggagaggaggcttcaatggaggaaaagaaagagggaaagaaagagagaggggggagcatgaaattgaaggaagaaaaagggagagaagttgaactttgagttgtgtctcacaagactctcattgatcaaagttacaacaagtgttacacatg

SEQ ID NO: 21622 - DNA, 397 bp, Glycine max
agcttactttaaagttcaaaatatgagctttaaaaaaatgataagaccgataaaaaaaaaaagtataagttgtttgacgatctttgctatatataaatttgcataactatcctgaatgagaacatttttataagttattcttcaatgagcaaatttttagaaacttttaaaaccattataaatattaaattaatttagttagaatggttttaaaaataaatgttatatttatcaaattcatttaatatttagaatagtttaaatattatattaaaaatattttttattttgtgttaatttttaaagtatttcgatatttaaatagttacggagcttttttttccctcttttcttctcattccacgatgaatatatgtgtataataattaaatattac

SEQ ID NO: 21623 - DNA, 425 bp, Glycine max
  unsure (1)..(425): unsure at all n locations
tgcaactcttcttttacattgatggctgtgctgaatgttcttcttatattgaggttacatcactgctgcataccctaatttggaggtgaactaatattcacaggaaattataattttatttcaattaaattttatttactagccattgccctaaggacattctttttaataattccttaacgtcttttacccttaaagtaatggatagaaaaaatgattttaattacgcagcgtagtgaacagtatacatgcaaattaacaagtttgcggatttagtttcttactgagcaaaggttacagttctttgatctatcgctcccttgccttttggtccattctatatacccaatgtcatcttgtcaattgtaaatacaaagatgtatttntcttcaattgaattgtcatttgatacaccaaatttgttc

SEQ ID NO: 21624 - DNA, 401 bp, Glycine max
agcttgcttatggagcttctatggaggctggatctttgagcttcaatgaggtccttcaatggtgattttacaccatggagatgcaacggaaggcaaaggagaagaggagaggggaggcaccatccactagggaataagccaaggaagaaggaacttcaccaccaagaattgccttggataagaagcttgaagaggatgctttaatggaagaaaagaaagagagaaggggggagcacgaaattgaaggaataaaagagggagagaagtggaactttgaagtgtgtctcataagactttcattcatcaaagttacaacaagtgttacacatgtttctatttatagactaggtagcttccttgagaagctttcttgagaaaacttccttgagaagcttctttga

SEQ ID NO: 21625 - DNA, 389 bp, Glycine max
gttgatggtgttgagaagaaatcacatgtttgtcatcatcaaaaagggggagaatgtgaatgtatgtatacatgattgtgatgatgtcgaaagaagaatcagacaaggctcattttgcttcaagagtaatacaagattgtttcaacaaacaaagccttgattcaagatttcttcgagatcaagccttgcctcacaatgaaaggtgttaagtcattcaaggcacatgtcatcgattaccaatacatgtaatcgatcaccaatggtttgaaagtgtgtaatctattacacatcatatgtaatcgattaccaaagactctgaacgttaggaattcaaattttaaatgaaggatcacaactgttcaagacaaacagctgtgtcattgattaca

SEQ ID NO: 21626 - DNA, 404 bp, Glycine max
agcttgaagctcaaggaaaagcttgaataagtttttggcttttacatgcccaactcccttgagtgacatttgtattgatttttatcttagttgttgcatcttagtacatttgaaatttgttttgcattgtgcatcatcatagtgtgtgaagaaaagtttctaagttagaaaaatttcttcaaaggaaaaaactctctgtaatcgattacaacaagctatttgaagcttgtagagttaagtcccgtatcgatttaatcaattactgatatctcgtaatcgattacattggtggttgagacaatgactgatttagtcaggagtctctactttaatcgattaccaagtgaattagaatactgagtaaaacctatagaggattagaatacttggtgtgagggctcgtg

SEQ ID NO: 21627 - DNA, 391 bp, Glycine max
tcattgcctaacaagccaacttacaacagcaagccctaagagactcatcataaggatgcacaagtcaaagttgagtatgataaaagattgtatgaccaagtgaaggtgcaaattgcatagaagaatgaaagctatgccaagcaagccaacaagaaaatgaaggaagtggtacttgaacccggtgatgatcctggacatttgaggacaaatgttttccaataaggagggaatgatgagaatcatgaaactggccaaatacatgctaaaggcccaagtggataatgacgaatgcctaagtggataaggacaaaaccccctagtggagaatgatgaatgcccaattggataatgatgaatgcccacatacagagactcttataaaacaattatt

SEQ ID NO: 21628 - DNA, 460 bp, Glycine max
ctctgcagggcatgcacagcttgttataaaaaaaagcgtctttctaactctatatttgctatatctttacacgtcaatgcttattgaatcagtttgatatagtgctcgagttagctgatataagtaatgtgcctttatattaagactatttacacccaacaatacccgttgtattattacatagacgagatgtatataaataaatacaacatgatatacgattttcctgattactcacctttgcttggcatactgaactttggcactagactgaacttagacataatgatacacgtttcgaatacaagtcataattgatattctgataatataatgatttacttggaacagtcatatcaaaaggctttacaagtggatccttcttacaaagcatctgctgagtgcctagccattgttttaacggatattggtaccaacataaagcttgctggaaacactc

SEQ ID NO: 21629 - DNA, 360 bp, Glycine max
tgtgaagatgatcattcggttgtacgttgtgcctttccaccaatctctgactggcttcatctttctaccgccctgatatgcatttttcccctagctcaagtgtaacacaagtacaagtaataatattaaacgaaataaactacccaggcaacatggacgagatgaataactacagagatatgggaagaatgttaaatgagatggacaacatatcgatcctcattttaaatatgaaaatgaaaattttatagtagaaacgtagtttgtatagaaagtctacaactgttaattcggtctcggaggacaattaggtgtttaaaattgtattctgattttctcacccatatttttgaggctgcc

SEQ ID NO: 21630 - DNA, 396 bp, Glycine max
  unsure (1)..(396): unsure at all n locations
agcttgaatcctttctccttctctctaatgcttggaaaccctagtagagcaatgagaggaaacacttcaggaatcttagagaaccactagagatgcatgtatcactaccacactttacgcgtgagcctgcttagagataagggatgagtttatcacaattgggttaaaatgaacatgtgtagggatccttagacgatcaaattgggatttattttaggataattattgtattgtaattctacctttacgaatataattatgagattgttgtgtttgacggaccaattgatgccctgatgcgaattggttgataaaattgagtgctcttgatgttttcatgtttttgacctatgattntgattcctttgatttccatatgattatgtgaaattgttt

SEQ ID NO: 21631 - DNA, 302 bp, Glycine max
  unsure (1)..(302): unsure at all n locations
ntgtccgcaaaagtcacttagaatcgttttaaggtccaacgccttaaacggtcctctttgcttttatcggttaacatggaccgttcaaaagcataaaatcaacctataactntaccgcttttgcaagaactacataagtatgattttctcatcgcaattgaggatacgtaagagcaaaagccccgcttttgtcgaccaccccaagagatcgttaatggtccaacaccttaacgttcctctccgttcaaaaaccaagagatcgttaatggtccaatgccttaacgtttctctccattcaaaac

SEQ ID NO: 21632 - DNA, 392 bp, Glycine max
agcttcttgttctggatcatcccacatttcagctgatgatgcttaacctaatgcaagacatgggtagggatgctgtttctccataattaagaacctaatcaaagaaggttggggttttgtgaagatattctcgaactaccagttcaagatgtacaaggaccataactgttttcttaaattttgttgttttggcaacataacatttatgccattaattttcattacgcagttaaacatattgtttgtgtttcataaaattacaattacttcttcttgtatagtccctccccctaaataaatgtatattgcattttaatctattttaatataaatgagtttattaataatgatgaacaagctataaacaaacttttcaaacatacattttttcc

SEQ ID NO: 21633 - DNA, 398 bp, Glycine max
  unsure (1)..(398): unsure at all n locations
actaagctnttgaacgggatcagtatattcgttggcataaattaaaggatgaagacgtggtttgtgatatcttttggtgtcaccctcatgcagtgaagttagttaacacatataatttggtgtttttgatagacaatacctacaaaacaaataggtatagactcccactactcgattttgttggggtgacaccaactgggatgacattctctgccggttttgcatatctggagggtgaacatcttaataatgtcgtttgggttttagaacgcttccgaggtatatttttaaaacgtgatgtcctccctggagttattgtcactgacagagacctagaattgatgaatgcagtgaaaactgtatttactgagtgtacaaatttgntgtgtagctttcac

SEQ ID NO: 21634 - DNA, 390 bp, Glycine max
agcttctcaaggaggtgagcttagttattagaggggtgtgtgtagctaagctctagcttctcaaggaagttttctcaaagaagcttctcaaggaagttttctcaagaaagcttctcaaggaagctacctagtctataaatagaaacatgtgtaacacttgttgtaactttgatgaatgagagtcttgtgagacacaactcaaagttcaacttctctccctttttcttccttcaatttcgtgctccccctctctctttgtctccctctttcttttcctccattgaagcatcctctccaagcttcttatccaaggctcatcttggtggtgaagctccttcttgcatggcttattccttagtggatggcgcctcctctcacctcttctccttt

SEQ ID NO: 21635 - DNA, 379 bp, Glycine max
gttgattaaataactgacctttacttcaatccaattaggggtaagttgattagatttaccatcccaactagtcttcaatgtcttcattgcattcgttataaaaaaacatcaatgagggatggaggatttaaatatttacatacccaagttcataatagagtaaatgagttataatttaaaactaacttgttaattgcggctttgatgtgaatatcaagcttcttttgcaacgaatataaccagacaacaatgttgttcctaagacacataacaacaagctgccaatggaccctaaattcaagaataattagctatgtataatgcaaacattattttaatgcatttgctaaattttacttattgattcaagtaagctcat

SEQ ID NO: 21636 - DNA, 400 bp, Glycine max
  unsure (1)..(400): unsure at all n locations
agcttgttacatatagtttcaacctgatgtcctttaaagacttagtaaaaatatcagccaagtgctacgagatctatctttatgtgtttagtatgttcatggaagactaaattagatgcaatgtgaagagagcaacttgattttcacaaataagcttagtgtcttgagtgtctccaaactttaattgttggagaagttgcctaagccatgtaatttcgcatgcaacttctgtcatggtatagtattcaacttcagcgctggatctcgcaactatattntgcttcttgcttctccatgagatcaaattccctccaagcagaacacaatagcctgaggtagaactcctgtccaatcagcactatgagtaacaaacaatttgacattgtcttcgtcttcatat

SEQ ID NO: 21637 - DNA, 294 bp, Glycine max
aggagtatgaaacatattcagaagatgattgcggctatgggtgaattggttgacatggactatgatgcggaagataaacgactgctggatagatcaaaggtgctcattaagaccccatggaggccgacaatacaacacaccattaacgtgcatgttgtagacgagtgcgggagtgtctatcacgaccgaaatgggacggatctaatcataagaggatctgcggaggaaatcatacaccgatgatatccacctggactgcaacactccagcctcgacggataaagggaggttcga

SEQ ID NO: 21638 - DNA, 371 bp, Glycine max
agcttcttgtacacttctccatgtacggcaaaattgaagaagtcgtgcacttctccagaggttgattgtggggcgttggatttggagtggacggtggagattgggtgtggaatatgcatctttgtttgttggtgaggaataggtggcttcagtgggatatcgctttgtgattgatgtttgagatgtcgataacttcagccatggctaaggtaataggctaatagcaacactaaagttatcaatatatttttgggtagtaatacaatttgtagatgctcaactattttattgttgtgaatggattaagaatattttaaacctacaaattttgaaaccaataatatcattaatatgaattggaatatctcata

SEQ ID NO: 21639 - DNA, 364 bp, Glycine max
tgcacaacaagtaactaagtctattttttacaaaataaactaactaactaactaacactaatatatagagtgactacttggaaggaaggatgagtcttgattaagcccatcttatatacctaattaaactaattatacaaaacaaagcccaaactcccagcccaattattcaattgcaacggttctgacttccaagcttaatttgaccctcgaaatggcaaaatagacaaaagcttatttttgacaaaattgaagttattttttgtagctttccatggattactcacactatttggaagtttgtagtgtcttctatgccctacacaaggcaatatggtcaagtaagcattaaatctgaaaatag

SEQ ID NO: 21640 - DNA, 377 bp, Glycine max
  unsure (1)..(377): unsure at all n locations
agctttcaccatggcttatgcctggtgatgtagagtatacatgatttggctcagcatcgacccatcatcagcatggaggactttatggcccagttggcctggccaggagtccagccttctcctttggggggggggagtgaggcaacaccaaaggccgaagaagaggctgaggaaactccagacgttacttttgttgccacacccatcgaggatatagattatgcagttgatatggcggcgacatagagcacctgngatccctggcccactccagcaccagatacatctttgccggcccaagatgctccatcctcacctcatgatgagcccactccagtacaggatgattaaagacagggctttatttatttttttgg

SEQ ID NO: 21641 - DNA, 404 bp, Glycine max
tgtcaaagccttgtatggattgaaataagctataagagcttggtatgaaagactaagtttattcttactctagatagttactctagagaaatagtggacacttcactattcagaaaggcttagaaaaaggatctgctgattatacatatatatgtgaatgacatcattttttatgtaacctctgaaaggatgagcaaggagttttctgagctaatgaaaagagaatgtaaaatgagcttgatgggtaagttgaagttctttataggacttcaaatcattcaaaaagattatggaattttcatgcataaagagaaatacatcaaggacctattgaaaaggttcataatggatgaagcgacacaaatggctaccggtgcatccttccactatcattgactatgatg

SEQ ID NO: 21642 - DNA, 352 bp, Glycine max
agcttgagtgagattcatataaaatgttgtattttattattttatattattgggcaagctcagcgaatctgtctgttaactcttgttctagacttgtcaaaagttgtacatgattttttttattgttaatgcattaatagcccttcatgctactacgtctggtttgggtttcaaagtaactttgttttgtctcatgtccataaaactaaataggatttcctgattgtgtggtgtctcacctgattggctagagaaaagaagcatagggggatggaaatgaaaaatagtagtgaaattgatatcaaactatgcttcaagtcaatggatatatatgttagtattttttatactg

SEQ ID NO: 21643 - DNA, 407 bp, Glycine max
  unsure (1)..(407): unsure at all n locations
tgatatcacaacacagtatgggacacagtcactcacggttattatctaatgaccgtctttgaatgtcaaactagacactgcattaaaagacggttattacataataactgtctttgaatgtcgaaccagatgcagcattcaaagatgattattatctaatgaccgtctttgaatgtcaaagcagacgcaacattcaaagatgatttttatctactgaccatctttgaatgccgaagcagacgcaacattcaaagacggttattatctaatgaccgtcttttaatgtcgaagtagacgcagcattcaaagacggttattcgacaataaccgtctntgaattgttctaactttcaaagacggttattataataaccgtcgtaaaaaacaatttcatttcaacaacgtta

SEQ ID NO: 21644 - DNA, 429 bp, Glycine max
  unsure (1)..(429): unsure at all n locations
cttgatttcctntgtttcggaaacctctcttttctcatgtgcacccaaacccaatctccgggttcgaagacaaccttctttctccctttgttggcttgtttagcatagcttttatttttcctctcaatttgatctttgactctctcatgaagcttcttcacatagtccgcctttgcttgaccttctttatgcttaaaaacagaaacattatgcataggcaaaagatcaagaggagttagtgggttaaaaccataaacaacttcaaaaggagaacaattagtggtgctatgaacagctctattgtaagcaaattcaacatggggtaaacaagcttcccaagtttttaagttattcctcaaaactgtcctaagcaaagtgtcaaaagtcctattaacaacttccgcttgcccatcggtttgtgggtgacaa

SEQ ID NO: 21645 - DNA, 415 bp, Glycine max
agcttagacgcagaacaagacaggttatacggagaagaataaagtgcgggcaaaataggtcacgcctgatataatttaaaatgtaagtccaacatcgattttcaataaaaaaaaaaaaacctatgttaacaaaatgatgttaacgttaacatcggttttcttcaagaaaccgatgttaacttatcatacgttaacatcggttttcagaaaaccaatgttaacctcggttttcttcaaaaccgatgttaaagaacttacgttaacatctgttcttctaaaaccaatgttaactaattaatgttaacatcgattttccaagaaccgatgttaacgtcactttgttaacatcggattttcaaaaaatcgatgttaaaggatacacattatttacaattatgccaccgcatttatcata

SEQ ID NO: 21646 - DNA, 415 bp, Glycine max
  unsure (1)..(415): unsure at all n locations
ngactagatntgggtgttgcacaacaccaagaaactgaacttcagtttaccattgcttatgaccctacatgaaataagggaaaatagtcaaaggaaattcaatgtaaaaagaaaataaagaacattttagctcctctaagccaatgattactaacaaatataatgtaataatatagttaatttttcaagatagtaaaagattgatccattaatacatcacaattccttcatattttttggtaagaacaatatatggtttctttatcaagtaatatcaaattacatctaaaaaattataccagacatgaagaaacccatctatggagttacattactgtattgtctggtgatgtaaaatatgcctttacatgtgaaacattcaattcaaacagataaattttccagcaaaaaatat

SEQ ID NO: 21647 - DNA, 412 bp, Glycine max
agcttctgttcctgagaaactggttcccataagacaacagggagtgaagattgctgaaaaccctagccttgcaacaagtcctagggaagtagacacggagatggacaagaaaatccgcagtattgtgagtagcattctgaaagatgcttctgtgcctgatgctgagaaagatgttccaacatcgtccaccccgaatgtttctgtgcctgatgttgagaaagatgttccaacatcttccggtccaaatgctgaagtactctcttcccccagcaaagagagatcaacagaggaagatgatcaagcgacaaaggagacccctgcaccaagggcaccagaaactgttccaggtgacctcattgacctggaagtagtagaatctgatgaagaacccattgccaacaggttggcacct

SEQ ID NO: 21648 - DNA, 424 bp, Glycine max
ttgctaagacaaatagtgtaatcgattacgataagattgttatcgattaatatagagagtttcgcctttggaagaaaatatctaactgtagaaaatttcttctcactcatatatgatgatgcacgactcactaatgatatgacatagactaagatgcaacattcaagataacaatcaatatagatgccccttaagagagactgtcatgtaaaagataaaacttcttcaagcttcaagataatcgtggtgctcatgtagcaccccctatctctaacaatataccccttgattactttgatgatgacaaacttgaatatgtcaatgagtgcatttggaggtctgagtcttgagagaagagacttgcttttcgttagtcaatcctgaaaatcgtaacactgaagaaaaaaatcaattcttatcatca

SEQ ID NO: 21649 - DNA, 415 bp, Glycine max
agcttctacaacatcagccagggcaaaggcactttccaaacctgaatctacagaagatagaacctaaataagaagccaagcaggccttttggtagaaaaaaggtatgtaggggttctgggtctattataacaaaaaagggggagaacggattttgggatgtgtctatcccacaacctggtgaaatgtaagaccacctacataacctatcccaaaagagtgtaagcgagggattaaaaacctagttgatcacttataaagtcaagtagaaaatattattctattttgattcccaacatgcaaaagtacaaaaccaattaacatagaaattagagtgagttggatggaacctgatgatcttcgaggtagaagggagctatagtggaagctggcgtgggaatagtaagagctccagct

SEQ ID NO: 21650 - DNA, 417 bp, Glycine max
tctacacataacaaagatgatcagatagttgcacaaaagagatagcttcctaacaaaaatcttcatgcaggtggaccttcttctagtaattctgacttaccgcagccgcctatccctctttctttcccacctagagcaattccaaacaaaaaaatggaagaagcggaaaaggagatcttgaagaccttcataaaagtagaggtgaacatacctctgctagatgccatcaagcagattccaagatatgccaactttctaaaggagatgtgcacccacaaaaggaagttcaagggcaatgaaaggattagcatgggcagaaacgtgtcaacattgataggtaaatctgttcctcacattcctgaaaaatgtaaggacccacgcactctttgtatacctcgcattatagggaacaataaa

SEQ ID NO: 21651 - DNA, 397 bp, Glycine max
  unsure (1)..(397): unsure at all n locations
agctttgagattaacctcaagctagcatgtccaagcttcttatgccataccagtgatgctccttgacaaagagtaaacacaataccttttgactgtacaaatcaccgagtttaatctccttgtctcttagcagaaaagagtgaagagttatccttgttatggaaaatacatatatccttgtaaaaggtgacattgtatccactatcacataattgacttatgcttagcagattgtgcttcaatcctttaacaagtaaaacattatctttaagaggataaggagaaatgcatactttacctaccccagttatcagtccttttttattccctctgaaaatgatcaccccactagatatagggcttaaggattggagcatagactnttcgcctgtcatgt

SEQ ID NO: 21652 - DNA, 409 bp, Glycine max
tatgttagtggatcttgaaaggaaaatcccactaacacaataacgcccaaatgcatatactaaacatgctcataaaaactctttttttttattatttctagatctttaacatctacaaattaattttattttcccacagtaataacccacaataatgtttatttgtttaattattcaaaacattttatgaaatattgcatatatttatatgatataggaaaaaaatatcggagtgttacacaatgcatatctaatggttactccaattttggttgattctcaatttaatgggcaaaatttattatggattttcacttctattgtattaataggaggtataaattatatatttttgttgacttgactttaatatcggggaaaaaaataatattagataatcacagtcagt

SEQ ID NO: 21653 - DNA, 394 bp, Glycine max
  unsure (1)..(394): unsure at all n locations
agcttgagctntagtagtcttatccttgtactgtctctgacactttcttcctccccccccccccaccccatcatgtctgttgcgtttaattttgtgtacgttgtgctattttctcaggatatataatatatatgcttgtttatcatgagcaactttttatgcatccattacttccacctgtagtagcaactgaacttcattgttgtattgaaactataataatcttttccttactgtttttgcacacaatggtttaataacaactctcattttccttgttatatgtacaacatacaagaaaaatgttttgtgctttgtgcatggattttctttcttctgtggccataccctgccattgttaacgatgctaattagcctgcatctttcccgcgtt

SEQ ID NO: 21654 - DNA, 420 bp, Glycine max
ctcaaagagtgtagatattccaaacacataaaagttctcatcatagaaataagttggttccgttgggaaaaggtagcaaagataggctactaacaaataatcaaggatcatctctcattcatgtacccatgcagtaacttctccctgagatgttagaacatgaaatatgcatacagactgattacatcttcaggttgtcccttgataaatcacagcacctcattgtcaaatatgtttatttaaaaaattgctgcagtagactataccctaaagaagtcactttataatgcggtcaattaactcattaatttattgacactttaaacaaattcaacaatctacatcaaaaacaatcccattccaaataagcaaaggcaacgtataacatagtcaacacataccacagtccaagaaccagac

SEQ ID NO: 21655 - DNA, 386 bp, Glycine max
  unsure (1)..(386): unsure at all n locations
agctntgatgtaacatttggagaggttaatgaaacaacgagatgatgcgctccatgagaggttggatcaaatggagaatagagaccatatgaattgctcaagagcttccattgttcaatttcgagcgtctagatatataatgcgcctcaatcggacctccgagttaaaagttatgaccatttgaaatgctcaagagcttccattgttcaatttcgagcgtcacgatatattatgcacctgaatcggacctgcgagtgacaacttatgaccatttgaattgctcaagagcttccattgttcaattttgagcgtcacgatatattatgcacctgaatcggacctgcgagtgacaacttatgaccatttgaattgctcaagagcttcca

SEQ ID NO: 21656 - DNA, 400 bp, Glycine max
ttcactcggaggcccgattcaagcgcataatatatctagacgctcgaaattgaacaacggaagctatcgagaaattcaaatggtcaatacttcgaactcggaggtcctattaaggtgcataatatatctagacgctcaaaattttacaatggaagctctttggctatacaaatggtcataacttttcactcgaaggtccgattaaggcgcataatatatcgagacgctcaaaattgaacaatggaagctcttgagcaattcaaatggtcataacttgtcactcggaggtccgattcaggtgcataatatatcgtgacgctcgaaattgaacaatggaagctctcgagcaattcaaatggtcataacttgtcactcggaggtcggattcacgcgcataata

SEQ ID NO: 21657 - DNA, 398 bp, Glycine max
  unsure (1)..(398): unsure at all n locations
agctttcttccgtcggtgctcccctcatggggtaccctaactgtcttatagcaagtgcgggattgtagttaatgcaaccccttgttcctatcagcgggatgtttgggtagcccccacatgagaagagaactccctcctttccttctttccatcatggaaaccagttgactattctgcctcctatcccagccaagtgttagtcccaatctactcttcttttttcgacacacgagcgatggcttcagagtggacatggatgccttatgtcttgttggaataagtgtgaaaccaaccatacacaaagagcgggtaaacaatagatgatccgtgcactactctnttcgtaccttcggtcgaatgtgtcaaataagtccgccaagacaactaccaccgggctc

SEQ ID NO: 21658 - DNA, 51 bp, Glycine max
tagctcagcttatcatcctcaaacagatggtcagactgaacgaaccattca

SEQ ID NO: 21659 - DNA, 392 bp, Glycine max
  unsure (1)..(392): unsure at all n locations
agctntgcatgcgtaatctacctattataggtttcaatnttataagaatatgaactgcgttttctgtttttttctggaaatttgcaatgaactcactcagcgacccttcaacgctcagtgaattcatctatactcattgcatacatgcatttctgatagaacttgttgagcgcacctgtcgcgctaagcgattggatctgtagaggatgaataatcatcctctggataagtacttgtggctaagcgaggctgattcgccaagcccaagtaacttagaaattttttttgtcatgatagtcgtgcgctgagctagtatccttgcgccaagcgaagttctttataacagtgactgggctaagcgacccatttcgctaagctcccataaattagta

SEQ ID NO: 21660 - DNA, 417 bp, Glycine max
  unsure (1)..(417): unsure at all n locations
tgaaagaaaattagtaattaacataagtaaagctagtaattaagtagagataattaaggttgacttatggtgatctagattttatagaattagaaaagggataattaagtcatattagtttaaagtggagggcattttcataaatgacaatataactagtttaaaatagaatttttagtttaattagttggtgattaattaaagtgtttagttacatgatgtagaataattaaaataagttagagttgtaacaccatgaaaaattacaactcatactgacagaggaagtgtngtgtcatctatacatgtatgaatttaattccaatagtatatgttttttatcatagaantttgtgttatatataagtgacaccctctaccgaaacatacatataaaaataaaaataaaattattaa

SEQ ID NO: 21661 - DNA, 295 bp, Glycine max
agcttctttgttatacctcgatcggttatctttccaggccgaggtcgaccgtcatttttttcgatccatttcggtgaataatatttttttgccgagatgggcaaaatgccagtttcggccgaataaatgggaaaatgccagtttcggccgaaacaaaaagtcgggtgcgctcgcacaaaaaaacctagccgacctacattttaaattttttatgcaaccccaaaacaagagaacttcctgtgccgtaaaaaaaaaacattacatgacagcgagcgttctgaaaaacaaaattgcg

SEQ ID NO: 21662 - DNA, 358 bp, Glycine max
tcaccggatgacgccgatcgaacatttctttaccgacttcatgcaaatttcgttcagggattgaattgaaaactcgttaggcgacatctgtcgtgaagtatcgaccgatatttttcagccgacattgcacaattctttttagaaaagctcgctggtcgataatggtctttttacggcagagtaagttttcttgttttggtgttgcataaaaaagttacaatgtacttcggctaagtttttcgtgcgagtacaaccgacattttgtttcggccaggaaaacattagcccacctctgctaaaaaaatatttgcttaccgtcttcatgcatatttcattcaactattggatagaaaactta

SEQ ID NO: 21663 - DNA, 388 bp, Glycine max
  unsure (1)..(388): unsure at all n locations
agcttgttagagtatgttaccacactcttaacatactctttacttctgattcttataatttttgagttgaggaaacgctgctaatgtgtctcagtcccactatatgttttgcattttctattttaatgcaatttttgtcttccaagtctttccaacatttaaaaaattaggaatcaatatttacttagatttctaaatttaacatttcattnttcagatattgatcctacttgagagagcattgtttgggacaatttggcttttttttttaatctttttctgatcctgtattactacagtcagctgcaactttctttattcaagttatggctaagcttgggggaaccactgctggcccagatacataatatacttcaaggaatcatgt

SEQ ID NO: 21664 - DNA, 379 bp, Glycine max
tcatggtgaatcaagagtgatttaaagatgttttgatgataacaaagatgataacaaaagatgatgacaaaaatctcaaaggtctatcaaagaatgagttcaagatattcaagatagaatcaagaacacttcaagattcaagaggaaagttgatttcaagaatcaagattcaagagatcaagatttcaagaattaagattcaagagatcaagattcaagattcaagaatcaagagcaggcttaatcaagataagtatgaaaaggttttcttaaaaattgagtagcaaatggatttttctcaaaacatgcttaccaaagagtttttactctctggtaatcgattaccagttattgtaatcgattaccagtcgcaaaatgg

SEQ ID NO: 21665 - DNA, 371 bp, Glycine max
agcttgtaagattatggcgtacccatctcatgtggtactacgaggcggtcggacgatggtgcacaacatgtgtttcacatacacaaagcgcgcataaacccaccatactctgatgcccacctgcaactgagctcacgtactcccacgtagcccatatcctgttttatctgaagaccgggatcccatcaatcctaccaagctctcccaacatctaagtaagacgacattctaacagcacaggctatcacagccaagcaaaacagagcataggcagaaaactgtgccaaaacaccaaccaaatcacagcttttctcactgagagactccaataacaattccttcgttccggttcattaaccgccggatcgact

SEQ ID NO: 21666 - DNA, 298 bp, Glycine max
taacataaggcatgcgaatagggtggaattcctagttctattcccgcttggtatcaaacatgaaagggaaaatgtgatattttatctcgatgctctttctcggcgtcatgcattactttctatgcttgaaacaaaattgatcggacttgaatgtcagaatagcatgtatgaaaatgatcaaacttttggagaaattatctcaaatggtgaaacactctcaaaatacggtcctttttaacatgaatgctctattttcaaagaaatcaaattgcgtgtgcgctaatgtgctactacatat

SEQ ID NO: 21667 - DNA, 1149 bp, Glycine max
  unsure (1)..(1149): unsure at all n locations
tgcgttgtnncccttttgaggcnnntcagtcacccaatttgcgttactggagatacctantncnnnnnntatcgcagcgtcgagacacatacactctcactacactnactaatattttattatactgttactcgacggacttccctatctccttcctccttcctacttatacctntttactctctcccctcctatacctaacatctcatactaaccaatctcctcccataccctgcactatgcgccttctttccgactactcatggtgggatacatatatttntagctatataacatctctcttctccgacgaggcacctgctactaggccggcatacgctactatcatcattatcatccacactccgtgtttcctctttctgtcatacaacacatctgtgacggngcacacgagctctaacgtacgtatatcgcttaactatttgcactcaccctcaatgtttttcaacaagggtcctgcttcgcgcacggacacatattaataacgaatgctctcctatcttcaccgcttctttaaaattcaaccctccttacactacaaataccatatcctatgcttcctcattcactatctacgaaggacggactgagaatccgtgtctggcgctcaccncttcncaatacatacatacatttacacttctacttattatctcctaactatcataacaccacctccccctctatctctagagaggaagagtggagtggtgcggctgtgaccttacacattatcttcgcctctcttcattctctctcctctatanactcttctcatatctatcactactttgcacccgcggctaccgcagggtcgagggagtcgggcgccgtgctcgtgctcgtcgccaccntacactacccatcttatgacctattctctcaacatgcacanattatccatcaatatcatcatcaatctnngactctctgacagattagcaccatacactctagtctctcaacactatcattcatctacncgtaacgatcttatattctaatgattcactgcattgatatgcacatacacatacgtaacacctcagataccatctactcttncatgactatctccaacggtactacctgcgccactctctagactcctgtctctctaacctaccg

SEQ ID NO: 21668 - DNA, 801 bp, Glycine max
  unsure (1)..(801): unsure at all n locations
tatgtctctttacctcaagtacatttaatagagcctgcagctttcttctgttagttatgagatctgagatacccttttgantaaatgacctatagaanagcagtacccccgtatgctatattaattgatccatcgtaccctatctaatggaagtaacaagctcaaactctgaattagactgggttgtgtaatgactcaactaagctctattgctagagaaataggctgaatcacgtggtgttgtacaaggtcgacactgtgcaagacattatgatcacatttgtcttatgatgggttatgatgtatatcttgaatcatcaatttagtgaatcttcattgtccttaacatacattaatgctgtcttttgtaataatgccctagaggatatcacttcttcccacatattcaagttaagtgcatattcctctatattaatgcaaactaatagctaaatgatgagtcctctccgacttctatttatttggcttttacttgtgcacaagactactactggtaggaatcgttcgctaaatgtgaacacgtgcgtgagttgatattaaatggtttagactttaacgctacttgccatttttatttttggagagagaaaatttgtgggagattttctatttaacaacaaccacatgttggtaagtgtcacattcttccagtaccctaaaaatgtacaccgtttttaatcaccatttcttttgatggatttcacagcccttgtaaatttttttcccattcctttcatcaatactttttcttggtcagccacgtgtctttatcttaaggct

SEQ ID NO: 21669 - DNA, 865 bp, Glycine max
gatgtcacttgaccgtgatcctctaagcacctgcggctgcagctgagttgcttgacgcacctattatggcgcgcaatgattgtcgtgactagatcctgagtgaaatctgtatgcgctgaatatgtaccacatcatacaaacctgcatgcgtaccggcaaacactgtggtgactaatgactgagctcactcacatgatttgagttgactcactgtccgcttaaacatcggatacctagttgccgctgcttaatgaatagtaacacgaacactggctggctctgggcagcaaacaggatatgttgaacatgctataaaattctacgcctcctctatatcatcagaacgcgggcaccagacgttagggccccctctgtgcttagatatggacaagcctgccaactctcaactgtgtcctagttttatctgcgacctgtgaatccaccttctgggctccgataacaaagaaacagctagctctgcttttagtcccggcaatcgcggcaaaattactttggccaggagatgagtgaatgcacctagcaaacatgttatctatatactgggaatagctttccccccccgcctcccctaaatttgaccccaactgtagttcccgcacgcaaggtttttctagtgctgaacacgttaattccgagcgcaccataatactagcggcataaccttcgggaaagggaaagtcccactcttcattttcatctgaatcttaacagacgtgctttcccttcgctataaccctattcttttgaacgatgaagcgtttgcgttttctcccttcggcgaccatgtctaaagtcacgataatgaatacttcggcctcaacatctccccatcccgtgaaaaacg

SEQ ID NO: 21670 - DNA, 72 bp, Glycine max
  unsure (1)..(72): unsure at all n locations
ccgacctcaatgccctatttgttatatatacaataaagaggccttagttcacactttttaaatgnaaaaccc

SEQ ID NO: 21671 - DNA, 449 bp, Glycine max
  unsure (1)..(449): unsure at all n locations
atccttacagtcacctgcggcatgcaagcnttggcatgtactcaacgaagtacttgtgtgcctctaaaataaaaggaataataatatatcagttagcagttacataggcaatngtaggaatccaacattccttgcaacatcaaagtttgcattgcaacaataaaaaaaaataaacaactgaaacaccttcaacctggatctgggttnttatctggatggtattgaatagaaagtcgcctatactttttctttatttcagactctgccgctccaggctctaatcctagaatattaaacggatcaaaaatttccatctgcattaaaattaaaagaaaaatttcagaacgtgcaccagtggaagtctcagccaattagtaaaatgttaaacacaaatacaagatccctcaatactaatttcaaatctcaagaagtggaatagctgaattcat

SEQ ID NO: 21672 - DNA, 975 bp, Glycine max
  unsure (1)..(975): unsure at all n locations
tgtgtctcgtgacgtgatctcacatcgactgccgctgcagctgaaatgagantccacacatatatgtggatctctatagactctctacttgtattcgttaggaatgaaggctcctactcttatttatactactccacctccgcaatgaattgtggagatgacatctttataatgcgttacacatactacgtacatctacactcttatacttccttccataaagatacaaaagctccacacatctatataatattctggacgatctcacatccttccacaagcatataagagagttctacactactattaggttcttcaagacgatctatacaaactctcactattttccaagcttggcagttttcttatcctcacaactgaggaggcatccacacaattttatttgttgatactcactagacaccattngcgtcgtttcaaaactgcatactatagtgtatatacacataccctccagactagactttttactgattcactttaacaagtacaacactctctccttattcaaaggcgcgttcttattctcatggggctgacacgaatagacgcttgacgnatttgtatctgtgctcacatttgactcgcgtagaaacaccactatgttttgttatgctngactgtagtaattcgctactactgctctgaatcatagtctggacaaacatattaatgatagttgggtgccgccttcgctgctcctttttgtatacggtcgacgggaggaatacgggccaaacaaattactttttctgtgtagccacctctccacaaatgtgtatcattatagtaatgaccatcgacaacccgatctggngtactctctcatttccataagtatgtccttcttataaatgcctaaatcaatcaagcaagtgtgttccttggtagatctttttttataacctatccccattcgtcccttaaattggggtcttaatcggtgctcgggct

SEQ ID NO: 21673 - DNA, 229 bp, Glycine max
  unsure (1)..(229): unsure at all n locations
gcactatacctcgccattgtcactaagataacactttatattttttcatagagcaacataccacagttatctcttctattcatagttttattgggaatacatcctacccctttccccctgcttaaagattattttcatacctgcgttatctccantaatcctttactacatattttttaaatccaccacctccaccccaccatatattntttaaaacgnttaaataact

SEQ ID NO: 21674 - DNA, 215 bp, Glycine max
gaattgattgattgattgattaaaccttgagcctattaagttgtatcttttgctaccttattttaggttgtaagagaccatcatccacaaaagatggttcaaggcaaatttgtcctaaatttgggggaggtattatcaaggtaaaattgtcccaaatttgggggaggcattgggtaaggattgaaatggtaaagaaaatactattacacacttgt

SEQ ID NO: 21675 - DNA, 419 bp, Glycine max
  unsure (1)..(419): unsure at all n locations
aggggcccttccttacatctgctaatgtatgtcttagaagggacccctactcaagcacaacgtataacttagctcattagtagtccttgacaacatgctgaccctactcaagctcacccatatgggatgcgacctgattatatgcccctcattgcaaacacaactgaatccactctcccaatgggtatggttccaatcctgactaaccaactagttcattccacacctccaatcaaccacaacatgacacaagtcatanaaagagtcccaatggcctgttcaaacaagcaactatatattgtggagaagagggtgaaagctatcgaatgtattaattatagcatggcagaagctgcagatctttgttgggtcccgatgaatcattccttcaaagtttaagcactagagttcgattaata

SEQ ID NO: 21676 - DNA, 928 bp, Glycine max
  unsure (1)..(928): unsure at all n locations
tgatgcttcgntnccnttcaggcactcgaggagcgcgcgcggtgtgatatatttatacaaaaaaccaaaaacacactttattcttttaccccttattgcaccccaactacggaagaaattatattcattcatgaacgtaataccgcgtttgtgtgattaacctcacaggacatgctttttctaatggaaagggtccaaaacctttatcagatgcatgcacgtgccgaaagcttgatggtggtgttgcacttgcaagctggctctgcccaagagatgcatatacctattttgctccttagatggggctcttgtttcaagttgaacaataaaccatatgatggtcctccgatgatggcattcttctccacctttgcacctttattctaacgccgaaaagaggcttttttttctatttccaatcttgagcacagctgatttcagaatttcaatgtgacacgatgattgatataaataacaatcccgtcgaatatataacatcgtcgccatcgtccattgcatggccgtnttatggtaacgaattgaacttgataggaagcaattatatatttctctttgcaggtacatgaatttctcggtntgtcttattaaaaagctatgtgatcgctgattacaaataaaaacctcatttttaccatgatatgcagatcacgctacgtttcaccatccttgagatttaagatcattaatacttttacccatgtgaatcaaatgctataaacgaatgctccatcacaaattattctgaactattgtggtgaattggcgccaacgcgcatataacaatatacaggttgtatcgtcaatcctttatctcttgagaacaaggtccgtgtattaccacactgaagaatgtttaacaacgacaaatctcccctatgatagattgaacatttcgcagtctaactcg

SEQ ID NO: 21677 - DNA, 432 bp, Glycine max
  unsure (1)..(432): unsure at all n locations
cttgtggccaatgaagattgatttgacacatgcgtcctcgccttacttgattcctctacttcctgatgaaacatgttgtccaaagccactgcgaaggactggttagttctgtcactctcaattgttgggggattctgctcaagttgctgagaggattggttaaaaccatctttcactgatcattttccctctcacagctcttctggtgcattagaatagctttttgagtggcctcatatgcagaaagcttattgtgattttgatcaatgcactgagtttcattgtccgtctcttcggtgcgcctacctagctcactgctaaagaggatgctgcttgccatgattttctccacatcatatcttgtgatgtcaaagatggttacagcattctctcctcggaatttatatcancaatatcataagcttcaactgc

SEQ ID NO: 21678 - DNA, 328 bp, Glycine max
accatggagatgcagcggaagaacaaggagaagaggtgatatgaggcgccatccactacggaataagccatggaagaaagagcttcaccaccaagatgagccttggataagaagcttggagaggatgcttcgatggaggaaaagatagatgtagagaaagagagagggggagcacaacaattgaaggaagaaaaagggagagaagttgaactttgagttgtgtctcacaagactctctttcatcaaagttacaacaagtgttacacatgcttctatttatagactacgttgcttccttgagaagcattcttgagaaaactttcttgag

SEQ ID NO: 21679 - DNA, 583 bp, Glycine max
  unsure (1)..(583): unsure at all n locations
aacctagaggagacggaccattccaagtgttggagaagatcacacgacaatgcctacaagattgacttgcctaaagagtataatgtaagtgccactttcaatgtgtctgaactatctctttttgtgcatatagatgagccttggatttgangaccaattcttttctctannannnnnnnnttnnnncttttcccccnccctnnancncttnnanntccctgaccccancatacttaacgagcccnncnccccttannacacccctnncctttttttccctcccttcttactattaaagcccccctccaaaaaataatnccccaatgccaaagcacttcccaaccactaattgttcttaaggccgaactactgggagcgcggggggataaggtttantattatttactttatttgtaatttngcccaacctttttaaccccttgctttttttattttttttcaaaaccctttacaatttttttttttcattaaaaaactttgcattaataaaattggggaatttctctggtttccttttaacatttcacactaattagaaatctttgctctccctgcctttttc

SEQ ID NO: 21680 - DNA, 240 bp, Glycine max
  unsure (1)..(240): unsure at all n locations
cttcaatattgctatgagggacttancaacatggagaggagcttgattgatgctgtctatggtggagcacttggtgatatgacgcctgctgaggctaagaatntgactgataagatggctttcaactcccaacaattcagtgcaagaaataatgctattgttcttataggaggccatgaagcgtgcccagattgatcttcatctactgaaattaaaagcttgaagggaaacttgatgcct

SEQ ID NO: 21681 - DNA, 652 bp, Glycine max
  unsure (1)..(652): unsure at all n locations
tcaggcttcctacttntgtttgttgaccatatagctgtacctgaagatatgtcnccggggtctcgagaccttggggatgtctagtggggtgctattgcccataaccaagcttgaccaatcccgacctaacccgggcatattcaatctntgataaccttttacctaccttatcaantaaactcttttcagtctncccttttaanaactaagaccacatatcaangaagttttttttgtggctggccccctcttaatcttnactcgtatctgnaattcttcctcttgtaatcnattaccaanggctgtgttnatccattatccccngcctctncacatnncacacacggaaggttaagatgggcttgtggggtggaggtccaaanngttttatatctattactactctttttatttgtaaccgaaattcaaaagcctctattattctttaccacgatntttatccattacaaggcttataatggaacatgatttnaaggggcccttgttatttatacccatcctgtgtatcatttccaagantaattggtaatcgattccaactatttttatccatttcccctcgttaatnttntttcttttttctcccccttttcacaccagattgggcactgggagtaggttagtggctttt

SEQ ID NO: 21682 - DNA, 1271 bp, Glycine max
  unsure (1)..(1271): unsure at all n locations
agaacgcatcgtcgcnttactntactcnntgtcgcactatcgacgcgttcacgcaaattgtctccgcctacnctnntctaannnnnnnnnaannnaaaaaggtganttgatggcccctgcaanangcccccannangnnngangnnaggnccgcaatnanagagangcgagangantatgacctgagggatactgtacttattactcaactcaatcaagaaacaaaaacaccacagagaaacgtccgaatgattctacttggctcatcntactataagaaattttcttattagtatattattatcataccttctttaggttgtcaatgtggctacggcatgacctgacgggcggatttcatttagctgatattacaaatcatatgatcggtggaacatgattttattatttgattaggcgagataatgccgtcaatgacaccataacgaacgaattgataagcaatgaaacaagaataaaagtacgtgaaacacatggcgagccccaacgcgtcataagattgaatatgcaaagtccgatttcaggatctcaccgcgtgaagactgaagaacgacgatgaacgaacgactaacgacgaagaaccgttgaaaatcttcacaaattacccaccgaaacgttatggaagcgcctcggcttggattttcttcaagaaaccattttctcactattcttaactgttacgaagcatcagaagggcngaccttcgttctccttcnctactctcgctatatataaggaaaaatggggacgcacgttgtactctcgctcgcccagcgcgagcaaggtagcttactcctcacatactatggggacgatgaacactccggaatgcccaacgtggctcgcggcgttattgtacaccttacttatcacaataccacacattatatgtttgggtattctttccgcgacggagtgaaacgtatcagatgacctaacaatcttgtgtctttctgttcggggacgtacccgtcctgacctgacantcctctatatatangttataatagagttggacacccggtgtggtcgacaacatgtctctgatgtggcgtagtcgaagacttatcantgcgatacaggtgccttcgattgtcacacggttgtgacctactcnccgcacgaggtcgcnatctcgttctcactcgacgaccgtcacagaacatcctccgtcacactgatgtctgtactagctgaacgtattcatcacactgaatagtatgaccactaatgtagtgctatcgctcacg

SEQ ID NO: 21683 - DNA, 562 bp, Glycine max
  unsure (1)..(562): unsure at all n locations
ttctaggcgtgactttgctacacacacccctcttatatctaatctcacctccttgagaagcttcattgataagattcctatagaggctacagcttatctactctcacccctctaatanctaactcacctccttctnatgaaaaactataactcaattacacttaccccctgttatanctaaccctccctccctgtcaaaatacctgataatagaaaaaagtccctattacaaaaactgctcaaaatgtcctgaaatacaaggctaaaaccctatactactataatggacaaaatacaatgcccaaaacaaggaaaaatctattctaataattacaatgaaaagtggacccaaccttggaccgtgggcttaaaaatttaccctgagattcatgagaaccctatggctntctttatagctttagccaatcctcttgaatcttctatccataaccttgggggtaagatggatcatcttctccccttggaagaattgacctccattttaggttttatactttgggtccttccttgcaccgtttctgattttatgtggttttcctcc

SEQ ID NO: 21684 - DNA, 371 bp, Glycine max
  unsure (1)..(371): unsure at all n locations
tactctaacaaagctcgctgttgctaccccacagagcccctgnaacaaggatcagtcgtattcttcctatagggccctctttggttctcataccaatgcttccatggtagccatattgatgtctctccgatccacgtactccttttggaccttatggccattgtctcgaatttttcctttactgcttgtgtccttttcagctattcctttaaggcttgcccattctcactcttcttaagggtttccaccatttccttctttgaaacctttanctttcggagccaatcccactcctgcatcttatccttcagccacttatgatagccgcgaagaacccatagttgcttcccctagctctttatctttctttg

SEQ ID NO: 21685 - DNA, 325 bp, Glycine max
atttttggagtttcaattctactaatgctacattgctcttgttacaaaactgttagatttctagtataccaagagagttcccaccatattgcaaaaaacaagccagctataaactcaccatattgcaaaaaaacaaggcagctataacattgtaataaacttcagagacacaaaagcaccattgaaaatcaaagacacaaaagcaataagaagatgactgcaataaacaagccagctataacattgtttgatatttgttcagactttaattacagcaaatggtaaaaacttaatgagtgcattacaaggcccttcaatttaacat

SEQ ID NO: 21686 - DNA, 784 bp, Glycine max
  unsure (1)..(784): unsure at all n locations
atttattatttatgcaatataccatacttaantcacanaggtcaataaaaacanggtaagtaattaattntaattaataaatcataaatttaaattttaatttcataatttttaaaaataaataatttaagtggtagattatttagataatatgaaaatgcatattatttaaatggttattcaggtcaataggcatgccangcatgtcatcctaaagttaatcatgtcaagctttatgtggatcaaccaatcttaagcanagctatcataacaatggctaactctttatctttcacaaaagtcagtcaagctacgacggtgcatatttattctaagtcatctaaacttatcaaatcaaatntatttgttataaactacacaacattttattatataaactgtaaactttactgtcaatcatatatatatatanactctgttgtcattgagaagtcttccacattctcctctgtaggatactctgatgtttttttatcatgagagaaaaaaagctactcaaattttttcttaatttaaatctatcagactttcatatctgaaactattaaattcaagaccttgtcttatctaatgtaaaggatgaactttctcttcttaaaagcttaccttcaagatttttaaaagctacatcccccccttgtgttctaaaagcttgaccgctgctatatacttaacgaaaaataaaataggtgcttcgcggtaatatgtatgacacgacatgaaacctcaggctgattaaaattaaaaaatttatgcgctgccc

SEQ ID NO: 21687 - DNA, 488 bp, Glycine max
aagagtctcattgaaccattcttcagccgcatatcagataccacaaaatttggaaagcccatgccactggcactaaaaggcaatcttcgtatggatagtttttatggagactttgatagctacataagcaagtagcgcatcactgtaagcctctttactcattaatctttattaatccatcttaaaagtcttgcaatttcactttattatctgcataaagaagaccataagcagatatcattcaattcattaaaacacaataaaagactggtgtcaaagtcaaatgatttgaagctgttctaattatactctagcacaacaagggaatggccaagtattaacatcaacatacatcatctagtccctttgaatgtctagcagatataaacactataaacacatgtcattatactggcgtattaagccaaacttaaccactcggtgtgatgtactatatgggaatttcctcgattaaagccggactgaga

SEQ ID NO: 21688 - DNA, 285 bp, Glycine max
  unsure (1)..(285): unsure at all n locations
accatacaaaccttntgccttccatgtagcaacctggagcaattgagcagcctgaagcttatgctgcaaatatttacaatagacctnctcaacctcagcagcaaaatcaaccacagcagaacaattatgacctctccagcaacagatacaaccctggatggaggaatcaccctcacctcagatggtncagccctcagcaacaacaacagcagcctgctccttcctttcaaaatgctgcttggccaagcagaccatacattcctncaccaatccaacaacagcaac

SEQ ID NO: 21689 - DNA, 525 bp, Glycine max
tgtaggattatggggtacccatcacatgtggtactatgtggcggtcgggcgatggtgcacaacatgttttccacctccacaaatcgcgcataaacccaccatcccctattgcccacctccatctgaactcacgtactcccacgtagcccatatcctcgtttctctcaacacagggtccccatcaatcctcccaagcttccccaacatccaagttactcaacattcaaacaacacaaaccatcacagcctaaaaaataaggcaaaagcagaaaactctgcccaaaacaccaaccaatatcacaagctttctcacttaaagaccccagtaacaattccttctttccaattcgttaaccgttggatcgacttcaaaattttactgtaagtctccagttcataaacctacatttttaccgttgggatctattataaagcattcacaactcattctacattactctttccacaactcaccaatacataacacttttctgcacttgtgccaaatctttgtgcacaatttcc

SEQ ID NO: 21690 - DNA, 296 bp, Glycine max
  unsure (1)..(296): unsure at all n locations
tcatcaggatcagggacctcgatgcaactagcttttggagcctngattgcaataatttcttgattctgtgaaaatagtagataaaggtaagaagtcataattgataaacagactatagccttataaaattttaaatatttacacaaaaaatcacctggaagcagggaaggctaagaatatcttccttggttaaaaaaaggtacctaatgatcaagcaagcttactatcatgaaaagaaaccaagaaattgcaacttataagacaagttgtcagaagttcatactcttgagagcttt

SEQ ID NO: 21691 - DNA, 474 bp, Glycine max
  unsure (1)..(474): unsure at all n locations
ggacctcagaatactcagctattaatcttctcagctaagaatctttttagaccatgaaaatggggaagagttctatctttancaaatntgactttgtataccgctgctgcagttaaccaggtccctgcgagattatttggagggcaagaaacgcatgtcctttggtatgtatatactacgctcacaaatcatttttttccaacctgatcaaagctatatctagctatatgcgggttttcttttcatgacaaatatatgcatatactactttcaaccttaatttttccacgctgatcaaagttatagttagctatatgcgggtctcttttcttgagaatcatatgcctatacttctttccaacttaattttctccttgctgctcaaggttctaattatctatatacctggttagtttcatgaaaatcatatgccaattttttataaatatcagtttttttccctttggattataa

SEQ ID NO: 21692 - DNA, 1176 bp, Glycine max
  unsure (1)..(1176): unsure at all n locations
cgtacgtagcgaatcgttgatgncacntcatcctctactcantcacactagannttatcangctctctatttatatctcatcttaatnactanncnnnnacgnnncaatgttgatactttgcacgtgaacggcccttcnacctgcacgctgcaactctgcactantgtgcgtgaacattcatacataagaccgacatagcagactattacactcattctgcacgcaaataaacctcacgctaacatctgctcacaaaagacttgtaagtgcaaagccacttaattctatgggtatacactcttcctataacatacacctattctaaacatgggttatcgcaagccaagccgacgcaataataatgttcttgatgataatacttacttacacacttttccgttgtgtgaacacctactttgtcaattctaagttatgctgggcttcttaacaaaatgggaaattaagttttttccctaatcttattcaactatgggcgctcaaaataaaagattaccaacaatcgcttcttatgtaaaacaagntagcggaaaggcacattctatcagcactgttcttgaaactttacaagaaggatgccccaggaaccatcggatcttgtattctacaatgacataaagaacacactgtcangctcgtactgactatgaacacaacactctcgattgtggaacaaccaatccataagttgaagaatacaccactctagccacacgtgcacaactgtgcgtctctatatggacagtaattacctatctaaacaagccagaaccactgttctacctgctaactctctaaccacgttaatgaaacaaaccacccttctatcttgtattcaatacaacacaacaaataccattggtacacaaccaaacactacagaaacaaaccataacgtgtacggtacgtctcactaaccaactaacacaacactatcctcatcaagacaataccactctactacatcatcgatacgaatattcatctcactaacgctcacaacaatcaatgcttatatacgttctagaccctcgttctgattacttcaaacataggattctattatacgtatctcaatancgttaatagataagcgcatgatcacatagcgtcttcaacctactacgctcatgtcatacgtcacatcctctctcacg

SEQ ID NO: 21693 - DNA, 203 bp, Glycine max
  unsure (1)..(203): unsure at all n locations
cacgataactcgcctgtngcttttctttcatgctatatgtaacaaagcgattgatccactaatgtttgatgagttggaaaatgatgccacaattatactgtgccagttggagatgtattttccccctgctttctttgacatcatgattcacnttgattgtgcatctgggcagagaaatcaaatgttgtggtcctgtatatcta

SEQ ID NO: 21694 - DNA, 589 bp, Glycine max
gcttcgtatacaaaacgatgaactcattgtagaacaaagaaacatccaacctgtttgtctattcatatcaaatgaacacaactctaagctttgttgttgcgatgaatcaaaaaaccactaaaagctagtaaatgattcacatgcaacatcaaaacccaacaaaccccgaccaaaatgatacatatcaacaaaccactcaagataaatccaaaagctttgtatacataacaacaaactcatgataaaatacaaaaagggcgaaccttttggcttgaaataccatcatacctgccaactaaactgataactaacaacaaacaacgtttatgaacaaaaaggtcaaacctagtggcttgaaataccatcatacctacaaaccaaaccgaatacaaccacaaacaacttttatgatctaaaaggtcgaaccccgtggcttgaaataccatcatacctacaaaccatgctgaaaactaacaacaacaacgtttttattaacaaaagggcaaccttgggctgaaatccattatactggcaactaaccgaaacgagtcctattttttcatgcgaaactaaccctatttgaaaattg

SEQ ID NO: 21695 - DNA, 388 bp, Glycine max
  unsure (1)..(388): unsure at all n locations
gcagcttgtccttctctgccacaatgccttncacctagccatccatttctttttctcttcctgcanacctttacagcgtgcgaaccagtcatcactgtccaaccatgtgctcagcaacttggccaagacattgccaaccttggaagatagttggtggtttgaacttataacttcagcgaaggtgatggtggtgttagctaccttaaggcactcttgtcttcaaaccatgcgagcagtagccctccatttagcaaccttcgtctccaaagatgaccacttgtgcaaagccttctggtgccgctgcccattcttttccaaaattgccaaacttctgaacaagaagactctggcggagtatgtggcattatgcaccctanctgacctcatg

SEQ ID NO: 21696 - DNA, 541 bp, Glycine max
  unsure (1)..(541): unsure at all n locations
tgtaataaccttagatagaagtgagagatttagttcctgagtggactccctcttctgaggagaaaacctatcatctatgcagntgcatcacaaaccttttttctgtaaagttcaacagtggctggcaatgacaaaatccaatggtatagttggtctaacaaaggctaggttgaaatccaatggggaattggcacgttgtggaaatctaatgatttgttggtccaattgtgaactagtataaaaaaaatgaggattctttctttttcctttttctttactttgctttgcatagatatgaaaactatttttgaccaaatcactaaatcttctttttatcaaacttaataatagaaccaaacattgatttaccaaaaggttttattaagagactatctttgatacataagtcttaaactgcaaaagaattattttttcataactattgcattttcattctaagcaaccttgaatttccattctgagctcagaacacctntcattctgaactcacttattctatactatattcagaaatcttttg

SEQ ID NO: 21697 - DNA, 386 bp, Glycine max
  unsure (1)..(386): unsure at all n locations
gcaagcttcacggtgctcattgactccagattgctgcagatattgactttgatctgaatggtgatctgcagaagaacatataccacagactcttgcaacaggtgtagatttctgattcatggcaagctgggttactacgttgaccaacgcattaagtttttcttcaagctttttatantcagtagatgaagatgaatctgtggccacctcaatgactcctctaaagacaatagcatcatttcttgcattgaattattgcgaagtggaagccatcttctcaattaaatttctggcttcagcaggagtcatgtctccaacggctccaccattggcaacatctatcatacttctctccatgttactgagtccctcataaaaatattgga

SEQ ID NO: 21698 - DNA, 534 bp, Glycine max
  unsure (1)..(534): unsure at all n locations
atagcttattggcttaactgtgagtattcanaacagcccactactgttgattatattattatctaatatattatatattatttttaagacagattatgcctcttatttaatggacctttaataaccctaaaatgtcattcacaacaagccctacaatgtactatttttgttatttaatccgttctagcatcatagnatattagtcttttaataatgtttgtaaacctatacattcacctattggtttatttaaggataaattcattaacctatttaaaaccttaataataagtaaaatctctatctatttattacaagtagcccttgtggatctatatgaacattaaattgaaatctaattcttctctagctgctcattgaaacttgaatatagtactatatccccgaagagacaatgaagacccggtggatactctagacaaggcagaaaaatagcagcctatgacttggcagctcgcgcctatgataacttatttttttatataaaaggatcgacatagcttaaataatttt

SEQ ID NO: 21699 - DNA, 841 bp, Glycine max
  unsure (1)..(841): unsure at all n locations
gtgttatacttgaaacctgacanacccccccanagtaatgtatcctagggggaccaagcggagcggatgttattattttgccttctacatacccgcgaggggcagactactcctgtgagatcaacgggtgccatataaacttttataaattccatcctgcatgcgcgttcccaacatttaaagaaagaacattttttaggatcgccttcaaacgggctcgatggaatacatttgctatacaaatcgctgttgattgaacgcacccctacagaaacaactatctatattaaagaaggttgacgattcatggacgaaacaaaataatttggagctttaactatattaaagctcaaagaactttatcatgatgtagctgacttggacttacaatgctcccatgtgttgtgcactgacacacaaaatgaaccacttgtagtttttggttagtccttaagagtcatatcttttggaagccgatatttaatatcccaattggtcatcttcacccccccaacagtacgtccacataatactaactttgtggacctatcaatgtcatatttttccttaacctgtccaactctcctttataaatcaaccgatggtgcgaaaaaacaacaacaccgttattgattacacaccactttgtatataaaggagttacaaccaataccaagcctggctgaagatttgaaaaaactggacatcaacttgactagatgatatgggataaggacccgggcacctcctttaacaagggggctaccaagtcggaacggctttaaggacatttgacgcgattgaatataatctgatcgggtgcgcgcccaatagggtatcg

SEQ ID NO: 21700 - DNA, 522 bp, Glycine max
  unsure (1)..(522): unsure at all n locations
tatagatcttcacacagcaaacactctcaaaactctctggaacttgtacctttctctctctaaaatctctaaacatgcaaagctctgaatcccagtccaaactccttatctaaaatctgatttcaggcttaaataggtgaccttgttcctgctcttgcgcttaacgcaattttggaccgcttaacgcacattantgaatttcngtttaacgcgtgcctttgtcgcttaccggatggactgaagcggtgcgcttaatgagatgaatccgtgcgcttagcgaacctatacaactcatcttcttccagattcttccttgcgcttaaccaatgagtgttacgcttaatgngcgctcgctaagccaatggactggcttaacgagaatgtgaaaaaccacacttttaaaagcttgcctaattaacccgacattgtcagaaaatgattattaaacacacaaaatggaagtactaagtatttattacctatacttaacataaaggtcttataccactacaaactaaccat

SEQ ID NO: 21701 - DNA, 1006 bp, Glycine max
  unsure (1)..(1006): unsure at all n locations
ccacccgaaccgaggagtataacaccacacaatcaagacagtcaactccgccatcgtatgatgtanatcccctccnnnnnnngggcaatagtgaaatcgataacctgaataaccncancagaggaagaaagtaccaaaagngcaaccaccacccatagcgaaagaatttgctgtttttcactaccagcaaagctgaaccaccagcccgagatggacccaaaaacgcaaaatccctagcccaaagaaaccttaagggcatataacgaagcacacaggcctaagccacatcaccaagggtcccgaacccaggggggggcgcgggggccctcaaatttaacccacacccagcaaccacgcgaagagccaaaacacacccatgaaagaagggaatctaatacaagtaaacaaaccccctctcccccgaaacagagctcgccggcgcaatatactacaaccctggttaggaaagaggaatgaaatcaccttgggcccgagaaaaggggggaagctcgcggtctcacgaccgaacaaagggcgcccgccttaagctgggacataaacaacaggagagacaacgaaagcgcggctaaggaaaactcccccaaagccgggcaagaacaacgcacaaagaagtgcgaacggcacaccaaaacgaaccggggaaccccccaaagcaccatcaagctaccagaacacttccccgctgagaacacgacagacgataaacaaaaccacccctggacatcgaaacagaacacaacccaagggagggctattccatctaacacagatacctcacacgaangggggaggatcaactaaccggaaccccttcgctgaggaccccggcaaaaacacaaggacatccgagacggcctcaactacgaaacaacccacgaagacactcatagacagacgaggaacacaaacgagacgccctcgccgaacaactctcaatcatgggcaaaccgacaacagacccatcacagctaaccagacgaacacc

SEQ ID NO: 21702 - DNA, 987 bp, Glycine max
  unsure (1)..(987): unsure at all n locations
tgttgcttcccttcntttgtatgcccttgaggagccgccngcgnggnntnnntnnnntcccctacnnnccancacaatgcatcagacttcacttttatttgattgttatgaccacctgaatcgctcgatagctttctgtgttcaatttccagcgtctcgatatattatgcgcctgaataggacttccttgtaacaagttatgacgattgtacttctttcaacagctctctattgatcgaatttcaagctctccctatatattactgcgcgctaaacacgacttcctggtgataagatatcaccattttgaatctctctaaagcttgcgtggttaatttcaagctcctcgtacattatccaccttattccgacttgggtgtgtaaggttataacatattatcttctagagacgtctcttgctcaatctcaaccgtttggtaattctattcccagcatgcggacttttggtgcaaggttttacccttatgatttactcgaagctacggtgttcacttctagctgttgggctattaggcctctgatcgtacctgcgatgataaagtatgagcattccatttctcaaagcttctgggtacattggagctctagaatatatgtcgtgaatgacctccgtgcaattatgctttatatgtgttgcacttgctgtaaattgactttcttataatagcctgattgccttccccgaatttcttccttgattcttagagttcgggtcattgacctctttatatacgcgactgctcttggccgattgacttatctaagggtctccggtcctctccttgttccgcctgcgcatgttaattttaccattcacacactctctttttttaaactagaccatctctctatttcttcacacgttatctctcctcggccgtccgtatatcactattgtccgcctctattctcaacgtcttatgtattctctgtaatttattattccttgatactcgtgngactccc

SEQ ID NO: 21703 - DNA, 775 bp, Glycine max
catgctctaccttaagtcctgcactgccgctgcgcttatttatacaacaagaaagactatgctttgataaaccataatctctgtcttcaatattgatgtttccttgtgtaaaccacttgggttctacttccttcgttgcacatactcaaggtcacctatgctctttgctataaaaacctcagattcaacattcaaagaactgaccttaatattcagctttctctaagaccaagtcatccacttgactgtacctaaattgctgcttgttatcaattgaagttcgagtggaaagataactctcccattcttactaatgttttttggaagctacttatgggttgaggtgttgactactggatattaattaatcaaccaaattgggcattcattcagaatactcatatagacgataagagcagtgcctaatttccctgcgagcaccttatacattttatctgaggggattacctgaatatgttttccctaatcaattggatctcgaacttgtcatgtatacatacatgtccttgaatctctttgctaataaactgctgagggagcaattttggggtaggacgcaagctaatcaaacaagtttaatgctgatttgtttatatataaattaccgtttatagggaaagcctgggtctttctctagttactcctcctaatctttatcgtggagtcaatttattgattctcttagtctcccgtaataacttctatccttcttgtttccctctacacgaaattcttttcactcattatacccact

SEQ ID NO: 21704 - DNA, 192 bp, Glycine max
aaaacaatctatccccaggagaacttataatctaaacctcaaacaacgcacattacacaactctactcctgccacaaaaaattcccacactctctaaccacttcaagaccccccatggacaaaaccctacattcaaaaaacaccaccccaaatagaattgatatttctccgaatcaaagcgttgtgcacaca

SEQ ID NO: 21705 - DNA, 139 bp, Glycine max
  unsure (1)..(139): unsure at all n locations
caccatacatttgtctagcttcttacgaacatgagcgccattcttaacattcttccactaggtgaccccccccccccncccacacacacaacatgcatatcaatcatgtcataatgatccacaactgaagtcataacac

SEQ ID NO: 21706 - DNA, 411 bp, Glycine max
aaatgatatataatcacagagtcccatcaattccttgatgtaagcctgataaagaatcaacttatggtctctggtctcccattcaccttttagctgatggattaccaacgctgagtctcagtacactttgagcaacttgaccctaaagtcgattgctgctcaaatccctatggtgcattcttcggactctgccatattatttgttaaatcaaaacacaatctacccgttaaaggcaaacattgtttgtctggtgaaaccaacactgccccacatccatgatctattgcattatacgcaccatctaaccatacaacccacttatttttgacttcatcttcacctcttatctcacacagggccataatatccttgtcaaggaattatggatgcatatgctgataatcacttat

SEQ ID NO: 21707 - DNA, 413 bp, Glycine max
  unsure (1)..(413): unsure at all n locations
tcacctgccgcatgcaagctngacatgtccaggagaatttatgaaattataagggatttagtactcatagccatttacatttaaacataggtcttcacaagttttgattcaggatgtgtatgtgactagttgaaacagtctcttctaaatttgacatttgaatgttgtgcaatgcaataattattagagcaaaaaagtcttaatagttgaagttcacagtttgtttaatgacatatcattatttagttcttgcaagttgtaactccttgcatacgtgagcaaaatacttatctatttcttttttaaataatagatataaaagcattctttttttttgtatatagatcctttcaagttcgatggtccatacccagatgatgtggtttatactggcctacattcttccaaaatgg

SEQ ID NO: 21708 - DNA, 459 bp, Glycine max
  unsure (1)..(459): unsure at all n locations
tagtttgtgatttaagactttctatagtcaaatgattancttannttgtgagttaccttgtataatatttgatgctgtgtatgctcttgaataacgacgagtttaggagtatttttgggtaataagaaaattatttggtctcatttcactcatctcatatgtgcattgcaagtctcattgaatattgtcgcttgggcttgcttccgcgcatgaaaagagaaatgctttcttgacaaggcctcaggttttgtcttgaaagagggttctatctttctccctttctaatagtaacacaactcattctgatttacccaaaaggatcacaatgaagcctactaagttcaatgactctgcttcacaggaaatactcaatattaaataatatattcttccaattatttgcaattgaattgtattgcgttttccataatcttgcattctatctttctgttatcaatt

SEQ ID NO: 21709 - DNA, 579 bp, Glycine max
  unsure (1)..(579): unsure at all n locations
tctcagtcacctgcggcatcgcagcttgttgacaataagaaatgctaaaactggcactgctagagctattctagagtctagactttggacaaatagttccagcacctaaacttggaccaccttgaaattcacacatttaaaagcaaggtacttttgtttgtgaaaacaaagaaaataaaacaaaaaggtttcttatttntggggcgagggagatgatgaagaatcatcttcgttggtgatgaagccatgctctcgcaaacaaaaaggataaggacagaaccaaattgaaattacgcacgagccaatatttcaattttcaacttgatacctacactacacatctctagtctctaggaggagaaaaacaatttctccatccacgtagtgtgttgcttttactttgcattttcacacaactttntatttattacattttgaaataaatcttgcagggacagacatatgagatggttaatcaaatatgttgtaacccatcaattaattaacatgaaaatattntaacttaattaataatcttaaatctagccttttcattatgttacatatttaacttgaaaa

SEQ ID NO: 21710 - DNA, 548 bp, Glycine max
tctaagcttacatcctactaatgtcataatgatgcttatcatttgttaatcataacacactctatcttattgagtcggttcttatgataaacattaaaacctgaaacatcaatatggtgtactgcatccttgacaaatccaatagtaacaacggcaaccatctgtcaaaagatctacatgaaatcatatttttgtcccagttatgaatatcaaactccatttaatttaataaacattattacattcgaattcttctgaagaagcccatccactccagcttgaagccttgttgtcacctcttggagacatcatcatattattcactatgttgtgatgcacaatatctttcccacaaataataattcggaagccaggaggaagtctcagatctaaaatagaggcataactctggataggaaacaaacatataatgataaatgtgacaatgcgcgccctgttcataaatcatatccctgtccatcctgcacctataatcgactaaactacatatcaaatctaccatctaaattgctacataatacccttta

SEQ ID NO: 21711 - DNA, 875 bp, Glycine max
  unsure (1)..(875): unsure at all n locations
tgtgtcatctgaccgtgatctcacagcacctgcggctgcacttgatgctgtgacgacctagtcagaacattgatgcttccgacatgtataggggcaatgattgaatgacttggaatggatgtcatttgggtacactatttctgaattggaaatctatgggagcctttactgactacaaagacccgcactgcatcctgtgcagaccgagaatttagatgcactgagcttcattctatacttctcagaacacttgtgaccaaaaagatgtggaaagtgggatggatgaccttatatatatactgtcagagtggtatcttcattgccactcatactcctactcattacaaattcacatataaaaaggcttgcgtgataaactgtaaatgcaattgatctatatatgtacatgctagtatatcagcaaatgctactcattaaaatgcagcatccttgaactggtaattgtcaacctctaccnctctcatatagcctagtgcatattcctccttaaacatattattcatgatggagataagtgttgtgttgtctgacaagattgtgagacactaagttttttataatatgtcctaattgtgatagagncaaataatcttggacctgntttgtccataagactttgccttgattntcaactgcggaagattaacaccaagacatataaggcctcgttggaattccaacttgttctccttgttagaaggattgaaatggcgcacacctttaaaggaggtttgttcttccttggagcggtcgaaaccccatatattgaatgcgtgtgggcaaagaatatttttcatgtggccaaaccaaatatgcctttcaccctcttattctggcttatacgacaagaagat

SEQ ID NO: 21712 - DNA, 362 bp, Glycine max
  unsure (1)..(362): unsure at all n locations
cttttagttagttagttaaaacagaaaattgaacagagagcaactatgtagaacccagtgcgtaccctgtcattcccccgtcaaactcatggtggattcagctaanaggggatgctaattcaaagtttttctcacgatggcgttagggaaaagaaggaagaattcaatngagatggatctggaagatggagtctatttacggattctggngttattgcttttgaaatttcacaaattatatggagatttttcataggagggatcctctacgccatttttagaggggctggattgaaatcccattttgtcagaaaaggctacatcgctagaaagacctttgtatgtctgtttttcttttggat

SEQ ID NO: 21713 - DNA, 323 bp, Glycine max
tctatcctttctaagatattttcaaacccatttaccctcattaagaattagctattttcttcctctattgtctctagatgaatacacctttgtttggttttctatttggttcttaactctctcatgcaacttctttacaatgttaagggattgaacccatacacaacctcaaaagaggattgcttggtggttctatgaacccccctattgtaggcaaattctacatgaggaagatactcatcccaagacttatggttgtctttcagaagagcccttaaaagggtggatacagacctattcactacctctatttgcccatcagt

SEQ ID NO: 21714 - DNA, 896 bp, Glycine max
  unsure (1)..(896): unsure at all n locations
gagccggaaacattcctatatctacacgaaaccgacgaaacaataactctcacnnnncccnaaagtgtatcatgcctgcacnacgcanngagncgcagtgaaagtggaagaaaaacggagggggagtgccttttatcaccggcgcgacagcgcgccacccaatcgaaggccgcgcacaaacaagcacggaaccaaaccccagagacgggcgagcaaaggacaaagacgggacgccgatagggacacacccanacggggggggaaggcctagccgcacggcaaaaaaacaaaaacacacggtcaggcccggtaacaaccgaaaaaaaaaaaacgaaaggggacgcacaaagacgatggaacacaccccacagcagggaagacggacggaagaacacatggcgggaacacggagatgcactcgaaccaactagaaacaacaaaacggaacgcgggccaccccaaagaactaaagcggcaaccgtctggggataaggggcaaaagacaaacaggaaggcgaacccagcgtgggcactaggaaacgcgaacccgaatacacgaaaatgacacacgccggagaccacctcaacaacggcggcctgagcaatcacgggaccaactaaccagaacaaaaaccgggccagggaatgaggtcagagccacagacaccgaacgggaaccaaaagaaaccagggggaatggcaagaggaccgagaaggaacagaccacggagaaagaacgcacaagaaaggagacgctaccaaccacggaaaaccgaaggggagcaccaagcaccccaaaggcgccatgcgacaagacgccccgacgcgcatacggaaacgctgcaagaaagagcattcaaaaatacgggcagcacagacgctcgacgagcaaaacg

SEQ ID NO: 21715 - DNA, 395 bp, Glycine max
tacatgttgctagccctatctctaacatctccaaatgaatgcttcagaagggacccctactcaagcacaacctataactttgctcattagtagtccttgacaacatgctgaccctactcaagctcacccatatggtctccgacctgattatatgcccctcattgcaaacacaactgaatccactcgcccaacggttatggttgcaatcctgacttaccaactaattcattccacacctccgatcaaccacaacatgacacatgttatacaaagagttccaatggcctgttcaaaccagcaactatatatgttggaaaataggctgaaagctattgaaggtgagtattgtggcatggcagaagctgcagatctttgttcggttccccgaggtatca

SEQ ID NO: 21716 - DNA, 920 bp, Glycine max
  unsure (1)..(920): unsure at all n locations
gtatttctacgtcacaccatcanaaaccacccaccgttcaaacgacccaaaacccactactataaccttatccattttttatagttttccttaccccgggagcaaatagaaagaatgaaatttcactaatatgaagctaaaaaaaggaggaaggataatttcaatcaaggaacgaaactcccttcaaagagtgggagaaacatacagaaagaaagaaaatcccaatatagaatgggagtaagacaaaaaaacatctnaaacgtagacgctcatggtcaagaaaccaaataaatggcagataagcttttaaccgacaatatttgacaatacagaattgtcaccaatgaccaaaaaacgataggaaccatgactaaatggcttctcctttattgccaccaaacagtgcctagaacttttcccccgccctaacatatatataggagacctactaaatcaatgcctatacctcatagcgtaaaccacaaagaaccattccaggaagtctatgattttataccatgtattatattgataaataattgcaagcagcctacaattatgtcgaatagagaacctaccgtgcaattatcacttggtgattttcttttgtccaccctggttccttaaggcattaaaacaaatcacattcaaactacttatgtttgggatttatctctactctctccgcgaaccttgtttcatcaacactatacgctcatgaggaactattctctaaacatggctattccaaataccatcattacgttcaaattcaaaccctgctgtctctgagaagacacaaacactctgttccccctttcatacaaaagtaccaatacattgttctcgtagtgtgaagatacatgcacctcttgtataatcctcgactctactttcattagactcgtttaccatggacg

SEQ ID NO: 21717 - DNA, 474 bp, Glycine max
aaagctatgatggatgctatgatagagatcttttttctttatcatagtaaaacaacttcagctgttgataccgtcaaaacaaccaattctctcatgtgaagaatatggaggcaaccaccatgcctgttactatatggaagaagtaaccaaggaaaccaaattcatgagagaatgcactacaaagctaaaagaaattgtaatcaaccttagcatcacatcttactccaacctcgagaacaccgtgaaggtaataaattttttaaaagatcaagtaaaagagttagcattgcaaaaaaagaaattgccaacaaggttgactggtatatcgtaacaacaagaagcatgttagcaactaaagaaccagtaagaaaagacatggaggtaaatgatggagtgaatgaataagacatataagaggaggacatgatagttgaagaaataacatgagagccaaataaaacaagaggcaactaa

SEQ ID NO: 21718 - DNA, 366 bp, Glycine max
tttttcttaccatgaaaagcgaccctgaaaacagaaatggcatacaacgcccttcgataaatacacacatcagtgtcaatttagagcgagctcatgcacatacttctttatgaacgttcgcttgcacaagacattcgtatgacgtaagaataatgctcccatatacaatcaaggcacctagattatttacatgtacttgcaaggtgtatttgttacctacaccacacacacttcctttgctaaattcacatacatgcatactctgagcactttggatataaaaaattagagtgcgagctcatcttggtttttctaatacccatgcatacacgagcgttatgatgaatgttgactatctacacaata

SEQ ID NO: 21719 - DNA, 537 bp, Glycine max
atactcaagcttgtcaaccctatcagcctgtctgaataagttgtaaaatgcttgagattgtctatcttatctctttctgaagtcctgtatgtcataagatagatgtgagagaaagaatcaatattattgacttaattcacagtataacatgtttgtgactacctttaggacaacttttaccccaccttcactaaacctgaacaactttcttgcatatctccctggccaccaaagctagttgtgttatattccttaaacatatattcaacatgaataattgaaaataatttataatttcaaaaattttgaaaacaatatttactggttggcaatctcactgatgtctaaacgtgggtcaagcccctttccaatgccttccaacactgcatagacaaaaatagacttgttaccttattaccatatgcatggagtatgctagattatgcattacacttgttgcatttaccttgagaatgctcttacaacaaatgtcaatgttccggaaatctgaagggctggtcttgtgctatacataat

SEQ ID NO: 21720 - DNA, 844 bp, Glycine max
  unsure (1)..(844): unsure at all n locations
tgtgcttgctccctttgagatcatgaaagacggnganncnnncaaantatttngattccttggaacgcaactttatttttcccctttttaaccaacgaacacgaatattttatatctattcttgtccacaaatcctagcccgaaacctatttagaagcgattacccaaccgcggtgggtacacctcgaccatctacccctttactacttacagaagattcgctggcgacgttagatcccccgcttagtggctcatcccgacgtgataatatcttcctcacgaaggcctcttttaaagcctaaaaggggatgcaccccccccccctattctctcattgtttcgtgcgaccgctcaaaaaatctcatttatttatcctattgttttagcaaggtagaactactatttttgtcctaggctaccacaatggaggtcaattcccataaattctggagggcgaacgtatacccctggcggggggtaaatcctctttactaccctccccccccccgattaatatcctcttgttttagaagccggggccaagtacaactctcctgggcactgctaggtgtgtcttacccgagcctccaatcttggtgaacacctcgctccaaggtgtgcctaattactggtccaacatttctgataagggattattccaattccttattcctcgtgctatcgaagtatcgctggaggtaagctcttagaaacacccgaacagtacgtctttccccttttgggaagattgaatacgcttatttatatattcttagctacagagtcccaggtgctcttttcttggtctagttcgattctcgtattcttatctcactatccgacg

SEQ ID NO: 21721 - DNA, 461 bp, Glycine max
  unsure (1)..(461): unsure at all n locations
aataaaattaactaagattgagaatggaaaattgagattgacaaatgaagaatgagtataaaaatggtatgtagaaattatgtgtgtactaaagcaatttatagaatgttattacctaacattgtgtgtgtaacagctgaacaagtctacaaattttattgtttaacggtaaaattttgtagccaacgttcactgtacacacttacgattttgacaagtaacgttcttttttactaccctcattgagagtctcttcctctctctttctctctctntagattatctcacccacccaccccttcatttttcccactgttcttcttctctcgtgacccaccccctcatcttcctcactcttcttntttcctctctcttcttagtgccacttcttaccacttcttattcttctcttcttcttcccctttccactctttgtgtgttcttcttctccattcccttct

SEQ ID NO: 21722 - DNA, 481 bp, Glycine max
tagaacacccaagcttgaccggatgtaagatacatcttcttaaccttagcattctgacccattcattgtttctcttattcacttgcagtccaaatatcaaacctctcaccaactatagtttgaagaccatcaaacctttccaaaatcttataaaaaagagatgaatcttctccctcatgtccttctgcaccaacatttctagcaccctttcttatccaagatccatcatgctctttaacatattcaaaagatgctatgactgaagcccctataacgaatgatcttttgattggaacataaggttcagaatcaaaacggatgttgatatgtttaatgataaaggtaacaagatgacgataatgtaatggggcattcaatcacaatgccttatccatgcgatatcttacaagatgtgccccatcaatttgtaaacctttaataaatggccacctgacattgatgtcttctttagaaaccttgt

SEQ ID NO: 21723 - DNA, 189 bp, Glycine max
tatattatgcgcctgaattggaactccgtgtcataagttatgatcattttcattttctcgagagctgtcgtgcttcaatttcaagcttctcgatatattatgcacctgaatcagactttcgtttgacaagttatgaccatcttgatttctcgagagctttcgcggttcaatttcaagcgtctcgatata

SEQ ID NO: 21724 - DNA, 613 bp, Glycine max
  unsure (1)..(613): unsure at all n locations
gacctccgaaactcagcttgatgcacatatggagaggtaattgaaataccaaatgatgcgcctcctgagaggttgttccaatgggagattaaaaatcttactgaagaatataggaggagaacagggaatgatcgtgttcctacacaaaaccgaattgatggtattaaactcaacattcctccctttataagaaagaatgatccggatgcctacttggagtgggagatgaaaatagaacattgtttctcatgcaacaactatgatgaggaccagaaagtgaagcttgccgccacggagttttccgactatgctcttgtgtggtggaacaagcttctaaacgagagagcaagaaatgaagagccactggttgatacatggacggagatgaaaaaatcatcatgaagccgtatgtgccggctagttactcacgggacttgaaattcangctccaaaaactaacccaatgcaacacaggggttgaggaatattncaaggaaatggatgtgctcctgattcaagccaatattgtaaaaaatgaagaggctactactgctcgatttcttaaatgggtgactatagaatccgcgatatcgttaccttcaagagtttgtga

SEQ ID NO: 21725 - DNA, 389 bp, Glycine max
tacatattcgacatggctcccgatcgcactcagctgcagaacatggttaagaaagaaagtgagacctttaaagaggttctcctctcgggtggttcaatgcattgcagctgccccacttcacgatgtaattacgcccctgcccatggtttaaattctgattgcgattcttgatatcgcaaaagatttaagaaaatacaactcatgtggctgcaatcgtggtcacgagtgcagtggcgacgaataaaaagccttgatgatgtggccaaagccaaggccccttgcatgaaagaagaatttgcaaaccttttcagagagggtatgaactttcatagctctgctccttttgattgaacttctacaactaatcgactttggtggaattggaacct

SEQ ID NO: 21726 - DNA, 436 bp, Glycine max
  unsure (1)..(436): unsure at all n locations
atcctctcagtcacctgcggcatgcaagctntgatggtgtcgagaagaaatcacatgtttgtcatcatcaaaaagggggttaatgtgaatgtatgtatacatgattntgatgatgtcaaaaaagaatctaacaaggctgcttcaaatgataagcatttgcttcaagaataattcaagattgcttcaacaaacaaagccttgtttcaagattcactaaagaccaagccttgccttataacanagtgatttcaagacatgcaaggctctggttatcgattaccaggaagtgtaatcgattaccagaagacggggttgagaaatagctgttgaaaaagggtnntgaatttgaatttcaacatgtaatcgattaccatatgtctggtatcgattaccacgcacgaaactttggaaactcanattcaaaagtcataaccct

SEQ ID NO: 21727 - DNA, 549 bp, Glycine max
  unsure (1)..(549): unsure at all n locations
ggacactatagaatctaagcttaagccaagccagacttttgtgcaagcagaggcttctcatgaaaaaaatgccaaactctccctcaaaaaatctgatttcaagcttaaataagtgggttggtccgtgctcgcgtgcttagcgtaattttgaatcgcttaacatgcataagtggattgtggcttaacgcacttctttcncttatcnaatgaaactaancggngtgcttgatgacctgtagcggtgcgctcagcgaacctgacaactcatcatcttctggtttcttccttgcgcttatccactgagtgtcgcgcttagcgaattctcgctaacccaacagattggcttancgagaaggtgaaaacaacactttgccaatttgcctaattaacctgaaattgagaaaaattgattattaaacacaccatacagaagtttgaattatctattacctatatttaatataagatacttataatatattaaacacctattaatggagaagattattcattatttctcattatattcccaataataatcgtcttcac

SEQ ID NO: 21728 - DNA, 444 bp, Glycine max
  unsure (1)..(444): unsure at all n locations
gctttgaagcctggtgtaaatgcattacttcatgaatntggttttcaggtcagacattnttgatctactgctaacctatgtatgcaatatagtaaagagagttagatnttttgtattttgcccagtcatttatgctttttctaaaaggaatcttgactttttgcttgatgcagctgctttatgaattgtgtgtagatccactaacaagtggaccaacaatggatctgttgtcanataaaaagtacctattctttgttaaaggaaacagtttntgatttatttgagcaccttttctactctttagtgtttataattatataattcaatgaattgatatatctctcaaactctttttcttgctaaaatgcagcaccttgatacaattggtattgccccactttctaaacgaaatagcaaccagtcacttcgaaacagttcccttca

SEQ ID NO: 21729 - DNA, 115 bp, Glycine max
  unsure (1)..(115): unsure at all n locations
atgtgaatgtatgtatacatgattttgatgatttcaaagaagaatctaacaacgctgcttcaaatgataaacatttgcttcaagaataattaagattgttnacaacaagcctgtt

SEQ ID NO: 21730 - DNA, 348 bp, Glycine max
  unsure (1)..(348): unsure at all n locations
tccttggattatagggttgaaccaagctcatgcttttataaaaaggttcatcaagtcaagttgaaatatggaagtaaccgtcttgcaaaattggggcaaaagatgaatcgagtcacatcactgcttcgtctactgccaaacatatttangattattgatgttcttgttactttcagtttcaccttgacaaagatgtcatggaccatgtngaaaatctaaattgattcaccccatatcttgcgtaagaaatcgcaatacttcaactgtacatcattcgcatgcatccatgcctttcattgngtgcattgctcattgcattctttcctttgaacataaataaataaaatg

SEQ ID NO: 21731 - DNA, 603 bp, Glycine max
  unsure (1)..(603): unsure at all n locations
gtgacctataaaactcagctaaccctaagtgaaatatatctcanagtttaactacttggtagaagcaacaatgcttaaccattaagagtagaagcaaaacaacaattcaatgcttaaccatccatgacaaaagcttaatcaatgcttaatcaccatggacaaaagcttacatcaacaaaatagaaaaatcacaaaatttgtcttctatgaggacttttgacaaacactttgtgaaccaacaataaccaagacttaacaactcatgccaaaagctaaaatcatcaaaacatgctaaaaggctgaaaacaataagccaaaacagaccaaatttcaatgaaacaatgaaaaggttattcaccaaacagttggtgtgcacctttctgaaatagtgcaggacttcaaacaatagtcaatatcttcaaaatcttcagtagcatttaatcaaataccttgtaggcaaactgaagcttaatggatgcaaacaattatggtgctatatgaagctttgactgttgctgccatgttatcaactgaaactacattgctactanggcnnaggaagattgagagtnagaggaaacataccatatctaacccttctga

SEQ ID NO: 21732 - DNA, 1046 bp, Glycine max
  unsure (1)..(1046): unsure at all n locations
cgagacaccgtcgcctggctctcacacgactctcaccacacagcgccacgaaccgaactaggcganncncactcccccccnnnncccaaaagggacttgatgaccgtgcacnnacaccnnnngnngnnngnangncgcagnnnnnaacagaaaaacaacagcgcgaagggaagaggggtgtgtgcccaacgcgcgcaaacacgacgcgcaccgggagggacgaaggagcacgccgcacccaccacggcgagaagacgacaaacagcagaggacccacaaaaccccagtcaaaccaacgacacagcccgcccccaaacaagaagaagaccaaacgccacgaagcaaaaccaaagggcaaacaaagtaaaacaggatggaaaaagacgaagaaaaggcgtgaaacgggacgacaccagaaaccgcacaccccgagagtagatgggaacaacaccaccgaagcgccggaacccaaacgcaacacaaaccacgaaacgaaccgggcaaccccaccacgacgacaacaacacgagtgaaatacgagagaaaagccaacccgaaacacaaaacagaaggaagggcaccgagcccgccacaaacctgcaagcccaaatgagaaaaaaaaaacgcaggcaaaagaagcgctcgcgcaaaagagaaacacacgaaaaagacgcgccgagggcacaaaacaccaggacaccaaggcgccaaacgacaccggggagagacaactacgcgcaaagcgcaccaaaagcgcgccaaggaggaacaaacagtccaccgcaacccagcaacatggacacaccaccgagacccgaaccaccgagccgcgaaacagccacgaacgcaccgcgcagacgacagaacgacgcccgacacatcgacaacagaatcgaacacaagaacgaacaaacgaagcacagaccgcagatacgacagagcaagacgggaaagcaaacgaacacagcaaacaccacaccgaacgaagcgaagcgtcgcgaacgcacaagcaancgcaaggccacaagacgacgatcgcagaagcg

SEQ ID NO: 21733 - DNA, 299 bp, Glycine max
  unsure (1)..(299): unsure at all n locations
ataaaggatcattcattgaagtctataaaaggcctctctacctaaaaagctcatgaggaaaatatatctcaagaaaatgaaatactttaaaaaaaactttgcagaaacattggatgaaacatttaatggttcactggttaattcttgcctaaaaaagatactttggacttgagctttatgggtatcccctccttgagtgatctctgaattcattcaaactattatttgtgaaagcactaaagtaacttaatgtaaaagatacctgagatttcttatatncaaggggagtctaagttaat

SEQ ID NO: 21734 - DNA, 1123 bp, Glycine max
  unsure (1)..(1123): unsure at all n locations
cacagaatacgtctaacttagtagctcctcattatgctaatagctcgaggtcngantatctatttgattactcactaantaaattnntnntttttctnnncnnnnacaaccaaggtganatgatgaccnttgaangccgctccanaanancncncnngangnntgcaggcnangagccaaaaacccgactcaccataaaccttgatccaatgttagaatgtctttccttaccctcggcagcaaagaagaaaggagagaaggaaaatttccattcaaaggacaataggagaggaaaggaaattcccaatcaaagagtgggagaaagcataaagaaaagatagaaaattccccatcaaagaatgggagaaagaaaaagagaacgagaagaatgaaggaaagctcctgatcaaggatcgaaagataacagaagacatgtgcagaggggatctctggaccagacaatatctaaacaaatacagaattgtcaccaaatgaacataagagagaaaacgaaaccataacctaaaagtggtcttcttcctttgattaccaaccacaattctagtgcgtcagtgactngttcgcctcgcgtcaaacaacaacacgaaaagacataaccaacaaaaaaatcatcaaaagccaaaacacacaaagccgaataaccactatagaattcatcccagggaagcctattgaccatgaacaccatgaattttatttgaagaaagattgcaagcaacctgacatattatgtcgaatagaaaaaacctacccggcgaaacgacccttaatgatttcctatattgaaaaccagagttcctctaagatatttaaaacaaagcaacctccaattcatttggtatggagatttagagacctcctcccgagaccaggtttcaccaaaacataggcccaacattgaattatccctgaaactgtgctatagggaaccctaaattccaatcacgtaccacactgtgcaatctttgagacaagaacaaactctggtggcgctcaatttgaactgccgggagaagacccttgtcaagagggccacaaaagaaattactttcatataacgactccggcacccttcacacacagatctggacgatacattacg

SEQ ID NO: 21735 - DNA, 180 bp, Glycine max
  unsure (1)..(180): unsure at all n locations
ccacaccattctcaccctccactctcttccccccntcacctcctccacaacctccatactatataatttttcacccccccccccccccccctctcctcttccattccaccctcaacctccacctctataccacaccataataccctcccatcctcttaacacccccctctatctccccaa

SEQ ID NO: 21736 - DNA, 440 bp, Glycine max
  unsure (1)..(440): unsure at all n locations
ttttaaatagtgtaatcgattacaatatattgataatcgattaccagtgtatctaaacgttgaaattcaaaatcaattgtgaagagtcatatcttttcataaaatgctttgtgtaatcgattacatggttttggtaatcaattaccagtgacaagttttgaataaaaagttaagagatgtaactcttccaatggttntcaggtttttctcaaggttataactcttccaatggttttcttgacctgacatgaagagtctataaaagcaagacattgacttgcatttcaataacttttttttacacaacttttgaacatctttttgaacttcttcttcttcttcttcctttgccaaaagcttcctaaagttttctagtttccaaacctttgtctttcacagaaaacaaaaagtgtgtatatcttttcattctcttcttcctt

SEQ ID NO: 21737 - DNA, 400 bp, Glycine max
  unsure (1)..(400): unsure at all n locations
cttgaactagctgaagggtaccccctttttatagtaaacactgggaacgggactactattattggtgatcatttttctccgncattgaaggaaacacttgggctgccagatccctccacctttgggggtattctttgaaggattcatgctcctttttgcacatattctatagttgcattctatctanagccatatcaaaattgtactgacactgcctaacgaaagcaaccattaagtccttccatgaatggactcgggaagttccaagctagtgtaccaggtaacagctaccccagtaagactttcttggaaggaatgtatcagcaattcctcatcatttgtgtatgcccccatcttccgacaatacatctttaaatggttcttggggcaagtagtcccc

SEQ ID NO: 21738 - DNA, 293 bp, Glycine max
ctttttactcggatgtctgattgagttccgtcatatatcgagacgctcgaaattgaatgttgaagctctgagccaattcaggcgacaatatctttttactcggatgtctgattgagtcccttaatatatcgagacgctcgaaattgaatggtgaacctctgagccaattcaaacgaacattaactttttctcggatgtctgattgagtcctgtcatatatcgagacgctcgaaattgaatgttgaagctctgagccaattcaaacgaacaataacttttactcggatgtctga

SEQ ID NO: 21739 - DNA, 423 bp, Glycine max
gttggaatggctcagagattcaacattaatttcgagcgtctcaatatattacgggactcaatcagacatccgataaaaagtattgtcgttgaatagcttaagcttcacattcaatatctaaccgtctcgatatatcacaggactcaatcagacatccgagtaaaaagttattgtcgttgaattggctcagagcttccacattcaatttcgagcgtctccatatattacgggcctcaatcagacatccgaataaaaagttattggtcgttgaattggctcagaagctcaacattcaatttcgagcgtttcgatatatgacgagagtcaatcatacatccgagtaaaaagatattgtcgtttgaaattgtctcaaagcttcaacattcaatttctagcgtctcgatatattacaagactcaatca

SEQ ID NO: 21740 - DNA, 420 bp, Glycine max
  unsure (1)..(420): unsure at all n locations
agcttgcgaagaaagaagacggcggngtggtggtgaggagcagcatctagtttccatcaagatgtgcctgaggaagtgcttcaacaagttggtttcgcgcgaagaccaccacgaagcgatgatcatgttgaaggacatgctcgctgagccacactggtaccataggaagtggaggagggcaaggcacaatgggaacaatgaggagctcataggagagaataataacaacaactagggagttcatagaaacagaaccattgccttatcgtggcctttggatgggaatggaagaataattcatgagatgatggtgaacaacaacaaggtgatgaaactctctggtcctcttgatgggaaaatgaatggtggtaacaatgagagagtgaatgtgtatgcaaatgcaaatagaaacccattgat

SEQ ID NO: 21741 - DNA, 636 bp, Glycine max
atggagcttacatcactatcgataattccaagccctatgatatagggccataaccttttatctctttattgaagtcccaaaacatgttgcaaatccagctttcatggtatatgcagcaacaactaattgcttttcactcttccacgatactgctcctttgtcttaaaaaaatacatatccaaaaatgtattttctctttttcacccatatattaaactctatgttcgattacctaatcacctcctaggaataaacctcctatatgtaaaaacgtggccttttactcctattagtatttcaaaaccttctttgtgcctttcctatggtacattcccaatctattttgatatcttcctatcaatctaactccaaaacttatattctatttaatacataacctatccatcatgatatctcccaacatctggatcctacaaaaatgctaccaattgctctagttctagaacattcttctgaatatttagcataacaaaactagtcttctatcttatactggaatggtaaagcactacaccttttttacgtcaatcttctatgacttatatgaaatagtttctaatacaaccctaacaactttatgccattccaaaaatcttatttataatacatcttgcc

SEQ ID NO: 21742 - DNA, 938 bp, Glycine max
  unsure (1)..(938): unsure at all n locations
tcacgaatggatatatatgctctattccacagaatcagatgctagacaacatgatctaatcaaggtacattgtctacagaagttacatggctctattccctattctcttccttgtctctcctcaaaagagaactcatatgtcgactgaaaataatgtgctatgtcccggttgtaccttctttaataaactaatacggtgcttttctatgatggaggatgaaatgacactttctcagaaaacagacatttggagtacagacgttgctgtggtttaatacagagtggcgagaaacgcatgtatgtcctgtcaccctctgcatgggaagatcttcttatcaaaaatacctttcgcgcggatatggcgggagatgggtgaaaagatacgctacctattgtttatttcctttggctttcaccatgtatctgaagagatgccaacaatactatttcctatgtttaattgtgattatataccgctacacaacgatgctcttctcaactttattatttaatagtccatgttaaggaccgtatttaatcatatgcttccatcttgcttcttgaggctaaactcaaaagactgcattcctttgaaaatcttggaccaaatttctaatcttaaagggcaattgtgggaagctcattcaataatgagatttatttattagggcacgctcacacattctctattgtttgttcttatattcatcgcagaggggtttaaacggcggtggcgagtaaggcacaccttccatctttcataatatcactctgtcccacccgaagcccacattgagtcaagctggtcttatccattatttctctaggacctcttcccccacctctagacgngtgtgtacgaccatcacttactactcccttgtactctctagcccgctaactcgcggcacgactatatttccatacgtgggcagcct

SEQ ID NO: 21743 - DNA, 385 bp, Glycine max
  unsure (1)..(385): unsure at all n locations
ctcaacttgcttctatggacacagtcatttgggtatacttggtgggactctctaccatcttttgttattatgaactcctttggtacacaacatgagctttcttttgataggtctcctttgactcttctttagggtaccgttaggccctccaattgaatcacactcttattcggctcatatcaaatatattagnaacatgttttattggaacattacgcctttgcagtgtcatttgaatgtcaacccattttgttccttatcctctgccttttctttataaacaaaacaaaaaaaacatcattagattcatttttatcttcaaatcgagacaactaactaaaacacttccccttattgtctatatcaaattaccaacattctttta

SEQ ID NO: 21744 - DNA, 357 bp, Glycine max
tgctagcatgcaagcttaagccataactaatagtgcctgccaagtatatgagactccattgtattgctgtccaatgctgttcagcgcgatctgacataaattgacagacctttgtggccaagaaactaacttcagatctggtgatggttgcatactgcaaagcacccacaacacatctgtatatagtgggatcagaacaagactcacaccctgatctggttaacatgcatccaccaaccattggagaggagatggacatagcttcatccatctcggttgtagacaacaaatctctcgtatacttgcactgatgtagaataagagcacattacgctgatgtctgacttcaatacccat

SEQ ID NO: 21745 - DNA, 409 bp, Glycine max
  unsure (1)..(409): unsure at all n locations
gcttctttcgtagttctttacacatataanatagtgacaatcttgtcttctcgaacagtgtttcaaagtcggctgctatatgccgctatccatgattgataatagggagaaccacactgcaaaaggtagttgttgtagttgaagttagagagccctagcacctatacacatcataccaaaattccatattttcaaatatcgggttgagtttcataccttgcagttggattctaaaatttcaccattatttgcatccctagcgcccatgtgggcactggctgtgcactaattcccttactagtcttggatcaactctgcaattctactgatgtcccactcatgccgcttgtttgcaactaagagatatattgaaaagatttgacaccaattgagaagaacatctagagaa

SEQ ID NO: 21746 - DNA, 395 bp, Glycine max
attcattctgtttatttcacataagcactcaaacttactttgagttgttcatcacaaagcttataataactaacaaaactcactttcgtcactttaaatatttaagtttacacatacaaattaaatcaactaattatttttttctcagcaatttcaattcaattagttaacctaacttaatggccttcacttcctttaatatatcaacccctaatgtaccttctctaaatttccaattcaaattattttgcctattatgtaaacatattccaaacaataaaaaactctactcttatgggacgatttgataattaatattcaacgtttgcatgtgtgactaaattgatcgaatcaatggccacaccattcaaaatgaaattattggcaaatttact

SEQ ID NO: 21747 - DNA, 925 bp, Glycine max
  unsure (1)..(925): unsure at all n locations
tgctgggtttgtntacctttgaagcncacattctacctgccggcntcgangctttgaagcttgtactggaatagaacaggagcggtgccgaccttctgggctcatactgcgaatcgcggcagagatacatgtgatacttgtgaagatccttgctaatctgtagatacatcttggtagcaccctcgcttgagctatatgaacatcctcctgagagtcgcacgcgcttgacctgatacacgtcagatgaccccaccacttgggccatttaagatgctactacagagtggcttgacaatatattaattaaccggttgtcctgtgtttcctttgttaggggcacaaaagtatctactgagcgattttcttttgaatcttacgccaatgggaaaaaatgagcaaataattctttggggttgtctttaaatcttttaacatggtattgggacacatatactcagcgggtcaccttcctcctttgtccagggcattgaaagaaaaaaaatattcatcttggttgcgggttgtggagggatctctgacacgggagtttttttttttttcttggtgcaagcacatactctaggattttgcctcgccattaaatcttgggcgacgtacgaggatctttgaatatttttttcccttttaaactggctcttaacacttcttaaaagggcaagatactcttcatttctcttacactcgttttggtgtgatttaacaatctgtaaaacggctgtcgcttttacaaaaatctctttttttgcaaatataaaaactcgggcgagagatgggtcctacanccctgattatttgtgtgttgtttctcgcaacctcggttgtatatgacttattgggcgaggggtcaacacctcatataggtacagccaaccctactttctagtcgaattaattagatgagacc

SEQ ID NO: 21748 - DNA, 570 bp, Glycine max
atcttgcaaagctccaaaaatgagaaaagaagcaaacatgtaccttgcgttgatgttagactccaacggaggatgctcaacctcacgacagtgacaaaccccaacggtggtcatgaaccccatcggtgacgatggtgaggaggagacggcagtgacaggtcgcatacgacggttacaggtcttgcgggtgagggagaagagaaagactttgtttgcgagactgagcgtgtgggggaaaaaggttttgggttttaatttatgtataaccagttgacgttaacattgatcttctaataaccgatgttaatgatctcatgttaatatcggttttttccacagcgatcgtacttaacttaaattatttaggacaatatcatcgtgcttttgttatatcgatttttcataaccgatgtaatcatgcaatgtaaatctataattctagagtgatttttttgattactatttgatccctgtaatttattatcgcaactatggagtgattaatctaaaaagagatttattgaactaactattgcctatctaatacaattccgattaacttaattctga

SEQ ID NO: 21749 - DNA, 1015 bp, Glycine max
  unsure (1)..(1015): unsure at all n locations
nacccatcgatagcaccaatctactcacgcactnacgcgtccatgaaaaanttaaatactgatccaacacccnaancacagagtgcatgagacctgaaggcgcgtcncaaccacgnaagantcctacaaaccacacgaccaacagaggagaggaggaagggtccttatgtccgatttcacaacctcacagaaacgacaacatagaacntggcgccacaatacaaccagagacgacgcatacacataccgagaacgaggacgcgctacagaagaacacaagtgaatcagtgaatggaacaataacagacataaaccaagcgagctacgtcacaggataaacaagaccggtaaccgatgacagcaggaacgacgagaacacgcgaacaagaagacaatgaggaacaaaaccgacatggcgaacaacgaaagggaaacaagaaacgataacatagagcaggggaggaacaagattaacacgaaaaagaatcacgcagcatatcgagaacgaggggaaacaacgcatgacaaccaaagacaacacgtacgcactacacacgacctgaacgcacaagagcactataacgcagatgcaaggggacaagaagtcaaccacgaagactagcagagagacaagaagaagcgaacgtagccacgatcacgacacgagaagaacagtggacctgagcagaacgaaagagaggaaatccagagagaaggaggaaagaggaagaaaagggaacacgggaagacgaacaagaagatcgggcacaacacgcacagacgggacgatcgaccaacaacccaacgagtaaaaccgaagacgacaacgaccatcgacgcacgaaacacaacactcaccgaccgaccatacacaacgcaacggggcacccagcataactaacgaacggtgcatacacgataagcgaaggagaacgacgcaacgatgccgacacaatacagagcccgtatcaccacagaacgaagcaagacgagaagacagatcgcaagtacgacc

SEQ ID NO: 21750 - DNA, 418 bp, Glycine max
  unsure (1)..(418): unsure at all n locations
aggaacttataaaggaaccccggcagcaggaccgacagacaacagattaattatgacctttcaagcaatagatacgatccaccgtgtgggaatatccaaaattgaaaggataagtcctccacaacaacaacaacatgttcgctcctctccaaaaatgctgtgtgtccaaacaaagccatatggttctccttcaatgcatcaacatagcaggtctccaaccaaagacaacagcaactgaggctcctcctgaaccttccttaaaagacaaatgaggcaaatgaccatccataatatgcantttcaacaagagacaagagcctccattctaatctaacaaatcaaaaggcgcagatgggttcttatatgaaccaagctcagtcccacaatattagacaattgccttcacaaaatgtgcaaa

SEQ ID NO: 21751 - DNA, 1078 bp, Glycine max
  unsure (1)..(1078): unsure at all n locations
cgcacaacatgcacgacnacctcagaccangcaacgctagcagaacaccctaganagacacatcccatcccncnnncnnnnaaagggacgtcgatgaccgtgagcncccgncanngncgnnnannagnacaaaaaanacaaacnacaaggcaccaacagaggaaggggacgggtataaacgaccacagcgcacgccgagaccaccacgtgcacgaagagcgcaaaacccgaacaccccctgcggccaaccacaaacagagcgcacgaaatcgcacaggggccatacacccgtgccacacaacaccagggccccaccaatgcctacaacgctcccacaacaaccaagcaaaacaacatacaaacagcgcaggcatcacagacaagaaaacacaagcaaaggccgaaaacacgcccaaaacaccaaccacaagcccagcctagctcagttaaagcccgcagaacgatgcactccgaaccaacacaacaaccgcgggaaccacgcaagaaggtaccggaagacaaaacacagaagccgacacgcgaccgaaggagcgacgaccaaccatcagaacgcagacgcgcaacgccgccacagcaacacacacagcatgacccgactcgagcaaagccgctgcccattcaccgcaaaaaccgccaaacgcaaatgcaaaaccaccccccctcagcaagctgcgcgaaacaacccaccagccaaagaagacaaacaggctacacaagccagcgaaacacacaaccaaacagggagcaaccaccaacaacggatccacgccgagaggaacaaaagagggacacgaaacacctcaccaacagacgactacacaaacggcaacaaaaaaccgaagcccgaacacagacaccacccacgagccagaaggacggaacacggatgagggtaaaaccagcaactcgcccacgcaagagccagcatctaccactacccccacacagaagacgaggcacacaccgcaccgtaacgacaaacgacgacccaacaaggagcacaaaacgacgagggcgggcgaanacacgcaacacaccaaaccacaaagcgtgcacg

SEQ ID NO: 21752 - DNA, 718 bp, Glycine max
  unsure (1)..(718): unsure at all n locations
tactcaatcttgcttgataagcttctatggaggctggatctttgagcttcaataagctccttcaatggttattttcanccatggagttgcggcggaagataaatgataatatgtgagagaggcgccctccactataacatattccatggatggagaaccttaaccaccaacaaagtgccttgtatcttattcttttataggaatctttttggccgaccacattctcanatatatatactttggtctgtaaattcaaggttattttggttataaacttttaatcttttttacaaaaaatcattctcttactttctctctatagatctcttctgatttaatactcctcccttctttatttattcacttcaatttgttcttgcgtttacattatttactttttttctgattgtttttttctgtaaattttctttttggaccctttaatctcataaactcgcttcttttaatccctacaactagcttcatactttcttcattcttagcataattatttttaccttttccctatcattcacaatttgtggttggagtactgtgctggtgacgttattgtatctcttgggtcactcgatcgttgtattatttcttttcgctaacttattatattccgccttagttcttgagaatcttgtgtttcataatttatatttctttgactctctacctattttttacaactcattttttcttcttttta

SEQ ID NO: 21753 - DNA, 842 bp, Glycine max
  unsure (1)..(842): unsure at all n locations
agtaaaaaggtattntngatgaacaatgacaaccaatagatctttaacctaaccttctaccaggatttgacccggagttgaccctccaaatcaacatccacaataactctcgtgtaatgcccaaatgaacgtttcaacattgcatcatccattgcgagaccaacaccaactcttctctagcaatngaaaaaatataatttggtcaccaatattcttgggctaaaccaaaaatctcaacacaacatcaagagtttggctatttgaccatattaaggtaaaaatctatagtccatgaaaaataccttaagggtctaagctctatgctgcacattccaatttccaagatacacgtcaaatcttcatatgagcaaaatgagaatcatacaacattgggcaagatgttccataactttcagtttgcacctaatcaacaaactaaggatgatatttccttagtaaaaaaaatctccatggaaggggtcttgcaatttttaaaccaccttgacttaaccttattataagattggaaagatattccttaacaaggaaaggaatgactaagcgaacatccgtctgggtaaacttgcaaaaattaactgggcccaaatgcatagaggtttaaaggcgaaaaattaataaaccaggacaagggacagaaaccaatgcatctagatggccaaaataactcttggaaggagaaacacctatcaaagccatagtatcacataaatttatgaataaacttttaaaaaacaaatttatataataaaggggagtagcccccctgataaaaacttaaaaatatattaaaaaaaaatatcttaaaatcattttataaaata

SEQ ID NO: 21754 - DNA, 1122 bp, Glycine max
  unsure (1)..(1122): unsure at all n locations
tgctgtcatcttgaccgttgatctcattgcanctgccgcatgcagctttgagcaaatcctgactcaccataaccttgacccatggtgagaatgtcaatccttattctcggaagcgaaatgaatagaacggaaatttccaatccaacaagaggaaagaaggatgatttctcaatcactcaagaaagccaacatagaagagaaggaatattttcccatcatagagtgggagaatgcacaagaaaagcaagataattctcaatccaagaatgggataaagttaaaaggaagacgaatattgaaagaaatgctctgatcaacgatcgaatgaaaacataatatatgtgcacaatggtctgttgacctggacaatatctgaacattacagaatttgcaccaaatgaaaaataagaaggaaaggaaaccacgacctaatatggtcttcttcctgtgactaccaaccaaaataccgcgcgctatcgactgtctcgctcggagaataagataatgctaccactaaaatcattatgccataacacacatatagctgaataactccttcatgacaatccatgttccaaggtgaagttcttattgatcccatgactaacgcgtgctaattttcgatttgagtagagaataatcttgtccatgcatagtcatgacaattctattggtctgaactatgatcgaacacgtactctggcgacattgatcaacttggttgactttcttctatttctgtcgcacccatcgttnttctatatgttcgtctacaaccatactgcatcaactcaaantccatgaccgatgggcgtgactcacaacacatcttcctctccggagatcgattgattcactcaacacatgtacgtcgtctatacgtcgactataattcatatctacctgtggtactactgatacaaccagtctatatgtcaatacttccaacactatgtattgcctattgagacgcgagatacctcgttcatttcacctctttgtgtagccccactgntacccgtctatgcctctcgaccgacttgccatataatctgtagctgagatcacttttcgtagtgacacacagaattaccattgatatcttaatagactccatagcct

SEQ ID NO: 21755 - DNA, 1136 bp, Glycine max
  unsure (1)..(1136): unsure at all n locations
ttctatccgtgttcgcagtcacnatagtaantcactccatatntgnctctctatctctgtgactctcactacattctggtatcccaanntntncacanncccnnaagccccaagagtgatcacctttgaccgngcatctctagagtcgacctgaagcatgcaagcttgtgttagcaagctcacacacctcacaatgcagactcctctcatttaaattnctaaaccacgaaggaaatatcacttttgcaccttgatatagaagatgtcccatccggaaatggtatagtcgcattttctctttgctagtcatggcggattcagagatgagagagtggctcctggtaggcattgtacgaacctctatgtagtacaggccattccattctttagcatatccaatcattctccctgagttctttgcctgtaatatacaataattgctataaaaaacaacattacatgaaagatcttttggagttctcgatagaaatcaaattggtggacatcttagaacatgaagacatttttaatgttatgagtggcgtatttggacctctccttgccctgctcaagtatatgggatcctctgctatggaaacataattttctcatattgcaaatcattttcttttgttaacacatgaagctgtgtgataatgaggcacaatgacgcttgcatataagacacatcataatgtgtgtagtttacgttgccacaagaggctctgctaggtttagctgtcagagctctagatcagactcgatccattaattaaaggaaatattaatcctataaatatgagtatggaccattgccacagtctgctatttagaattggacctatcaggaaccacccttaatacgattattcaatcaaacctaactatgcctaaaaccggcaacataaatacatcgcgaaagttaccttctaactccatataaccaattgaccggcttcttttcgcacgactccctctcaggaggagggcgaccctntcaataaaatatatgtcacgtgtaagaagggacatctccgactctaccctactcacttgtctnaagttcgtataacatggcgtcacgcgatagctatatctcgttcgaatccacttgctcctcattactgactctctcg

SEQ ID NO: 21756 - DNA, 1193 bp, Glycine max
  unsure (1)..(1193): unsure at all n locations
cgagacacagtccancgtngatcctcacaactctctctgcatctctcactacttacatgantacctactcatagatgcacaacacgcctcnnncnnntcgnncnnaagagtgtcttcatgaccnttgatacaccctgtcganctgcggcatgcnacgtttggatctggctttacaaagccaagcactgtctcggacaagtcgtccgtgtgtcccccattgtatgcccaggcctcgctaggactataccatcttgcgaacggggactggaagatctctccccgcatcatccacggccaattaggttggcggatgagaaggcggcacgtagctctctcacatgtcacttggcattctggagcgaaagaactgcggctcgcataggcaacatagntcttaggccgcgttacggcctaagagagcaacgcntggctatgtgaagccgagctcgagccggattcccgagaaccccgccttgaggggcgcggcgcccttaactggtgagcgctcatcagataaatcccaccgcgactgaacaccacgccgaagtagcccaatacgaggggactcgagttccatgccacccccgcgttgagcgacagatgcaatctcctactccagcttctccacgctactcgaatagaatcgcggtcctgacagggcgatcgctagaccatccgccgaacgacacctccaatatctgactaccatacactgcaacgtgcaagcccgctatgcccgtcacattctcacacgatccagtagtaggctcgactacacaatccacaccaacacacctggctgcgaagatgtagccacgataacgacatacacgctaaccggcaacacgtcaccttcgacccggttcacacatacgaacaaaccatccgatcgacactgtttcaacaatcccatcagatatcgcacgcacacacaccatgtgcaaacactcgcgtaacataatcactacgcgtacctcgtctactacacgctcgctcgtctctctcactcgtcacattatcaccgcatacgtttcgtacttcaatacgcancctactcgcgacaactgtccgtacaccgccacactctcatcttgcactcaccgcacacactgctaccataatatctaatgtcacatggcacctctaccgtacatgcatacgtatgctcagcgtctaggatatccatatacgcg

SEQ ID NO: 21757 - DNA, 362 bp, Glycine max
ccaaacctgctcaccataaccttgcccatgagagaagccaaccttattctttatacaaaaaaatagagggaacattccgtctagaaaagaaaaggaaattctcatgacacctaacaaaaatgatgaaatcccccaatcacatatgggagaatccacatacgaaacattgaaattccccaatcaaaaatatgtgaaagctcaaataaataaaggaaaattcccatcaaacattggagaaagtaataaccgacaacaataatgaaagaaagctcctgatcaacgatctaaagaaaccaaaatataagtgcacaaagtgctttggaccagacactatctgaacaatacacaattgtcacccaatg

SEQ ID NO: 21758 - DNA, 664 bp, Glycine max
  unsure (1)..(664): unsure at all n locations
tgaaaaatctcaacaggttttttgtgtatttcatacttattagctagggttcaatctggtttacacaccataagttgttttgccagttgagaccctagaaagaaagaatcttggatgacattacttaaattttatttctatttgccacacatattatgattgtactaatggataatcttctcataaaggtgacccatgcttcttgcacacctatattggccttattattttctatctatantcaaactaatttttaaagacaattactggccaaatatgttttaccattgaaatcttaatatacattatggatcagtattcattaatttactcaattttgatattgttcaaccatcttgcaggagcgccttcttggagacatgaataatcaacttagactcatggttttactatgtagcccctaacattctaagtgtatatgtgcaccaatttattggcagaataatggctgccatattttttctcattaattaaccccttattctaatttctttttaattgaatcttatttattagttggaagcgaggggattaatcctttaactccggaaagctttgtgtgctttcttctctgtcgtaacagtggctttactttcacagcctctgataccatgctattgtgttcgacggcgaaacctttttg

SEQ ID NO: 21759 - DNA, 464 bp, Glycine max
gcccataaacgaaatataataaaattttgacaagataagataagattggatgaaataaaatctggacgaaataaaatatagatgaaataaaatctggataagataagatttgataaaataaaattgtctgctcttttcaagtccaagcccaattctggattcaagcccaattgcttataattctcctgaaattaaattaaaaacacaaaattagtcaagtaggcccaaatgataaaactacataattaatttgacaattaacgctaatcaattattaaaatggtgacaaaaagcggtaagacatatgagaaaataatgacacatcaaacccatttcccgagcatcttgccatgaaggaacatggtccctcaccaactcaatgagtggtgctacaagtatagaaaaatatgggacaaaccctttgtaaagttcgttagtcatggaagctcataatcttttatact

SEQ ID NO: 21760 - DNA, 511 bp, Glycine max
tcgaattaatcttgaagcaatgcttgcttgttgaagcaaccttgtattattcttgaagcaatgcttaacctttgaatgtttttttgaagtaatcttgaaagcaaccttgtttgattattctttggcatcatcaaaaccatgtattcatacactcacattctccccctttttaatgatgacaatcattatcaagtgaattctttctggaatcatcaaaacctaaaacctacatgattggcattctccctctttttgatgatgacaatcattatcaagaaaattctttttttttttacatcatcaaaacctgcatgattcacattctcccctttattttatgatgacaaccatatgtacgttaggagtaaaaacaaaataatatctatctgtatagtttactcccccttgattatgcaatgattgcttataaaaaacagctgaagattgcatagattttatatataaaaagttgtctcatatacccttactatcttatcttttatctatctct

SEQ ID NO: 21761 - DNA, 623 bp, Glycine max
  unsure (1)..(623): unsure at all n locations
ctcactgttgctatgtgcgaatgtgggatgttcgtgtaaggattcgaggaacctattttttataggatnggagcatagttaccggatcttgtttgttagggatgttataacctgtgcagataattctttacttacatatatataatagggagcttgtcgataatgttagatataaatcctatcttatacataaaaaacccccaaataacttctaccatatagataaattatgtctttgctgataattaactaccttcccctatataaaaggattcaaatattttctcatatttatatgttatagataacatgcttgctatggagcccgattgcttaaggcttaatgtccatgctcctatttcacggctttacatgtatgcttgacacatcttacggattgccatgtttgatatacactcatttaatgagtcttgactttacatttttgaaccacaaaaggattggaacattaaataccacacctattgatactctgtgaaagggcttctatgctgccaatttggaatctctgttattgttgcgctataaagcaagataaactacttatttagtgtgtcctctaaaggtttaatctaaggtaacctcgttttttatcttaattc

SEQ ID NO: 21762 - DNA, 694 bp, Glycine max
aacgaatgaagaacgttcaataacggctgaaacctctgcgagattcctcaccgaaaacgttacggaaacgtttccgaagcgccttcgcttatattttcttctcggaaacaattttttccagcacattcccaataaaaaaaaatgcctgaggggctgggatccatttcttcttgcattcctcccctatttatatcaaaatatgtgaagtggttgccgcccaactcgcccaggcgagctcatctcgcccaagcgaagcaggttgctttctccacaacaaccgccttctggaggaatcttcttgagggcccacatgggcctgtgtgctatttgcacccccatttttactaaatacaccccctctgctatttttgaggaatcctttcttcgtaaagtacggaaacttaccaattcttacgaaacttgtttctttcttaatgtatcgaccttgcggattacataatcatccctctttacttacggaatgttcccgaactccttaattttccacgatgcttccattgattcccgggggcacggaacttacggatggcataatatttttaggtttctgctgtgctggaatccataaattgccatgaaggtgccaacccttcaagaccaaaatgttcttttatcatccaggcccgaacaaataggattacgcgcccctttacttcttttatggaaagaaaag

SEQ ID NO: 21763 - DNA, 980 bp, Glycine max
  unsure (1)..(980): unsure at all n locations
acagcccaaactcaccgcaccaacaacgcctagngcgataaccgcaacctaaccaacaccaccaccnncnnnagnnaagatgaaacgattgacgntgacaccccggaanaacananaaaannnannannaacgccccnnccacccangagcacagaggaacatttgcccatctcacaacgacaccccagcacggcaactgaaaccagcccgacgccgagacgacaagaccgaacagaacgcccagccaataaaaannncccaacccgacacccccaagaacggcggaacaaaaaacaacgaaccacacaaacggcaagcccacacccagaaaagaaaaaagcaaaagtcgcgacaacccggaaaagcaaaagaaacacaagcaccgcaaaaaccgcaacgaggagaaccgcggaacccccgaacccacgaaaaccacgcgcgagacccgccacgacccacgagacgagacaacacacgagacaagacgcaacagcggagccaggcaccaccaacaacatggtgacgacacagacaaacaacggcaacagaggcaaaaaaacgcaaagcgaggcaggaaaaaaagatcggcccgcgcgcgcgcacaacaaccacaagagaggaggacacaccaccggggacgcccacacacgatgagagaagacaaacaacgaaggcccaccgcacccaaacaacgatagcgagcggaacacaactacgacncccagaaaagaggaacacaccaacacaacatcaacataacaccggcaacagcgaacaaacccacagaaccccaaaaccagaagcgcggcgaaggcaaacatacgacgcaccacgaaccacataaaacgagggnggacacgcgctcaacgcaaaaacaacatacaacaacacgcggttcgacagcacaccgacccccggatcacacccaaaccgacagaccgctcacgaccaacagacaacccgagcggcgaaaccgccg

SEQ ID NO: 21764 - DNA, 556 bp, Glycine max
  unsure (1)..(556): unsure at all n locations
atagcaccccacctgacgtccccaaagtctcctgacccccactacatatcttcatgtaccactctactatctacaatgaaaacaggaatattcaccctataacacttcctcatcccaaacttgtcngattatggggcacccatcacatgtgtgtctatcgagcctttggacaatggtgcacaacattttttacacatccacnatgcncccataaacctcccattccctggtggccacctcctactgagctcacatacttccacattgcccatatgctaaattctctctacacccggttctcatcaatgcttccaagcttttctcatatcctagcaaaacaacactcaaacagcacaagctatttctgtcaagcaattcagagcataagccgataactctgcccaaacaccaaccgagtgccaggttttctcacttatagaccccactaacaattccttctatccaattcccttaccgtgggatccactccaaaactttactggaagtctataatacataagccaacattgggaccgttgggatctactatgaaaca

SEQ ID NO: 21765 - DNA, 204 bp, Glycine max
ccgtgcttatcctctatacctgccactcttcatccctggctttccccactatctcactatccctcccaccctcttaccctcctccttagtctaagaaaaccttaccacccccctcactccttcctatacccacatcatccttcctcctcctctcttcatccttatcggcagacacctttcgccatataatctacgcccttctct

SEQ ID NO: 21766 - DNA, 381 bp, Glycine max
  unsure (1)..(381): unsure at all n locations
tacttgtccttcatttagctgtctttgggcttggcgggcatgctcaacatagtaanttcgacacctactatacgttgatttgaccaatgctgttatgggaatgttgcgacaatccttcaaaaccatatcgatacattctgagaggtggtttgcatgtggccatatcgacgcccttctctatcataatacatcgtccattttttctttgaaatgcgatcaatccatgttgctatggctggactcagttgactaaatttttctagattntgataaaaaaatgtgcttgcaaggagtgtaggctgcataaacatacttatgaataacaattttaagtatatatgaaagttaaataaacgtgaccatcaaatatgaaatcttacc

SEQ ID NO: 21767 - DNA, 624 bp, Glycine max
  unsure (1)..(624): unsure at all n locations
aaatcatnactcataaacaccacataagtgtaatcccttaaaaaaattgctaacgattaaagcatatcgtcatcaaacctcttttcctgtttaaactcttgcatcataaactaacacctgcaataaacttttaaaaaaaatcattntaaaaaaaagctgaatcccatatttatgaagaacaagccattaaccactacacatactctaaaaaaaaaataaaaaatacctccccaccctaacaattaatattccntttaaaaaaactatcaatttccactctaaaaaaacaaaactatcatctcatactaaaaattctctccttctcatggtcctacattaacaattattataatttaccactactatttccccccctttaataatccattcccccggcccaattgtggattttataatttaggacacttcaagatttttaaagggagggatacctaagaacaacaaagttgccccccaaaatatcgtgttctaaccaagacaatacccttttaaaaaaactctttttatatttttccaaaacacaaaatcacttataatacatataaaaaataaaaaaactttttgtcaattccataaaaaacctacccttgtttttaaccgggt

SEQ ID NO: 21768 - DNA, 282 bp, Glycine max
  unsure (1)..(282): unsure at all n locations
aacaaaaaaaccttatttaattactccaaataaataaaattgttttaatagagatcacgagaattcaaaaataatataaaaaatgtattccttttcgggaagtatggcgatgcctaccatgcttagatgtgtgcaaccaagtcctagaaccaccttatcaagaattttctttntaatggagaagataacgcacaatgacaacaacataaaataataaaaagatatagaaacaagggaatgaattcatgttatggaaaccggcaacacgaattcaatcctcga

SEQ ID NO: 21769 - DNA, 409 bp, Glycine max
  unsure (1)..(409): unsure at all n locations
agcttatgtcccataaaacattcattgaattcaggccaggtatatatttctaacaatcccatcatcttaaaggctaaatggtgtttttgggtccacatcacaagagatgtcatatttgaaatatccgatcaacgcttactgtgaatcggnggttcanatggaagaatgaaccataaaaccgacaatacttatttttaataataatagacccaacttnttatttaacatcttcatttttcacaggtttttcaaaaggaacgtaaaaacactccaataacgataccccaatcataagagatacatanatagactctatctaactangagaaagcataaaaatcatggttacctctaagaaacccccaanggagggttgagggctctggtctctactgaatcctcaagttga

SEQ ID NO: 21770 - DNA, 454 bp, Glycine max
  unsure (1)..(454): unsure at all n locations
tctcaagtcgactgcggctgcagcttgtgcgtttacctatgatgatccttcatacgttaaagctaatgtgtctccacatttgttttgcactttgtagctgtggacctttgtatattcttcctcagagagggcgcacaatagagcgtttcaagctttagagtttagtagaaacatttgtctttgagcatatgtccaggagggtctaggaactttattcagttgatcgtccagtggaatatagtttccatgttctatgacatcccagacgtctatatgaatggactcaaaatgagctatcatacattccatatagtactcatatttgccacctctgaatagtggcagnttatttatggaatacctctcttctgtatctatntgactttaggatctttcctctgtagttgtaaaatactcaacccgagaggctgagctgcaatgacaactaaaatac

SEQ ID NO: 21771 - DNA, 432 bp, Glycine max
  unsure (1)..(432): unsure at all n locations
ctttatctagccaacattatacaaaagtgttacaatagaacctaacggtttctaattatatgggccatcaaatctatcatgtgttaacagtaattgattatcccgtgaatatcctcgggggctgttcacacttcancaatggctnttgctttggctantactccccggaggtcttgacttccattcaaagtcaatgcgaacctatccatccacataatcacttcttgatgcaatgcatcaatcaccctccctcttgcttccttttctgcgtacactttgtccaaatcttctactaacttttgttcatgggtcacatactgacttaactcttccttgtactgccctatgaatagctaacatgctttgctccgtggctttcaagtgttgagccaaacttctcttagatcttgcgcaagcctctaattcttcttt

SEQ ID NO: 21772 - DNA, 462 bp, Glycine max
  unsure (1)..(462): unsure at all n locations
agcttcaggttgctcattgactccaaattgctgcagagaaggacaaagatctatatggtgatatgcagaagaacatagaccatagactctagcaacaggtgcagatttctgattcatggcaagctgagttactaggttgaccaaggcatcaagttttccctcaagctttntattttcagtagatgaagatgaattcgtggccacctcatggactcctctaaggacaataacatcatttcttgctctgaattgttgggagttggaagccatcttctcaatcaaattcctagcctcaacaggggtcatatcaccaagagctctaccactggcagcatcaatcatactcctctccatgttactaagtccctcatagaaatattgaagaaagagttgctcacaaatctggtggtgaggacaactcgcacacaaattcttgaatctttccagtactcatacaagctc

SEQ ID NO: 21773 - DNA, 342 bp, Glycine max
ccgtcgatgatcccattactgcttcccctaagctctatgtcctttcttcatgccgcatcccatgccttgcgaactccttggagtaccctcacgttgtggtcaccgaaaccccgtgcgatgaaaggcgtgatgctttcgtctgatggcactcctctcatggggtagccaagctgtcttatggtgaggacgggattataattaatacaaccccttgttccatcaagggaacatttggacatccttcgcatgaagatagaatcctgattcttccttccttctagcgagggaacaaattaatagacgcccctccatgctttccaagagttggtcccaattcgcctt

SEQ ID NO: 21774 - DNA, 438 bp, Glycine max
  unsure (1)..(438): unsure at all n locations
agacttgcttattcatttagtgctaatttctcaacctttacagtttagtcagnttaagatctcttataattttcagaaggagaaatggtctcttaatgagctcatttcatactgtgtgcaagaagaggaaaggctgaagcaagaaaggactgaaagtgctcatgttgcaagtacctctaaagacaagggcaaaagaaaaagaactaaggagcccaagaataaagctgttaagggtccaacacaaaagaaataaaatcaaggtgacaactgtttctttngtagtaagcttagacatgtaaagaagaaatgtaccaaatatcatgtttggcatgcaaagaaaggggtgcctaagctaccggtagccaactgattcagaaagatgaatatatgttggagctatagggcactttagaatattattatgtacctagttttatt

SEQ ID NO: 21775 - DNA, 210 bp, Glycine max
  unsure (1)..(210): unsure at all n locations
gatcgcacatttcatctgttcctgaagacctgtatgtctttcgatagatgctggagaaagagcctataatattgactcanttcacacggtgcacctctttgtgactacccttatgacacacttctacccccacttcacaataatcttgacaactccatttcatagctacgtggccggtaaggctatttgtatttcatatcgtgggccata

SEQ ID NO: 21776 - DNA, 1052 bp, Glycine max
  unsure (1)..(1052): unsure at all n locations
tcttcattctatttccatcgtgtatctcttcnattctcacctacctcatatnctctttacctcgtctanacatantcnnactccgcagccnnnnnnncncccnactttgcttgttttcactgaccngtgctacnctacagannntcnagangacctggaggcttgcaagcttcttccacacacatatatattgaaacgatgaacacgataagtatgatgtgatacatacaattgatatagtgggaggaaaattgatgttgatccttcgctggagagatcaaatcgatataagcaattatgtccaatgcttatgagattggccgatgaggcatctaactatccagaagcatgttctttaagttatcaaaacggtgcttgagcttacgaagaaagtggctgaaattgattgaaccaaccaccacatgttctcatgattccacgtgtgaagccacaaagtatgctatggagccttcgacatccacaggaatttgattttagaagagagatggtgaaaggatgataataataactctctgagaagctgacttgttatcttacggcgacaagaataatagtgaaatcatgcaaccatcattcataaggttattttagcatctttatatttttattctttgtgaccaggtaataaatggttgagtggggttgttattacacctatatttctatgaaggcaatcttgtggagctttaattagactttgttggtgtgtcattaaacaatatatacaaaacacttattttcgaagataactattagtgcnttcccttacaggcaagagttataaacgtgggtggttcaattaaaactcgtaaacaactaactaccctttttttcaatagtaaagaacactctttcattgtttttgctaaaaaagccgccttatcttagatggctacaaattatgatatgcaccaacattgtgcagactacaattctacaggttcttgtgtaaccgcgattggagaaagaaatttggtgtaaaaatatgggaaacttttttctgacaccgggggcgcaaaaaatattaattt

SEQ ID NO: 21777 - DNA, 316 bp, Glycine max
  unsure (1)..(316): unsure at all n locations
agctntaacctcatcgtctctcacagtctttagatgtgggagccaatccaatccttgtgtccggactctcagccacttatgatagccgccgatgatcccattactgcttcccctaagctctctgtccttcttttgtaccaccccccatgccttgcggaccttatgaagtgtctccacgttggtcttattgaagcctcatgaaatgacaggcgcgagcccatcctctagtggcgcccctctcatagggtagccaagttgtcttattgcaagaatgggattgtagctgatgcaacccctcatcaccatcaagggaaca

SEQ ID NO: 21778 - DNA, 306 bp, Glycine max
  unsure (1)..(306): unsure at all n locations
cacaaacaccccccccacaccacaaccggatgccccccacctccccccacacccnacacccaccccaccccccccctcacaaacaccccccacccaacccaacacccaaccaacccgccccccagcaaaacccctagcccnatccctccccacccttcttcccccccccccncccctcctaccccctccacccctccaccaaccccgcataaacaaaagggcaaacgaccaacgcaaaccaaaaacaccgaaccaccaccacacccacacaaaacacagcacccacaccccacgcaacccgcccaa

SEQ ID NO: 21779 - DNA, 487 bp, Glycine max
  unsure (1)..(487): unsure at all n locations
acaacaagtcttccacattcacaatgcgcgcataaacccaccatccgctgttgcccacctncaactgagctcacgtactcccacgtagccgatatcctcgttttctaacaccgggtcccataatcctccaagcttcacaacatcaagcaaacacattaaacagacaactatcacagccagcaaacagacagagcagaaactctgtcacacataaccaaatcacagtttctactaaagacacagaacaatccttcatccaatcgtaaccgttgaatcgactcaaaatttactggaagctatagtgcatagctacattgtgaccgtggatctactagaaacatcagaactatctgactactttcacagcaacacacacaacatttctgcacagctaaatctgtgactatttgacagaaaattgatagtgcaattgaaatacacttcttatcatctgccaataatcacagtcaatatgatatatgctaac

SEQ ID NO: 21780 - DNA, 434 bp, Glycine max
  unsure (1)..(434): unsure at all n locations
ctcagccacctaacaaaaacccaaatgatcccaatactgcttcccctaaactctatgccccttcttcatgccgcatcccatgccttgccaactccttggagtaccctcacgttgtggtcacctaaaccccttgccacgaaacgcgccacgctctcgtctgaaggcactcctctcatggggcacccaagctgtcttatcgtgaggacggcattataattaatacaaccccttgctccatcaaaggaacattcggacatcctacgcatgaaaatanaatcctgaatctaccttccttctaccgagggaacaaattaatagacgccccctcatgctagccaaaagttgggaccaaaaccccctatcctctttcgatgcacgagcggtgaccctgaatcggaaaaaccggcctaccctcccggagaaaatgagtgaaa

SEQ ID NO: 21781 - DNA, 562 bp, Glycine max
ccatcactgcatcccctaagctctatgtactttcttcatgcctcatcccatgccttgccaactccttggagaaccctcacattgtggtcacctaaaccccatcctatgaaacgcccacaccttcgcctgatggcactcctctcatggggtaaccaagctgtcttatggtgaggacgggattataaataatacaaccccttgatccatcaaaggaacatctggacatccttcccatgaaaaaagaaacctgattcttccttccttctagcgagggaacaaaataatacacgcccctccatgctaaccaataattgagcccaatacggcctttcttttacaaagcaccagccgggacctcgtaccggataaacggccttccctccttgaaaaaagggattaaaaccaccacacaataagagccagggcacaacaaaaaaaataggctccctcttttaaatccccggcgaacagggcaaacaggaccaaaagtgaacaaaccggcgcttccttgcatgatgaatggcaaggaaacgtccaacactcgagggccccaacccctcct

SEQ ID NO: 21782 - DNA, 1037 bp, Glycine max
  unsure (1)..(1037): unsure at all n locations
gaggcaataaactattacaccacacactgcacttaacatcgccctctgtcgttgtntnctcaatcaatccnncagaancaagagtgggctgtaacgttgacaccatcgaannncancnncaancancaaacaaccacaaatatagcaagtgaagtaagcaggccaatggcgggttataacatcacacaaaaacaacgagcaggacatacggcaaaacgactcaaacgcaccagggagcatcatgatgagcaacggggaacacagacaaacaacaaatcacaccagcgcggacaccgcacatacccagaaaccatatggtcgcaaaaacggagccggaggcaagtgcgatcgcaatggaagggagagcataagacccggccgcgcttcccagcacagcgaatcacaacaaagcgacggcacgccacgacaagagacgagccaagagaagctacacaaagagactaagactaaatagcaacgcgaaagacgcgaccgacgcaaacaagacatcgaggaacactgaggcaggcgcacaagattaagaacgagacgagggagcaagtgatcgacggcggcaaccatgaggcatatgaccataaacaacccgcaatgcgacaggatgaccgacgcgaacgacgcaaggcacacgcgcgccggagactcatgagcgagaaaacacacacaacctacatagacaactaacgacggaaaaacaatccgcgctcaatgtagcacgcctaccacgtacagacctgaccatgcaacggactgtcgagcacggagaaacgcgtcgaacagagcacacggacgcaaacggccgaatacaaaaccgatgcacaaacatgcgcatagaatacgtgacgacccacccggcatagcgctgtacagacgcgacgaaatacgatagaatatatacgcgaagagacggagcactaaaacgaacgacgcagacgtcgtgcaagccataggatacaacgtgaaagagaacgagggcgcgcagaacgaaccggtagaccacacacaaatcacaacacccg

SEQ ID NO: 21783 - DNA, 206 bp, Glycine max
  unsure (1)..(206): unsure at all n locations
ccaaacacctccacccacacccccccacataatccctcccataaccactctcccccccctcaacatcaaccccacccctatacnttttncattttccccccccccccccctaattcctacacctccaccctcccatcccacaaccccagccactcacccacccaccactcccccccaacacaccccatccctatcacgccaccaca

SEQ ID NO: 21784 - DNA, 903 bp, Glycine max
  unsure (1)..(903): unsure at all n locations
tgtgtgctttgttnacttgatgagcgctgaanaancnacccggagnnannaattgncccaaccgcgncacccgagacgctcatttgaccattcgatacttctacacggatgtcgacccggctggtaacatgcaagaggctttaatggttaaccgagcccttgagaatttttatggccaacctgttcacacgagagcctgataagggttttcacatatttctgacggtcgcattgtgtaatggtacgtcttggaatctcagattgggctaccttgttatacgcgcggccgattgtggtaatgtaaaaataggaacgtgcaagaatacactcctcatctcttgaaagataacatttagaaaattttttatgaggatcaacgtcttggtgctttttttctaggagggagaaatgatcaagatgccgttgtgaataagagggataacttcacactgtgtcttggtagattattcttaaacccgcaaactctcacggtgcttgagaagtcaaggcctatcttaccagggggttaataagcgctttgtttggggcccatatgcgccacgggtctctggactaaagggttaacttacgtagatgcggtaaacataaatacatcctgaataacatcaatccctccatgattatgcttccgaatcatgacgggactataatgcggctctttaactctgagttttctctcaatttgtgtttataactatactgatggtgccgtctccaatatgatcattactttcgtcgagtatataatgaggcctcctacgccctctttcatgtttttcgtcgtgtttctgtctctagccgtatatgtaggaggacaatgacttctatgatttcttccatctcaataacgtcatcttccatctcacgtgctatatttccact

SEQ ID NO: 21785 - DNA, 290 bp, Glycine max
ttagatgcaaggggtgggcgctaaatgcttgagactcgcggcttagcgcatgaacagagatgtgtttaccgcgaggcttgcgcttagcgaaaggactacttttcagaaagaaaaaaatttctaagttattttttcagtccttcttccaagaaattgacacccttatgttaaacattcaaaggtaggctgatatactcctatgtacagatcatacagcaaggtcaaattgattaaatgcatgacaaacaaagataacagatatttaaactgggtttgcctccaggaagcgc

SEQ ID NO: 21786 - DNA, 548 bp, Glycine max
  unsure (1)..(548): unsure at all n locations
tcttatccaagcaattcttggtggtgaagctcctntttcttgccttatccctaatggatggtgcctcccctctcctcttctcctttgccttccactgcatctccatggtgtaaaatcaccattgaaggacctcacttaanctcaaaaatccancctccatanaancttccccaacaatntnncctcccccaaataataactcggttaatactaatgaattaattaacaaaaaccatagtaaattttttttttcttcttctttcttttcatttctttctcttttcaccacaacaacgtttccaaagaaaatccctcctacaaaatccttaatggccagttcacaactctattcgnaatcatttcttttctcccaggcataatctctaaactattttgctttttcaaaagaaagaatgtaccacccattactttatgtcgtcacggtgaaataaagaataaataccggtgataaactttttacaaataaaatgctacgctattttttaaatacagatcgatcataaagcatcatcatttaaggattcaaa

SEQ ID NO: 21787 - DNA, 486 bp, Glycine max
tagcgagttacactttatccgaaggactgtatgatctaaccctttgtattgatgaatgagggcagactgctgaaagttttgtgaacaaatggattgtcattcactattttacactgtgggtgatacaaattctctatcggaactattatttgtttatttacgaaaaggcttcgatgaaatcgcgtcattgttatgataatacacagaaactatgctttacacagctaattactaattatgatctaatataaaaatatgaaatttgtcacgacaaaagaaatacagtaaaacaagattctgcatattattattaaatagtttaaagaaaattcataaataataaatatgtgtcacaacaacaacatttacttctactacttactatacgacataccttacacatcctaccaccgaataatattataactaatgtggactataatgtaaatactgcatgtcactcaacttaccagacattctttcact

SEQ ID NO: 21788 - DNA, 466 bp, Glycine max
  unsure (1)..(466): unsure at all n locations
agcttgggtcccaaagaaagaaagtagtgaacatcccatttttcgtattctaattttaaaaaaaantatttataaataaataaatttttagaagatgatgaggtttttataattaaataaataaaggaaaatagccatattaaaataatggtttgaagaaaaaaatatttaatttattcatttgataaggaataaaataaagcttgctttataaaatgataaaaataaataaatagagtaactgatagattgtgagtaccctagttataaatagcgttaggtcagttttcacatgtacgatgactctnttttccctcaattttgtcttcccccctcctcttcccaaaaaccctctttttttctgcacaccaccaaaccaatctcagaaaatcgacatttttggactcattcaccgttaaatcgtcgtgaaaattaaacaccaagttcgcaactcaacttcgagcat

SEQ ID NO: 21789 - DNA, 490 bp, Glycine max
agcttaaggcatgtttccatgttcaaatcaaatcagtgcttagaagttgttcttttatcaaatccatgccaaaaaacatctaaagtcatttggtatttgggaaagccattcattgttttcattcttaatgtttccaaaaatccttttgttgtattttgattcaatcaaaagtaagtttcaaaaataccagttgttgattctttccaaagcatgttatgtccaacaattttttttgtttaagtcccaaaaaaagttatatataatttacaactacattaacaaaacaaaatatatcaaataatgcataaatcagttaaaaacacacactcgcttaagtttccaaaaaaaataaaaaataaataaggtaataaagtactaaaatttaatacaaagtgataaatgatcataaagacaagtcacacatttttggagatcatggttgaggagctcaatctcctccaatgaaataatcaacaagatctaccatgtc

SEQ ID NO: 21790 - DNA, 648 bp, Glycine max
  unsure (1)..(648): unsure at all n locations
tgcttctacactctgcctctttttgatgatgacgaccctgaaatcaagagacacatactttcactttttcctagtcgatcactcacttaattttccattatccctctttatttttgaatttatgctccactcgaaattaagttaattacttatgtgagttcttgatttaatacctatttctctccccctttggtatcaacaaaactccacagtgcctaacatgtataaaacattcatgtactattaatcattcacaaaacattcattgaagaatataaaccaatcatgaaggcagaaacatgaatagatcaaatatatgtggggtaccaatggggggtagcaagcaaatgctcacctctccctctataaattaattggattggacttcttccaattcaattaaatatattttttaacacgcacattcaatattcacttaatgcatgtgagattacaaaattagccctaatatcaaaaactactctaggtgccctaaaatacaagggctggaanatataccattttagggtccctccctactttttgggccccaatataagcctacgagatgaatcctatctatttggcagatagggggtcaacatccccatagccaaattacctatggtataaaacctaggctttttt

SEQ ID NO: 21791 - DNA, 586 bp, Glycine max
  unsure (1)..(586): unsure at all n locations
gcttttggatcggactntgtgtggttgaatattatggtagtttataaatggagcaacacgtaacactgatggccaagcaaaaagccattggctggaaagacactggcattatgatttaataagcagaagggtatcaagcaaaagccacaagagtatgtgtgctctcatagtncaatttgaaatgttaaagagatattttgtcatttgaaacatttttttctccttttatagtctaactgttaaagagatattttgaaaactgatgacagtatttttgtctaattttgtattaattaaatatttctttatcagtgaacaaccttacaagactattatgtatgaaatggagagagtacaaaataaccgcacaattttanatatttgttccaatatatatactatatataagtagtagctaaggaaacacagaatccaacactttttatgaaccatntagagttgttatagcatttacacgtccaaactaaaataacgttgatttctacactctgtttcatattactttacatttaacctttgtcttgttttctgcactgactatttaaattatttttactttttgaat

SEQ ID NO: 21792 - DNA, 827 bp, Glycine max
  unsure (1)..(827): unsure at all n locations
tcatctcacctccactatatatttccatataccactctatnctccacactctaaacaagaantcttaccctgtaacacttcctcatcccaaacttgactgataatggagtactccacacgtgtctttcttggtggcggatgatcaatggtgcnccacaanttttccacctccacaattcncacataaaccccccatcccctgtttcccaccttcctctttnctcacattctcccacgatgcccatattcttgttttttctaaccccgcgcactcgtaaagactcccatgcttcccgcacatgcattcggaaaaacactccaacgggatacgccctaagattccgggcccatgggctaaggctgaaccaccctgtctatgcccatatcaaattcagattttattacttatggaccctatatttaaggcctcctaaacgaatggaggagaccctggaaaagtccgaaatttacccgatgtctgttgggcaccacaccatgtgtcgcgttggggtggctttgaaacatcacaactctttttccctcttcttctcctccttcaatacagatcttttctctcttaaccatacctcatgaaattcaaagcgaaatatcactttttccatnccaatacncactctttcttcactttcccaaccttctcctaccccatttaatcacctccttccnaatatttttctccttacctnnatttntccccctcttcctcttnttttctcattccccaatttccttncantcnntcccctccctccccccccnaccntttcccttttncnncctcccctttccccctctttcctttcccc

SEQ ID NO: 21793 - DNA, 334 bp, Glycine max
  unsure (1)..(334): unsure at all n locations
tcttctttttgggcactctttgttccccactctaacgantcggctgtagtcatgttgacatcccttaactagtcacactctttcctgaccctggtgactgtcgtctttaagctttccttgaccactctcgttctttcaagctctgctttcaaggctagcacttctttgctttcctctgagacttcagcttccctactgagactttttagctcggggaccaacgtatcccttgcgccgagccttcaccatttatgatagccaccaatgacccattgctgcttnccctaacttcttatcttttctttcactatatccacactcttcggattctctg

SEQ ID NO: 21794 - DNA, 346 bp, Glycine max
  unsure (1)..(346): unsure at all n locations
ttcttcctccccgacaacacccttgcacgtcatggtgggcaacgggaacaccttggactgtgatatcatctccccacaggtacccatttcgatccagggccacgcctttaccctagacctctntcacctttccatctgtggcgtcgatattgtgttggagtgatatggctgaagattctaggcccggtaaccacggattatacgtccctcaccatgaacttttcatattttggccacacagttaccctaattgctgatgcaccccccacacccacacttgcctcatcacatcagttaaaacgtttcgcacaaaaccacaacatctcagccttatntcatatcacac

SEQ ID NO: 21795 - DNA, 1167 bp, Glycine max
  unsure (1)..(1167): unsure at all n locations
catgcctcggaanaacggngcgcacctcagaactnganncatcccagccagncgncactanncatnnnaccacccnacnnncccccnaagagggacgtcgatgaccgtgcaaccaccgcnanananagnnnngaggaagagagccagaagaaaanaaaaangagagaacgcgagatgacattttgcgggacaacaacgccgccaagggacagccagccccataccaccagaacacgcgccgcaacaccactaaggaaaaaggccacacggaacccacagaccgaagcaaccagcggcacaaaacacacgccgccaaccacccgcgagcgcacccacagcgccaaccacatcacgaacaacacaccaacagcggcgcgcgcgcccgccagaccgaaaccacgcacaacaaaagacgacaccaccccgcgtgccgccagcgcccgtaggaaccgcccccaccaccgccacagacccacccaacgaaggcaacgcacccacacgaccgcgcgaagcgaacaaccgcacatgaacgcgccaagccacccgcaccgatcaacaacacccgacaccaaaccaaaacccgcacgcgcaggcgctacctcacgccgcaccagccgcacacaatgagtccgagacgacacccggcgcctcgggcaacgcacccagaaatgcttacacccgagacagaacccaaactcaccaccgacngagcagcacgaataacacaggcgggagggggacgaaaatacgcacgccgatcgccagggacgacacaatatacccctacactgctagacgcagctccacacacgcacacggaccgtacgccacaccatctcctcctcgtccgtcacccaccacacacacattgaactagcgccgcccaacacacanacggacaactcaaccacgaacacacctccacgcaccccccaccgaggcaaccccgccacgcagacactacgcaagcaagtgccgctaagatcaacagagccgtagccgccgcacccagcgacaccacaaacaaacgccaatgatataccacgacgccccatacacggcgcgcacccacaacggaccaccgcgccaccaaatcaccagcacgcgcgaccatcgacaccgcgccgcacacccagcgcacctactcgnacgacagacaccngaccc

SEQ ID NO: 21796 - DNA, 604 bp, Glycine max
  unsure (1)..(604): unsure at all n locations
cctgaaatcaagaaacacatacttatatctttcttctatcgaccactcacttattttccttatccactttatatttaatcctgcctcccttctaattaaactaattacttatatcagctctttattcaattcctatttatctcccccttttctcttctaccccccccacacccctacantttaaaacaatcatgactataattactacaacacattctttgacaaaatatccctcctaaacaacaacatgaacgatcacatataaagaagtaccaagggttgtcaagcaaaggctacctccctttctaattaaaagaatggactatctccttactaaattatatttcacacaccaaaaaatttacttactcagggaatagaaaattcccctaaacaaaacaagtcaagtgcccaaaatcaatgggctgaaaaaataatatattgagaccaacttccataagaggcctaaaaaaggcccgataggaaccctctctaaatgcaaataagagggctaaatatctcataaccaaatttcccaagtatagaacaaaaggtttaatcaattacactcttttagaatttttctaccctaggagtgaaagta

SEQ ID NO: 21797 - DNA, 971 bp, Glycine max
  unsure (1)..(971): unsure at all n locations
tgtgcctgtacgtgaagccttgancgcgccganatntgatgctgttaccacccaacaaagaacgatgttgcgttatcacctttggcaacgcgcgtgacataagatcatttgaggatggactatggtgctcaatgcgtattgcccctattatcgtggcttacaacactaattttcttgtaatctccgtgcagatattcatttggtgggaggccaatttcagctgccgctgacattatgaacccctgcatctgcgatctcttgggcagaccgaggctatttgagatgcacactgatgcttccattacctataccttcttcaatgaagcactaggtgacccaaaaatatgattgcgggacagagcgattcggatgacccatattatatatacctggcacagaggtccgtatacttccatttgcacactcgtaacgttttacgtcatctacggactatctctctatataacaacgctctggcgtgataaatccgctacatggcactggtatctatagctcgtacactgctgctctttcagcaaatgctacccactaaatagcagcatatctataacggttgattatcatcttctaccctttatattgcccaaagctatatgctcttaacagtattatttataagcgcattgctgtcacttctccaacagctcctcacactatgcttattaaaatccgcttatcgggataaaaaagtattacgcgactttcagccctcatcacgactcttcgtctcctgccgtgcgcggaccatcatcttgatgggcatcgtcgatgctcaattgctttcatgtacaggaagaaccacactcccgctatttacgtattcggagctncttatctttaaatttgtcatcctcccactataccatcggtcgctggagacctatcttgtcatactccggtgactagagttgatattccacctcatctacacatatatatatacgacatcg

SEQ ID NO: 21798 - DNA, 547 bp, Glycine max
gaagcatggatcagagaagctactacaggagatattatcaaaaaaacttctcatggaatctacctaatctataaatataaacatgtgtaacacttattgtaactttgatgaatgagagtcttgtgagacacaactcaaagttcaacttctctccctttttcttccttcaatattgtgctcccccctctctctttctctccctctttcttttcctccattgaagcatcctctccaagctttttatccaaggctcatcttggtggtgaagctccttcttccatggcttattccctagtggatggcgccgcctcttacctcttctcctttgtcttccgctgcatctctatggtggaaaatcaccattaaaggacctcattgaagctcaaagatccagcctccattgaagccccacaagcaagcttccatcaagtggtaatcagagcataagagcttcaagtaggtgctccttaaacctccatttaattttagctttaccttctcttccattgttgtttcttcatttattcctcatggatctcctcacatg

SEQ ID NO: 21799 - DNA, 422 bp, Glycine max
  unsure (1)..(422): unsure at all n locations
cataagggtttttactttccaatcccactacattctccatgaatntcccaaccaactaacatttactcttcttctcgcggaacatgaaggacgaatatgacctattcctgtggccctgcagcgtagttctcgccgagtatgtttggcagcacaatcatcaatntttaggagccaacgttgtttaggtaccctcttatttcaaattcttgtctaatgttatgtgctcatttattattctccattattttttcttattgtattcatgcatctaggtgttggaacttccttgcctagcttggttgcaacaaaactcggtgcctgtgtcactcttatcgatgacttcaccagaataggggtattacactgttaccatcccaattttaatttatatacttttataaatatttcaaataaactatagt

SEQ ID NO: 21800 - DNA, 434 bp, Glycine max
  unsure (1)..(434): unsure at all n locations
tgcagccagacacaaggtctgtacttatgtatagacttaagattattaatgatatcaactatagaaatttgtgcaatgagctgaagcttaaattctagtcaaggatccctgtagtatgcatacacttgacttttacatatattaatatataacatttattgaagctgacaaataattaattgtcacagaaaaagcatttaaggatgagcttcctgcacctattgactcccaatataagcaaagttataattggaaattatatcacttatgaaatatttcctacatgatctacctgaatgaacaaataaactatgaaaaggaattntaaatgttattacttctaacctagtagatcatatgggttatttcctggaaattagcacatgcttacacatatggtcagaaatagtagttctgatatgaagttataatat

SEQ ID NO: 21801 - DNA, 387 bp, Glycine max
agcttggagaaattcaaatggtcataacttttcacacggatctccaattcatacgcatcgcatatcgagacgcttgaaattgaacagcggaagctcttgagaaatttaaatggtcataacttttaactcggatgtctgattcaggcgattcacatatagagacgctcgaaaatcaacaacggaagttgttgagaaattcaaatggtcataacttttcacactaaggtccgattcaggcttataatatatcgagatgctcaaaattgaacaacggaagctctgcagaaattcaaatggtcataacttttcacacggatgtccaattcaggcttatagtatatcgagacgctcaaaattgaacaacagaagcttttcagaaattcaaat

SEQ ID NO: 21802 - DNA, 293 bp, Glycine max
tcggacctcagtgtgaaaagttatggccattatattatctctagagctaccgctgttcattttcgagcgtctctatatgtgatgcgccttaatctaacttccgtgtgaaaagctatgaccattagaatttctcaagagctttctttgttcaattttgagcgtctcgatatgtgattcgcctgaatcggacatccgggttaaatcgtatgaccatttgaatttctcaagagcttccgctgatgaattcgaggctctcgacatattatgcgccccaatcggacatccgtgggaaa

SEQ ID NO: 21803 - DNA, 389 bp, Glycine max
  unsure (1)..(389): unsure at all n locations
agcttcttatccaaggctcatcttggtggtgaagctccttcttccatggcttattccctagtggatggcgcctcctctcacctcttctcctttgtcttccgctgcatttccatggtggaaaatcaccattaaaggacctcattgaagctcaaagatccagcctccatagaagccccacaagcaagcttccatcaataacttttcacacggatatgcgattcgcggacataacgcgtctagactctcaaaattgaacaacggaagtcctcgataattcgaataatcataacatttcactcggatgtctgattcgaggacataanatatcgagacgctcgaaattgaacaacggaagcactcgagaaaattgaattgtcataacttttcac

SEQ ID NO: 21804 - DNA, 290 bp, Glycine max
tctagcattgttatgtccacgaatcggccatctgtgttttaagttatgaccagtcgaatttgttgagagcttgcattgttcaattgggagcatctcgataaattattttcccaaatcggacatccgtgtgaaaatttatgaccattctaatttatcgagagcttccgtggtttaatttcgagcatctcgatatattatgtccccgaatcgaacatctaagtgaaatgttatggccattcgaatttctcgatagcttccgttgttcaatttcgagcggctagatgagttat

SEQ ID NO: 21805 - DNA, 361 bp, Glycine max
agctttggagaaccaagccaatcagaatgctatacgaaatatagatgggaatagaggtaacaatggcggtaatgacggaccgaggcagaaccgggttgagggagtaaagctcaatgttcctcccttcaaaggtagaagtgatccagatgcctacctggactgggaaatgaagactaagcacttatttgcctgcaatgactacactgatgggcagaaagtcaagctagcagcagctgaattctccgactatgcccttgtttggtggcataaataccaaagagaaatgttgagagaggaacgacgagaggtagatacatggactgagatgaaaagggtgatgagaaaaaggtatgtgcccact

SEQ ID NO: 21806 - DNA, 369 bp, Glycine max
aacatttgcatttctcgagagcttccgttgttcatatttgaccttctcgatatcttatgcgccttaatcggacatctgagtgaaaagttatgaccatttaaatttctcgagagcttccgttgttcaattttgagcatctcgatatgttaggctcctgaatcgaacatccgagtgaaaagttatgaccatttgaattacttaagagcttaggttgttctatttcgagcgtgacaatatattatgcgcctgaatcggacatctgagtgaaaagttatgaccatttgaatttctcgagaggttccgttgatccatattgagcgtctggatatattatgcaccagaatcggacaaccgagtgaaatattatga

SEQ ID NO: 21807 - DNA, 415 bp, Glycine max
  unsure (1)..(415): unsure at all n locations
gagagtgctcactaagcgagttgtccaattctttcaatttttcttcaaggttttttttttcaatttttgcttcaattgtccttcatagcacttgaaatcttcttcttttaacttctgctaataaaaaactgcaaagatattaatttctttattatttcattaaaaacaacaatgaagtaaagaacttgcaatcattcttagccaaaattgactatcaaattaactcanatttcgtagttatcattgtgttatacagaaggaaaaaaaatcaaactcaacgttaaatattcaattntatagatatagattcttgtgttgtataaaatgtgtatcgatcttccttttgtttaattatatttaataaaaaataattttatatattaaatttatatgactcccataactataaatctac

SEQ ID NO: 21808 - DNA, 402 bp, Glycine max
accgatatcatataatattatgaagatgggtgaagaacaacacatagttgtcagagaagaagtggacaaactcctcaatgccaacgttatcagagaagttagatattccacctggctcgccgatgtcatcatagtaaaaaaggctaacgacaaatagcaaatatgcattgactatactgatatgagtagggcgtgccctaaagatgcataccctttgcccaacgttgacaggctagttgatggagcatttggattctaggtgctaagcttcctagatgcttactccgaatacaactagattaggatgcatgctctagatgaggagaaaatgacattcttcactgagatgcaacttttgctaaagggcatgccctttgcctaaaaaatgcagtgctacatact

SEQ ID NO: 21809 - DNA, 443 bp, Glycine max
  unsure (1)..(443): unsure at all n locations
agcttgtccagctagccgctccaaaatctgctccatgaacgatagagggaaatgatcattccttgtggtgtcattaagtttgtgatagtctatacacattctccactcagtgaatgcccgtgtaagggtgagatcattcttttcattatggatcaccatcatactacttttcttgggcaccacttggactggactcacccaagcactgtcaaagatcggaaagataagtcctgcttcaagcaacttgaggacttccttttgcacttcctccttcatggatgggttgagtctcctctgcggntgtctcaccggtctataatcaacttccataatgaatttttgcacacaataagatgggctaatcccttcaagatcaaagatgtgccatcttattgttgccttatacnttttgatgaccttcactaactatgcttcctctactg

SEQ ID NO: 21810 - DNA, 309 bp, Glycine max
  unsure (1)..(309): unsure at all n locations
agaagtgatctanaatggcatgtcaataaattggcttttcacaaagtgagattgataaattgaagcatgaaaatgaaaaacttgtttcaaggcataaagccactagttgtgtttgtgcttctacatgattacaaatctttgcaagatgagtttgaaaagtttaaaaaggttctctatgaagaaaatatgaagttgcaaactaagctttgctatcttaaatatatttttagaaaaatgaataaaggaaagactgatcttaatcacttactcaatttgcaaaagcatactaccgataagattggtttgggg

SEQ ID NO: 21811 - DNA, 448 bp, Glycine max
agcttcatgatgatgaatcatgtagttttgatgatgacaaaaagcccaaaagaatgattcaagaaaagacatcaagaagaatcaagattcaagagaagatgaattcaagattcaagagaagaaatcaagaagcaacaagtcaagacttaacaagggaagtattgaaaaggatttttctaaaaccaaacatagcacaattttgttttacaaaagagttttctcaaatttttctaagttaccagagtatttactctctggtaatcgattaccagtttcctgtaattgattaccaatgataaaatttgatttcaaaaagtttttaactaaatttgcaacgttccaaatgatttttaaatggtgtatttgattacaatatattggtaatcgattacgagtgtatctgaacattgaaattcaaattcaattgtgaagagtcacatcttttcat

SEQ ID NO: 21812 - DNA, 447 bp, Glycine max
  unsure (1)..(447): unsure at all n locations
tgagactctagacgctagctattatagacacttagactactcacgcttctagagagttctacactactctagagttctttatgactttctagaaaattctacacttttctagaaagctctagaattttctagaacctcttcaattaaggagggatcccaacaaaatgaaacaaaataagagtgtaaattttttatttgttacccttttgtgattgacaaaaatagaattagcctaaagggttggcattgactcctcccaatatgaagtcaattctcattcaagaaaaaacttgatgtgtcttgcactcaccaattaatgctaagtgaggatgatactgtgagagggtcccattggattcgtagaggaattaaattaccagactcactgcctaccccaatntctcttccaccaataaaaatctaacatgtgtgcaatgatgacatgtg

SEQ ID NO: 21813 - DNA, 432 bp, Glycine max
  unsure (1)..(432): unsure at all n locations
agcttgccatctgtccccaagctaaaaccattatcacagaagaagaggaagatggnggaataacgacgcanaatggtcagagaggaagtggacaagctcctcaaagccaatttcattagagaagtcaggtactctacctagctcaccaacgtcgtcatggtaaaaaagttcaatgacaaatgacggatgtacaatgattacaccaatcccaacagggcatgacccaaggatgaatatcctttactcagcatcgacaagctagtcgatgaagcatctgggttccaagtactaagcttcctggatgcctactttggatacaatcaaattcgaatgcacaccccagacgaagagaagacgacattcctcactaaagatgtcaacatttgttacagggtcatgccctntggccaaaaatgcangcgctatatacca

SEQ ID NO: 21814 - DNA, 301 bp, Glycine max
  unsure (1)..(301): unsure at all n locations
gaccttacatagttgtgagcagccagatcgacacaaatattcacgagaatagatgcccacttatagcataagcctgtattgcagcgaacatacatttcctatggtgtgagacaacctggctggatggggatggcagctccggtagtgtttggattanatagacgtgcgaggtgttggactaagaatattacgctgataaggttgtaacgctgttaaattggcttctaactgcttggctaagccaattgtgtgtgagaacgaatatggttttaaaatgaacagttcatgatgtatttccttt

SEQ ID NO: 21815 - DNA, 322 bp, Glycine max
  unsure (1)..(322): unsure at all n locations
agcttgtccataaaaatatgttntgaagtttatcatttaaaatttctactaagtaaatggatcattttcaaggtccaacgccttaaaatgatcaccttttaaaataaaaaagaatcacttgataagaaagaactacgtaggtctgatttcctcatcacaaattgaggaatacgtaggagcaaagggaaacacccttgtcgaccacaaaaaaggaaaaatataaaaagggtataaaggatataaggacataaaagggaacataaaaaccaaagtcacgtttgcacattcgattaaaggctgccgtcccttgggacggacgtat

SEQ ID NO: 21816 - DNA, 392 bp, Glycine max
tagaatggctagacatgatacatgtcatgtgtttggtttggttcaaggataaaagggatgccccacattatttccatgacacaaatgcaaaaatgatgatttggaaactttacgcaaaactggtcatgcatgcacctatgcggacactcaagtgtcaaatttttatggtcatgtgatgctagggctcaggattcgattcctctattttaatcaacccaatgtttccaaaatatgttcttttatcaatttgtgcattcatccgagtgcatttcgggcgtccggggaaatttcacagcattcacccttcacgtgtagacacattttccaaaaattggttatgatcaatgaactttttcaaagaaaagttggaaatcgtctcttttaaaagcatg

SEQ ID NO: 21817 - DNA, 411 bp, Glycine max
  unsure (1)..(411): unsure at all n locations
aatggaggaaaagaaagagagaaggggggagcacagaattgaaggaataaaagagggagagaagtggaactttgaagtgtgtctcataaaactttcattcatcaaagttacaacaagtgttacacatgcttctatttatagactaggtaacttccttgagaagctttcttgagaaaacttctttgagaaaacttccttgagaagctagagcttagctacacacacccatctaataactaagctcacctccttgagaagcttccttgagaagattcctaaagaagttagagcttagctacacacacctctctaatagctaagctcacctccttgagatgagaagctagagcttagctacacacccctataatagttaagctcacccccacgccaaanatacatgaaaatata

SEQ ID NO: 21818 - DNA, 323 bp, Glycine max
tgaggtataatttgattgagtactcttttgtgacttcaatttcttctcgataaagagttctctattttggttttaattgacttaagaattgcaattgcgatgtttgtcatatggtgcattctgcaggtaatgacttgtaagccaacgtcagatcttttaatgaatcttccaactctgcgcaaacttgacagcatgcttcttgttagagtaagatcttactttcattgtgtgctaatagagtagtactttggtagagaaatagctctaagaatgtgcaagccaaatactaaaagcttccatggaagttcttgagtcatactggg

SEQ ID NO: 21819 - DNA, 434 bp, Glycine max
  unsure (1)..(434): unsure at all n locations
agcttgtgcattcaataccctgatgaggatgtcccatatgttcttaaaactagactgatacacttgttgtccaagtttcatggttttgcaggtgaagaccctcataagcatctaaaagaattccatattgtctgctccaccatgaaacctccagacgtccaagaaggtcacatctttctgaaagcctttcctcattctttagagggagtggcaaaggactggctatattaccttgctctaaggtccatcacgagctgggatgacctcaaaagagtattcttagaataaattttccctgcctccaggaccacgaccatcagaaaggatatttcaggcattaggcaacttagtggagagagcttatatgaatactgngagagatttaaaaaactatgcgccagttgccctcaccaccagatttctgagcagcttct

SEQ ID NO: 21820 - DNA, 378 bp, Glycine max
gcgcttaataaaatctcgtatttgcgggtgtcatggattcaaaagatatattttgctgggtcgaaagtggagtttggtatacactagaccacccatacatctcttaaggttttgatgaaaacagatatattaatttgtgctaaccattatggtgcatgctggccaacaagtttgatgactggatgcaacaccacgtaagacttgtccgtgaatggactatatgtctattacatgcatgatgtactcgtccagtccatccaaacactggtggaatatgcacatgtatttgaatttaccagcttatgccatattatatgagtctatttagaaggaacatatctgggaatctatcttatatttccttttatatctctaatg

SEQ ID NO: 21821 - DNA, 394 bp, Glycine max
  unsure (1)..(394): unsure at all n locations
tacccatcacatgtggtactatgtggcggtcgggcgatggtgcacaacaagttttccacatccacaatgcgcgcataaacccaccatcccctgttgcccacctccaactgagctcacgtactcccacgtagcccatatcctcgtttctctcaacaccgggtccccatcaatcctcccaagcttccacaacatccaagcaaaacaacattcacacagcacaagctatcacagccaagcaaaacaaagcaaaggcagaaaactctgccaaaacaccaaccaaaaatcacagcttttcccactcaaagaccccagtaacaattccttcgatccaatntgttaaccgttggatcgaactccaaaatttactggaagtctatagtgcataagcctacat

SEQ ID NO: 21822 - DNA, 440 bp, Glycine max
  unsure (1)..(440): unsure at all n locations
ggtcttttcaccgaacgtgcccgatttttgatatttggggcaaaacaaattcatgtgctagagtgtcagttttgggttgaactcccatattatttccacgaggcgcacgtaacaatgatgatttggaaacaacgcgcaaaattagtcatgcatacaactaggtgggtactcaagcatccaacttatggcattatgatactaaggcttgagatttatgcaagtagacccaacgtttccaaattatgttctttcattggttcaacgaatccatccattcttatcttggttattttggaaaataaactcttagcgtcagtttcttgtttccaaaagatatgtttgctctctacgaatgaattattcttcctatgaccataacacgctgaccttgaaagggcttctttctcttattcttttggttcattnttttctatgcatgt

SEQ ID NO: 21823 - DNA, 351 bp, Glycine max
agatgaggaagtgttgaaaggtgaaacttcctgcttttattgttgaccacagagtggtacccggagatatgtcgcgggggttaggagaccttggagacgtcaggtggggtgctatttcccaaaaccaagcttgaccaatcccgacccaacccgggcatagtcggtcagtgagaacctgtgatgtacctaaacaggcgagctcctggcagtcaacagataaaaggaacatagaccacaaagcaaggaggcttgtggtggctggccagctgtgaattttgtgtgatatgtgggttgtagcctctggtaatcgattaccaagggttggtaatcgattacaaggcttaaaaatga

SEQ ID NO: 21824 - DNA, 368 bp, Glycine max
aattgcttcagattgttgcacagaaagacaaaggtctgtgtggtggtcggtagaggagcataaaccatagagtctggcgacaggtgcagatttttgattcatggccagttgggttaccaggttaaccaaggcatctagtttaccttcaagcttcttagtctcacctgatgaagatgaattcgtggctacttcatgcactcctctaatgacaatggcatcatttctggcactaaattgttgggagttggaagtcattttctcaattaaatttttggcttcagcaggggtcatttctccaagggctccaccactagcaacatctatcatacttctctccatgttgctgagtccttcataaaaatattgga

SEQ ID NO: 21825 - DNA, 440 bp, Glycine max
  unsure (1)..(440): unsure at all n locations
agctngcatctttattgcacgtgtataatttcttttactatcattgtatgtattttgtagtattgatatattcttagggtttcacacaaatacttaaccttgtcattgaccatggtaggaaattgacgcaccaactgctcgggaacaagtgtcacctaactttagaaggagattggccattctggtttcacccaccatcacaactgacattcatgaagttatgaagacccctgaaaagcgtttagttggtgcttccaacgttactctagaagttgaaaaccaacacacccagcaaaaaagaactctgacaagttctgaagtcctgcaatcgaaatcaaagcaaaccttatccccagcaacatcaacacgagaacattagaacattcccctcgtaaataactaaattcagcctctaaattattatagtcaatataagtcat

SEQ ID NO: 21826 - DNA, 432 bp, Glycine max
  unsure (1)..(432): unsure at all n locations
nngtccaaattgttcaaggcacaatctattgaacatatgttaattgtgtgacaatggacatgatatatatctccttcaacaaagatgagtgtataatcaagaacagggatgggtccttgttgtttactactaagaggcagaataatctttataagattaagatgggaaaactgacaaatcaaaatgtacattccttaatcttggtcaaataaattcactggacagaacataaaaaacttggacatgcaagcttcagattaatctcaaagctgaaaaatcattacctcatgagaggtcttccaaatttttctttccagtctaattttctttgtgaatcttgtgagaaaagtaaacaggtaaaaacctattttcaaagtaaaatattgttttcacttacatacctcttgagttttaacctatttacatatttga

SEQ ID NO: 21827 - DNA, 453 bp, Glycine max
  unsure (1)..(453): unsure at all n locations
agctntttattaatatatcagttntttccctatgcaaatttaaaatatgtttttcaatcaatggttttataaagattttgtttatattaaccagtgttaatattaagttgcctttctattctaagaagcttttacttttataagtgagttgtatcttgactatcttatagttttatgtagtatttttttttcaaaaattctgtttataccagttgaacgagttattattaagatttgtccatttacattgaattaataacaaaaaaatttatcatttttttatttatttcaatacttactagtaaaattttaaaaccataaaaattaaacctaaccaaatcacaaaagaataatttagtttgatttgaatttcataattcattttaaattaaccactatactggcacttaattntttttatttggattagagntatttaaagcataaatcaca

SEQ ID NO: 21828 - DNA, 450 bp, Glycine max
  unsure (1)..(450): unsure at all n locations
gcgctntagacaacttctgtaatcgattatggtaaggttgtaattgattattactgatacgatatataactctacaagttttagaaaacttgtgtaattgattacgataaggttgtaatcgattaaaacaaagagttttgtcttctgaagaaaattttctaacttagaaaattttcttctcacttactaatgatgatgcatgatgcacaaaaatatgatatggaataagatgcaacatttaatataacaaccaatacaaatgccactcaagggagttgggcatgtaaaagagaaaacttctttaagcttttctctaagcttcaagctttaatcttcatgttgtttatgttgctccccctatctctaaaaaaaaagattgaccaagtccattgctaatgcagaccttgggctagacaactttgtcattacaaagaanatcaagaagatcat

SEQ ID NO: 21829 - DNA, 445 bp, Glycine max
  unsure (1)..(445): unsure at all n locations
agcttgaaggcgtgtaacccaccattntccataatagaatactagtaatatgtctactatcattgttattatttctttctttgtcattgagggaaacacttgggctgccagatccctccacctttgggcatattctctgaaagatctgtgccccctttntgcacatgttctgtagttgcatcctatccgaagccattatactgacactacctaatgaaggcaaccattaggtccttccaagaatggactcggggaggttccaagctagtgtaccagataacaactaccccactaagactttcttggaaggaatgtatcagcaatttctcatcctttgcgtatgcccccatcttctgacaatacgtctttagatggttcttggggcaagtagtccccttgtacttgtcaaagtccaacaccttgaacttgggagggatgatgatat

SEQ ID NO: 21830 - DNA, 410 bp, Glycine max
tcttggccaaaattgtaagataatataaaattttataattaataattcatgaaatctatgctttcataaatttccctactttatttcataagaaaatgttcaccccatgttagattaaataacatattaaaaaacttacatgttagtaagcaagagagtttctatgtatattaagagtataataacaataaattaagaaaaataagctaactttaataagttaaccattaatgtagtttaggtaaattgttcattcttgatttaataaaaaatgtttattccaagagtttgattttatacattatatatataatataatttatatattaataacatatatgacatcaacacgatggtgaattttaaaattattataacaacgaattaaagaaatttaactccactctaat

SEQ ID NO: 21831 - DNA, 331 bp, Glycine max
  unsure (1)..(331): unsure at all n locations
cccaattgagatagccctcttaggtttagactaacttaaattgagtttcgtccgcagatccctcttggtagactagactcagctcaagcagcttacgaaagtttagcctaatttagcctaagcttcgtgcacagatccctcttgtaagactaggcctagactacacaacattattctcataacataattacaaccaccacttaatatgtagatccctcttgtatgatcaagtttcgatcctgcttgaatcaaggtctgaagccacaggacatttaccaccgctggaggcgcctcactatcgccgcttatggattatcacaccangctcata

SEQ ID NO: 21832 - DNA, 390 bp, Glycine max
  unsure (1)..(390): unsure at all n locations
gattatttcaatccaaggctagtcttatttataaattctttcgtgatcaacccatgtcatcaaactcccagcgggattaaaagacccatggcatcactctacgaccttcaatcaagaaagtttcacttggtcatataccaaagtgcaacaatccattgccatccttcaatggtgtatacgattggtcccaacgccttatatttctcttgctgtgcaaagtaatcaatgttttgaacaaaaaaaggggggaaaaccctaggatcaatatttcaatggattgattaaatgtcaaacgactccattgtagtcactctaaaattntcaagtgactgaatcaaaccgaacatacactctaagggaatccccgaagagatttgctaaaaaaagata

SEQ ID NO: 21833 - DNA, 399 bp, Glycine max
agcttagataagacactagagttgtatacatgaatatgttgtatgtttctattgcaggtagagacacctgaaaatttgaagtttgtgttctcaaacaatatcaatgaccttagaaatattgtatagaaagtagaaataataaaacaaggatttgtttctttgctgacccaaataatgtcttcgaagaggccaaagaagtcttgtttgggaaatattttaggaaggccctttcaataattgttatttgattaatttcatgtttgttctctaagttctcttataccatttgaagccagagaagatctgaagtaaacttttgttttgcaaactttagcttccttgactcagataacaaaaacatatccttaaattactgaagcagaatgcataatttacttg

SEQ ID NO: 21834 - DNA, 437 bp, Glycine max
ctcttacctcactcgaccgccttttggtttcctttctagctatcttatacttatcccaagtttcagaatttctacacctagaccactccttgaaacactccttttttactctaactttgttctgaacactttcattccaccaccacgattctttacccctaggtccaaaacctctagattcacccaacgtctctttagccactttaataatctcttgggacatcttgttccacatatcatttgcacttccttgtgattgtgcaccccatccctcccatatcttttgttggaagattccttgtttctcacccttcaagtgccaccatttgatccttggtgctaccataggacttcttctctttgccctatctctaaatcttacatccataaccaaaaatctatgttgggtagtcaaactctcttccgggataacttta

SEQ ID NO: 21835 - DNA, 404 bp, Glycine max
  unsure (1)..(404): unsure at all n locations
agcttgtacctggaagaacttgttccctttatctatngagaaaagcttgatgattntagagcactgcaagaaaagggtctattaaggatgcaaaatgggtgtgtgatcaatcaattgtgcctgcagtataagccaattgaggaggaacatgcttgcattttgatgatgacaattcacaatttattttgaagagaccagcaatgacatcttatctggcagtcaaagactgtaaaagatggcattccatcggttttaatggcatcccagattttggatcttgtgtcatttagtttaatttgactctaacattaactagtttgttatttaacctgctatgtttattaactattaagagatacattagagccattacatgcaatcactctttcataaaaaaaaatcca

SEQ ID NO: 21836 - DNA, 370 bp, Glycine max
cgctaacaagccagcctgtttaagtaagaataattataatattaataactattattattattaaataaaaaaacttttaaaactcttcagattcttataaaagaataaatagaaaacaaaagtatttttaagttgtactgcaacctgtactatacgcatttcacctctacgcatgtccctttgcattctcactttcttaattcatttctttctctaagttcttgcatctacgccaaatagtcttacccatcctagttaaagtcattctttgtctttgtatgcattttttctttacgaagtctcgcaccaccatccaccagctaccgcactttcacaatactacatcaaaccatcacaaggtattttgttt

SEQ ID NO: 21837 - DNA, 439 bp, Glycine max
  unsure (1)..(439): unsure at all n locations
agctntgagggatttcaaatgacaataactttatactcggatgtccgattgagttccgtaatatatcgagacgctccagattgaaaatagaagctctaagcaaattcaaacgacaataactttttactcggatgtccgattgagtctcgtaatttattgtgatgctcctaattgaaaacgaaagtttgtagcaaattcaaaggataataaatttttactcgaatgtccgattgagtggcgtaatatatcgagacgcttgaaattgagaacagaagatctaagcaatttcaaacgacaataaatttatagtcgggatgttcgactgagttctgtaattatcgagatgctccggattgaaaacggaagctcgtagcaaattcaaatgacaataactttntattcggatgaacgacagagtcccgtcatatatcgagatact

SEQ ID NO: 21838 - DNA, 234 bp, Glycine max
tccattgtcaatttggagcgtctcgatatattacgggtgtcaactggacatccgtgtataacgttattgacaattcaatttgctcagagctccagttctgaagtttgagcgtctctcaatattacgggactcaataagacatctgagtaaaaagttattgtagcttgaatctgccacgagcttacgcttgcaactcggagcgtctagatatattacgggactcaatcggacatc

SEQ ID NO: 21839 - DNA, 302 bp, Glycine max
agcttggttcgaggtacttactccgttgaatatcgaagaacgatgaagaacgaatgaagaacgtcgaagaacggttgaaatctttgcgaaattcctcacggaaaacgttacggaaacgtttcggaagcgcctcggcttagattttcttcacggaaaccaattttccaagcaaattcgaaagagagagaagtgcctaaggggctgaaccccttccttcttgccttcctcccctatttatagcaaaataggggaggtggttgccgcccagctcgcccaggcgagctcagctcgcccaggcgagc

SEQ ID NO: 21840 - DNA, 371 bp, Glycine max
attttgtggacgagcttgtctaggcgagttgaatttagccttagtttcactttagttattagtcaattcaattaagaatgaggaatcccaaagagaaaacgtccgattgatctttcgcttttattttactaaaaggtatttttatattattattttacctcttttttgatttccaacgtggttacggcacgaccgaacggtcggaattcattgtaaccaaaattaacggatgatacaattcaaacgatcggtggaaatttattttatttttagattaagtgagaaatgacttaaataaatggcttaagcgcgtcaaaagggggtataaaacagtaatgaaaacgagaataaaaatacatgaaacaaaatgt

SEQ ID NO: 21841 - DNA, 341 bp, Glycine max
  unsure (1)..(341): unsure at all n locations
agctttacactngacagtagttctaagacaacctttttgagcttattctatgcacctcagaatgcatgcacacatctacttttcaaagatgtttaaactaaaagagttaagtagaaatgttaatcatcacacaaattttgtcatccttacaacatgcattgctagtggtttgtcataattaaaactaaggatgtagactcaacacatgtctcaactttcaacttgttgcatctttaaatcctatcaacattaatcttctaatgagccctttatgtgtgtggctacacattgaagatgtgatgttgtcaatttcagtcttacaatgaacccactttgtatgt

SEQ ID NO: 21842 - DNA, 372 bp, Glycine max
agatgaggatcatcccacacttcggaatgtgcatcatggaaaaacttctttcgatgatgccacacacggtcatcatggataatcccagctttcttagaagaagcaatgtctacaaaccaagaccgctcactaacagatagtagggattcatctggaaactcatcacatatctctttctccccatgagtaacatcctcattaactaacctagacaaggggtcagcaaccaaattctcacatcccttcttatctttgatttcaatgtcgaactcctagagcagcagcacccatcttatcagcttgtgcttggcatcaacctttgtcagtaagtatttaatcgtcgcatgatctgtgagaatgatgaccttggag

SEQ ID NO: 21843 - DNA, 419 bp, Glycine max
  unsure (1)..(419): unsure at all n locations
agcttggcctttatgttgctcaccatgttgttccccctatctctaacaatctctcccttnttggctttgatgatgccaaacttgaatatgacattgagtgcatttggagggtctgagtgatgtaagctccattggagctngtaagcctaggatcttcttcatcaatagattcctttgcttcttggaagatgaagggcagtggaatggagaaggaagagagagagtagatgccacttcaaggagaagatgagtctagaagaagctcaccaccataggaggccatggataagagcttggaggaagaaggagatgaatgaagggagacggagagaagagcacgaaattntgtgctctaaaagatctctgaaatatgaagtttaatattcaaatgatncaaattaaacaaatgcacacacatg

SEQ ID NO: 21844 - DNA, 388 bp, Glycine max
  unsure (1)..(388): unsure at all n locations
ntatacaccttcgagtggttntcctctattcgggtgaatatagtgtctcttctaatgctcttttagaaatgaaatgtgaaatgtcttaatctcattattggttatgagaaattctatctttgtgctttcattcctgtttcgtcatattatttttgaaagactgtgtgttgctgtaccatcgatttggggtttgatttctttgccaagcatgctcgcagtataactagagtgttcataaatttcaatgtcttcagtgttgtagacctcaaagacttcagtggcttctatattttacgcgacttcaatgtctcttgtcttgtatatctcagagacttcaatgtcttcagtcttcatatgttcaagactctaatgtctttaatcctttaca

SEQ ID NO: 21845 - DNA, 404 bp, Glycine max
  unsure (1)..(404): unsure at all n locations
agcttgtgaattttcactttcagtcaagataaagaaggttaataaagcttcggaggactaaagatctcaacttaaataacatagcagcaagcagaagaagaaacttgtttattacattatagaaggaaaattatggggtgaaaaagttctatgtcaaaccaatgattacaagcatatataggtacaaaacaaagggaaatacttatgagtgctagagaaaagaagagcatgcagagagagagagagggagactttgctggacccgagtttccttcgaggcaagagaaaattggaaagcaaggcaaagacagggaaaattggagctctggtgggaatactttntaactnttctttntcttttgctgttcatnagctttttttttttctctagtggatatatcttg

SEQ ID NO: 21846 - DNA, 331 bp, Glycine max
cacacaacctaacaaggtttcacagttatatcaacaggcacatcttctggctagccaaatcaattattctaacaaatacacaccaaacaaacaaaaaaataaacccatcttgcagaaattcacattactaactaaaccctaaaattttaagaaattaaaagaagttaattcagtaaaaataaagataatattgttacctctacagttcttcgaaaaattatatgctttctgggtcaccaaattaaccttcccagcaatgtagctataacactaaaagactggaagctcacaatgcaagtcttctgctttatgccacatgcaaattaacccc

SEQ ID NO: 21847 - DNA, 410 bp, Glycine max
  unsure (1)..(410): unsure at all n locations
catacataagctctactattttaatgttgttatggctnttgaagatggttccaaaaaggagctacagaaagttagcctaaaactctcaaaggactttcctcttaccaggactactcttgcatctatggagtctttgtccctgccagtggtactgtggacaccttattctactttcagttttgagattggccatgaatttgtgtatgatggtttggttcttgtgctgggaacaggttcagcaagttgttctttctgctgatatgcaatgtgagaagtgccagaagagggttgctgacattcttactaagatgaatggtaagcctctattttacaccgagcgtggattagtatgttgcacatgcatgattgtgaaattcaaacattgttcattgattggtttggagctctat

SEQ ID NO: 21848 - DNA, 389 bp, Glycine max
  unsure (1)..(389): unsure at all n locations
gatgtcaacacaggttaaactagataagttaaacattaagtcattaaatgggttggattggattatattacatgacccaccttcaacaaatagttgtgttgggtttatccattaggttgaagtttattttactttttaatttttataattttaaaattgaaacattttgttggtttaatataccactaacataattttttcatatttgctttgtggttgacatatataatgatgatttattttgctttttggttgagtttttttaacatgtttgttattatttttaatntagttataattnttacggatcaatcaaacccatctgacaacccaccacgatttggagtttggacttggttgagattttcaatcaatgaaaaaatggatta

SEQ ID NO: 21849 - DNA, 445 bp, Glycine max
  unsure (1)..(445): unsure at all n locations
agctnggttggatggaatggatcattcctattcccatgtttggttaagtcaagagacccaaggtgttcatcaatggcgaagttcaagaatcttgctttgatcgtgttgaccagaaagaagtgaggttgtcatgattggataattcatatctctttggtctacaaaagataagttttgttgataaattgtttcaagtgccttttgaattggaatggaaccatgtggaggttacatatgaaagtgcgttatatatccttcttaatttcttttggcatgactatacaacttctttaattatagaagccattaatggctaatgaatttcctcaagtgatggtggggcaaagttgcgcattgcttactangtacccaaacataccctatgttatatttgcaattgaggcatatatgcacgtaagttaaatatacaataaatgttttatgt

SEQ ID NO: 21850 - DNA, 356 bp, Glycine max
tagggttaaagtctcacgattgtcacgtgctcatgcttcaattgttagccgtggctatacgagacatcttgccaaacaaagtcaggttcacgataactcgcctgtgctttttcttccatgctatatgtagcaaagtcattgatccaataatgtttgatgagttggaaaatgaggccacaattatactgtgccagttggaaatgtattttccccctgctttctttgacatcatgattcacttgattgtgcatctggtcagagaaatcaaatgttgtggtcctttatatctacggtggatgtacccggttgagcgatacatgaagatcttaaaagggtatacaaagaatctatatcgt

SEQ ID NO: 21851 - DNA, 451 bp, Glycine max
  unsure (1)..(451): unsure at all n locations
agcttgtgcttaatcattgtaatatacccatggttaataaaactatgtttgaactctatgcagcttgttgtgttggtaagtcacatatcccaaactgtatattctgctccccttgagctcatatacagtgatttgtgggaactctctcatgtttcatcttcaaatgacttctcttactatataagctttgttgatgcctactaggttcacttggatctattttcttaaaaataaatcagaaacttttcctatttttcagcagtttaaaaccatggctgaacttcaatttgatactaaaataaagagtgttcatacagattgnggagggttcattttcaaactcatggaattattcataaactgatttgccctcacacacaccaacaaaatggctgtgtggagagaaaacacaggcatatagttgagttaggtctcaccctactcaaacaag

SEQ ID NO: 21852 - DNA, 371 bp, Glycine max
gctcattgactccaaacttttgcaaagaaggtcaaagatctgtatggtgatctgcagaagaacatagatgacagactcttgcaacaggtgtagatttctgatttatggcaagctgagttaccaggttgaccaaggcatcaagttttccttcaagctttttattttcagtagatgaagatgaatctgtggccacctcatggactcctctaagaacaatagcatcatttcttgcactgaattgttgggagttggaagccatcttctcaatcaaattcctagccttagcaagggtcatatcaccaagggctccaccactggcagcatcaatcatactcctctccatgttgcttagttcctcataaaaatattga

SEQ ID NO: 21853 - DNA, 461 bp, Glycine max
  unsure (1)..(461): unsure at all n locations
agcttataagaacaaaattgccttaatcatttccaaatatgcatgtgaattatgacgcatcaacaagaatcaagccaaggctatngtgcaagcaatcaatggggcaaaacacaccaaatgattataatgatggatggctcanattctcacaaaggtaaaatcatcactttcaaattgagctttcaaaactatcatgacatgtagagaagaatcaaggatttcaagtcacaaaatgtcaagaacttttattttcaaaacaattacccatttcttgaacatatcctataattcaaagaaaaacatgcaaagtcgtacgtgcacacaaaattgacccaaaatattaaactaaaattccgacgaaactaacaacattaacaaattaacacaactaacaaattaacanaaccatcaaaactagcaaaaccaaagaacacttcccccccccccatacttaaacaaca

SEQ ID NO: 21854 - DNA, 375 bp, Glycine max
tgcaacgttccaattgttggacaaattgtgtaatcgattacaatatattggtaatcgattaccagtgtatctgaacattgaaattcaaattcaattgtgaagagtcacatcttttcataaaaagctttgtgtaatcgattacatggttgtggtaatcgattactagtgacaagttctgaataaaaatcatgagatgttactcttccaatggttttcaagtttttctcacagtcataactcttccaatgtgttttcttgaccagatgcgaagagtctataaaagcatgaccttgacttgcatttcaataaatttttcatatattcttttacaacctttgaatctctttgaacatcttcttgaacttcttcttcttc

SEQ ID NO: 21855 - DNA, 368 bp, Glycine max
  unsure (1)..(368): unsure at all n locations
agctttcactgacgcatatgtagaacttgtacctgctttgtctgatctgaatgttcttgttgagacctactttgctgacatccctgctgaggcgtacaagaccctcacatctctgaatggcgtcactgcatatgggtttgatttggtccgtggaacccatactcttgatttgatcaagggtggatttcccagtggaaaatacctctttgctggagtggttgatggaaggaacatctgggccaatgaccttgctgcttctctcactacattgcanggtcttgagggcattgtgggcaaaggtattttattaaacatgcatttcatagcaaatnttgggagactattacctataatatagctatctgatg

SEQ ID NO: 21856 - DNA, 227 bp, Glycine max
ctcgccttatacccactgcaggatcgggcttatgcataccgtaaaaggatgtcctactttataggatatcattaatcatatgaaaatgagctccattgatacaaaaaatgaacatgtgcctctacggaccttagcctggctatgggctttctgaatcagcaaatttacccatggagacctgttgctatcacgctaaaagactacaaacatggagggcccgttgggcg

SEQ ID NO: 21857 - DNA, 431 bp, Glycine max
  unsure (1)..(431): unsure at all n locations
agcttgttgcaaatgcaaactgcaataacattntactcggatgttcgattgagtcacgtaatacatcgagacactcgaaattgagaatatatgctctaagcaaattcaaacgacaataagtttttactcggatgtccgattgagtcccgtaatatatcgagacactcgaaattgagaatagaagctttgagcaaattcaaacgacaataacattttacttggatgcccgattgagtcccgtaatatattgagacgctccacattgaaaacggaagctcgtgacaataattttttactcggatttccgattgagtcccgtaatatatcgagacgctcaaaattgaaaacggaagctcgtactaaaagcaaacgacaataactttntactcgaatgtccgatggagtcccgttatatatcaagatgctcgaaa

SEQ ID NO: 21858 - DNA, 345 bp, Glycine max
tacaaaaaggttcatcaagtcaagttgaaatatggatttaaccatcctgcaaaattggggcaaaagatgaatcgagtcacatcactgcttcgtctactgccaaacatatttaggattattgatgtccttgttacttccagtttcaccttgacaaagatgtcatggaccatgttgaaaatctaaattgattcaaccccatatcctgcgtaaaaattcgcaatacttcgactgtacatcattcgcatgcatccatgcttttcattggttgcattgctcattgcattctttccttgaaaaataaaataaaataaaatgaacttatcaaaaagaaaaggaaacgcttta

SEQ ID NO: 21859 - DNA, 415 bp, Glycine max
  unsure (1)..(415): unsure at all n locations
agcttataagaacaaaattgcctcaatcatttccaaatatgcatgtgaattaggacgcatcaacaagaatcaagccaaggctattgtgcaagcactcaatggggcaaaacacaccaaatgattatgatgatggatggctcaaattctcacaaaggtaaactcatcactttcaaattgagctttcaaaactatcatgacatgtagagaagaatcaaggatttcaagtcacaaaatgtcaagaacttttattttcaaaacaattacccatttcttgaacatatcctataattcaaagaanaacatgcaaagtcgtacatgcacacaaaattgacccaaaatattaaactaaaaatccgacgaaactaacaacattaacaaattaacacaactaacaaattaacaaaacccaacaaac

SEQ ID NO: 21860 - DNA, 422 bp, Glycine max
tctaaggaggtgagcttagttatgagagggtgtgtgtgtatctaagctctagctcctcacagaagttctctcaaagaagcttctcaaagaagttttctcaagaaagcttctcaaggaagctacctagtctataaatagaaccatgtgtaacacttgttgtaactttgataaatgagagtcttgtgagacacaactcaaagttcaacttctttccctttttcttccttcaatttcgtgctcccccctctctctttctctccctctttcttttcctccattgaagcatcctctctaagcttcttatccaacgctcatcttggaggtgaagctccttcttccatggcttattccctagtggatggcgcctcctctcacctcttttgctttgtcatccgctgcatctccatggtggaaaatcacca

SEQ ID NO: 21861 - DNA, 447 bp, Glycine max
  unsure (1)..(447): unsure at all n locations
agcttgaagtagttgtttgacaagtggcatcaataacttaagaggggggtgaattaagtttcaaaatttcccactaacaaacttttaacccccttctaaatgataggctcaaaatgcagaagaagaaacaatcaatttaataatgttctttaaacatacaagacaaaattgattgcaataacataaatgagataagggaagagagaaatgcaaactcgattatactggtttggccacttcccgtgcctacgtccagtcctcaagcaacccacttgagattttccacaatctcggtaaatcctttacagactntgaacacaccttangatccctcacccttgagttcaaagattctccaagagacaaccagtctcttgattacaattctcacaatccaagagacaaccagtctcttgatacaactgactttctgagatgaacagaaag

SEQ ID NO: 21862 - DNA, 251 bp, Glycine max
  unsure (1)..(251): unsure at all n locations
tgccactctactcaaagaatgtgaaagatatgtnggcgaggcagaacaaaaacatncaccacgagaatatcgctgtgggaggaaactttagagctgtgatacacaagatccctacaccgaacacacaatgaccctagaagtatgactattccttgttcaataagtgaaataacagtggggaacgctcccattgactcgagagccaccatcgccttaatgccacctctcatgtgtcgatagttgggagagat

SEQ ID NO: 21863 - DNA, 349 bp, Glycine max
agcttgtccttggtttagacatgattgatacatgatttgggacttgtaggattcaatttgggaaaaattggatgagggaaagtgtgatttcgaaaatctgcacttatgcagaattttgctgtcaaataggtgcagcagaattttggctttgtgcagaaaatgttatgtatttgctggttgtggaaagagtagtacagattgggctctggaagttttctagcagatcccaacggtcataatgtagatttatgtgctagagacttctagtaaaattttcgagtcgatccaacggttaacgaattggaacgaagagaatgttactggggtatttgtatacgaagagaatgtg

SEQ ID NO: 21864 - DNA, 433 bp, Glycine max
tgagagaagatatctcaaggacaacctcttgatgtggtaaaacttcattaagagattggatagtgactctatccaagtttggtggaagtacggggaattttgataaaaggttaagatataacaaatgtccttctcataggattggacatggatataagggaaaaacttatgatcatgataagaaaactagtatatgttatttctgtggaaagattggacatatgatgtaacacctaattcttcgtaaaataaattaaaaagaactttgtttaagaataaatagagttttaaaaaataatgaagtttttataattaaataaataaaaaaacataattctattaattaaaataatagttttaagggaaataaaataaatatatgtctgtagaacaaacgtaatgaatttggtgttctggataattctcattattt

SEQ ID NO: 21865 - DNA, 429 bp, Glycine max
  unsure (1)..(429): unsure at all n locations
agctntgatggtgtcgagaagaaatcacatgtttgtcatcatcaaaaagggggagaatgtgaatgtatgtatacatgattttgatgatgtcaaagaagaatctaacaaggctacttcaaatgataagcatttgcttcaagaataattcaagattgcttcaacaaacaaagccttgtttcaagattcactaaagaccaagccttgccttaaaacaaagtgctttcaagacatgcaaggctctggtaatcgattaccaggaagtgtaatcgattacccgaagcagggttgagaaatagctgttgaaaaagggttttgaattgaattntcaacatgtaatcgattaccatatgtctgtaatcgattaccagcaacgaaactttggaaattcaaattcaaaagtcataacccttcaaattataactgtgtaat

SEQ ID NO: 21866 - DNA, 437 bp, Glycine max
tggacgaataaggtgatgcacttatgaaacacaacagcttatacgtatgaaaattgtcatttttttattagggtttaggacttaatggataaaaacacttgtatttgtttattgattttctgtatttcatatgcaaggttgaatctgctcattcgactttaaaaagactattacagaatagcattggagatctatgtagtgtttaagaagccatgaacaatatgatcacgttgcaacacactgaaattaaggcatcttttgagacaattacacatgtggttggacatacttttaaagtttccttatacaagagactacttggcatggtatcaaggtatgctttaaattaaattgtcgctgagtttgagtgtgtacattatgctggcaaaaacccatctcgttgtggatgtgtcatgagaactactcacggtcttcca

SEQ ID NO: 21867 - DNA, 429 bp, Glycine max
  unsure (1)..(429): unsure at all n locations
agcttggttagccatgccttcttattcattgatagtgttagttggatagacgagcgagaggtcatacttgatgcctgcgcatacttcaatgtccaccgtttcaccacatgcatactgtctgctgcaaccacattcggatatgatctgaaagttgcctctcgctggggattctgctgttgtaatcctgtattcggtgtcatatgttctgctgtcccctttcctttacctttgtctctctcttccaccttttctatggctacctcctccttttcctggtgtttcttgttgactgtctctatcggattccattcccttccatgcatcgggatgttcacgtgtagctntaatcctccaagaaccaggttatccagttgtctctctagtttccttgcattnntcaacccattgaatctcacgaagccatattta

SEQ ID NO: 21868 - DNA, 437 bp, Glycine max
agtcatctctcagactggcttagtggcttggtgaagagaatgaaatcagaatcatgaatttttagacaaatattctacccggaagagcaagcactctaagtgatgtttaataaatatgttatagatgatttgttgaaaactcggacaaataaaattctatccatgaaagatgaaccttaaagaaactacaaattaatggatagcatatgttcatagatataattaactttttacacgaatccacccttacatattaaatttgaagtctaattttaaaaataactcatcattctaagtttttcattttcaaaaaaagaaattgagcattctcctttttactaagtggtgggcatagtgtcaaaaaaatacgttgctacataatatttttaaaattaggtgagaaatgtacataaatttaagggtgtttactgtgtccg

SEQ ID NO: 21869 - DNA, 467 bp, Glycine max
  unsure (1)..(467): unsure at all n locations
atctctaatcacctgcggcatgcaagcttagcacaatcggcgcgctaagcgcatttccaagcatttcanaagcagtaagggattggcgcttaacgcatgctgccgctaagcccaactcgtgaaagttcacttccagaatggatatggggcttagctcaggacaatgcacttagcgctgctacaaaagatttttccagagatggagtggcgcttagcgcatcatctctgctaagcccactgcttgaagtttacttccagtgaagatgttgggcttagcacagtgatgtgcgcttagctgaactatttagccaactatccaggggtctaagcgcttagcatgagcaagctcaggcttagcgggtgaagacatggcacttagcgaatggacaactgaanaaaatttctaagtctcttctgtccatctcttcagctagggctttaaaaaccccntgttcactactaaacaa

SEQ ID NO: 21870 - DNA, 376 bp, Glycine max
  unsure (1)..(376): unsure at all n locations
gccatgtttcatgtgatgctgaaactgaaaaatgaatacgagaccacaattctgaacaagatcagaatacattaaaacaatcaagaatctcaaaaattaaaccatgcatcactgtgaaacagccataagctaacacacgacagtgaagaccatatatcataataaatccaatcaacaaagaaacaaaaccagttgagaaagatgatcttccaaagtaagcatctcttgcatctagcagtgttaaaaaaattaaaataggggcaaatcaatgatcttgggacaccccacatgaacaaattacagaanaacaacaacaaaaacagataaactaacaactttcaaaattcaactccaaaggattcatacccattaacgg

SEQ ID NO: 21871 - DNA, 420 bp, Glycine max
  unsure (1)..(420): unsure at all n locations
agcttgcccnccagctcgcccaggagagtcttgggctttctccagaagcaaccgccttctggaggaagaatctgaaggcccaagtgggcctgattgctatttgcacccccatttttactaaatacacccccttgctcttttttggtgattctttttccgtaacgttacgaaactttatgaatttcgtaacgatgcttgttttctttccgtaatgttatgaaaccttacggattacgtaatcatcccttctttgccttccggaatgttacggaactttgcggattacgcactaacacttccttttaatttccggcatgtcacagaacttcgcggattgtgctacaatgctttcttttgactcccgacatgtcatggaacttcatgaatngcctaacgatgggtgccaagtacctggaagtg

SEQ ID NO: 21872 - DNA, 392 bp, Glycine max
  unsure (1)..(392): unsure at all n locations
cttatctcccaaacagttntgccagctaccaaacgtccttttccctgatgacttccctgaataccccacaaagtttcagttcataagctaccttgaaagctatgccaagcacttcagcatagccccacagttcaatgaaacagtgcagtctgcaaagtacgatgagacctttggcctgtggaggatcaagaccatcaggaagatcaagaaattaggaggactctcttcaggtggttgtgctgagtgtgaggttgagtacatttgcaggtcgcttgtggtcgccaccggggaaaactcggagaaagtggtgcctgagtttgaagggttgggagagnttggtggccatgttatgcatgcctgtgattataaatctggggaaggttatggtggac

SEQ ID NO: 21873 - DNA, 455 bp, Glycine max
  unsure (1)..(455): unsure at all n locations
agcttctatataagctgaaccattttatctataaacacaagttgagttttattcaaaaaattagagtttatctcttttatcttagtgagagtgattctcctaaattcttgagtgattcaagaacacccaggctgtatcaaaggactttcacaacctttgtgtgttgccctcgctggaaagagtgattctttccttcctttcatattcacccttgttctttcaaaccacaattccagaaaattcacctctgcccagaattatctcgtggccataactcccattttatgcactcaaattaagtgattcttgagcctaaattgaatttcaaaacgagacctttcacctcgttttggaatcacctcatttggagccctgtagcttcagttattgccatttctatatttctgtccagcccaccacttaacctacgtntaccatcccattcatccatttta

SEQ ID NO: 21874 - DNA, 423 bp, Glycine max
  unsure (1)..(423): unsure at all n locations
ctaacacttgaattaaaacgttcagaaattgctggtaatcgattaccatatatgtgtaatcgattacacagtgcagattttgaattcaaattttaatagctgttgtaaatcggttttggccactggtaatcgattacatcctctggtaatcgattaccagagagtaaatctgttgaataaaactttttaacttaaatttcttggccaaaccttttgctacttcaattggaattctcttcctatttaatataccctttctaagactctagagactgtcttgatcatccatcttgaatatctttaatttctttgtcttngaataaagcttgagacgcatgtgaactcttggcattatcaaaacattcagcttgatcatttgtctacatatatatgtatatatatatgtgtgtgtgtgtgagtgtg

SEQ ID NO: 21875 - DNA, 272 bp, Glycine max
agcttgcatacatgacaaggatcataactttcacgctgtatgtggacgcacatgcacgcgtggagaatcacacagtctaatctaagacagctaaggagtgtcgggggcaccgactgaaggaaaagcctgttcattaccattctacgaaaacacataggtctacatataatcatcattactgggaaagtcaggtatgaccgtggaccatatcaatcaaaccataaaatgctctcgtatcaataagcgttaaatcaacaatgtaaaataaatta

SEQ ID NO: 21876 - DNA, 316 bp, Glycine max
tacagataacaccagtgattttccattttaatcgaggcctacaaatactgttggcctgaatttctcttgcactatatatcataaactgaatatgcttaaagtgcagattcataaatcgattttgactcaagagtgaagctgaattcataatatgttatcataattatttctctcaagtagttaataaatatagctcatgtatattgtacctatataatttactcatgtagtgcatccgaattcataatacatttataaatgacctgtggatatggcgtagatggctccatatatacttctgctcaccatttcaaca

SEQ ID NO: 21877 - DNA, 380 bp, Glycine max
  unsure (1)..(380): unsure at all n locations
gattactatttatttctaaaaatgtcttatcttaaaatatatctgaaatttaaaatctattttctgatacattctcgtttattattgaatcttctaataaaaacaaaaaatatcctttgttgtcctttaacactttttttatatttacttctagtaattttttatttgtattagtctctttcaaaaagacttataataaataatttttttatcagaaaacaaacataanaattattaatttatcatagactaaaaaataatacccaaaataaaaacaaagactattatttatcagaaacaaaaggggaaaattattaaaaataacacactctaatatatttaagtatcacaaatatttatcttttttatcccttcatcta

SEQ ID NO: 21878 - DNA, 315 bp, Glycine max
gaactcagattcctgcaatgagaacacattatccagaagtggatctcctatttgatggcgctcctgcctatatagcatcagagtctcaagtgattttggcatttgagagattttgcaattttatctttacttgtagtgaagtcatggacaaaatgtgcaaccaaagatacggagaaacatggtagaaatcttatactagacagagtatggaacctgatcgtgaagtgtgattgatcaaataacatgatgtgagaagtacatactaaggggaactttatggtgaatacaggtatgagtgggctcaacctaatattt

SEQ ID NO: 21879 - DNA, 421 bp, Glycine max
  unsure (1)..(421): unsure at all n locations
agctntatacaagaatgaatctctgatactacttgttggacaagtggcctcagatatcttaagaaggggggggggttgaattaagatattacacactatttccccaattaaaattctatttcactttctattcaagttacaaattcccttaataatgaacttcttaaatattgattcaaatagaacaatttgaatataaagatgaaacaataataaataaaggagtttaagggaagagaaagtgcaaactcagatttatactggttcggtcacacccttgtgcttacatccagtccccaagcaacccgcttgaaagttccactatcttgtaaaatccttttacaagttctaaacacacaaggacaatccttcctttgtgttagtattctttacaacaagaaccctcggtctcttatccctt

SEQ ID NO: 21880 - DNA, 391 bp, Glycine max
cttagaaagatatgatcttcttggacatcatgtggctttatggtggaacaaacaatatggaactccttaagatgcttatgaggatcttcacctgcaagaccatgaaacttgggccacaaatgtattattccagtgttgagaagatatggaacaccctcatcaggatattgaatgcacaagctttcataagtaaaatcaggtgcaaccatctccctaagagtcatctcacgaggtggaggttaagccatgttctcagtatgaaaattagtagtcgaatgcacaaaatcagaatattcagaatcaccaacaacaaaatactcagaatgctcaaaatgcacacaatgactaggatgcacactatgcctaactaatctatgaaaggttctatcta

SEQ ID NO: 21881 - DNA, 434 bp, Glycine max
agcttcttgagatgcctgtctactatcttattggaggctttggtataatccacaatctccttagagacatcaacctttgagtagtcaatgaatttagaggcaagcacaacatatggaatctcaatccacaaggcgacaacatttcagcataatgtcttcaattagcaatacccaattcatcttaatacttgattttagaccataaagaatttgcaaatcatcatcagttacctgagcatgattgcttgaccttggtgtgagaatgtacgtgatgaggtataccatcattttgtcttcagtagttaatccaccaactccaaggtgatttctcaatatccttgtaggatcaagaagcattcctttatatgttagcatcttagtgaaccatcaacggtttcatcaaacttgcggactccaccaatgtccagactaat

SEQ ID NO: 21882 - DNA, 321 bp, Glycine max
cgcccgatggatgcctacccattacccattttatatatatctgtcgatagggcagcaagaccctgcctacttatctacttagatgcatactccgggtacaaccacttacggatgcatccacaagatgatgagacaacgcactttgtaacctactagtataactattgctatcagatgatgccattcagtctagaagaggctagcttcacttaccatctcctaatggacatgatcttcaagagacgtattgtaaataaaatggacgtatgtgttgaccacatggagagaaagtctaatgatgctgaatcacactcctatgat

SEQ ID NO: 21883 - DNA, 353 bp, Glycine max
  unsure (1)..(353): unsure at all n locations
agcttccgttttcaatttgttagcatctatctataaatngcgacactctgtcgggcatccgagtaaaaagttattgttgtttgaattttctaagagtttccgttttgtatttgaagcgtctcgatatattacgggactcaaccggacatccgtgtataaagttatggtcattacaatttgctcagagcttgtagtctcaattttgagcgtctcgatatattacccgatttaatcggacatccgagtaaaaagttactgtcgtttgaatttgatacctgcttctgttttcaatttggagcatctcgatatattacgagacctcttcgaacatccgagtaaaaagttattcatcg

SEQ ID NO: 21884 - DNA, 517 bp, Glycine max
  unsure (1)..(517): unsure at all n locations
tggggagatgacttganatggtgccgctcgctattcttagacacttagacaactcacgcttcgtagcanattcaaatgacaatgactgtgttctcggatgtctgattgagtcccataatctatacagcgttcgtatgaatgaagctgccagactacctgcgatatacaaccgtttaaagccacgagttagtgtttatgcttgcttaagggctnggagtagacacagatatgtgattgcgttatgctcaattatcttagaataacacaatttcaagagagcttaacacttattttgattcacaaattcagccactacttaacaccacatcttaaccttattataagcattatgtaggaatcttgaaatcataaaaatgtttacctccagaatccttttaaaacttgttataaacctgctttaaaccaaaatcaacgcctgtaatttaccctacattttatgatttgttttaattgcgagagtacttcaaataatgggttcttattcttaaacanaacn

SEQ ID NO: 21885 - DNA, 428 bp, Glycine max
  unsure (1)..(428): unsure at all n locations
agcttgtagggttaaagtctcacgattgtcacgtgctcatgcaacaattgttagtcgtggctatatgagacatcttgccaaacaaagtcaggttcaccataactcgcctgtgctttttcttccatgctatatgtagcaaagtgattgatccagtaatgtttgatgagttggaaaatgaggccgcaattatactgtgccagttggagatgtattttccccctgctttctttgacatcatgattcacttgattgtgcatctggtcagagaaatcaaatgttgtggtcctatttatctacggtggatgtacccggttgagcgatacatgaagatcttaaaagggtatacaaagaatctatatcgtccggaagcatctattngtgagaggtacattgcagaagaagccattgaattttgttcagaatactta

SEQ ID NO: 21886 - DNA, 376 bp, Glycine max
  unsure (1)..(376): unsure at all n locations
agatgaggaagtgtagaagggtgaaactttctgcttttattgttgaccacacagtggtacctggagatatgtcgcgggggtcaggagaccttggggacgtcaggtggggtgctattgcccaaaaccaagcttgaccaatcccgacccaacccgggcatagtcggtcagtgagaacctgtgatgtacctaagcaagcgagctcctggcaggcaacagataaaaggaacaaagaccacatagcaaggaggcttgtggtggctggccaactgtgaattntgtgtgatatgtggattatggcctctggtaatcgattaccaagggtgggtaatcgattaccagggcttaaaatgaagtcaggaggctaagatggtctctg

SEQ ID NO: 21887 - DNA, 447 bp, Glycine max
  unsure (1)..(447): unsure at all n locations
agcttctatttatagactaggtagcttccttgggaagctttcttgataaaattcctaaagaagctagagcttagctacacacacctctctaatagctaagctcacctccttgcgatgaaaagctagatcttagctatacaccccctataatagctaagttcacccccattccaaaaatacaagaaaataagaaaaagtccctacttcaaagactactcaaaatgccctgaaatacaaggctaaaaccctatactactagaatagccaaaatacaaggcccaaaagacgaaaaaacctattctaatatttacaaagaagagtggatcaaaccttgacccatgggctcaaaaatctaccctgatgcaatcctaccccgtagggcatnggatagaagactccaagaagatggagccagagatgcaagagaaggccctanggttctcatga

SEQ ID NO: 21888 - DNA, 353 bp, Glycine max
ctttcttctttcctctaatgtttctgttagcctgtttgggttgatgtcgttcagcacactgctctttctgctccttattgcttagttaggaattttagctttgcagataaagctcagaaagttttatagttgtaaaagggtaatttttttctgatcttattcctcttcccctacatttaatttcattactttttccacttactatgttgttgtcaccataaataattgattgattatatatatatatatatatatatatatatatatatatatatatatatatatatatcaatatgagtactaacaacacatataattgaatatgattagatatatattgataaaaaatatct

SEQ ID NO: 21889 - DNA, 436 bp, Glycine max
agcttgcctgtccgatgtagcagtaatgatggcccgagttatgttggggagcggttacgaacccggaatgggtttaggcaaagacaacggcggcataactagcctgataaatgccaaaggaaatcgtgggaagtatgggttaggctataagcccactcaggcagatataaagagaagcactgccggaaagaagagcgaaagtcaaggctcgcggttgagacaagaaggtgaaggaaacccaccctgccatataagtaggagctttataagcgcgggtctgggggacgaaggtcaagtcgtcgctatacgaagatgatgttccgagtacattggatttggtacgaccatgccctcctgatttccaactgggaaattggctagtggaggaacgccccgacatttacgcgacgagcataatgtaaacctttacgggttt

SEQ ID NO: 21890 - DNA, 383 bp, Glycine max
tatcacatataataccatgcatatcattgaaattctggatgaagtacttgaattaaactttcattgtattcaattctcaatattaattatatttctacagatcacacaacacataaatttctatgagtcgtaatttttaaggtattatgaaaatcacccccgacgatggggcacaatggtctaaagcgatgggggacgttggaaagggaagggttaatcgaataaccagaaacaaaattataaaagaagaagagactttaatcagaacctatacccttaatttataaagtagtatatctaatggtgtataattgctttcccatagagagagatatgtatgcctcttcgaccctagaactttcatgtgcttatacttgttttta

SEQ ID NO: 21891 - DNA, 430 bp, Glycine max
  unsure (1)..(430): unsure at all n locations
agcttgcatgaccaaactagtggcatgaatctcctgtttacaaacctctatgttattcatctttaaccctaaattaaatcccaaatgaccaatgcaagattggtttagagggaagagtattctcagaccatgaccatagcctaataattaaaataagaggtattaggcaattaattggtaactgatatttcttaattaaaatatgaattatgggaaaaacggtacatgcgaaatcataatctgagtcacttctcttcatacatatcttttcttgaaattgttgtttgtctttagttttattttctcaaacacaaacacaaacagtccccaactctagataaaaccccncanaattatttagtttatgccaattaaattatttgggaacacaagtagtctttagggtataatatttgtacttttgagtcta

SEQ ID NO: 21892 - DNA, 117 bp, Glycine max
ccttaaaaatagctgaaacatgggttataatgtgcctgggtctccgctgccgctctatatggataacacatctagggctgcattgacagtctgcatacaacaaaattatgctcctaa

SEQ ID NO: 21893 - DNA, 400 bp, Glycine max
  unsure (1)..(400): unsure at all n locations
agcttgtaacctattatgactntgatgaatagcaacgcataaccaatggccactgaattnttttccttatcttccagtgctgcctttactcttaggccttggccaaaagaatgagtatcatatttatatgtttgataataataataatatttttattttttttcttgatacatgtaaaagacaacaacataacataagttaaaaagatttaatttcagttgattgagttggatatatgagttattataagttttttaattttcacggataaaaaaaaaaaagagaactaacacaaacttttatatatgcatatcaaattgaaacggtaacataatgactccttttcctttaatttgcttctttcaggagagatcatcatcaattgacatggaatcatgtg

SEQ ID NO: 21894 - DNA, 408 bp, Glycine max
  unsure (1)..(408): unsure at all n locations
tagccagttggctgcatgaggtagatgatatngggagttcatcatcattctntgcttgaggttgccctgccactcgcaacctaataaagcctcatgcagttccttctcacttttgggatgtaaatntgaaccctggaaagtgttttttttgtgtgtgtgtaattgtgaaagaagaaaggatgataataggtatcatagcctacctagtttttggttaatgatatttatatctgtgtggctgtgcaagaagaaaaaatgagaatagattgagctttctatcangaaaaagtaaccgtttgtattgagacaaatattggaatggcattaattccgtagcctgatagactggattttattcttcctcgaacattatacatttggagacataaactatccaggctcaatccc

SEQ ID NO: 21895 - DNA, 457 bp, Glycine max
  unsure (1)..(457): unsure at all n locations
agctntaagtgaanaaccatgatatcaccttacccttataggaatttggagctttggaattgttttgggaataagtgtggggggtatgtttcattggaagatataatttttggccatgcttaatgtttgattntggccatgcttgatgtatctgcatattgcctagttcttgctttaatcttcaaattcgtactgttaaaaaaaaatcaattgctgcaaattttgcaaattcgaactgttcaaaaaaaaagaagtgaagttgaataaatgaggtcttgttatgaggactttatttgggagccttggttgattttgttaaattagagggtttgggtttactacttgtgcttaatttccacttattccccattgctcctctattcctttgggatttagctacatattccatatttgtccctaccttgtccttggccccattacaacctttaaagatctt

SEQ ID NO: 21896 - DNA, 411 bp, Glycine max
  unsure (1)..(411): unsure at all n locations
tgatttgtgagttgattntagccttagtttcactttggttattagtcaatngatctaaggaaacattcaaagaaaaacgtccgattgatttttttgattcttttattcaaagatattttgattattttattattatttttttcaagatatttttattattttattattattttgcattttttttatttaaccgtggttaaagtgtgaacgatcggttagattttgtctacctgtgattaaacgagattacaacgcaaatgattagttgaaattcattntctcatttattacgcgagataacggcttaaacgatcggtttaggctcgttataaatggaagaaaagaaaactggtagtgaacgaaatgaagatgatagctataaaaacaagaactaattggaagtctcggatt

SEQ ID NO: 21897 - DNA, 428 bp, Glycine max
  unsure (1)..(428): unsure at all n locations
agctngatgtgagaaagcgtggaagagtcattcttcctacttttgtttgttgaccatagagtggtacctggagatatgtcgcgggggtcaggagaccttggggacgtcaggtggggtgctattgcccaaaaccaagcttgaccaatcccgacccaacccgggcataatcagtcagtgagaacctgtgacgtacctaaacaggcgagctcctggcagtcaaccaataaaagaacaaagtccacaaagaaaggaggcttgtgtggcggctggccaactatgtatcttgggtggtatctggaaattagcctctggtaatcgattaccattcgtgggtaatcgattacagggcttaaaaatggagataggaagttaaaatggcctctggtaatcgattaccagttgggtgtaatcgattacacagagagata

SEQ ID NO: 21898 - DNA, 379 bp, Glycine max
aatgtgtatggaatattattgagtttataatgttgaactgggatcatccatgtgtattttctagtttagttattaattcatgtggctgcggtaaaattggtttaccttacagtttacattgttggttaaaaaaagacaatgacatttatattatgggttatttaaggcttatttaaagttaagcatagggtttggttatctactgaaataatgctctactgaaataatgctctgttgctagtgacaatattgtgaagcttgtgctatgaaaattatgtgtatggaatatttttgagtttagaatgctgaactgggatcatccatttgtattttctagtttagttattaattcatgtggctgcggtaaaattggtttacc

SEQ ID NO: 21899 - DNA, 441 bp, Glycine max
  unsure (1)..(441): unsure at all n locations
agcttcaagttgcttggatagcaacttgttttggaccaacaaagcgtcctgtgatgaaagctccaacaggcttcttttggttgggatgtgtgctctatctcgcaagattgcatggtcactagcagtcatattctcaatcaattccatggcttcttcaggggtcttcaattttatttttccccctgtagaagcatctaaaagttgctaggattgtggccttaacccgtcaatgaaaatatggagctggattggttttgaaaatccatgagtaggcgtctttcttagtaacccacgaaatctttccaaagcctcactcaaggactcgtctagaaattgatgaaaggatgagatgacagctnttccttcagcagtcttggactctgggaagtatntcttcaagaatntttcaaccacttcatcccaagacttaagactattatc

SEQ ID NO: 21900 - DNA, 438 bp, Glycine max
  unsure (1)..(438): unsure at all n locations
atccactttaaacaccaagcacaatttctttagcctcttatcctcctcaacaacctcattagcaatcaagactccatgcaacaactgtctacccttaacaaatgctgactgtctttcatcaacaaggtgattcaataccttactaagcctattagataggactttagcaataattttgtagacacaacctatgagggatatgggtctgaaatcacttatatgtcgaggatccttgagcttacggataagagcaatgaatgatgaattgaggcccttaggaaaagcagcattcacatgaaattctgccaaaaaccttaagaactcaagtttcagctcattccataaatgcttaataaatatgaaattaaacccatctgaccctgngcttttgtcattgccacaagcccacactgcagaagatatctcctcctctttaaa

SEQ ID NO: 21901 - DNA, 450 bp, Glycine max
  unsure (1)..(450): unsure at all n locations
agcttgtaagggcttgggtggaaaatgatagtgagactcaacttggatatcaaccttgtgctacaacaattgcaacaagacccactatccacaatgagagaacaatttttgtttaaaaccttacatcttgtatgaaagatgttctctctttgagttagggttaggttacaagattgactcccaaggagccttctcaccattagaagattaccttcttcataggtgtaaacctcattaatatgctcatcacccttggcttcacccttacttccatttgaggagggagaagaagtagcctcctcttggctactatagatgtcttgactcctcatgatcgtggttttctttgtggggcattgagaagcaatgtggcctttcccaatacatttgaagcacttgatgttactagttctatcttgtgaactagcctttggagtganttcctctatg

SEQ ID NO: 21902 - DNA, 403 bp, Glycine max
attactcatttgcaaccaaattgaagaccttcatttcttattgattcttccatatgatacttaaccaatattgacctaaagataaaacaattaaaatttacattttagacccatcaacaaattttaattagtttttaaagtaaaaaataatacatatattaacaaaaaagatcgatctataactcttatttatgggtaaaaaatcaatatcttttcaagtttttttaattggatttctgatttgtgtttggtatagggcccatttttataggctatttttaagccaaggctttgtggctggtttgtcttggttactttctatataccttattgaggttaaatgactattaaccagggatacatgatgggtttggtttctggtgtatgggttatgctaaccttt

SEQ ID NO: 21903 - DNA, 448 bp, Glycine max
  unsure (1)..(448): unsure at all n locations
agctnttatgtgaaaggatgtgactcttttcatttgaatttgaatttcaacgttcaaaagcactggtaatcgattaccaaaacattgtaatcgattacagctttntgaaattaattggaacattgtaaattcaatttgaaaactttttcaaaacaattttgctactggtaatcgattacgacaatctggtaatcgattaccagagagtaaaaactctttggtaaagggttttgtcaaaaactcatgtgctattcaaagttttgaaaaactttttaatacttatcttgattgagtcttctcttcattcttgaatcttgagtcttgaatcttgatcttgattcttgagatcttgattcttgtctctagactttcttcttgagtcttgaattcttcttgattcttatgttgaactcttgaattggtcttggatggatcttgatttacttga

SEQ ID NO: 21904 - DNA, 355 bp, Glycine max
  unsure (1)..(355): unsure at all n locations
cctttgctttaaggtcacattattctcggcctatgcaacgtgagcagtcaaggctgagttaagagagcttttgacattctttaagttagatttcaacttgataacattacaagagccaacaatgtgttgaactatggccgttgcacgcaaatggaaagcccataagttgtcctagttcacaaaatcatcattcttgttaaggacatgatgttcgagattcgaaatactatctagcttgatgatgtggtntgggtagaaatcattggtaaagaatccactatttgtaatagctgagatgtatccaaggaatagctaataggatactctagaattttttgtttcatttcttagaacc

SEQ ID NO: 21905 - DNA, 403 bp, Glycine max
agcttaagacagagacagattgaaatttgtttatattcttctctatctccttctaataatacaccacctatatatagttatatgcgcatgctacaagacaaaagctaataacagaatctctaaggcactaaataacagaattataaaagcataaggtactactgctcctaacagaattgagcactactgctcataacagaatggagcactacaaaataacggaattggtaccaaaatcccttaaacataatccttcgagtgcagaggtggtttggtttgcctcttgttgagtccttatcttcctcttcctatcatccctggcccatcaaaaacaccttgtcctcaaggtgttaggacttcaaaccacggcttaagatgtagaaccaggatcccaaattataat

SEQ ID NO: 21906 - DNA, 424 bp, Glycine max
tcaatgttaatgtcacatcaagtaatgtcaattattgattcaaattagggagatcatgatatggtattgtaagcgacatccttggccagaaggggtttcattgggatggcactaagcacatgatcacagttgagaatgaaaaatgcttggaatgaatattgcactgtaagtattctttactatatcgctatttgttattcaaagcagattggatttgactttttctttgtttcccatcgcataaattggctaaaccatttcgatttaaggtgcttcaaaactaggatgatatagtggatttgtgtgctaaagatagagtcactggtcatggagctggaactgctatggatgctgatgaagcgatgagtagagaaacaaatgaagtggaattcatgggtttaggtgctgctgctactatagactt

SEQ ID NO: 21907 - DNA, 452 bp, Glycine max
  unsure (1)..(452): unsure at all n locations
agcttgtaggattatggggtacccatcacatgtggtactaggtggcggacgggcgatggtgcacaacaagttttccacatccacaatgcgcgcataaacccaccatcccatgttgcccacctccaactgagctcacgtactcccacgtagcccatatcctcgtttctctcaacaccgggtccacatcaatcctcccaagcttccccaacatcaaagtaatacaacattcaaatagcacaagctatcacagccaagcaagatagggcaaaggcagaaaactctgcccaaaacaccaaccaaatcacagcttttctcacttaaagaccccagtaacaattccttcgttccggttcattaaccgttggatcgactcgaangaattaatggaagtctctagtacataagcctacattttgaccgttgggatctactagcaaatatccataactcat

SEQ ID NO: 21908 - DNA, 350 bp, Glycine max
catgtatgaatgagttaatcataccctttctgttctaaggtttctgtgatgatgtttgtgatgtttatatgctcaaattgctgatggaaaactgttacagatgaatggtagagttaacctacggttacaaagtgagaatgtggtgttgggagtggaaaaagagtgaatttttgagggctggaaggccaaatctggattctgtagtatttagaggttgaagcgagttaatcctagcttgaactgtcatttaagacttatgagaaagcttggactgtgctagagaataaaacaaatgaccaaagtgaaccaagagccatttctagggcataattgggtgttgaagagtcaaa

SEQ ID NO: 21909 - DNA, 429 bp, Glycine max
  unsure (1)..(429): unsure at all n locations
agcttgattgtgagttgattntagcttttgtttcacttcggttattagtcaattcattcaaggaaacttccaaagaaaaacgtccgattgatttttttgattattttattcaaaaatattttgattattttttttattttttaagatattttgattatttttttattattttgtctttttttggtttaaccgtgattacaacgtgaacgatcggttagattttgctttaacagtgattaaatgagattacaatgcaaatgatcggtggaaattcattttgtcatttattaggtgagataacggcttanacgatcggttaaaactcgttcaaaacagaagaaaagacaaccacatgtgaacgaaataaagatgaaagccaatacaacaagaaatgaattgacagtctcagattcgaaaacttaccggttg

SEQ ID NO: 21910 - DNA, 409 bp, Glycine max
cactctaagcaccgggcgcataactctttagccttctatccggctcatcttccgcattcgtatacaaaactccgtgcaacaactgtctacccttaacacatgctgactgcctttcattaacacgtgattcgctacctgactaagcctattacataggactttatcaactcttaggtagacacaacctatgagggatatgggtctgaaatcacttatatgacgaggatccacgagcttatggataagagcattgaatgatgaattgaggcccttaagaaaagcagcattcacatgaaattctgccataaaccttacaaactcaagtttcagctcattccatagctgctgactaaatatgaaagtaaacccatctgaccctgtgcttttgtcattgccacaagcccacact

SEQ ID NO: 21911 - DNA, 453 bp, Glycine max
  unsure (1)..(453): unsure at all n locations
agcttgcttgtggggcttctatggaggctggatctttgagcttcgatgaggtcctttaatggtgaatttccaccatggagatgcagcggaagacaaaggagaaaaggtgagaggaggcgccatccactagggaataagccatggaagaaggagcttcaccaccaagatgagccttagataagaagcttggaaggatgcttcaatggaggaaaagaaagagggagagaaagagaaaggggggaacactaaattgaaagaataaaagagagagagaagtggaactttgaagtatgtctcacaagactctcattcatcaaagttacaacaagtgttacacatgcttctatttatagactaggtagcttccttgagaagctttcttaagaaaactttcttgagaagcttctttgagaaaacttccttgagaagctagangctagctatacacaccta

SEQ ID NO: 21912 - DNA, 381 bp, Glycine max
gtaacctcattgtctctcacagtctttagatttgggagccaatccaatccttgtgtccggactctcagccacttatgatagccgctgatgatcccattactgcttcccctaagctctctgtcctttcttcacaccgcatcacatgccttgcgaactccttggagtacctttgcattggggtcactgaaaccccgcgtaatgaaaggcgagatgctttcgtctaatggcgctcctctcatggggtagccaagctgtcttatggcgaggacaggattataatttatataaccccttgttcccattaagggaacattgggagatccttcgcatgaagagagaatcctgattcttcctttcttctagcgagggaaccaattaaca

SEQ ID NO: 21913 - DNA, 431 bp, Glycine max
  unsure (1)..(431): unsure at all n locations
agctnntggataaagaggaaatctatgtgttgatattttatacttaaaaaagggtaatgtagtcttgccatataaataattttttcctaaccaggaaagttagaaatgattccgacctcccctgtggattttaaaaaaaaactaactaaaaacatttctaaaagataatattttccaaaattttgaatttttaaaaattaatatcaaacaaggagaaactaaattaaaattctcaaaaaataaaaaacttttaccttattaaatgcggcctcgtaataaagtaatatctctcacgtctgaacaactacatgttatttggcagcccttgatagcagactactctaccatcaacaaattnttgtgtcatgttttccacttactgtaacaatattattaccaaggaaacattctttttcttatttcattaaatc

SEQ ID NO: 21914 - DNA, 178 bp, Glycine max
ctcgagcttgcgctctaggccttggacattcatttcatgctctcatggttgagatgctatgctactgctcaagggcatgtgtaccatgactcggtgaagaatgagccagagtatctgcagagagccatacggttttcatgacctttagaggttattgtagaccccttagctcaacaat

SEQ ID NO: 21915 - DNA, 436 bp, Glycine max
  unsure (1)..(436): unsure at all n locations
agcttgtcaatctgttttttaaaaattgtaagggtacttgatgcagtgaatacatgatgaactgctccaactagcaaatagaactatnttttgcctcttgctcaagtcaattttctggtagtgcacttgatttgcttgagctcttgtttcataaagtatgattcttctgctttagtcatcctacgtacctttntcttggtgttgaactaagctattcttattcaggtattttaatggaaagtgctcattactagacgagttcctatcttaatttgacaaagcaggatctaaacttctgatttgggaacttcttctatacttgatggatcagcaagagtatataattagaattgctagctgatgtacatgtacaagtggagaaaagcatntacatatgttactctatgctactatattgagatgctngctcttacta

SEQ ID NO: 21916 - DNA, 434 bp, Glycine max
  unsure (1)..(434): unsure at all n locations
tgtgctctagcctcactcaccgcctttnggactcatttctagctatcatatactaatcccaagttacagaatatctacacctagaccactccttgaaacactccttatatactctaactctgctctgaacactgtcattccaccaccacgattctgtacccctaggtccaaaacctctagattcacaccaacgtatctatagccactttaataatctcttgggacatcttgttccacatatcatttgcacttccttgtgattgtacaaacgatccctcccatatcttttgttggaagattccttgtttctcacccttcaagtgccaccagttgatccttggtgctaccataggacttcttctctatgccctctctctaattcttacatccatgaccaaaactctatgttgggtagtcgagctctctcccgggat

SEQ ID NO: 21917 - DNA, 472 bp, Glycine max
  unsure (1)..(472): unsure at all n locations
aagtcacctgcngcatgcaagcttctataatgttgtattctactaatatatggtgtttttcactgcctcttctgaggatgacaattggtagaccataacaatgctatcggtggtaaaggataatggtcttttaaataaatttgtgtacatgaaaaaaaaactagtaactcaatcgtacacaactgattgcataaatataaaaaaaaccttatatctacaatgtacctgaacaaaatgattgccatagacgtgacagatacaaattatgtgatgcaccgaagaatctcccggtggttgacttctaagaggaaagaacgacatgatacaaggattaccttgatgcaatcacatatcccatgtcggttatatccatccacttatccatagtgacctgaatgaaacaaatatagatgtcgaaataattnntaagccaagtcttaaaatanaaacatcaataaatacatggtaaccc

SEQ ID NO: 21918 - DNA, 430 bp, Glycine max
  unsure (1)..(430): unsure at all n locations
ggtnntttttcaatatatgtttttatgtcactaggtctttgaatgacattagatgctttgatgtttgtgatgcaatcctactccgcaagggcattggatagaagactccaagaagattgggccggagatgcaagagaaggccctagggttttcatgagccttagggtagatttcgggcccatgggctaagtatgagcccgcttatctttgtacatattagattaaggtttcattatttttgggccttgtatttagggctccataatataggtaaggtaccttagaaatgtaggatttttcagcccttgtattttagggcacctagactagtgtttgtattaggggtagatttgtaatttcacatgcattgagcgaatatttgatgtgtgtggctagaaataaaattaattgaattgagagaagtgttgga

SEQ ID NO: 21919 - DNA, 435 bp, Glycine max
  unsure (1)..(435): unsure at all n locations
agcttgatgtatttcatcttaatttcatatcataaatatatacttatctccatttaatttagtccttattaattcctttntttccaaccccaaaaaaataaaataaatgagactctaacagtgtgtttttaaataaaagtggagaatatatttagtcatttgaatgtacatccctaaatttcaagacgcaaaataaagaaaaaaattgattactttaaaaataaaagtacatataaattcttccaattgacatctaaacatgacttgngttggggggacaagactctaatatgactcatgcttctctctttcgacacaccacttccctctntaatagagaaggacaaaatgcagacaaacgatgattcggatttgatttctgtgctgtttcttctcgtctctttgttatccctttaaaactatgtatctttcatg

SEQ ID NO: 21920 - DNA, 454 bp, Glycine max
  unsure (1)..(454): unsure at all n locations
tattatttgtgaacattaccacccaaattnttaattttgtaaactttactatcatattaataacaaaacaatacagtttttttttaaaaacaaaacgtaactttttgagtgacatgtcttcaacgacaaaatacacaaaaattaaaaacttgaataataaaatttacaaaataataaaagtttcctaataaaatatggaattaaaccttccatcaatttcttagaaactagagtcatatagttgtcatggatgacattcagagtcctataactaatattaataatataagaaactaagacaataaactttatatatgtaataataacaatagtttaaattaataattaacctagtaagcacaagtgaaaggatcgaagacaaagtgattggcgccatctcggtgtagcgtagtacagctcttatggaattatcttgaacatatatgacatggat

SEQ ID NO: 21921 - DNA, 462 bp, Glycine max
  unsure (1)..(462): unsure at all n locations
agctntctgactcctgattctttggaacttgcttaactcttgattctttggcatcatcaaaataatcttggaagtcattgcttccatacaagttcatcaattactcatattcctaattcaaaaacaaagggagatttttgtttaattgcataattaaaaacaagaacaaaacaacacaattaataacgatgtagagaaaaaattaaccctaagattcaatgttttttattaaattaacacggttccaaaaatgaaggacgaatatatgatcatgcaatccaatatgagttcatcaaattatgtcaaaggtggaactcatacctccaacacactcactctcaacctcacaagaaaatngtagatgatacacaataatttgatggtattactcataacccanattatgtacaatcattcctatntataatatcagaatccaaacaacttgctttctaaacaaaa

SEQ ID NO: 21922 - DNA, 454 bp, Glycine max
ctttccttgagaggatgttcaccatgttgctcatgttgttgcccttatctctaacacctagctcatatcatctaagagtctattaatagtggaacttggaagccattttattttggaagagttaacagagtggaagtttcacaccttttctttgtcgatgatattattttagtggctaaagcctccactaagcaagcaaatgagattaaaagagttatgaatttgttctactctgcttcgggtcaataaataattttggataattctagtcttttcatctctaagaatgtgtataggtaaagggcaggagccattgctaataagctaaatgtcccttttgtggacaagttagaatcttatttgggctatcccattcttaataaaaggaaaacaacatctattataagctctctagatggaagtctagaaccttattgctagctggaacgattac

SEQ ID NO: 21923 - DNA, 274 bp, Glycine max
agcttcttatccaaggctcatcttggtggtgaagctccttcttccatggcttattccctagtggatggtgctgcctcttacctcttctcctttgtcttccactgcatctccatggtggaaaatcaccattaaaggacctcattgaagctcaaagatccagcctccatagaagctccacaagcaagcttccatcaggcattcccttggatctctggcccaatctacttggagtcttctatccaatgcccttgccgtgtaggaatgcatcattccc

SEQ ID NO: 21924 - DNA, 437 bp, Glycine max
ccgggagaggtgaccttaactgtattgaattatttctttgagtaatggtctttgcatcaatctctgaaatctagaatgaaatgtctgaatgaggacatgatgaagtccataattgtatatacaagccaattgaccaaaaagcctaccttgaattataattgtatcctttgcaccctctgtgagctgaattacattttcaaaattgaaccctgaacttaaataattatctccagataccttgtttagattctaggagagcatatggctcaaggcaaattgaccccaaatttgggggagtggagttgattgggatgtaaagtaaaaggtaaagcatcagcacacacaataaataagttgtgttaaaaaaaagcaatcaaagaaaatgtgtggcattgtaataaggtcaaaagcaaaattaaagtgaaacgctaatgagt

SEQ ID NO: 21925 - DNA, 400 bp, Glycine max
  unsure (1)..(400): unsure at all n locations
agctntaacctcactgtctctcacagtctttagatttgggagccaatccaatccttgtgtccggactctcagccacttatgatagccgccgatgatcccattactgcttcccctaagctctctgtcctttcttcacgccgcatcccatgccttgcgaactccttggagtaccctcgcgttgtggtcactgaaaccccgtgcgatgaaaggcgtgatgctttcgtctgatggcactcctctcatggggtagccaagctgtcttatggcgaggacgggattataattaatacaaccccttgttcccatcaagggaacatttggacatccttcacatgaagatagaatcatgattcttccttccttctagcgaggggaacaaataacagacgcccctccatgc

SEQ ID NO: 21926 - DNA, 446 bp, Glycine max
  unsure (1)..(446): unsure at all n locations
acccaggtgggcccagtggtggaaaatactccaaaagtgacccttttgcccttcttttgaatatttttcacatttccttccaaaacatcgcaaaaccctacggattgcacgacaattggtgttaagcagctcaattcgactgacaagaatccaaatattggcaaacaatcatccccagacaaaattagggtacgacagccatcatgaaaaagggttgttaggtttggacgaccattttcacacctaccttagattttaatgattaaaaaagattaaaaattgttgataaattaatgagtttatgacaactaggcaggatcaactttactaaaggacttaactgttatctacatatattgtctacgctcggagggaaacattctgttaactattaacaagccgtcaacgcactanaaccataagtgtccacttgttatataaaccaa

SEQ ID NO: 21927 - DNA, 444 bp, Glycine max
agcttataatatattgatatgctcgaaatttaacattgtaagctctcgagaaattcaaatggtcataacttttcacacggatgtccgattcgggcaaatcacatatcgagacgctcataactaaacaacggaagctatagagaaattctaatggtcaaaacttttcacacggatgtccgattcaggcgaattacatatcgagacgctcaaaattgaacaacagaagctctcgagaaattcaaatggtcataacatttaactcgaatgtccaatttaggcgcatcacatatagtgacactcgaaattgaacaacggaagctctcgtgaaattcaaatggtcataacttttcacactgaggtccgattcaggcttataatatatcgatatgctcgaaattaaacatcggaaactctcgcaaaatcaaatggcataacttttacacg

SEQ ID NO: 21928 - DNA, 224 bp, Glycine max
  unsure (1)..(224): unsure at all n locations
agagcttacgttggtcaatgccgagcttctcgatatgcgattcgcctgaatcagacatacatgtgataagctatactactcgaaattgtcaagagcttgcgatgttcaattttgaacatctcgatatgttactcgcctgaatcggacattcgtctgacaacatattccaatagagtttctcatatgcttgccttggatgaanggcgccgtcttatatgttatgt

SEQ ID NO: 21929 - DNA, 420 bp, Glycine max
  unsure (1)..(420): unsure at all n locations
agctnnttgcanagcttactgtaaaatctgtgacctagccatggcagaggtctccacaaaggccattgcctccctcgcccagtattatgaccaaccattgaggtgcttcacctttggggacttcaagctattgcccatggtggaagaagttgaagagatcttgggatgccctctagggggaaggaaaccatacctcttctcaggattctatccctctttagctagaatttctaagatagtccaaatctcggcgcatgaattagaccacagaaagcaagtcaaaaatggggtggttggagtatcgagaaaatgtttggaggcaaaagcaagaatcttggcaggtagaggcgaatgggccccgttcatagacatcctcgcactttcgatcttcggaggagtcctctttccaaatgtggatgg

SEQ ID NO: 21930 - DNA, 448 bp, Glycine max
tgcatgatttacattctccccctttctcaagcaaattctaaattcttcttgacatcatcaaaatcttcatgatttacattcttcccctttttgatgatgacaaccacctgtaggttaggagcaacaacaaagaaaaaatatctatttgcatataatttactcccacttgattttgcaatgattgcttatatgagacagttgaagatttcatatttttcatatgtaaacaaattgtctcataaacaatagataatttttcttactattttatcttttatctttctctccccctttgtcaacataaaaaacaaatcatgaatagagaggagaaagatgttaccacttgttgcaatgtatgagaatcaagtgataccaaaaggcattaaaacaatcattcaatattaatcaagcaaaaaacaagttctataacacatcaatcaaatacaat

SEQ ID NO: 21931 - DNA, 392 bp, Glycine max
  unsure (1)..(392): unsure at all n locations
agctntgcgtgaccgagcaccctaccctgctaatcatgttgttggccatctcagtgggagctttgcttttatagttnttgacaaatctacttctaccctctttgtggcatctgtaagtaatcataatcctacctaccaaatgtcatgatccaccaccatataagctntcatttatttctcattttttgcatgtattgttcttgacaggatcaatatggtaaggtacctctgtattggggaataactgctgatggctacgtagcatttgctgatgatgcagaattgcttaatggtgcttgtggcaagtcacttgcttctttccctcaaggtgggttaacttctattatgttaatgtgnttattatattacataatatgtgctgcaggttatgt

SEQ ID NO: 21932 - DNA, 345 bp, Glycine max
gcagcattgctttatggaccacagatagtatatattctataaaatatcatatatgcttctgctcaaatttccccagaaattacaatatctttaattcaataatatcatttgactccaaataacctgagcatgtgcacagttacaacaaacaaaatacacaggtgctacagcatagcatatcatgataacaactagaatatcatacttggataacaacatggtgtctgaaaacagtagcctttcgcctagctatccacccacgtgtacatgactgaataatgatggctgatttattctttagtttaagcgacaagagacccttccaccaccggtgctatttcacaa

SEQ ID NO: 21933 - DNA, 451 bp, Glycine max
  unsure (1)..(451): unsure at all n locations
agcttccttcgggagcaagtgttacacccctccaatagctaagctcacccctccaaaatacatgaaaatacaaaaaaaagtccctaccacaaagactacttaaaatgtcttgaaatacaaggctaaaaccctatactactagggtacccctaacttgtagggtaggttgcccttaatttgtagggtaccttacaaacttaaaatgaccaaaatacaaggcccaaaagaaagacaatatattctaatatttacaaagaaaagtgggtttatacttagcccatgggcccaaaatctaccttaaggctcatgagaaccctanggccttctcctacatctctagctcaatcttcctagagtcttctatccaacgcccttngggggtaggattgcatcaagttggacataagccaccgcatgtgctatactgagactcaagaaaatcagttatgat

SEQ ID NO: 21934 - DNA, 349 bp, Glycine max
  unsure (1)..(349): unsure at all n locations
cattgggagtgttagttttaccaagaaatgctgctcttaaaacatgaatggcatacagactcctccgatagacgcaaacatgaatgtaaatttagagcatactcatgcacatgcttncttacgaacattcgctcgctcaagatattcttctaactaagagagatgcgcccatgcacaatcaaagcgccttcgttacctagatcacttatacgtacattccaaggtgtatatgctaccatagttacatgcatttggtttgctgaatttacatacgtgcgtacgtagagcactgggatatcaaaaattgcgtacgggcacattccggtatatataatacctgtgcatacac

SEQ ID NO: 21935 - DNA, 440 bp, Glycine max
  unsure (1)..(440): unsure at all n locations
agcttgagacttcaatatttgagcctttgttcctttnttcatttcatggaagcttcattaaaagtaaggggagtctttcacttcttgaaccctaaccttgttgcctttggaagctaggcttctttgcatgttgttttcatgtttaaaatttcgtgtctgcagccatgactagaactgcacaatatgttgtttttatggaagtttaaaggttaaaaatgagttctttgggtattaaagcataggattagccttaaatttcacttaaataagagtttcctagtaaaagttatgaataaaacaagttttaggatattttattagataaaatctgtcacgaaaatgaactaactagtatatttgtatggactgtttttcttaaaattntgacctcacaaatgagtttgttaggtgtgaaaatgtanggtagcatataacatctg

SEQ ID NO: 21936 - DNA, 164 bp, Glycine max
gcacatgtaataaaagttcttcagcttgaagaatcattggccgtgcttccacttgatatgcatgatcgttctccttcttctttaattacgaatacgcatgcacgggccacttattattcttcgcaatcactacccttcactaacagccttggaagtgttggacg

SEQ ID NO: 21937 - DNA, 395 bp, Glycine max
  unsure (1)..(395): unsure at all n locations
agcttgtgcttgttttatttaaattcctatgatcatgagcaactatgtgtgtcctactatgacttgagaaacaaaaggtgatcaaataacaagcagaaatttaaaaggtactaggttgcctcctagtagcgcttctttaacgtcttgagctggacgcgtgatgacttgtcggccacggacctagtactttgcttacctttggctttggacttggtcgtctattggtcggtcatgtgtcgtangcaacgctctaacctttttgtggatgagctgaggtgaactctagaggtggtggtggtgtgcctgttgcccgctgtcagccatccccaggctgctgtggtgtctcgccctacgcctgccttggggcgtagtacttcttgatgaaagcccggtta

SEQ ID NO: 21938 - DNA, 289 bp, Glycine max
ttcttatactagggacctgtatcctactcgctgggattcaatgtatgtgataagtcaaggatgtgcacgttcctttagatgtacacgtcttttaacctattgggtatgatatgatccaagctaggtttgaaccgagccctcctaacttgagcacatcgtgctcaaagttatgtatgctggcttagtctcacgcaactacacaaacgggattgagtaagtgcaacattgatggcgcaacatgtagtgggaaggggccttcaactagtgagggaattttatgacattctag

SEQ ID NO: 21939 - DNA, 418 bp, Glycine max
agcttctttgagaaaacttccttgagaagctagagtttagctacacacacccatctaaaaactaagctcacctccttgagaagcttccttgagaagctagagcttagctacacacccatataatagctaagctcacccccatgaaaaaaaaacatgaaaatacaaaaaaaaaatcgtactacaaagactactcaaaatgccctgaaatacaaggctaaaaccctatactactagaatggccaaaatacaaggcccaaaagaagaaaacaacctattctactatttacaaaaaagagtggacccaaccttggcccatgggctcaaaaatctaccctaaggttcatgagaaccctaaggccttctttatcaactctagcctaatcctcttggagcctcttgctcatggctctggtaactg

SEQ ID NO: 21940 - DNA, 202 bp, Glycine max
tcttcacaaatactatcatgggcatgacctcctcgactacgcttcgtaacttccaaaactcaattctcacgaaaattcatgtgataagaagtctacccgaacctgaaatgagatgtcgcacaatggagaggtgctcttcatgactactaagatggctttctttcgcgatttggagcaaaaatggtgtgcaaaggttggagct

SEQ ID NO: 21941 - DNA, 461 bp, Glycine max
  unsure (1)..(461): unsure at all n locations
agcttaaaagaacaaaaagtcctgtaaaagataagaacaaattaagtaaagttgaaaacaattatgagagatgatgggctaaatattattcagcaagtcaggctaataaatagcctctacaactgttataataaaccagaaaatgcagcccaagtttgctactactgaacgcaataaacaaacaaaggaaccaattaaacactaagcctatcctctatttaacagggattattaaaacctgaaatgaaatgaaaatcctatcctaacggaacataaccacttatttcatttcaatatatatatttccaatagagagacacaacaatagaaaatatatatattcctaaatataaatntgagctttaataataactgcatcaactgcttacgaagtataaaccaataactaagaattcataagtgaaaacaccatngctgtaagcctgtaaccttatatgggt

SEQ ID NO: 21942 - DNA, 453 bp, Glycine max
  unsure (1)..(453): unsure at all n locations
cgcttggaactagcttagtcacttattgcaatgtagcaagtctttttcttatactatggacctgtttcatacttgctccaattcaattagctcataggtcaaggatgtgcacgtttctttagttgtacacatcatttagcttatttggtatgataggaaccaagctaggtttgaaacgggcccttttcagtatgagcacattgtcctcaaagttatgtctgctgccttaatctcaggcaactacacaaatgggattgattaagtgcaacattgatggtgcaacaaatagttgtttggggccttcagctagtgggggaattttttgtaattctagtggtgcttttttgggttgtttctctcactctntggatatttcaattgcttttcatgctgagttgcaagttgcatttntagcttattgaaatagcgcaggcaaaggtccggatcaattat

SEQ ID NO: 21943 - DNA, 458 bp, Glycine max
  unsure (1)..(458): unsure at all n locations
agcttgtaatcgattacacacatattgtaatcgattaccagagcatattttcagaanatattctccacagtcacatctttttatttggttcttgaatggctatcaaaggcctatatatatgtgacttgagacacgaatttgccaagagtttttcagaacaaaaaggttttatcctgttaaaaagcaaaatcgttttatcctcttacaaattccttggccaaaacacttgtgattcaataaggaattatttgagtgctcaaattgttcaatctatctcttttaagagagatttcttcttctcttcttctttattctgaaaaaggattaagagaccgagggtctcttgttgtgaaaggattctaaacacaaaggaaggatngtccttgtgtgtttagaacttgtaaaaggaaattacaagatagtggaactctcaagcgggtttcttggngactggacgt

SEQ ID NO: 21944 - DNA, 388 bp, Glycine max
  unsure (1)..(388): unsure at all n locations
gtcatgagtactttagtcataatgtgtttcatgaatttgaccgacacatgtaaagccctattatgccctctcccttcggtgggaatttcttccttggcgaaagtgaaggagttgttggttgtgatgttattgacgatcccctcaaagccttctacggagatgtcttgggccacgtgagcttcattcaaaaccttcaccaatattgctcggtgaggctcagagctatgagcagttttagaagggataccctanctagggtcgtgttgagttgttcaatgaccttaaactcactttgttggataatgcggaggaactcactggcttcctctagtgatacctctttcttgccatgaccatcttttccctcggcaacctccccattgaaaca

SEQ ID NO: 21945 - DNA, 449 bp, Glycine max
  unsure (1)..(449): unsure at all n locations
agctnggagtgcgcgctaagcctgaagtgtgcactaagcctggagtgcacactaagcgagctatccacttttttcaacttttcttcaagcttttttttttttgcatcaatttccctttaaagcactcgaaatcttcttcttttgaattttgtcaatcaaaaactgcgaagatattaaattcttcattgtttcattgaaaacaacagtaaagtgaagaagtttcaatcattcatggtcaaaattgattatcaaattaactcaaatttcatagttatcatatgagtaccgagaaaagaagagaaataatcgaatgagtaaagagagaggaagagagtaaatgaggcgtgactcttcatttctaactngtccatcttctctacaagtgatttgagaggggaaatgactcttcatttcccaaattcagttgagaggcttgagacactctaaaa

SEQ ID NO: 21946 - DNA, 418 bp, Glycine max
tactaagcttctacattactcaaacaagaagggtggaagaagaagattaagaagtaaaagctcattgaacaactagttcttctctctagcaatatcttaggacaccagaggtgaaggcacgggccttttaattattcgctctctctctctctctcttaaaactcttcttcttggttagataatgaactgatgtgtgtatagcggtgtatatgtataagcatatgagtccagtaaaagttgagggaatcacgggctgtagtatgaataataatagagagtgggaaatgaagggcttgtttggaatccgaagaagcagtgagggatcgaggagtagagactatacagtagagagtagagagtagggtaatgcgatgaacaaagtagttttagtagtgcccacggcagtcacggaatgctg

SEQ ID NO: 21947 - DNA, 405 bp, Glycine max
  unsure (1)..(405): unsure at all n locations
agctnttgggctatgtggttgctnggattatcactctattgggagcaatcatgctcaattgatagaggaggatcttctccttagttgtctcatgcacgggaaattgaagattaattgggtcaacattattattgataacatgatgaagaccaagatgattaggtcttttatgtgtccctatgcaatgttgatctcaagaatccttgattacttcggagttgatacccaagaagaagtctttgcttttgttgaagttgaatttaaggtgaagtccaaagttttgaagcagatggggtaatcaatctaaagcatctggagttggataaattgagaaaaacaaagaggatcaaacaacacaacaagatctagaggagaagcctatgagccccttggagcagatgatgc

SEQ ID NO: 21948 - DNA, 418 bp, Glycine max
  unsure (1)..(418): unsure at all n locations
gcctatggtaagatttgagacctagctatggtagaagtctccatggaaccgattgcatccctttcccagtattatgaccagcccctaaggtgcttcacatttgaggacttccagctagtgccgactgtgaaagagtttgaagaaatcctgngatgcccactgggaggaaggaagccatatcttttctctgggttctatccctccacgacaagagttgccaaggtagtgaaaatctcagcacaagagttggaccgtgtaaagcaaaacaggaatggggtattcggagtaccaatgaagtgtttggaggaaagggcaaatgccttggaaaatcaaggcacatgggctttcttttattgacatcttggcgcttctgatctttggagttgtcctctttccgaatatggaacggttagtggac

SEQ ID NO: 21949 - DNA, 448 bp, Glycine max
  unsure (1)..(448): unsure at all n locations
agctggccagtttaagatgttagtagtaatattaactnttaagagttcatgttaacaatcttgctaaaacgtatctttaatgatgtgttactactaatttataagttttatattttatatagcaatgattaacacagttgaagttattaatttgaagtcaataaataattaatcagcatggtaaaatacagaattgatcatgaaggttaataatatgacgtgtactaatgattgtgtgtcgaaattttccatatgatgtgtgctagtgattgtgtgttggaacttttcatgtgtattaagggtctcagttaataataaacaaaattaatttcttgtataacagatattgtgaaagtttttttaagaagtctttcttatatatacgaataagaaagaacctaattaatatatctattaattgtgtcagagctccctaatagtagtagta

SEQ ID NO: 21950 - DNA, 437 bp, Glycine max
gagaagaatgattctctatgcggacaaccttaagatgttgctaaactccattaacagattggatagtgactctatccaagcttggtggaagctccgggaagtatctacctcagtggagaactctactagactgttcatataagataggacagagcttttagggaaaaacttttgaacgtgattcaaaaactaggttgtgtatcatctgagaaaagattggacatatgacgcgacacctaactttctctctctggccccccgcccactataacaactctgtgtttgagtgtttgtctgagtagtctgaaaaacatacaaatggaaaataatatcttcaaaggaacttttttaatttgtgtaaaccattgcttgaatcttgtatcactctctgaatatgcttagaaacactcattcgatccagcagaaactgatgtaac

SEQ ID NO: 21951 - DNA, 445 bp, Glycine max
  unsure (1)..(445): unsure at all n locations
agctntgacatgagtcatcataagattataaatatgtgaccatggaatgaatnttaagatgatatcaatcatctatctttcaatcttctctcaaacatcattcaatatctttcaactctttctacaaaattttctgattctttttctttccatctttctaaaagtttttgttcaaaactttctcttccaataaattttgttcaaaaacttgtgctattcatctttttcattctcttctccctttgccaaaagaacaaaggactaatcgcctgagaatttttttggttcttccctttcccttaagcaaaagatttcaaaggactagccatctgagatatcttttgtttccccttacaaagattcaaaggactaaccgcctgagaattctttgtcccaacacattggagggtatatcctntgtggtacaagtagagggtacatctac

SEQ ID NO: 21952 - DNA, 388 bp, Glycine max
gctatcctgtgacacttaaatctccgctttttcagtcgtctgtaagatgattgagtgttataaattatgcaagcctactgtatactatttgtttcccatgttttagctgatagggcttgagtgtgcttcacagatggggcatgcatgatgacccttaacattggaaccgttggaacccccctatgctggaaactcattcatggtacaatgaagccttgcacacatttcatacgtctgcttgcgaaacgcatcgaacactacaacccgctagtgccacaattgtcttatatctgtcgccaatggacttagattaacatcaatttcatttgctagctgtcttgagcccgatatcatcatatacaacatcatgtattttcgctttatgcac

SEQ ID NO: 21953 - DNA, 423 bp, Glycine max
  unsure (1)..(423): unsure at all n locations
agctntacagaagcatatatgacttgaatttcttcttttntctcttccttctcacccatattaagtgaaatatgtttatttagggttttaagaattttacggaagtattatggaagctttaagcaagcatataggacttgatttccctctnttttctcttctctttcaccaatattaagtcaaataggcttactcaaagttttaggaattttaaggaagcattacgaaagcctcggaagctccggaaaccattttccaacaaaacgtggaggatcttgataagttcacccccccccccctttgctaaatgcaactcattttatttacacaccccattttgctaaatacactcccctctgcccttnttttgctgattctttctccataacattacggaactttacgaattacataacgatactt

SEQ ID NO: 21954 - DNA, 404 bp, Glycine max
ttctgcctgacaaataataaattatgtgttattgatagtaaattataaattttggctactaaacaaaatcaaagaagaaaacaaacatacctgaatatcctcctatatcaaatacttgcatcccgtatacaaaggcttctttgaatcactctgcaatccttcatacataggggcatgtgcttgctaaaaagactcttgtccaaaggcacgaatcatatactccaagcgatctgctatttctacatcaaacggttcagattgggacccactctgcatgtctatcaattcaccatgccatatccacgtcgcgtaattcttcttaatcccatcacacaatagatgctcccacatgccgttcagtaattgttgtcttccattcaaacaattgatgcaaggacaataat

SEQ ID NO: 21955 - DNA, 343 bp, Glycine max
  unsure (1)..(343): unsure at all n locations
agctntgagcaaattgaaatgataataactttatacacggatgtccggttgagtcccgtaatacatcgagacgctccaagttgaaaacggagactcttaaaaaattcatacgacaatatctttttactcggatgcccgacagatcgtcgtaatttatcgagagatgctccaaattgaaaacagaagctcgtatcaaattcaaacgacaataagcttttactcggatgcccgacagattgtcgtaatatatcgagagatgctccaaattgaaaacagaagctcgtatcagatacaaacgacaataactctgtactcggatgtctgattgagtcccataatattt

SEQ ID NO: 21956 - DNA, 289 bp, Glycine max
agcctcccagctcataatcatacccttcttgacttactgtatgcttcggaccctctgtattcgtgcaacgatgctatcatcagactctcaggtgctacacataccatgcactttgtgcatagccgactgtgaaagagtccgaagaattcctgagatgcccactgtgactaatgatgccagatcttctctctgcattgtctacatacacgacacgagtcgtcaagctaaggtccctgtccgaacttaaggtgtaacatgtgcccctctatactagtgttttattggagat

SEQ ID NO: 21957 - DNA, 263 bp, Glycine max
  unsure (1)..(263): unsure at all n locations
agcttgcctcanagaggtccaggaaggacttatgcaccgaaggaactagttccgctccggagtatgacagtcaccgcttcaggagcgctgtacaccagcagcgcttcgaggccatcaagggatggtcgtttctccgggagcgacgcgtccagctcanggacgacgagtatactgatttccaggaggaaatagggcgccggcggtgggcatcactggttactcccatggccaagtttgatccagaaatagtccttgagttttat

SEQ ID NO: 21958 - DNA, 246 bp, Glycine max
gaaccgatcgcctgcctctctcaatattatgaccaggccctactgtgctccacattggacgacttccagctcatgcctactgtgacagagtttgaagaactcctgagatgctcactgggaggaaagaagccatattttttctctgggttctatccctccgcgacaagagttgccagagcctcgaaaatctcacccaagactttgaccgtgtacagctggacatgaatggtgtatgtcggagtacca

SEQ ID NO: 21959 - DNA, 445 bp, Glycine max
agctttatgatgaatcaagagtgattcatagatgttttgatgataacaaaagatgatgacaaaaagatcaaaggtcaatcaaagaatgagttcaagatgttcaagatagaatcaagaacacttcaagattcaagaggaaagtagaattcaagaatcaagattcaagaatcaagaaaatgcttaatcaagataagtatgaaaaggttttttcaaaaactgagtagcacatggatttttctcataacatgtttaccaaagagtttttactctctggtaatcgattaccagattattgtaatcgattaccagtagcaaaatgaatttgaaaaagttttcaaactgaatctacaacgttccaattaatttcaaaaagttgtaatcgattacaatgctttggtaatcgattaccagtgcctttgaatgttgaaattcaaattcaaatgtg

SEQ ID NO: 21960 - DNA, 335 bp, Glycine max
  unsure (1)..(335): unsure at all n locations
tattgacatctgtgactttatcttttctaaaatgttttcttagagatacatgactattttatattcatgtatccaagttaacactgtatactgattgcaaacgaatgactacacctaacgggctaaaagggcgaagcatatctatgtctatatggaaaggtcatcacaatatttctaagagacattatctactggaattgtgacaagaaaggtcgttntaccaatcagtgcatcgcaccagataataacaagattcgcttattatcagaggcgtgatgatgacgaatctgctattgcacaactgatgaatttgatgatgcattaatttgccgcta

SEQ ID NO: 21961 - DNA, 430 bp, Glycine max
agcttattgacatcaagtttttggttgtttaagaacgagttcagaatagatagatttccatagaacatttaaggactaatgatatgctagctgacctacttacgaaaggtttggtacctaaagtttttcatgagcacactgctaatatgggattgattccttatagtaccttagattagtggtagtcccatttatgttctatatatgccttttgtttttcagatatttgtatagattgattttctataaaataaatttgaaggttatcatttcattctgagattgttttgtttgtaatatttatattgtgtttggattgatctctatacagaataaagtttggactagttggaaatgaacatgaatgagatcacattgcatgttattttcatgttgcttatccatatttgatctatgtcatcaagtatat

SEQ ID NO: 21962 - DNA, 316 bp, Glycine max
taacaattatgacctctccgacaacagattcaactctggatggaggaatcaccataacctcagatgggacagacccttaacaacagcgacaggagcctgctcctttcttccaaaacgcgagctggcccaagcagaccatacattggtacaccaagtctacatccgcacctaccccataaacaggcaacaggtgacgccccttcacaacctaccctcgaagaagttgagaagcaaatgactatgctgaacatgcagtttatgaagagaccagagccttcattcacagcctaaccaatcatatgggacaattggctat

SEQ ID NO: 21963 - DNA, 437 bp, Glycine max
  unsure (1)..(437): unsure at all n locations
agctttcccaccatcttcttcaaaagttgcatccagtatgaaaaagaagaatgatccgatgagactntgacacacaacattctttatgcttgtctgagaatagcttatcggaagagaaagataaaaaacctttacagtgaggaaatttttatccagtaataatggaaacgaaacttgggaaacaaatttgagattaaaaatcaaacttttttatagcactggcatgggttactccggattaaagataccaccatatgagcacctttaaagttcactgctgagagttagaaagcaccagttttttttctcactcctttgactgaagggctaaacagcccaacatagtagaatgtctcccaacaaatgaagattatattagaaaaaatctaagtcccatatcagttaaagataaaatcaagttataatatataagtgag

SEQ ID NO: 21964 - DNA, 475 bp, Glycine max
aggcagaggttggacgtgtattcggatgcttcatgctttacggaccttggagacgcgccttaggttgctgaacttatgcttgggttccatgaaaacagcctacagatggatcgatcgctcacgaatgaagcttctcactcaagctttagcttgctagatcacacaccatctacccctaattcctattataaagcatgacggcggcagcccacacggtcactgattaccctgagtctatagtgaaattgaactgagagaaaccaagtgcgcgcagtaagaactatctcgcgaaggtgcgtcacttattacaagacttacgttacataaacatgtgctatggtgctacagcgattcctatcacacggctttcgaagacttcgtaacatgattaactcatcccacactctattcatacttggtgagaccatccatcttcacccctttacaaatcttattttcacagggggatctaacg

SEQ ID NO: 21965 - DNA, 454 bp, Glycine max
  unsure (1)..(454): unsure at all n locations
agcttgcattgcgtcatgatcggatntagcaaaaattgctcacgtttaattcggattcaaaattntaagttgaagtcctacattntagtttgggccaaccaacctagctagctaaacccattttgccacctcttatttgaccaaactattttagacgtggtaacaaatagtaagtcggcatggcaatgtatgatttattacctcatgatttatatataaatagataaactaaaatggttacgttttatgtgaatgttttttcttatttttcaatagaatcttctccatctgagtatcctcagcatagtctcgtttggtgtcaattctttaacacaagtgaacataacgaatataataaactcttgtagactntgataaaatcaatgtattgttttgggattgttatcaactaattagacatcgtcttacattgaaccagataattttgtttata

SEQ ID NO: 21966 - DNA, 450 bp, Glycine max
  unsure (1)..(450): unsure at all n locations
cgtatgttcatatgcacttctcaaaaggggtttcaatggtccaaattcttcatgcatgagtatggagagtttttttgtataaatattgtgtcatgctgcttattacattttatcaacattgaagcaaaagaatatgaaaggatggaagaaatatattatggagttaggtcagctgtcccctagagttctccggaatacttcattgggactgttgaaaggaattcaaggtatatatacatacatacactgttgaagtgtttgggggaactctgaatgtcatatgagtcaaataaggtataattattattcttcaaacttaaattcattctttatgatgtttaataaggtcttaaattccgatgacaattngtatttctntgtcatctataatgttgtaaanaatacaatcaaatataacttatgtgatcacaattataataatgataatat

SEQ ID NO: 21967 - DNA, 457 bp, Glycine max
  unsure (1)..(457): unsure at all n locations
agcttgtagggttcaccccanattccgttgtcatatgctatacttgatcccatatctacttgataattcaatggtagccataaccctagccaaggttcatcaacctccatttctccgagaatacgactcgaacgcaacgtgtgcttgtcacggagaagccccggggcgttccattgagcattgtagggctctgaagtgtagggtgcgaggtctaattgatgctggctgaaatttgaggaggatcgtgtgtaaatcctgacattgacaagagatgccacacatggngcaattttgaaagctgttgttagatgtctctaataactcaccaggattttcaactttcatcggaattgggtgcaagccattggtctatttgctcaagcgacctgtgaccattcaatcagaggttactcgtcttgcacgttggcggagctgccgtaaaacaacaaataaagct

SEQ ID NO: 21968 - DNA, 448 bp, Glycine max
  unsure (1)..(448): unsure at all n locations
tattaaaagtatattcggctcanaacaaggctgtcaatatttacaaaaaaaaatgttttgttaaatcagtgaggtagaataaaatagactaatatcatgtaattaatatagaaacttatgtctcaatgccacatcctattagagcattgtgtcccaacgtccttcaacacaaggttccttaaagcaactcacctagtcatttgctcccccgaacataaaattcaaggtcatcacaggatccaaatacaaacaacacacagggagtgagttatcacattcctaactaatagagagaaacaagatcacatgtaggtataaatatcatataaacaaaataaaacttacttaaacataactcacatcatttcatcactttgtcgtctaacatcacatcacaacacaacacgtctcattcattcacgtactcaaggatcaaaacacaatatca

SEQ ID NO: 21969 - DNA, 457 bp, Glycine max
  unsure (1)..(457): unsure at all n locations
agcttattcaagtgtatttattttttatactttatgcattgtagtaagtgtatgttcagtaagtgtgttgactagtacttgctcgagtgtgttttaagctttgtgtttatgatcagtatacgagctattaagcttgttgggtagaagtaactactgttctattttgtgagaatatatgtattagatacaaagcatttcagctgctctaagaatgaacatcagactttcacttcttctcttttgagtgtatttttattatttctaattttgtgaatctcttgtgccaacagtatccttctacaaacttaagttgaatctttagccaatgaattttcaaaagctaagtcttatttgtaagtttcatgtattctgcaaatggaatggaattgtatatgaagnttccaattgtatgttttaattatattaataacctcttaaaaaaagatgatattggtgt

SEQ ID NO: 21970 - DNA, 381 bp, Glycine max
  unsure (1)..(381): unsure at all n locations
tatcanaatggggggggtgcaaatagcaattttgaaattntgaattggaccttccagagtgtatttcgaaggaggattgcttctggaggaagtaacccaggtcgcctaggcaagctagacagcaacctcctccccctttttcctataagaaggcaaaaggggggtgttcaaagggttccagattcccctggttatatgtttcaattgattggggtgaaaaaaattgtttccgggaagaaaagccaagccgaggtgctttcgtaacgcttccgagaggtttccgtaagcaaatgcgtgaaggttttaatccattcttcgtcgttcttcatccgttcttcgttcttcaacgggtaagtttccaaatccgagaactttaattca

SEQ ID NO: 21971 - DNA, 450 bp, Glycine max
  unsure (1)..(450): unsure at all n locations
agcttctagataatggttntgtaaattctcaacaacattaattgctaatggtttctctcagtcaaagaatgactattctctctttaccattggcaaaggtgcttccttggttatcttgttagtatatgtagacgatattctacttgttggcccaagtgttgcatgtgttcattctgttcaggccaaacttcaagctctgttcaaactaaggatccttggtcccttaaagtactttctgggactagaaacactactacaaaaagcagttttaacatcggcttattaacatcggttntggacaaaatcgatgttaagttaaatgcggtggcatatttgtaaataaagtatccttcttaacatcgattttccaaaaaaaccgatgttaactaatgatgttaacatcngttttacaaacaaccgatgtaatgcatacacgttaacatcgatttt

SEQ ID NO: 21972 - DNA, 433 bp, Glycine max
  unsure (1)..(433): unsure at all n locations
ttctntctactctatatgcctctaaaatgaatgacatgatttggatgaagtgaatatatatttctttagagacaaaacatgtgtagttagtgagaatatgtacctaattaaaaatttatatgaaatataaattgaaggattgtgcttaccataatgtgttacatatgcacatatttgtttgatctaccttgtttatatttttaattataacatagaatcttctattaattgttataattgaattgtttgcatgcaatagttcttctctttgagttttgtgtgaaatcatatttctagatattgaattgtgcaatgtgcaaatatgtttaaatctatagatgatatatgtatgttgctttaatgatcattgaattacataaatgtaaatatggttgtgcatcccgtcataaatgagtatgttatactttttatt

SEQ ID NO: 21973 - DNA, 400 bp, Glycine max
agctttttttgtgttgtctgcaaaacattaccattggggattgaaccactgaaattgttgtaataaaaatcaatagattgtaggcttagaatgcttgaaaatgattgtgggattgtccctataagatgggtttggcagacattgagaacctccaggaatggtaaattttctcggttcaggggaatagctctcgaaagagagttgctatggcttaaattcaaatgggatctccccatatagattgttatggcttaaattcacactcaataagtgattgccagattatttatctgagccaatctgccataactcttgggggcttctgataaatggtttctgctcaagttgaacatgaaaagcacgcctcaattcccaatttcagatgggatattgctagtga

SEQ ID NO: 21974 - DNA, 438 bp, Glycine max
  unsure (1)..(438): unsure at all n locations
ctgaaggtgcgtagcccttcattttccatagtagaatactggtaatgtgtctactatcattgtcatcgnttttttgtcattgaggtgccactctgagctgccaggttctccacctttgggcgtattctttgaaagatttgtgccccctttttgcacatgttctgtagttgcatcctatccgaagacattatactgacactgcctaacgaaggaaaccactaggtccttccaagaatggactcgggagggttccaagttagtgtaccgtgacacatctccccctgaagactttcttggaaggaatgtatcagtaattccttatcttttgcgcatgcccccatcttccgataatacatctatagatggttcttggggcaagtagtccccttgtacttgtcaaagtccagcaccttgaacttgggaggggtgatgatatta

SEQ ID NO: 21975 - DNA, 443 bp, Glycine max
  unsure (1)..(443): unsure at all n locations
agcttaaagtatgcccgagtcattcatccttatgagatgttgttgaagtattggcgatcagaattgccattccttggattatagggttgaaccaagctcatgcttttacaaaaaggttcatcaagtcaagttgaaatatggaagtaaccgtcttgcaaaattggggcaaaagatgaatcgagtcacatcactgcttcatctactgccaaacatatttaggattgttgatgtccttgttacttccagtttcactttgacaaagatgtcatggaccatgttgaaaatctaaactgattcaaccccatatcctgtgtaaaaattcgcaatacttcaactgtacaccattcgcatacatccatgcttttcattggttgcattgctcattgcattctttccttgaaaataaaataaaataaanaatgaacttaatcattgttatcaaa

SEQ ID NO: 21976 - DNA, 268 bp, Glycine max
tctcgatatattatgcacatgagatcggaccttcgagtgataagatatggccatttgaatattgcgagagcttccgctgctcaatttcgcgcgtctcgatatattatactcctgaatcggacctcctagtgaaaggtgcagaccatctgaacttctcgagagctcacgttgctcaatggtgagcgcctagatatatgatgcgcctgactcagagcttcgaggggcacgtgatgaccatccgaatttcacgggaggtgggagcgctcaa

SEQ ID NO: 21977 - DNA, 432 bp, Glycine max
  unsure (1)..(432): unsure at all n locations
agcttatgttgcanacatttataatagaccttatcagcaggataaccaacaatagcagaataattatgatctttcaagcaacagatataatccaggttggagaaatcatccaaatctgagatgggcaagtcctccacaacaacaacagcctgtccctcctttccagaatgctgctggtccaagcaagccatatgttcctcctctaataccgcagcagcaacaacatcaatcacaacaaatacaacaagcaactaaggctcctcctcaaccttccttagaagagttagtgaggaaaatgaccatctagaatatgcaatttcagcaagagacaagagcctccattcaaagtttgacaaatcagatggggcagatggctactcagttgaaccaagctcagtcccaaaattctaaaaaatggccttcacaaactct

SEQ ID NO: 21978 - DNA, 415 bp, Glycine max
  unsure (1)..(415): unsure at all n locations
tgctgtatgctatctatcatgattgcatttgtattcctcataaagtgttctttgatatccttaatagaaagacatgaatacgtttccttaaaaaaatatctatagcgccatgttactaatatcacagtctctagaggcgaagaataccaacgagaatgttcacaagtggctgttgaaactgacgtctatcatttacttttctaaaggccaaagttgggatgtaaaagttgagatctttcgctttcgatccaacctcctgattgcaccatatttgttgaacataatgataacaatgccccaccaaaagaatcagtgcgtgtgtgtgttggagaaacaactganacatcttatcccacaccaaaccataggtgttgtccatttgatcacatagacatgcgccactatatacccttcc

SEQ ID NO: 21979 - DNA, 436 bp, Glycine max
agcttgaatgtagttccatccctccttggaggtgactgcaaattgagttgagaatgagcgagaaaggttatcaacgttagtggaataaacattatcaaagttttatgagtaggagttgtggttttattggacaacgactggggtgaagaaccacacacactctggacattgatgctctattatccacatctctagtatagttagtaagactcccaagaattgggttctggatatttcttgatctttcaaatacgttctctccacaccttcccaatgtgttccacaaccacaagttctaatattatgattaagaataattggtaaatgaaaatattatcattattaaacgattaaattgaatgataataatataaaagtgaagggtgctattcatagttttaaattcatctttttttatttactgtctaccctaatt

SEQ ID NO: 21980 - DNA, 435 bp, Glycine max
  unsure (1)..(435): unsure at all n locations
ntagcatggcctccgtgatagaagccatttgatctttttaggttgataagtcggtcttcatctgttcttgcactccctcttcattatccatcttacgtcgggatcgagtgttataggggtgtctttgcgcttttttacttatggtgagttccctaaagaaacaaacagtggtgagtatgccaccaaaacatgaatatgctaatgaatgatcagagcacttggatccacctcaaggccttttttagataacatgatgagtttcagaacttctctttttataaaaaagggacaaagcttttatctagccaagatcatacaaaagtgttacaacagaacctaacggtttctaattatatgggccattaaatctatcatgtgttgacagtaattgattagcccgtgaatttcttctggggctgaacacacttcagcgat

SEQ ID NO: 21981 - DNA, 413 bp, Glycine max
  unsure (1)..(413): unsure at all n locations
agcttattatttactntattttgtttattttagtatttcataaaaagagagctctatttgactccctattaaataaataaataaaacatcctttttattttctaaaaacatatttattttatttaccttaaaaccattattttaattaataaaactatttattcttatttatttaattacaaaaacctcattgtttttcaaaaactctatttatttaaaaaaaaaccatttttaatttattttatgaaaaacgggatgttatagaagttgatgaggaagaagcctagcttgtttcaccaatcacaattgtaccacctcatatgcaaaattttgaagaatctttntttcaagattttgaatacgagcatagctgggattgcgaagaagttcgacatttagtggggactatcttc

SEQ ID NO: 21982 - DNA, 236 bp, Glycine max
gaagtcttcctttcctgttggtaaggacccacaacatacgtgttccttccatattgcgattcttatgacatccctatcagaacataaatatggaggatggtggatacatttgcgggcttattatgcctatacatgtatgtgcacaccgcaatataaatattatatctaagacacaacgtgtcttgattacgacaatctcactgggtcgatggaattgttttgctctggtctttgaa

SEQ ID NO: 21983 - DNA, 363 bp, Glycine max
agcttgaggatggaatactgactcgtaggtgacgagtcgtagcactggacgtaattgaatactgcgagaaatgatgaccctatggctgcttactactacatactgtgggtattgctatagaatggagggaagaatgcctaaatacaaacacactcccctttcttgggttgtacatactggcgcatgggatgctcgaccacccgagctgccgttcactttatgaatctgacgcgcaaataaccatgtcccctcctttttatgggtaacgtctcgctaacttgaactacttaagtttaattacgcgtcgatacttatttaaaacagacaaagctaaagaatctgggatacaaagatctgggtgct

SEQ ID NO: 21984 - DNA, 154 bp, Glycine max
  unsure (1)..(154): unsure at all n locations
cgcatgtctggacgtagtttatgattgatgactcggngactggagctcgaattctccctgatattgaggccatgtctgttcactgtccgttgatatgcagcgtctatactggctaaaacgcgttgggatcttgatcagttgtgttgactttcac

SEQ ID NO: 21985 - DNA, 438 bp, Glycine max
  unsure (1)..(438): unsure at all n locations
agcttgcaaccgatatcaattacctacaccggttaggatgtcttgattcagaacaattagttaatttaggtggcatatattttatttttcttaatattaagatattgagtttaaattttgtatatataaaaaaaatgcacattaaaggtgaaaatttcaccatattatatatgttcgtgtcccgaataaagttntttttttctttctttcaaatgaagttgttgtttgtttctcataaacatttgatttaaaaaatactactccaacactaagacaaagtgatttagggtgcatttaattgtgtttttgtttttttaattttttaaatgatcttttaagacaatttttattttntaaaatctaatttctaggaaatagaaatgaaaaaatataacttgaaagtgtaagaaaaacataaatgatagaaaatcttaaata

SEQ ID NO: 21986 - DNA, 427 bp, Glycine max
  unsure (1)..(427): unsure at all n locations
ngactctaccggagatactttcacaaacatgagagtnttggcattaccccctagtgaatcactcatcaacatagttagcttgtgatttctgtaaggtatgtgttgaccaccagaagacaaagcactaataacatctcctagtgctgataatgatttgttgatactttgagcttctttaagttgactacctgaagagcccgacntgtttactctntctgagccagcaagatccacaaaacttaactgtatgacaaatgacatatccagcataaaaaagttaaaaaaactgcaatgcctcgaggtcataaaatacttgtgtttcacattgccacaaaatataggaagaatatggtatattaacattcatactgatattcaaaggtaaaattgaagtaatgtacaccaataccttttcccttgcagttga

SEQ ID NO: 21987 - DNA, 396 bp, Glycine max
  unsure (1)..(396): unsure at all n locations
agcttgatatgaggaagtgttgaagggtgaaacttcctgcttttattgttgaccacagagtggtacctggagatatgtcgcgggggtcaggagaccttggggacgtcaggtggggtgctattgcccaaaaccaagcttgaccaatcccgacccaacccgggcatagtcggtcagtgagaacctgtgatgtacctaagcaggcgagctcctggcagtcaacagataaaatgaacaaagaccacaaagcaaggaggcttgtggtggctggccanctgtgaactttgattgatatgtgggttatggcctctggtaatcaattaccaagggtgggtaatcgattacaaggcttaaaaatgaagacaggaggctaatatggtctctggtaatcgattacca

SEQ ID NO: 21988 - DNA, 350 bp, Glycine max
tggatttccttgtagtttgaaatctatcgttcctaagatggagcccaacccaatcaccctcattaagaactagcttgtttcttcctctattgcctttagctgaatacacctttgtttgggtctctatttggttcttaactctctcatgaaacttcttcacaaactctgacctagattccccttctttatgtataaaagaagtgtccagtgggaggggaatgaggtcaaacggtgttaggggattaaacccatagacaacctcaaaaggggactacatgaggaagatactcatcccaagacttatggttgcctttcagaagagctcttaaaaaagtggataaagacctatt

SEQ ID NO: 21989 - DNA, 328 bp, Glycine max
ccttgtatttgaagacaaatccttttcaagaatgatggagtgatgaggacatatccaaggaccatgaagcacttgaatgtcccatgaccagatgcagacttaaacaagctcaacacgtcatagagacaaggctggtcatttgtatagctgccattgatgatgattgaacgcccaagtggagaaagatgaacgcccagtggcagatgcactaccaagactactaattgttgcagaaggcccaaactatcgtgaatgcccaagctaaataagttctaagtattaattattttattgaattctgcccaactgttacaagccctgtcttttt

SEQ ID NO: 21990 - DNA, 369 bp, Glycine max
  unsure (1)..(369): unsure at all n locations
tgtgcattcaatatcctgatgagggtgttccatatgttctcaagactagactaatacatttgctgcccaagtttcatggtcttgcaggtgaagaaccttataagcatcttaaggagttccatattatttgtttcaccatgaagccccctgatgtccaagaagatcatatctttttaaaggcttttcctcattctctggagggagtggaaaaagattggctatactaccttgctctcaggtctattttcagctgggatgaccttaaaagggtgttcntggagaaattcttccctgcatctaggaccactgccatcagaaaagacatttcaggcatcaagaaacttggtggagaaagcttgtatgagtact

SEQ ID NO: 21991 - DNA, 447 bp, Glycine max
  unsure (1)..(447): unsure at all n locations
tattgattgaagaggttggtttctaaatctatggtcctgtaaaatcttgcacactgccttataaaaggaaatactgtgtatttgatggcaatgctgtatttttgttttctgctagagatgctagagttttgagaattctttctatttgtgtcacaggttgggggcagccacttcttggttagtttggtcgacaatgattacatcaatggtgatctttttgccgtctttgcagatttctgacatgagcttattatttattagtactttagctatgtcacttctgttggttgtcatgttcttttcctttcttttgttntcttctcagtatgatgattcatattacacatggttctaagttgaagtgccaaattatttttctgggctatgtccctaacgtctttatatnttcattcttcanagtcgcatgggtaacctgtacgttgacat

SEQ ID NO: 21992 - DNA, 427 bp, Glycine max
ggaaaacttcacttgttaccatttaaaccctcttcctctcatgctaaagaacctttagatttgattcatagtgatgtatggggtccagccccaatcttgtctccatctaatttcaagtactacgttcactttattgatgatttcagcagattcacttggatttttcccttgaaacaaaaatcagaaacaataacggcttttattcaattcaaaaacatggttgaaaatcagttcaacaggaaaataaaagttcttcaatgtgatggtggaggtgagtataaacctgtccagaaaatagccatagagtcaggaatccaatttagaatgtcttgcccatatacctcccaacagaatggtagagcagaaagaaaacatagacatgtagctgaactagggctcacactactagcacaggcaaaaatgcctt

SEQ ID NO: 21993 - DNA, 483 bp, Glycine max
  unsure (1)..(483): unsure at all n locations
agcttctgaataccatcttgataataatctctgtaatccttttcccattcactcaaatcgctctctaatctataatcaactatgtggtcatgatcatcatgtgaagttttggtccttttactctgacatatacatgagtgaaaatttcaactagatgaccaactatataatcaaagaaagggacataagaatatgtagagagataaacctacagaacacacatttgttgcactattggagctggagagcttttttcatgaaacagaattntgtgcagaagtgaaatgaattgagaggttgttcttgaagtattaagagataaaaaaggtaacacgtttagaagatccacatggtcctgaagaagtgcagtaatcaggagaagttcaataaataattaaatgagtttcccaaaagaagtgtaagaaaaatagaaggaccaatataaaactgccatataatattacgctaacctnctcgtaagct

SEQ ID NO: 21994 - DNA, 390 bp, Glycine max
taagtgactaggcttaagcgtagatgaacttaagcttaagcgtaagtgggtctaggcttaagtccaaataaatctaggcctaagtgtgggtgtctatcaagttttctttgacacatttcaattgaaactcaatcttaaatgcttcttaaggagtagaagaaccttaaatggaatgaatgaagttagattaactatatgagtactcatgatttgtgagaatgatatgaatgatgaattgaacaagatgtgaatgatgaatggacgataagttgaatgagatatgcatgatgaattgaatccatatgaatattgtttgataaggttgataatggatgataatcttgtcttgtaaccacccttatgtgttgaaagggttagctatatcatttg

SEQ ID NO: 21995 - DNA, 443 bp, Glycine max
  unsure (1)..(443): unsure at all n locations
agcttgaagtgaggaagtgtggaagggtgagacttcctacttttattcgttgaccacagagtggtacctggagatatgtcgcgggggtcagtagaccttgnggacgtcaggtggggtgctattgcccaaaaccaagcttgaccaatcccgacccaacccaggcatagtcagtcagtgagaacctgtgatgtaactaaacaggcgagctcctagcagtcaacagataaaagaacaaagaccacaaagcaaggaggcttgtgtggtggctggccagctgtgaactttgagtgttacatgggatatggcctctggtaatcgattaccaagggtgagtaatcgattacaaggcttaaaagtgaagacaggaaactaagatggcctctggtaatcgattaccaaggggtgtaatcgattaccaggcttaaaaacgagattaggaagct

SEQ ID NO: 21996 - DNA, 426 bp, Glycine max
  unsure (1)..(426): unsure at all n locations
ntagcttctttaggaatcttcttaaggaagcttctcaaggaggtgagcttagttatgagaggggtgtgtgtagctaagctctagcttctcaaggaagttttctcaaagaagcttctcaaggaagttttctcaagaaagcttctcaaggaagctacctagtctataaatagaagcatgtgtaacacttgttgtaactttgatgaatgagagtcttgtgagacacaactcanagttcaacttctctccctttttcttccttcaatttcgtgctccccccctccctctttctctccctctttcttttcctccattgaagcatcctctccaagcttcttatccaaggctcatcttggtggtgaagctcccttcttcatggcttattccttaatggatggcgcctcctctcacctcccttcctttgtcttc

SEQ ID NO: 21997 - DNA, 472 bp, Glycine max
  unsure (1)..(472): unsure at all n locations
agcttgtatagttcccanatttatggttattttgtagtgattnttgtaaataaatcttgtattatggttaatgttgtctctagaacatttccattggatttaatgatgaaatctatgcatttttcaggtgaaaaagacgctaagttttgaattgcaaaatttagcaattgggctaagctcagcagttgagccaagcacatatccaccgctaagcgtagcttcagcatgctcaacgcaaaggagaatctagtagagcatcagcatcaaagtcgcgcgctaagcgcgagatcagtgtgctaagtgcagcaggtgcctttagccaggctaagcttgagactggcgctaagcccaatttcacttactcgcgctaagcgtgagggtggcgctaagcgcagcatcgcgatttcatagcctatntaaagcttgtcttgtgcagaattagggtacaacattctatatcttntacacacct

SEQ ID NO: 21998 - DNA, 420 bp, Glycine max
  unsure (1)..(420): unsure at all n locations
ttaaaatttgaattaaaacgtttagaaactgctggtaatcgattaccatatatgtgtaatcgattacatagtgcaaattttgaattcaaattttaatagctgttgtaaatcgtttttggccactggtaatcgattacatcctctggtaatcgattaccagagagtaaatctgttgaaaaacctttttaacttagatttcttggccaaaccttttgcgacttcaattggaatttccttcctatttaatatacccttcctaagactctagagactgtcttgatcattcatcttgaatatctttgtcttgaataaatctttgagaagcatgtgattcaggtaatcctttggcatcatcaaaacattcagcttgatcctttgtctacaatctccccctttntgatgatgacaatacctgaaatc

SEQ ID NO: 21999 - DNA, 361 bp, Glycine max
  unsure (1)..(361): unsure at all n locations
agcttgagatgaggaagtgtagaagggtgaaacttcctgcttttattcgttgaccacagagtggtacctggagatatgtcgcgggggtcaggagaccttggggacgtcaggtggggtgctattgcccaaaaccaagcttgaccaatcccgacccaacccgggcatagtcggtcagtgagaacctgtgatgtacctaaacaggcgagctcttggcagtcaacagataaaaggaacaaagaccacacagcaaggaggcttgtggtggctggccagctgtgaaacttgattgatatgtgagatatggcctctggtaatcgattaccaagggtgggtaatcgattacaaggcttanaaatgaaca

SEQ ID NO: 22000 - DNA, 419 bp, Glycine max
  unsure (1)..(419): unsure at all n locations
agcttgccgcccagctcgcccaggcgagcaaggttgcttcctccagaagaaacaaccttctggaggaatcttttggagggcccaagtggacctggttgctatttacacccccctttttactaaatgcacccccttatatatttttctgtaattctttttccgtaacgttacgaaactttacgaatttcgtaacgatacttattttcctttccgcaaggttacgaatccttacggatttatgtatttactctttttggctttcaaagaagttacggaaactcacggattgcgcaaaaacacctcttttcgatttccgccacattacggaatttcacggattacgcaagcctgcttcctttnggatttctgagacgtctcgggacttcatttattgcatgtcatcaatttataatcctcgg

SEQ ID NO: 22001 - DNA, 388 bp, Glycine max
  unsure (1)..(388): unsure at all n locations
tcttttggactntgaacaggcaactaactcctctttcaaaatcatgctatgtgctcgcgactggtccctttcttcccttcgcaacttgagttcactattgctaccccatagagctccgcgaaatttgttccggccatactcttccttgcgagccctcttggtctctcgttcaagggctcttgcggtaattgcattctcttcccgtaacccggcacactccttccgaacgtgtgtagcagccaacttgaacttctccttggcgagttttgcctttcctaactcgcttttgagagcttggacttcctcgtcctcttccggtgcttcaaaattcccttcgctgacgacttttaacttggcgagccaatctaaacctcgtatgcgaactttc

SEQ ID NO: 22002 - DNA, 456 bp, Glycine max
  unsure (1)..(456): unsure at all n locations
agctnggagaggatgcctcaatggaggaaaagaaagagggagagaaagagagaggggggagcacgaaattgaaggaagaaaaagggagagaagttgaactttgagttgtgtctcacaagactctcattcatcaaagttacaacaagtgttacacatgcttctatttatagactaggtagcttccttgagaagctttcttaagaaaacttccttgagaagcttctttgagaaaacttccttgagaagctagagcttagctacacacaccaatctaaaaactaagctcacctccttgagaagcttccttgggaagctagagcttagctacacacacccatctaaaaactaagctcacctccttgacaaaatacatgaaaatacaaaanaaacgtccctactacaaagactactcanaatgccctanaatacaaggctaanatcctatactaatagaat

SEQ ID NO: 22003 - DNA, 406 bp, Glycine max
  unsure (1)..(406): unsure at all n locations
ntntattttcagtagatggagatgaatctatggtcacctcatggaatcctctaagaacaatagcatcatttcttgcactaaattgttgggagttggaagccatcttctcaatcaaattcctagcttcagcaggggtcatatcaccaagagatccaccactggcagcatcaatcatactcctctccatgttgctaagtccctcatagaaatattaaagaaggagttgctcggaaatctggtggtgagggcagcttgcacacaatttgttgaatctttcccagtactcatacaagctttctccactaagttgcctgatgcctgaaatgtcttttctgatggctgtggtcctagatgcagggaaaaatttctccaagaacaccctattaaggtcatctcagttgaaaat

SEQ ID NO: 22004 - DNA, 455 bp, Glycine max
  unsure (1)..(455): unsure at all n locations
agctngccctttcattcaatttagactaaccaataataaattgtttttgtctccatctttttttcgttnttgcattaacattggttatcctccgcctaacattgttgcattacccaaacccacatgtaagcaccattaatctgcctcttcaatgctccacaccaccaaaaacatgacaacatcactactcctttaccatacgaccaatacctataaacctagatctgacacccaaaactcaacacattcctccaaccaccctcaccaaaaaccccattggcacacaaaccaccatcaccttagcatcgtgacacaccaccattatagccctgccaacccatgattcaccataaccganaactaccaccaccaccatctccttctaaatcattaacctcgattcanaacatgtttcgattacccacanagcacggttctagaagcanaccataacg

SEQ ID NO: 22005 - DNA, 280 bp, Glycine max
tcctctccaaaaacactaccctcgagaaaatcctatttgatccatgatcgcgcgtgcaatcttttggtttgataggaaatcatgtgcaaaataaagtcagggtacaactatggtttggaattggggtaaaacacttacctgtgtgagtttttatacaccatgagtgattttattcccaatttcgatttgacccgacgtttcccctgaatgttcatttaaaagctaaacgttgacatcctacctttcattttcggttacaaggaaaactatttttggcata

SEQ ID NO: 22006 - DNA, 405 bp, Glycine max
  unsure (1)..(405): unsure at all n locations
agcttaaagtatgcccgagtcattcatccctatgagatgttgttgaagtattggcgatcagaattgccattccttggattatagggttgaaccaagctcatgcttttacaaaaaggttcatcaagtcaagttgaaatatggaagtaaccgtcttgcaaaattggggcaaaagatgaatcgagtcacatcactgcttcgtctactgccaaacatatttaggattgttgatgtccttgttacttccagtttcaccttgacaaagatgtcatggaccatgttgaaaatctaaattgattcaaccccatatccaatgtacaaattcgcaatacttcaactgtgcatcattcgcatacatncatgttgttcattggttgcattgctcattgcattgatcacttaacaatg

SEQ ID NO: 22007 - DNA, 342 bp, Glycine max
  unsure (1)..(342): unsure at all n locations
tctagccaaatggacttaccttgaattaattcctttgatagcccttttgagccttgtttccctttccttgttttgaagctcactacaagccttaagtgaaaaaccatgatatcaccatatccttaaggaattttggagctttggaattgttttgggaataagtgtgggggggtttttgtttcattggataactcgttttgttggctatacttcatgatgtattttgggccatacttgatgtacattgtatattggttaaatgttggacatgctgaatgaaatgctgtttctcaaaggatatagagtnaaaaaaaaaaaaaaagaaaagaccgaaaagaaatc

SEQ ID NO: 22008 - DNA, 427 bp, Glycine max
  unsure (1)..(427): unsure at all n locations
agcttgtctcagcgtttatgcgagacagagaccaacatgttagccatcatcagcaagtaccaagaagaattaaatctagccacggcccataagcacaaagtggcggacgagtatgcccgagtgtacgcggaaaaggaggctagaggaagggtgatcgactcgttacatcaagaggcaacaatatggatggaccgatttgctcttactttgaacgggagtcaagaacttccccgattgctagccaaggccaaagcaatggtggacacctactccgcccccgaggagatccacggacttctcagctattgtcagcatatgatagacttaatggcccatataattagaaaccactangaagtttgtattgtcactcggatcttgactagttataactntctgaataaaatgagtntatcccancgtttta

SEQ ID NO: 22009 - DNA, 325 bp, Glycine max
  unsure (1)..(325): unsure at all n locations
tgtgcatccaatgtgaaaggaataactntagataaataggttatataaaaagttagagtaaaatcacaatgtttatagtggttcactcaaacttgtgagttacatccaattctccttanaatctttgaagggttccattagtcacaaattgattacaaacaagtattttactctctcactnttgactacttttgactacaagtattctctagaccactcttgagacactcttagtctccccttgagattaagaaaacaccaaagtattcttttgttaataaaacactcgtgtttttctaattaacagtttggttgaataaaatat

SEQ ID NO: 22010 - DNA, 336 bp, Glycine max
  unsure (1)..(336): unsure at all n locations
agctnntgagcccgttggaagcacttgaagtcttccaaacatatcatttatagattctccttctttcatggaaaagctctcanaatttctcattagagtaacaacttttctcaactgagcatattatggaccttcatagttgatactcaacgagtcccatatctcttttgtactcattcttggatagagcacacgtcatagtataatgagcttttgtgtntaacttcattgtagcaatatcattgtctgtccattatgcttttagtctatgaatgggtatgtctccatttatgatgatcatccagagcatgtactgagtggacttgacttacatct

SEQ ID NO: 22011 - DNA, 330 bp, Glycine max
  unsure (1)..(330): unsure at all n locations
tctatggaggctggatctttgagcttcattcaatggtgattnttcaccatggagattcagcggaagacaaaggaaaagaggtgagaagaggcaccatccactanggaataagccatggaagaaggagcttcgccaccaagaatgtgccttggataagaagcttggagaggatgcttcaatggaggaaaagaaagagagagagaaagagagaggggagcacgaaattgaaagaggaaaagggggagagaagttgaactttgagttgtgtctcacaagactctcattcatcaaacttaccacaagtgttacacatgcttctatttatagact

SEQ ID NO: 22012 - DNA, 414 bp, Glycine max
  unsure (1)..(414): unsure at all n locations
agcttctcccncaattntctataaatagggggagaagtgaagtgaanaagggttcagccccttaggcacttctctctctttcgaatttgcttggaaaaattgtttccgtgaagaaaatctaagtcgaggcgcttccgaaacgtttccgtaacgtttccgtaaggaatttcgcgaaggtttcgaccgttctttgacgttcttcattcgttcttcatcgttcttcgatcttcaacgggtaagtacctcgaaccaagcttttcgattcattctatgtacccgtggtggtccacattgtgtttcgtgtatttttattctcgttttatttactttttatacccccttttgacgtgcttaagccattntatttaagtcatttctcgcttaaactaaaaataaaataaatttccatcgatc

SEQ ID NO: 22013 - DNA, 433 bp, Glycine max
  unsure (1)..(433): unsure at all n locations
ntggaccatagcaactcanaatctaggtatccaaaacccctcaatttaatggattttcaaggtttgagaagtgaaaatgagaatggggtaaatttggagcaaactctcacctcacacaagtctataacatcaatctaaacttgctcaaactggttttacgcctaaaattctgccgaatcaaaatttgactcctcaacacccaattttaccctagaaatggctcttgccttcactttggtcatttgtttttctctcttgcacagcccaaactttctcataagtcctaaatgacatttcaaactaggattaactccctttaacctccaaataccactaaattcagatttggccttccaactctcaaagtctcactctttttccactcataacactacattctcactttctaaccctaggtcaactatacccttca

SEQ ID NO: 22014 - DNA, 439 bp, Glycine max
  unsure (1)..(439): unsure at all n locations
agctnttanggacgaattgcgagaggccgaattgtcttgaaaccaaattaggctggtatccaaccaggcctaaatagttcgattgaacacctgtacgacaagacaggatctgtggattcaagtaaaatgaccatatttcgttcacctcttcttcattgtccggatcgacagtagggaaatagtcagtgaaccaggccgggccaacctctcgactaatgaatggagcatgttggggaagaaacttgtcaaagctcaggaaaatcctcatatactttaggaacagtttttgtgagcttggatctaaggtcttgggcgttagtcgaagtgctctctggccttcaatcgagcgatttgcaacttcttcagcataatcttgtgggattattaatcccatttcctgttcaaaagtggcattaagccacaactggaggagccacat

SEQ ID NO: 22015 - DNA, 438 bp, Glycine max
  unsure (1)..(438): unsure at all n locations
ctttaccaggggtattttggatatttgacctagctaactacccattcggtatacttgctctactaaaaatatgtctttcaaagatgattcttggaggcttttaaagacggtttagaattgtctttgaagctagcgtcgtggaaagtcaattttttccatgacggttttgtgactatctttgtaaggtgtcatctttattatggtttactaataatctgtcttagaattagttttaaaaaaaatgaaaaaaaatgattctaagacaatttttgaacaaaaattgtgttagaatgatatattttctaagacgattttgtccaagaaaagtcttagaatttttttttaaaaaaataaaaataaaaattgagaattctaagacggttttcccaaaaatcatcttagaaagtagattntctaagacggtttatggaagaatcg

SEQ ID NO: 22016 - DNA, 471 bp, Glycine max
  unsure (1)..(471): unsure at all n locations
agctgggttcgaggtacttacccgttgaagatcgaagaacgatgaagaacgaatgaagaacgtcgaagaacggttgaaacctttgcgagattcctcacggaaaacgttacggaaacgtttcggaagcgcctcggcttagattttcttcacggaaacaatttttccaagcaaattcgaaagagagagaagtgccaaaggggctgggatccttttcttcttcattttctcccctatttatagcaaaataggggagatgcttgccgcccagctcgcccaggcgagctcagctcgcccaggcgagcagggttgcttcctccagaagcaaccgccttctggaggaaccttctggagggcccaaatgggcctgggtgctatttgcacccncatttttactaagttcacccnctctgctggtttttggtgattctttnttcgtanagtacggaaacttacgaatttcgtaacgatact

SEQ ID NO: 22017 - DNA, 432 bp, Glycine max
aatctcagcttcacaccaagccaatgaataaggactcatgtgataagaagttgttgagtaggtatttttattacgttgaaataaacacatcctttgttattttttaattaaatatattttttcattagtaatttatattttaatttatatacaaaatctttcattacttttttttaaaaaagtattattatttttttcaaaaattaacccatgtgtataacatccatgaagcatagctactcaatgcctcaacatatttgaaagagaaaactctaaagttcacgagttttcaccaatcaagagcaaaatatgtaatcgtatgacttatcctaaagaacttgctcatccaaagaaatttccttaatgatgcaggaattatactccagccagatgcacctaagtatggctgaattgcacacataacaacaaaaa

SEQ ID NO: 22018 - DNA, 434 bp, Glycine max
  unsure (1)..(434): unsure at all n locations
agctntgagccaaaatcctgactcaccataaaccttgacccagggtgagaatgtcaattcttaccctcggaagcaaaaaaaaaggggagagggaaaatttccaatcaaagaggaagcaaaaaaggagagaaggaaaatttccaatcaaaggaaaaaaagagaggaaagggaattcccaatcaaagagtgggagaaagcaaaaagaaaagaaagaaaattcccaatcaaagaatgggagaaagaaaaaagagaagaagaaagggaagaaagttcccgatcaaaaaaaaataatatgcagaaaggtctntggaccggacaatatctgaacaatacagaattgtcaccaaatgaataaaaagaaggaaagggaaccatgacctanaatggtcttccccctttagttgccaggcaaaatcttgtgcgctagcaacctt

SEQ ID NO: 22019 - DNA, 426 bp, Glycine max
  unsure (1)..(426): unsure at all n locations
tatatgcaagatgcgtatgagttggttagtaatcaaatccattatatgcattcttgtttatttaaacttcttgatcattggaagggaccagaaaaggttacatgttttatttggaagctntgtcatgaatacattatgactaatgttaggcagatgagattgagtttcacaaatagaaatttatgtcctgcttatgactcccatgaagagactcttattcatctttttcaaaattgccaccatgctagtttggtgtgtcaattttttattagaaggaatgatggtgttgaattttattccatagttgattcgaagatatggctgcaaactaatttgtctagaaaccacctattccatgatgtaaattgatcattgttgtttgaagggatgctatattntacgtggttgaggaggagtaaggtcatt

SEQ ID NO: 22020 - DNA, 372 bp, Glycine max
  unsure (1)..(372): unsure at all n locations
agcttgtgcatatgaaaggaacattntatccgtagttggtgaaagtcttctacacgtgtgcacgcgccgatttagaaggtaatctcttttctacagttaatggaatagaaatggttatcgatgttgatgtatggaaggaagtagctagactggacatgggtggagttcaacaatttgaagaaataactaatgggtacaacaagatgcagacctacagaggaatgcttctcgactgatcaaggtcgtacccgaatcaaataaacattaaaaatgcagtatctaggaactgatcctaggtcatctcccaacgagcaatggtcaaccaaacgttcataacatatagtaataaaaaagtaacgaattggggggggg

SEQ ID NO: 22021 - DNA, 439 bp, Glycine max
aagaagaatggaaatggtgtctccttcctttatgaccagctcatgaaagagaggaagaatgaccaagttttgtgagcttttggagtttaaatgaaacttgtagatgaagcttagagaatgtccattggattcttgtgtaggatttagttaatgaacaaatttgacacattgaatgaccttgatcaactatgtgtagtcgtgccatccaataccaaatgtggtatgcttcacttttaaaaaatttactcaaaaatggtaaagtaaagttttaccaaaaatgggtattcttgctttataccaaaactagtaaattatatttgaaatgtcttgattattgttctaatcttcctaggatttcgcgtaatcagagtaaacctcacaactaaattacattgtcacttagtgtacagtggaatcttgtcacaaatgaaaatttcat

SEQ ID NO: 22022 - DNA, 378 bp, Glycine max
  unsure (1)..(378): unsure at all n locations
agcttctcaaggaagctacatgaagctgtctcggtaaaaacgttgcccagccttcgttaaccgttggatcttctcngaaattggtctgcagcttcacagaacaagtgtccacaatatgaccattgtgatctttgagaaattgtcggaagtgtgcgcaaagtttccgtttccgagagcattgctcacttgtgcgttntgagccttgtagtccaagtagctttggaaaaatgccatttcttctccttctttcttccaaaaccatttccaacgttccaagatctttctccatcacccacagccaccattagccaccatgaaccgccattgttctccgttgaaaccccacaccgagaggaacccttcaaccgaagtgaaatc

SEQ ID NO: 22023 - DNA, 427 bp, Glycine max
  unsure (1)..(427): unsure at all n locations
ttcttgagaggcttctttgagaagctaacactntaactactaacaccctnttaataactaaactcacatccttgaaaataattacggataaaataacataacaaatataatcaaacatcaaacataattactaataatatatagatatatatcaaggtgttacaactctcccaccctttntgaaatttcgtcctcaaaatttacctgactcaaacaaggatggatgagcttctcgtatctgactctctaattcccacgtggcatcttctcctgatgcacctccccagatcaccttgaccaacagaatctttttccctcttaggtgttttgttcacctatcctcaatcctcaaaggcaatgtttcatatgtcaaattctccttcacttgtacatcatccaattcaatcacatgggatggatcacggat

SEQ ID NO: 22024 - DNA, 393 bp, Glycine max
  unsure (1)..(393): unsure at all n locations
cgcgatcctttgagtcacctgcggcatgcaagcttataagaacannaatgcctaaatcatttccaaatatgcatgtgaattacgaagcatcaacaagaatcaagccaagactattgtgcaagcaatcaatggggcaaaacacaccaaaagattatgatgatggatggctcgaattctcacaaaggtaaaattatcactttcaaattgagctttcaaaactatcatgacatgtaaaggaaaaacaaggatttcaagtcacaaaatgtcaagagactnttattttcaaaacaattcccccttacttgaacatatcctataattcaaagacaaacatgcaaatttaacacaacaaaactaacaaaattaaactagaacccaactgtcgcaacatgc

SEQ ID NO: 22025 - DNA, 424 bp, Glycine max
  unsure (1)..(424): unsure at all n locations
ntgccacatgttagcatgtagaggaaagagaatgaacaatagtatagtcaatatgtgactntntgctccactacttgtacgatagcggtttgcagagaatatcctattttgagttgttctcatacacacatgaaattaaaatgatttgaattcaaatcgcaagaggaaaatacaaatatttcagagtttctagaatgtgtatcaatcttgtgagtgtgcaagtgtacgagctcatattggacgttaactaacttggatataaatatgtttgtgtaagttagttagtccctttttgaacatttaaattgcacaacacatcggatgttggttttcacaaagattcttggacacttgtttagttacaactcattggacattgttttcccctataagtaaaacaagtactaattctttggatgataaa

SEQ ID NO: 22026 - DNA, 448 bp, Glycine max
  unsure (1)..(448): unsure at all n locations
agctgttaatgcattatagtatagttttctcatatattagaaatattaaatatctaatttcatatttgtcggttaattgatcgactaattttattataattaaacactctcaattaatttataagttttcagttagctttcaactnttcaatagtttataaatttttaactatcttataagttttcaagctagattataaactaattttatcaaacatattcaaaataagctactttgaagtaatttgtggaaaataaattactaaaataagttcatgtaccaaataatcttaattttcttataagaacttacaagctcatcagaagtctcaagagtgtatttaacaagacatttcagttagttattaatttatttactaactaanaaaaacttatttaaatgtttagtacaataattgagtgtcaaataagaagtctcataactttg

SEQ ID NO: 22027 - DNA, 289 bp, Glycine max
  unsure (1)..(289): unsure at all n locations
nttaactatgtattaaggggaataaatgcctacattaaagaacttgatcattaatatattttcttctcacacgccgaagagatactaaatactttttttttatttctatgaattaaattcgatattagggctttataataattacgtattatgttcaattaattcgtggaaattaaaaacattatcaacgaatttataataattcacatatcattagttaaccaagtgaactagacccttgatatttacttagtagattattgacaaataatcctgattaatacaatta

SEQ ID NO: 22028 - DNA, 429 bp, Glycine max
  unsure (1)..(429): unsure at all n locations
agcttgtcttgtgcagaattagggtacacttttacagacttttagatagatagtaggcagaagattggcacagattccagagcacaccatagtgcctatttggggaaaagagccctaaaagcagcaagatgagtagcttgtgcattgaagcctaggttttgtaagattattattgtttgtgtttctttgtaatggctggctaagcaccctagttggggatttctaatgaacagttgatgtaaatacctaatatctaattgattaagttttttgtgttcaatgcttccttcaatgcttaatgtttgtatgcttttggtctgatcatccatttgtgtgcatagttaggtgactntagcattgggaaatgtattgttgccttagaacttgatggaagcaggatcgaaacttagtcttacaagagggctatgc

SEQ ID NO: 22029 - DNA, 371 bp, Glycine max
  unsure (1)..(371): unsure at all n locations
ntcagagtctactggtgagtttatgtattgattcttctcatataatacttcacatggtcataagacacaagctcactataaattgtaatttaaaaatgtatatgtcattgaccttctcttccagctacttgcagtgaggaagaaggatacaagtatcttccaggttgttcagatgaagggtacgaaaaggatactagaaaacctgaggttggcatacattggtgctgtcttgttctttacattatctaaatcagttattatatgccataaaggaatgcaactatccatgcaggtgagcatccttggcaacatgtattggaaggagtttgtacttattttcattgtctgngctcgcattgtggtcttacaga

SEQ ID NO: 22030 - DNA, 413 bp, Glycine max
  unsure (1)..(413): unsure at all n locations
agcttatggcaacatnttataaatatttcaaatatgaataaatgttaatatgttttcgtgacattttatcaagggttctgaggagattagagagaatggtcatgagagatttgaggaaaatttgggaaatttgtgatttatggtagattattttttgttttacactattagagatataatataacaattttttaagattggttgtatatgccactatgtactcgtgtaaacattttgttattttgagtaaaatctatttttcaattttactaccttttcatggtattaaagtcacaccatccgccttataaactctgccattgcttttttaaatttatttggtcttttccagattgctcgtnttatcaaaacaatctatcagatccttctattcttctttatgagatgagatg

SEQ ID NO: 22031 - DNA, 324 bp, Glycine max
tgaccctccattgccattggcgttacaggacgtgacgtggtacggtaccgccatttccactggcgatacgtggtgacgtggacggtactgccattgtcactggcgatacacgccacgtaggcacgtgaagaaggtctcgccttctctagtggcgagatatgtgaagaaggtctcgccttctctgttggcgagatacttggtacgtgatcacgtgaagaagctcaacccagggtcacaactttgcagtgtttaaggctacagctctgcagtgtttatggcaacagcatgcacagtatggactgaaaacacagagtagccttttga

SEQ ID NO: 22032 - DNA, 458 bp, Glycine max
agctttctccactaagttgcctgatgcctgaaatgtcttttctgatggcagtggtcctagatgcagggaagattttctccaagaacaccctcttaaggtcatcccagctgataacggacctgtgagcaaggtagtatagccaatcttttgtcactccctccagagaatgaggaaaagcctttagaaagatatgatcttcttggacatcagggggcttcatggtggaacaaaaaatatggaactccttaagatgcttatgaggatcttcacctgcaagaccatgaaactctggcagcaaatgtattagtccagtcttgagaacatatgaaacaccctcatcaggatattgaatgcacaagctttcataagtgaaatcaggtgtagccattctcctaagagtcctcttacgaaggtggaggtgagccatgttctcagtatgaaaattagtagcggaatgt

SEQ ID NO: 22033 - DNA, 353 bp, Glycine max
tgagccaaaatcctgactcaccataaaccttgacccatggtgagaatgccaatccttaccctcggaagcaaaaaaaaggagagagagagagagagaagagaaggaaaatttccgatcaaaggaaaaaggagaaggaaaatttccaatcaaaggaaaaaggaaaggaaattcccaatcaaagagtgggggaaagcaaaaagaaaagaaagaaaattcccaatcaaagaatgggagaaagaaaaaaagagagaagtaaaaaagaagaaatctcctggtcagagaaaccagaagaaatgtgccgagaggtccttggaccagacaatatctgaacaatacagaattgtcaccaaatg

SEQ ID NO: 22034 - DNA, 307 bp, Glycine max
  unsure (1)..(307): unsure at all n locations
agcttgtaggattatggngtacccatcacatgtggtactaggtggcggtcgagcgatggtgcacaacaagttttccacatccacaaagcgcgcataaacccaccatcccctgttgcccacctccaactgagctcacgtactcccacgtagcccataacctcgtttctctcaacaccgggtccccatcaatcctcccaagcttccccaacatcaaagtaaatcaacattcaaacagcacaaattaccacagccaagaaaacagggcaaaggcagaaaactctgcccaaaacaccaaccaaaatcacag

SEQ ID NO: 22035 - DNA, 408 bp, Glycine max
  unsure (1)..(408): unsure at all n locations
tgaatccacttacccgcgctaagcgcaagggtggcgctaagcgcaacgtcgcgaattcagagcctacttaaagcctgtcttgtgcaaaattagggtacactttgacacacacttttacagacttttagacaaattgtaggcagaagaaagggcatagattctagagcacaccacaatgcctattaggggaaaaaagccctagaagcatcaagaggagcaacttgtgcattgaaacctangttttgtaagattattattgtttgggtttctttgtaatggctagctaagcaccctagttggggatttctaatgaacatctgatgtanatacctaatatctaattgattatgttttctgtgttcaatgcttccttcaattcttaatggttgtatgcttntggtctgatca

SEQ ID NO: 22036 - DNA, 319 bp, Glycine max
gcttgtaatcgattacacatatactgtaatcgattaccagagcagaattttagaaaatattctcaacagtcacatctttttatgtggttcttgaatggctatcaaaggcctatatatatgtgacttgagacacgaatttgctaagagtttttcagaacaaaaaggtcttatcctcttaaaaagaaaaatcgttttatcctcttacaaattccttggccaaaacacttgtgattcaataaggaattatttgagtggctcaaatgttcaatctatctctttcaagagagaattcttctttttttcttcttcattctgaaaa

SEQ ID NO: 22037 - DNA, 368 bp, Glycine max
aattgaacgaaataaaaatgaaagccaagaaacaagaaatgaattaaaagtctcggatttggaaacttacccgttgaagaacgaagaacggatgaagaacggtgaataacggaggaaaaccttcacggatttgcttacggaaacatctcgaaagcgttacggaagcacctcggcttggattttcttcacggaaacaatttttttcacccaaaacagctgaaatacatcaccagggggatctgggacccttagaacaacccccttcagcctatttataggaaaaacggggaggaggttgtcacccagctcgcccaggcaagctgggttgcttcctccagaagaagcaatccagcttcaaaaatactctg

SEQ ID NO: 22038 - DNA, 409 bp, Glycine max
  unsure (1)..(409): unsure at all n locations
acctgcggcatgcaagcttctcgaggaagcctcttaatgaagcttctcaaggaagaaacatgaagctgccttggtaaaaatgcttccccacctttgttaaccgttggctcttctcaanaattggtctgccgcttcacagaacacttgtccatgatctgaccgttgggatctttaagaagatgtctggagtgtgtgcaatgttttcgcttccgagagcattgctcacttgtgccgtttgagccttgtagtctaagtacctttggaaaaatgccatttcttcccctttctttcttccaaaaccatttccaacattccaagatctttctccatcacccacagccaccattagccaccacaaactgtcgttgttctccattgaaaccccacaccgagaggaacccttcaaccg

SEQ ID NO: 22039 - DNA, 438 bp, Glycine max
  unsure (1)..(438): unsure at all n locations
tgaagctgggagaaaagctggaagatgttttgtcttttacattcctaactcccttgagtggcatttgtaatggttgttatattggatgttgcatctttagtacatatcatatcttttatgcatcatgcatcatcatgagtaagtgaaaagaagagtttctaagttagaaaagtttcttcaggaggaaaaactctctattttaatcgattacaattctatcgtaattgattacacaagttgtctgaagcttgcagagttatgtctcgtatctatttaatcgattacaaccttatcgtaatcgattacacaattgttttcaaggcaatgactaatttattcaggtgtctctgctntaatcgattaccatgtgatataatcaattatttctctttctttaagtaattcagatgtggacaaaaacactttaatcgattactt

SEQ ID NO: 22040 - DNA, 481 bp, Glycine max
  unsure (1)..(481): unsure at all n locations
agcttgagctngacctttatagtaaacaaactaaaccgagctgagccttacataggccgagccgaaggccctcgacaagctgctcggcacatttccacccctactcaatgtaaaatagttttatagtgttatttaataataaattattatttaaattactttaagataattattttaaaaatcaacagttttattatacatgataaattgtgattaaatgactacataattttttttattttttatactgtgagtatataatcttttttctcatataaatatagataaacaattcttatttcaagtagatgaatatcactttgattattaaaaatcagaaattgttctaaatttagttcaatgaagattacgactntaatattattacaatcattactagttgtaggaattaagtttcattttagtttacaattctatcatttatttaaaactntccaattaataaatggctaattcatgt

SEQ ID NO: 22041 - DNA, 433 bp, Glycine max
  unsure (1)..(433): unsure at all n locations
tccatcatcacgataccgtgttctattggtgaggttgatgtaggcaaagctcttagacttgggagctagtatcaatttaatgcctctctccatgtgctggcgactttgagagatagagataatgcccacacgcatgaccctccagttagctgaccgctccatcacaaggccatatggagtcattgaagatgttttggtgaaggttaaaccccttatatttccagatgatttcattgtcatagatatagaagaagatgctgacattcctctcattcttggctgcccattcatgtctactgcaagttgcgtggtagacatggggaagaagatgctgcagatgggcataaaagaccagaagatcagctntgatttgttccatgaggacaaagacccacctagccaaaatgtctgtcttaaagtgcatgtgatggag

SEQ ID NO: 22042 - DNA, 468 bp, Glycine max
agcttggtgctattgcaatcaaaattatgctttattcctagcaacttaacgtaaagagtaaattcattcagttcaaattctaagagtacttcctagtcaaaattaaaatccaatttcatgaaactagtgatcaaatagaatcaaacattatgaatagaatgaaatcaccataaatgagtagaaaagattcatatatatatatatatatatatatatatatatatatatatatatcaaaagagatacataaggatacaaaaattacatccaatcctttgaataaactagctggtcattgcgtagagcacaacgtcaacaaaagaaatcatgaaggaagagattcacgaccacttcctttcctctttctctcccctagttgtgtgcttcttcctctggtttcttccactccttcctttcctctggtttatagaaaatgagccaagaggtgctagaccaactcgtccaagc

SEQ ID NO: 22043 - DNA, 433 bp, Glycine max
  unsure (1)..(433): unsure at all n locations
tttgagtgaaacaatgtgactcttcacatttaaatttgaatttcaacgttcaaggacactagtagtcgattaccaaaacattgtaatcgattacaggcttttgaaaatatttggaacattgtaaattcagtttgaaaactttttcaaactcattttgctactggtaatcgattacaacaatatggtaatcgattaccagagagtaaaaactctttcataaaggttttgtcaaaaactcatgtgctattcaaagttttgaaaaactttttaaaacttatcttgattgagtcttttcttcattcttgaatcttgagtcttgaatcttgatcttgattcttgagatcttgaatcttgaatcttgattgtagactntcttcttgagtcttgaattcttcttgattcttgaactcttgacttgttcttgatttacttg

SEQ ID NO: 22044 - DNA, 376 bp, Glycine max
  unsure (1)..(376): unsure at all n locations
atgcagcttanacaacttgttgtaattgattacaacgagactgtaatcaattaaaacatagagtttttgtctttgaagaaaattttctaacttagaaaatgttcttcatactaaccatgatgatgcacaatgcaaaacaaatatcaaatgtactaagatgcaacaaccaagataacaactaatacaaatgtaactcaagggaagttggcatgtaaaagccaaaacttgttcaaaacttcttcaagcttttgcttgagcttcaagctttagccttagtttgttcaccatattgctcnngnggctccctctatctctaacaggtttgggacttggggttggggtgccctttatctggtgtagcaacttgtttaacctc

SEQ ID NO: 22045 - DNA, 443 bp, Glycine max
  unsure (1)..(443): unsure at all n locations
tctcgaacgtgatcaatacattcattggcatagattgaaagatgaagttgtggtgcgtgatctgttttggtgtcacccagatgcagtaaagttatgcaatgcatgtcatctggtgttttttatagacagtacctacaaaacaaacaggtacagactcccactacttgactntgttggagtgacaccaacggcgatgacattctctgctgggtttgcatatctggaggctgagcgtgttaataatattgtatgggctttggaacgatttcgaggcctatttttaagacacgatcgcctccctcttgttattgtcactgacagagacctagcactgatgaatgcagtgaaaactgtgtttcccgagtctactaatttgttgtgcaggtttcatatcgataagaatgtgaaggcgaagtgcaaatctttaatcggagaaaaaaatg

SEQ ID NO: 22046 - DNA, 286 bp, Glycine max
agcttctactaagttatgatgtttggattgataatactaggcttcattctttccattgcttatattgtttctcttaatagtgatgtttatttggctgaaatagataaatgttaaaataataatggagcacgctgtaaaggtgcaagaataatctttttgtgtatctagtggactagtggctaatctgtttgagttaatttgtaataaccctaaacatgacaacacccaagtccatcatagaaatcatcagaaccattccctacagcaacaacaactttttgttttt

SEQ ID NO: 22047 - DNA, 404 bp, Glycine max
  unsure (1)..(404): unsure at all n locations
ttgtccgcaaaagttacttaaaaccgttttgaggtccaacgccttanacggttctctntgcttttatcggttaacatggaccgttcaaaagcataaaatcaacacataactttactgcttttgcaaaaactacttaagtttgatttcctcatcgcaattgaggatacgtaggagcaaaagccccgcttttgtcgaccaccccaagagatcgttaatggtccaatgccttaacgtttctctcctttcaaaaaccaagagatcgtttatggtccaatagcttaatgtttctctccttttcaaaaccaagagatcgtttatggtccaatagcttaatgtttctctcctttcaaaaccaagagatcgttaatggtccaacgccttaatgtttctctccttttcaaaaa

SEQ ID NO: 22048 - DNA, 463 bp, Glycine max
  unsure (1)..(463): unsure at all n locations
agcttagcaagctntcaacaaatttcttcacaaataactatcaaaaggcataaacctagtaaaactacccatcatatctcccaaaacccaatacccatgaacatttatgtgagaagaagtctacccaaacctgaaatctgaagtcccactatgtagaggtgcactttacgactccgaaaatggcttcttttcgcgatttggagcagaaatggtgagcaaaggttggagctttgatggagcttcaatggtgaggaagaagaagggaatagcaacgtgagagagagagggagagaagcttctgaatttttttggctgagtgagtaaggagagagagaacatggctnttagtttaaaaagactttttctctttcttntttttaaaaaagatgtgccacatgtcttcttttgagtggagcaaaaaggggcccactttttctcttgatgtgactcatactcagtcaca

SEQ ID NO: 22049 - DNA, 417 bp, Glycine max
  unsure (1)..(417): unsure at all n locations
tctcccncaattntctataaatagggggagaagtgaagtgaaaaaagggttcagccccttaggcacttctctctctttcgaatttgcttggaaaaattgtttccgtgaagaaaatctaagccgaggcgcttccgaaacgtttccataacgtttccgtaaggaatttcgcgaaggtttcgaccgttcttcgacgttcttcattcgttcttcgatcttcaacgggcaagtacctcgaaccaagcttttcgattcattctatgtacccgtggtggtccacattgtgtttcgtgtatttttattctcggttcatttactttttatacccccttttgacgtgcttaagccattttatttaagtcatntctcgcttaacctaanaataaaataaatttccacccgatcgttgaattgtattat

SEQ ID NO: 22050 - DNA, 428 bp, Glycine max
  unsure (1)..(428): unsure at all n locations
agcnttgatgcttgctttggactctnggaagccgtcgaagttggtcgaagatttctcgaagttnttattntgaccaatgtattttcgacatgtttcgctatatttcatgttttcaatttttttctatttttttctctttcttctttaatgttgatgtattgtattctccaagctagaagtgttntcaacacattccagcttgcggnggggtattagacataaagttaatttagttagttactataagttatttgagaaagttagttggttactcaagttatagttactagaagttatttgagtaagttaatgttggttactcaagttagttattntctatctttgtataaatacatcaactntgtaatactttgatcaatgaatgaacctgaatgaatcgaaaatatcattcatttctttcattccta

SEQ ID NO: 22051 - DNA, 399 bp, Glycine max
  unsure (1)..(399): unsure at all n locations
ntcacgccacaaacaaaatgctattgcttctgatttacatgcatatgactgattggtccggcacaaaaaacgaggtcaagtattgactactcttggtcaacatagaacgcacaatagcgacaggagcataaaacaagtagcatgcaagtgaccctttatgtgtggcaaactaacaacgcacaataaatggtaattttcatgagtgcagtgtaatctttttttgcatgcagatgaagtttcattgaagaggtaaatgttgatgtgaatattttaatttgactttgaaattcaaattcgtttgtgttcccatcgaattctaagcttgatcacctgttatatgttcctgtataaatataaatatatatgttttagttcgtagaaattcgtttgtgagttctc

SEQ ID NO: 22052 - DNA, 430 bp, Glycine max
agcttgtcaactctaaccatgaaacttattggaataaattaacaacttattctgataaacttcatcaaataagttcctataaactcttcctaaaatccacatatagtgtattgactaaagcgtcagaagaaaggacggtattataaatctgatgctttgcaaaagtcttaaaattatagataattcaaagaagtcaatcgagtaaactaaataaaagattaatgtacacagagcataagcaagtccagtaaaatcagcagatgggtacaaaacagggtcagtaactacggaggtagtccaggtcaacccctaacctactcagctcttgaaaactgaagttaaggctaaatcagaatgaagtgagagatatggaaaaatgttccacaatcaactcacattcattggcactcttaattatcaattatcaata

SEQ ID NO: 22053 - DNA, 401 bp, Glycine max
tgcaatcatttggtataaaattcacccagtcttgtggctctacacaagggtgtctgcaaccttctaaaatagtatctccttcatcctattaaaatcaaaatgacaatgttaaatgctattcggaaaaagatccctccaaccaaaacaagggataaacagagaacgaaggtaaatgcgagaagaaaagaatgtagtaattgtgaaaacaacaaattaagtaccaatgaagtgatgtcacgccttgtgtagggagtatgacaactagaagccaaatcagcaaatctcaactatagattcctatccatgtacattctttaacataaattcatggatagtggcgttctactaaatgttgtcatgacaagagtatattcattagacatcaaaatggacgttatagt

SEQ ID NO: 22054 - DNA, 473 bp, Glycine max
  unsure (1)..(473): unsure at all n locations
agcttgtcagtttattcccaaaaacctgcctagtcgaagaatatggctttcaattgaatgacaatagtctctaaatcaattcattggcgtatcagttcactcacttgaattacaacatgatagatacttaactgataaataatatatatgtgatatgagtaattaattaaaactatatatatataggacaaagatatattattgattaaatttttaaaaaacaaaatattgttagtgattatttttttaaatgaatatatgtaacataattagaattgacagtaaactgtatggtaaaaaacacagttataatattaagaaaaaaatttaatcaaatctcctattntaaatataactatgcttattataataaaatattaaaataacataattgtatgtggatgtcctaatacaactgtcactaatcctttntaaaagaaactttatactcannattgataaagtttatcaat

SEQ ID NO: 22055 - DNA, 431 bp, Glycine max
  unsure (1)..(431): unsure at all n locations
tagcacgtaacagtgagatcctaaaactataatcccaaagaaaatcaagcagacgtgactcttaaggcaacacattcacccacaatgcatttttaagaaaagacgagaaatatgaaggtgaatgtattttgattagtgatgaattgaagtggcaccttgagttttgaaagcaacaaaaagataaaaatcatggcgactttaccataaaagcaactatttgctgctttaaaaaaccatggcaagttcaaccaatagtcaatccaacccgcactagactcaggtcaaagattagtctcttaaccgcggaaagtcaaaaagataattaccaaaaacagaagatcagcatttattttactaatataaaatattgagtggggttntgttggttggtaaagtatattcagattattaattagagggaaaaaaaaatg

SEQ ID NO: 22056 - DNA, 431 bp, Glycine max
agcttgtcttaattctcatattaattattcacatcaaaatgtttattaataagagtcttagtccttaaaaaaaaagctttggttttgacacatcataattgaactgcagcttaactaattatagtgaaccactttcatcgtgttgcatgctacgtggatatatattaatgttatgtgctatattttccttcaagttatgaagagacttcaccgccaaagagtttaacaatacgtactaacgaataaagtttatggctagtaaatatcacattgaacttttattatttttgcttaaagcaacacataataatattctcaaatcttcaaacaggtttcatccatcttcaaattctacgctagatcttagctacgctatgttcgaacttaataatttagccagtaactaaagctcgatccagaattcttcgaag

SEQ ID NO: 22057 - DNA, 309 bp, Glycine max
  unsure (1)..(309): unsure at all n locations
tgtaatcgattacacaaatactgtaatcgattaccagatgagtttttcagaaaatattctcaacagtcacatctttttatttggttcttgaatggctatcanaggcctatatatatgtgacttgagacacngaatttacaagagtttttcagaacaaaaaggtcttatcctcttaaaaagaaaaatcgttttatcctcttaaaaattccttggccaaaacacttgtgattcaataaggaattatttgagtgttcaaattgttcaatctatctctttcaagagagattacttcttttcttcttctttatt

SEQ ID NO: 22058 - DNA, 181 bp, Glycine max
agcttgtgactcttgtcgatttctgtaatactcgtcactcactaagatgtgactttcgataggatccttccaccccagtcacttgaggacctgtcactcgtgtatatgtctctttaagaaccattcactgatcctcgatgaccattaatatgggagtgattacccttcaccacaggcgact

SEQ ID NO: 22059 - DNA, 63 bp, Glycine max
tcgagccggacttctgactcagcatatacctcgacccattgcgagaatgcctgtccttaccct

SEQ ID NO: 22060 - DNA, 479 bp, Glycine max
  unsure (1)..(479): unsure at all n locations
agctngaaggtgtgctaacccaccattttcataataganaactagtaatgtgtctactatcattgttatcatttctttctccgtcattgagggaaccacttgggctgccagattcctccacctttgggcgtattctttgaaagatctgtgccccctcttgcatatgctctgtagttgcatcttatctagagccatatcagaattataccgatactgcctaacaaaggcaaccattangtccttccaagaatggactcgggaaggttccaagttagtataccaggtgacagctgccctagtaagactttcttagaagaaatgtatgagcattttctcatctgttgcgtatgcccccatcttccgacaatacatctttagatggttctcggggaggatattccncttgtacttgtcanagttcggcaccttgaacatgggaataaccgtgtttgggtactangaacaactcttctacgtca

SEQ ID NO: 22061 - DNA, 409 bp, Glycine max
  unsure (1)..(409): unsure at all n locations
tatatgaatntgttgcaaaattaattgaaatcccgatggccaaaaattcacaatgtcgttcaaaatttcaatggttgttacaagcaagttgttgctttgaagaaaagtggttacacaaagaatgatgtgatgattaatgcatatgttatttgaaaggaagacaaaaaaaaggattttgcattggagcatgcatggcggctattaaaagattagcatagatggttagaacaatgcaaagaagttccttcaaaaagaataaagttgaatgaaaattggaattactcatcgtcatctaattcagagacatcgattgatgtttccaaaagtgatactcctacaccactggcttgcccaatgggacaaaaggtggaaaaaatagggtcaagtgaaagaagcatcgtcttctaca

SEQ ID NO: 22062 - DNA, 428 bp, Glycine max
  unsure (1)..(428): unsure at all n locations
ttctgcgaaggcaaacatttggaaagttagttntaccaagaaatgctactcttaaaacaaaaatggcatacaacctcctccaataaacacaaacatcaatgtaaatttagagcaaactcatgcacatacttccttacgaacattcactcgcacaagatattcttctaactaagaaaaatgcacccatgcacaatcaaggcaccttcgttacctagattatttatatgtacttccaaggtgtatttgctacctacatcacatgcatttccttggctaaatttacatacatgcatactcaaagcatcttggctaccaaaaattgcacacgtgcacattctggtatttctaatacctatgcatatacaaaatntgtgatgaatcttggctatctacacaataaggtgctacatttcatgctntattcaagt

SEQ ID NO: 22063 - DNA, 431 bp, Glycine max
  unsure (1)..(431): unsure at all n locations
tcaagcttgccgttgaacacagttgagatccgtttggatcaccgggcagtgcactcgcattggtacaaccttgagaggtttggctttggtgtgttggagggtgacaagaggaatgagacaaaattctcaagtaggattcacctaagggtgtgtcttgagggtgcttatcatgtgcttgatgagtccacaatgtatattagtgacacaaggcctactgctagacaactttggaaacaaccaattgggattcttgaagtggggatattgagtgcccaagggctccaatctatgaagaaaaacaatgctaaagggtcaacagatgcttattgtgtggccaagtatggtcagaaatgggtgagaactangactatcactgagaagcttaatccaaaatggaatgagcaatatacatgggaagtgtatgatccttg

SEQ ID NO: 22064 - DNA, 446 bp, Glycine max
  unsure (1)..(446): unsure at all n locations
agcttgaaccatgagcttagcgagaccaaaccactaagcgagatagcagtggcttagcgattgaggataagccagagagagttcttccacgccatcacgcgcccagcgtgtatgcagctcgctaagcgagatgattgtctcttctgcgctaagcgcgagattggcgctaagccaaatctcacttactcgcacttagcgtaagaatggcgctagccgtcccttcgtggatagaaagcccttttttaagcctgacttgcgaagaatgtggggaggtctgaatagacggcgaattgtgtgtagagaacagaggaaaaggtgagcaaggaagcaaaggccctaacttttaggtagattgtaggttaaagagtaagtcctatgtttttagaggtggaggaggaatccncattgctntgtaatctggtattntctctgaaacccttctncta

SEQ ID NO: 22065 - DNA, 408 bp, Glycine max
tagactaagttcattctaccattctcagattgatggccaaactgaatggaccattttgtcgctggaggaccctttgagggtgtgtgtcttagagcaaaaggggagttggagagttttcttctattgctagagttcacttataataatagttttcaatctaccattgacatgactccctatgaagctttgtatgatagaaggtgtaggacacccctatgttggttggagcccggagaagacctcaccttaggacttgaagttgtacaacaaaccaccgagaaggtaaagttgatccaagaaaggatgaggagtgctcagagtaggcataaaagttatcaggataaaaggagaaaatgatgcaatcctacccccaagggtattggatagaagactccaagaagattggac

SEQ ID NO: 22066 - DNA, 474 bp, Glycine max
  unsure (1)..(474): unsure at all n locations
agctnggtagctngagaatgngccacacagatactcctaccaagagctcaagaaaacaacaaaagggttcaaggacaaagagctacttggacaagggtggattggtagtgtttacaaaggaacattgccaaattccaatacccaagttgctgttaaaaagaatttcacatgactccaaacaaggccttaggaaanttgtgtcagaaatagccagcataggcccgcttcaccactggaatttggttcggttgcttgggtggtgtctccgccgtggtgacctcctccttgtgtatgatttcatggaaaatgggagcttagataagcacttgtttgatgagccagaaacaatcttaagttgggagcaaaggtttaaggtcatcaaggatgttgcttcagcccttttgtatcttcacgagggctatgagccggtggtgatacatagagatgtgaaggctaacaatgtgcttctagatg

SEQ ID NO: 22067 - DNA, 428 bp, Glycine max
tggtgtagagcttgatttaaagagccaaaagtgacaatgattaatacttgtaacttgttgaagttagtagaatttggtggtttgccaagaattcgacgtagtttcggtggttgagacaaaccaatataaatttcttatgttttattccttttagtttctcttatttatatgaattgacctaaggtttgaatttgattttgcttttgaaaaactgtttgttttagaaatttatgaaactattgtctaatttgtcttacgaaaatataatatatgtttttattagttttacatcattagacgataactttgttgtattctaaaaggattttaaatttagtaaaaacaacaattcaactcaccttcttgtgatatttgcctttaaattctagtataagagttcaacctctaagggttgagcacttgaccgt

SEQ ID NO: 22068 - DNA, 324 bp, Glycine max
  unsure (1)..(324): unsure at all n locations
gcttcaacctttggccatcatttctgctccatatcgcgaaaggagggcattttcggggtcgtgaagtgcgtggctacgagtgggacttcgaatatccaggtttgggtggacttctttctctcttaaatttcgagggtatggagttttgggagatatgatgggtggctatgttagatttctgctgagtgatgattatntgtgaaggcatttgctgaaaactatgtgaaattgccatgtttggatgagttgaacatacccattctgttttanggtttatgagacgatgtgtgtgatgcttatatgctgacattgctgatggaaaac

SEQ ID NO: 22069 - DNA, 331 bp, Glycine max
actagaggaggggggcaagggctcaccgagcagccgcatgtgctgtgtcaaatccacctagacaaattttacccagacaaaaaccatgctgtcagtcaccacagaaaaaaagaaaaaaaatcccagccacactctttgtctctaccaccacatcgcagccaagacaaaacaacacgcgaaaaaccgttttagccgcttaaaacaatatttaggaagaatagctgccacagtttgacatttcacacacatacacaatcataatagttgacaatgaacttacctagatacacttgttttccacaatccctgcaacacaaatggaaccggaaaa

SEQ ID NO: 22070 - DNA, 460 bp, Glycine max
  unsure (1)..(460): unsure at all n locations
agcaagaatatcagaatactcatgtcaatacttgataaacttgctcaacgtctttaaagtcatcactttaataaccggatcatcactcacaacatattcatgcagaaaacattcaatttcccatacttgcataaagtagcgattagatgttggataagataagcccaaaatcaaattagtcatgacataaaaggggcttcaaaaactcacattntttcagcctttccatttatcatttgatggacattgaacatagtttctatcacaaatagccaaacaaccaaaagcacattggtacttaattgcactttcaagcataacataggtggaattccattaagtggctacatccattctcaaacccaccttagtaccaataccactcacttgaagaacacactctntgaatgcaatctttcttgcctccaatggctttcacatatttatactatttcttata

SEQ ID NO: 22071 - DNA, 302 bp, Glycine max
tggcattgtgtctcctataaaaggtgatagttggtgtgattaatacaatcttgctgttcatttatctaatatcaatttatcactggctttgctgtggtattgtcttacttcttttatgaattttcccttcaacataagtgtagaactgaccaccaacataaaattttatttaaactataagcttattcaaaagaaatcctcatgtaacacaaagggcataagcaagtaataattatttacctcttgtttctctttgctcgctcatcattgaaattgaatccataatttgggaccgcctacac

SEQ ID NO: 22072 - DNA, 429 bp, Glycine max
  unsure (1)..(429): unsure at all n locations
atgaatattntattnttttttatgataatactaattntagttntacttnctttataattttaattnttctttgtgtttcttcaatatattaatatatcagagttgaaaatttaatcaatatgaatctatgattataaaactttaggaaaattaattaaaggggtgacattttgtaataacatatcatatttttttatttgtaggaatcaaagacaatgtcaaggggtttacaacaacttacacacccttagtcaaccaactgagctagacccccttggcacatgtcacattntaatttgaataaaaaatgagacataaaacaaatagaacttcaatttatttataaaanaatatattacaaaactntaattntttttaataattntgggcctttnttagttgtgggcccaatactatcgcacctctgga

SEQ ID NO: 22073 - DNA, 409 bp, Glycine max
  unsure (1)..(409): unsure at all n locations
cctctggagaaggttgctttcaccttctcgctaagccaatttgctggcttagcgagcatccacttagcgcaacactnctgggctaagcgcgaggaagaatctanaagaagatgagttgtacaggttctctaagcgcaccacttcatctctctaagcgcaccgcttcagttcatctgctaagcgagaaaggcgcgctaagccaaaaatcactaacgtgcgctaagcgtccatacgtgcgctaagcgcacgagcaagaataaggccacctatttaagcctgaaatcagattttgtgaagggagtttggactgcgattcagagctctgcatgtctagggtttctagagagagaaaggtccaagttccagacagtttgagagatttgctgtgtgaagatctgagagaccaagc

SEQ ID NO: 22074 - DNA, 371 bp, Glycine max
  unsure (1)..(371): unsure at all n locations
agctntcaatgttcttaagcaaaagctaactaatgcccccatacttgcgttgccaaactttcaaaaatcttttgaaattgagtgtgatgcttcaaatgttgggattggggctgtgttgatgcaagaaggtcatccaattgcttattttagtgaaaagttaagtggtcctacccttaactattcaacttatgataaggatttgtatgccttagtacgggctttgaaaacgtggcaacactacctttatcccaaggaatttatcattcttagtgaccatgagtccctcaaatatatcaaggggcaaggcaagcttaacaaaaggcatgcgagtgggtggaattcctagagcaattcccttatgttatcaaaca

SEQ ID NO: 22075 - DNA, 410 bp, Glycine max
taacaaaaggcatgcgaagtgggtggaattcctagagcaattcccttatgttatcaaacataaaaagggaaaaggtaatattgtagccgatgctctttctcagcgtcatgcattactttctatgcttgaaacaaaattgattggtcttgaatgtttgaaaagaatgtatgaaaatgatgaaacatttggagaaatttttaaaaattgtgaaaatgtttcagaaaatggtttctttagacatgaaggctttcttttcaaagaaaacaaattgtgtgtacctaaatgttctactagaaatttgcttgtttgtgaagcacatgaaggaggtttaatggggcattatggggtccaaaagactctagagacattagaagaacattcttattggcctcatatgaaaaaagatgtgc

SEQ ID NO: 22076 - DNA, 456 bp, Glycine max
  unsure (1)..(456): unsure at all n locations
agctntagaaaccctaagttgaggaagaagaagcaagtgaagaagaaaatatttgataactttttaaattntgcattaaagttcagtctacgtgtcataatctgagacaatttgtcacgttttatgtggcactaaaattatcaacaatacaccttactaacgacattacttttaaatttaatggcaaagactattttgcaaaacttatgcaaagatagagactattttttatatttcaaaaagataggaactaatttgcaaaaagggtcaaaagtcaagaatcaaaatgcctatttactccttaaaagtagttacttattattttagttacccttattcttaatgcaatagttgtttatgcatcattntaatgttgaataggtataaacatgaatacaaaagtttattcagaccgtgaanggtctctgtttctcatcatnggtaaataatctttga

SEQ ID NO: 22077 - DNA, 417 bp, Glycine max
  unsure (1)..(417): unsure at all n locations
tcattgcttcatgatgatgaatcaagattgattcaaggtgttttgatgataacaaagatgatgacaaaaaacccaagagaatgatttcaagattgagtcaagaacaattcaagaatcaagagaaagattcaagagaagtttcaagtttcatgttttcaagaatcaagaatcaagaataatcaagatcaagattcaagactcaagattcaagaatcaagaaaaggctcaatcaagataagtacaaaaaagtttttcaaaacattgagtagcacatgaagttttcacaaaagcttttaccaaagagtttttactctctggtaatcgattaccagtggcaagttttgttttcaaaaagctttcaactgaatntacaacgttccaatcaatttcaaaatggtgtaaatcgatacaatatat

SEQ ID NO: 22078 - DNA, 443 bp, Glycine max
agcttgcatgctcttcttcacggttagttaattaatcactcttcttaattactctcttaggtaccttttgacagaggaaaaagaaatggaattgagaacaaatatttaaattaaaatggtatatgaaagtatgaaactctaccgaattttagaaattttctactcatttctctttctttactcacaaatcacacggacccttagtccgtgtttagattcatgttaaatgatttaaaattattatgttaaactaccaacttacgttaaacgtttatttggatatgtatgttgaaacaaacattctgcattctgtgtgttgaaacaaaaattgtgcatttggacacaagaataaataagtgactgttgcattgaatagaacaacaaacattggattctgcttaaccttttttgtattattaatcgaactaacaatatatttaaag

SEQ ID NO: 22079 - DNA, 424 bp, Glycine max
  unsure (1)..(424): unsure at all n locations
tctgagtctttntttgttccagataattaggaactgtggtatagtgactagtttgatccttttgcccatgaggctgaccatcgggaaagggcaaagagaataaggcacatacgaatcttgttgaggcatgtcatgttcctaattgactagtcaaatttgccaaagctcttcacattattcataaatcccatattctcaattatctgtatcatgaagtattggtgcattagttgagggacattagaacagcaggaaaacttctcaaataatggcacaacacaatcactacaatgcaaactagagaaaactaatataaactagcactgctttgtctggtaaactcaatgacaaaacagaacgaaatctcgagcaagctccanactgcttgcatttgtgatcaaggaatgatatcactcaggtcatg

SEQ ID NO: 22080 - DNA, 293 bp, Glycine max
taagcacctgagctgcagctttggtcgttgattttggatatcttcacacttatgtacgttcaatggatacatccaccgaaaaaattggaccacacaaccgaatttcctcacaagatgaacaataggtgaccatgatgtcaaaaaatgatggggaaaacatctcaactgacaaatgacatggcagctattcttaagtcatccattgagaggataatgattactacatatggattaaaagaaccaacggttatggcacctacttgtcagagatgcggaatccacggaatcatgtg

SEQ ID NO: 22081 - DNA, 404 bp, Glycine max
  unsure (1)..(404): unsure at all n locations
tctggtgggacatcttgacttgctttccaatctgacattcaccacagattctgccttcttctattttcagatnggggatgcctntaacagcacctttgtcaatgattttcttcatgcctcttaagtgcagatgtccaaatctttgatgccatattctgacttcatcttctttggaggatagacatgtggaggagtagctggtttcttggggtgtccataggtaacaattgtcctttgatctgctgcccttcattagaacttcactcttctcatttgtcaccaagcattctgactttgtgaagtttacattgaacccttcatcacacagctgactgatgctgatcaagtttgcagtcagtcccttcaccagcagtactttgttcagactangaagtccatcatga

SEQ ID NO: 22082 - DNA, 312 bp, Glycine max
agcttaatccttccctccttaagggctttctaaatagctggctgaaacactaaacaattggaagcattatgactataagagttgtgccacttgcaatattttttgtcttgtatctcatcagctgaagggaatttatgaccatcccatcaatcgaattgctaatccttcaatagatagtacataatatgactgcctttaaaatgtcaaatgagtattcaaacttctcatttgtggaattagaagttcttgctttcgctgttttcaatgctagacaagagtaatggctcttcacctgcaattttggatgccatg

SEQ ID NO: 22083 - DNA, 390 bp, Glycine max
  unsure (1)..(390): unsure at all n locations
tgagacttaattgctttgttcttcccataagcagtagtcagcagtgcactctcacccatctccattacaagcctttcttcttcctgaacacacatggtcattaattcattgatagaccatntatctttatgtgtgttgtaggaaatcttanatggcccatattcatgcggaagggtgttcnaaatgaaatgcactangaaggactcagacatatcaacctctagtttcttaagttgagctgaaatatctcgcattttcatgatgtactcacgcacacctttcacactggtgagccgaagagaaaanaacttatgatcaagtgctngctaaagtctatctgagtgatgaactgtcatcatggccctaagcagtctcgacttttatgctgtc

SEQ ID NO: 22084 - DNA, 429 bp, Glycine max
agcttcaccttcctctcaggttcaagcttgttttcaacctcaaagttcttctccaaagccttcacttgatccacacttagacgacgcttcttctcagattgataccccggttcttcaacacacccttcctcgtcgagtccgtccaacatcgattggaactccctaccatacatgtgttggctgttcctcggactatgttcctctaaaccaatacaaatcagacataatcgttagtataaataaccaacctaaaacatggatcttggatctgtgtctgaatttaaaaaaacaaagcaaaacaaaaatcaatattatagaagtgtgatttaattaattaattaagcacctgttgatggacaaattgtcatgagggcactggaagaatctgagctgctaagtctcttcatgagtgggaaagatgtgatctta

SEQ ID NO: 22085 - DNA, 437 bp, Glycine max
  unsure (1)..(437): unsure at all n locations
tatcaaaatctatcacattggatgtctgttccttttcagcattctgaactgtatgacaatcttgaccggaatcttcatatccatcctgcttacggaaaggcattctctctttaccccatttctggcccttcttcttgttggttattccattccactgaaatgtttcctgaaacactcagtttacatttacaagtcaattgaaatatcatgacaaaaataatagcatatctccaacaataccaaaaagatgaatcctttgccttctccaaagttttcacaatattacagaactgacatgcaattacaactgtgcaccaaaatttgattagttaatcaatatagtaagttttacaacttcaagctattcttaagaaagttttttnttaattaacatatgtttttaacatatatatatatatatatatatatatatatat

SEQ ID NO: 22086 - DNA, 467 bp, Glycine max
  unsure (1)..(467): unsure at all n locations
agcnttgattcagtaccccctattactagatccaataaaactcacaagaaaagccatagaaaaccaaatttggatcttacaatcttggcatatttctgattctaagattaataaacaataagagaatgaatattttgccaataatatcccccattattaattaaatgtgcatagctttagacaatatgagaggcaagacctgactaatactaagcaaaagaccatgtgaaaattcctaccgcaaatggattgaatgtgatttctgtaaatcaaactcaccaaaaaaaatntattagaggaaatgaagcttgacatccaccctcctgccaccaaaggaactggtagctagcactccttaccatttccagtctcttatttntattntatgttagtgagaaaagtcttattactntatgttattcatgtcttggtagtactttgctntntaagatatagtctccattagt

SEQ ID NO: 22087 - DNA, 430 bp, Glycine max
  unsure (1)..(430): unsure at all n locations
tgttcctcggccattcctcaacctcacgcacactctgaactcagtgaaccacaccacacaacacagacaatatctcagtctcaatctcaggtacgtattttttcttatctttcttctttcttttctctccaataccttaattacattcatttgcactttgtctacacttattcttcgaaattagcctctgcttcgttgaaacccctttctctttgtttgcgaaaatcattttcactttttttttcgcacacgctcaaccaagtaaaccctaattacttactcgcataaagtattgggtatagtcagttatgaactcctacaagttgttgttgcttctttcagatttccttgtcttttattttgcacgcgctgctgttaggttntgtaggcatcaataggttgcacatttggaattggatggtaatgtatg

SEQ ID NO: 22088 - DNA, 483 bp, Glycine max
  unsure (1)..(483): unsure at all n locations
agcttatgagaaccaaaacatgacaaaaaatgtttccaacaatctaattctcacggttatatagtaaatcttgtcctattctttatatagctttatgattatccaattgattcaagagcaaagcgcaaccctgcacattcgtgtggtatcatggataattatataaaaatctttccgatcatcatcaatagaaaatacagaggttgtcggtagttaattgaacaataatatattaaaatcagatagatatctcgtgacacaaatatactgaaagcacactcaattcatggtagtaaaacaatcaaacatacaatttataggtacgagaaacaagaggaagacacacattataattacaaatatatttttaaagcacgaaacaagggaatagaacatatcaatttcacaataattctggatggggacatcaattggtccatcaaacacaatcatttagcgattaanagcaagagaacaaaatta

SEQ ID NO: 22089 - DNA, 433 bp, Glycine max
  unsure (1)..(433): unsure at all n locations
tcgtacttcttatttaataatgtatttccacccaactttgctaatgcatcaacttgttcgtccgtccattcatctagcttcagtgatagaacctataatagcttcaaattatgttaggatttctttgtttagtgtgccagttattcatgcacaaataacttggtgaaatggggacaagtggttcaatactctcccctttcatcactttagaaagcagataaagtcaacatggagtgcttccgtattaacgactaagatctagtttggataatcttcttaataaatatttataagagaagacaataaaatgaatcgaggaagtaaaataaattaagtttctctcataagttaaaattaatttatgcacctcaactctntctaaagctccctcatctaactntttttataagtngaagttcataagttattttta

SEQ ID NO: 22090 - DNA, 411 bp, Glycine max
  unsure (1)..(411): unsure at all n locations
agcttgagccaaaatcctgactcaccataaaccttaccctcggaagcaaaaaagaatagaagggaaatttccaatcaaagaaaagagaaggaaaatttccaatgaaagagaaaaaagaaaagaaaggaaattcccaatcaaagagtgggagaaagaaaaaagaaaaggaagaaaattcccaaccaaagaatgggagaaagtaaaaaaggaaggaagctcctggtcgaagaaaccagaagaaatgtgcagagaggtctttggaccagacgatatctgaacagtacagaatcgtcactaaatgaacaaaaaggaaggaaaggaaaccacgacctanaatggtcttctccctttaattaccaaccaaaatcccgtgcgctagcgactcttttttctcgccccgcactanacaaa

SEQ ID NO: 22091 - DNA, 429 bp, Glycine max
  unsure (1)..(429): unsure at all n locations
tcgaagggaagagagacaccaatcacgaggacatagcatggtcttgaaagaggagttagctgtttgctcaaggtccaaaagaaacttgtctcaacgtttatgcgagacagagaccaacatgctagccatcgtcagcaagtaccaagaagaactaaatctagccacgacccacgagcacaaagtggtggacgagtatgtccaagtgtacgcggaaaaggaggctagaggaagggtgatcgacgcgttacatcaagaggcaacaatgtggatagacctatttgctcttatcttgaacgggagtcaagagcttccccgattgctagccaaggccaaggcaatggcagacacctactccgcccccgaggagatccacggacttctcggctattgtcagcatatgatagatntaatggcccatataattagaaa

SEQ ID NO: 22092 - DNA, 393 bp, Glycine max
agcttagccctagaggggatggaccttttcagggtttggagaggagcctataggttggacctcccggaagagtatggagtcagcaccacttttaacatttctgatttaattccttttgcaggtggagttaatattgaggaggaggaactaacagatttgaggtcaaatcctcttcaaggggaaggggatgatgcaatcctccctaggaagggaccagtcactagaaccatgagcaagaggctccaagaagattgggctagagctgttgaaggaggccctagggttttcatgaacctcagggtagatttctgagcccatgggccaaggttgggttttccttgccttcagaggaatgcatgtcctcgccttcagaggactacacgtcctcgacat

SEQ ID NO: 22093 - DNA, 442 bp, Glycine max
tcggaagaaagtgatgaggtacaagccctaaaggcagagcttgaaagagcccgggtagtcgaagagaagttcaagtccatagccatcaaagtctgaaaagagtatgatgaactaagggacgtcaatatggccacagctgaagccttggaatgagaaaccaagaaggcccgaaaggaagaacacgaccaaaacaagttttgaggggctttatagggcagcaatagtgagctcaagctccgaagaggtgaaaggaatcatcacgggtcaaaggcatgatcttgaaggacgagctaaaggtttgccttatgtcgaaaagatatttgtcccaacagttaagcgagactgaagggaatatgtgggccatcatcgataaaagagaagctaaatctagcgacgactcacgagcaaaggctagaggatgagtacgccaagatatcagcag

SEQ ID NO: 22094 - DNA, 463 bp, Glycine max
  unsure (1)..(463): unsure at all n locations
agccctttgaaacaaactttgctactggtaatcgattaccagagagtaaaaactctttggtaaaagcttttgtgaaaacttcatgtgctactcaatgttttgaaaaactttttagtacttatcttgattgagtcttctcctccttattcttgaatcttgagtnttgaatcttgaaatcaaatttctcttgattcttgaattgttcttgactcaatcttgaaatcattctcttgggaattgttcttgactccatcttgaaatcattctcttgggctttttgtcatcatctttgttatcatcaaaacaacttgaatcaatcttgattcatcatcatcatgaagcttacttctacaaatggaggtatttataataatttcatctccatctcagatggaggtatctatcatataattcanaattatcaatntatgatatgaacaatacaacattgacaattacactt

SEQ ID NO: 22095 - DNA, 382 bp, Glycine max
  unsure (1)..(382): unsure at all n locations
taaggggaacatgtatttgttcttgccaaatatcagtttgattatcaagaataacattagtcttattttttaggctttgcattgaaccttttaacatttatcatgttcctggcattttctacttattttgaattcctaaatatatagtgatttataagctcctgtcgcgtaattatccagtttggcacaatttctgatagcaaatgtttcgcttgcccttctgttgctctgtgtttgtgcaagttcctgtctctgagtggtgaattggacaaatatttangatatgcaagattatggattagacataaacacaattagcaaattgcttcaagggtttatgaatngagtttaattgatatccatatgatgccatcaagtgatc

SEQ ID NO: 22096 - DNA, 440 bp, Glycine max
agcttgtcaacttatatatcagtgaagtgattaatttacataggatacccactagtagacactcgttttacttctagattttgggtaagcttgcaagaagccctaggtaaaaagttgaagcttagttcagcttatcaccctcaaacagatggtcaaactgagagaaccattcagtctttataagaccttatgagagcttgtgtaataggacaaaagggtatttgggatgagtatttacctctagtggagtttacccacaacaatacttttcatgctagtatacatatggctccatttgaagccttatatgggaggaagtgtagaacaccattatgttggtatgagactggtgagtctcttttgatagtgttgagtttggttgcatccaagtcacattggactgtaccaaacaaagttaaatcctgaggttttgatgtaac

SEQ ID NO: 22097 - DNA, 420 bp, Glycine max
  unsure (1)..(420): unsure at all n locations
ntgcatgtctagggtttctagacagagaaaggtccaagttccagagagttttgagagattctgttgtgtgaagatctgcagagaccagagcttgaagcaggagccggtttgagagcttgagatgagtttgtgagtgattgtgagatcctagaggtgaaggagacatcctcaccacttgtattttttcaatctttcatcttgttcttctctttgttgttaagaaggcttcttggtatggaaagctaaatcatatgttggatcttccctgtaggtacttgatataaatatatttctatctatttaatgatgttttgtgtgttctctatgctatctgcttttcattcanatatgcctttaccttgatcacgtagatgcatgctttgttagggtcattcaacagtggaaattggtctgactcta

SEQ ID NO: 22098 - DNA, 453 bp, Glycine max
  unsure (1)..(453): unsure at all n locations
agcnttttgcaagacctatgggaagaattgggatctagctatgatagaagtctctattgaagccattgcaaccctcacttagtattacgatcagccactaagatgtttcacgtttggggactttaagttagtaccaaccgtggaggagtttgaagagatcttgggatgcctgctaggaggaagaaagccatatcttttttctaggttctatccctccttggcaagaatagccaaggtagtcaaaatctcagcacaagaattggaccgagtaaagcaaaatagaaatggggtggtcagaataccgaggaagcacttggaggagaaggcgaaggctttggcggatcaaggtgaatgggcttcattcattgatgtcttggccctattggtatttgtagtcgtcctttttccaaatatggatggattagtagatctagtggcgatcgacaccttcct

SEQ ID NO: 22099 - DNA, 414 bp, Glycine max
tgtccttggtttagacatgattgatacatgatttgggacttgtaggattcgatttgggaaaaattggatgaaggcaagagtggttttcgatatctgcactttatgcagaattttgctgttgaaatgtgcagcaaaattttgtataagtgcagaaaaatgcttgtgtatggctggttgtgaaaagggtagtacatatggggttctggacattttctagcagatcccaacggtcaaaatgtagacttatatactagagacttccagtaaaatttttgatcgatccaacggttaacgaattggaacgaaggaaatattactggggtatttgtatgtgaaaagctgtgattttgagttgtgttttgggcagagttttctgcctttgccctgggtttgcttggtttgttagtccatgat

SEQ ID NO: 22100 - DNA, 366 bp, Glycine max
agcttctgcgtctttggcaaaaacatgtgataaacttgaaattgtgtacgttttcaaattggaaccagacacgcacttgtccatctcggtaatctatagttcctgcctgatacttacatttataaatattaagaaattatactggtagttggaaatctttttatttacaaatctaaacagatacatacactgggagttttatatgggaaaaaattagagtgaaaacatgtcaactgtggatccacgagtgtagtttctataaatctgtgattataaacatggtataggtcagtccgtgcaatgtagtccattaaaaggaatcattcttctgtcattaaaaggaaccattcttctgttatgcgtctc

SEQ ID NO: 22101 - DNA, 417 bp, Glycine max
tgctcaagtgatgaggatggtacaaatcttataaggagtattttgaccatatccctaagccaatatgaaacatcttaactgtaaccaattaagagaaatgaattttgattttctctgttatgatattattgtcgacctttttctttgttctggtctttaagtttaaatttcttgcttttttttttggaatcatggagaaaaggagttgagagaagtatctatcaatcttcaaattttttgaaaagaacgtcaaagatatcgagataagaaaattttttccaagcatctcttctaattattttatgcatgctgggaaaccaatttgtatcctttcatgttcaaccccaatagagggcataatgatcctttctttaaatggaaagggtttacttgtatgtgaattcagagtcagactat

SEQ ID NO: 22102 - DNA, 435 bp, Glycine max
  unsure (1)..(435): unsure at all n locations
agcnttgagaaccctaagaagaagcctctattccctcgcgccttgagttgttttctgtgcgttcttgtctgcacaacaacactcatatcaggaggattcctccttcctcttcgacaattcccactacggccttgagggcgaggcaaaggtaacgtgggacgagaagtttcgagccggggctgagcaagtggtgttcagagaagagggctcgaaggggaaggaggatgagaggcagagaaaggccattgtgaaggcccttctggaagccgcgatggacgaggatgaagacgaagaagaagacgaagaagaggaaggaaaatgagtgggattggtgaaggaggaggaccaatagtctggtatgatatattntacttggctacatgctatagtggtataatattctctgtgtagtgttctatatacatccggctcatg

SEQ ID NO: 22103 - DNA, 418 bp, Glycine max
  unsure (1)..(418): unsure at all n locations
taagaaacagttagaggagctcttagggaaacaatttatgaggcctagtgcatcaccctgnggagcgacagtgttgttagttaagatgggaccatgaggctatgtgtagactattatcagctgaacaaggtgacgattaataataggtaccctttgcctatgatagatgacatgatggaccaaatagtgggggcttgtgtgttcagtaagatagatctcaggtcaggtaccaccatattagagtgaagtctaaggatattccgaagacttcctttaggacccattacgaccattatgagtacttggttatgccttttggtgtgaccaacacccatggtgtgttcctggactagttgaataggatctttcatccctacctagatagttntctagtggtcttcatagatgataccttggt

SEQ ID NO: 22104 - DNA, 363 bp, Glycine max
  unsure (1)..(363): unsure at all n locations
agcntttgacatgactggtctangaaagatgagattctttcttggcattgaagttttgaagaaatcataacggattctcttgtgtcaaagaaaatatgccactgatatctggaagaagtttgcaatgtctaagagcatacttgtgaaaagtccaattgtttcaggctttaaaattattaaagatgctgatggcgcagctgtggatgacacttatttcaagcaaattggtggaagtttaatgtatcttacagctacaaggtcagatataatgtatagtgtgagcttaattagcagatatatgccaaaaccaacatagttgcatttacaagctgctaaaagaatataatgtatttaaaggaactc

SEQ ID NO: 22105 - DNA, 372 bp, Glycine max
  unsure (1)..(372): unsure at all n locations
ntattactgttattgcataaaaaaagaaaagaaaaganaagaaacacaaccattatattgctgatcttctttaatataacttttaacatgattggtgattggataggattaaaatactntatatcataaggcataggcaaacttatgttgtatggagtgtaaatatacacccttgactttcaaaaaatacaaatatatatatatatatatatatatatatatatataatgttattatcattctgtccccgctatttctaataattgaatacgttgttcctaattttttagtcagggtgcanatacagctgctaactttaaaaaaatgtnctatatatctaggctatatttcttgcctctctattttataatt

SEQ ID NO: 22106 - DNA, 219 bp, Glycine max
  unsure (1)..(219): unsure at all n locations
agcttganatgcatcgattttatgagtgatgaacaatgtgcaagtatatcttgaataatcatcaactatgacgagtgcataataacttccaccaaagctcatgactctagatggaccaaacaaatctatctgtcgtaattataaatgttgagtaggtgaaacaatgttctgggatataaacgatgctctaatttgatatccttttgacatgcatcacat

SEQ ID NO: 22107 - DNA, 372 bp, Glycine max
tgtggtagagcttgcaagagtaagattaagaagtggcaatgaaaatacttgtaactctgttaagttatcggaaactcggtgggttaccaagaacgagatgtggtctcgggtttaggatgaaccaacataattctgtgtgtgcttgtctctattattttaactgacaaatgatttgaatttgattttggatcttatatgattgtttgttttacaaagaaaactatctttctcgtcatctgatatagtatgatctctaagtgtttttaggtctatttacatcatacgataatcctatttttagtcttagaaaaagtttagaatttctaaaaacataattcaactccccttcttgattatttgctctatagttcc

SEQ ID NO: 22108 - DNA, 480 bp, Glycine max
  unsure (1)..(480): unsure at all n locations
agcttatacggcctaggatgtggttntgtgactaaattcaatttaaacacaagtcttgcacttgccacattggtacaactccctccatcaatgatcaccatgcaaactttgtcattgatcaaacatctagtgtggaaatttttttctctttgactntcctccatagacttcaattgatggccaagtaaccgtctaatcatcaacaattctccctccagtgttttctccacttcctcttcatcatcctcactctcttctcccttttcaacttcggactcactaatatactctccatctctaagaatcatggctttcttgttagggcactcatatgcataatgtcccaagccttggtgtaacatcccattttttcgtatataaaattntagagaataatgatgttttataattaaataaataaagaacaatagttataataaaataatggtttgagagaaaataagaagagtattttattat

SEQ ID NO: 22109 - DNA, 440 bp, Glycine max
  unsure (1)..(440): unsure at all n locations
atactaagcttatggatttctcataagcttaatatcagaaagggacccaatattcatgagtcaattctagcacgagcttttcaagttgtatgggactaagctgcgtatgagcactgcttaccatcctcaaagtgatggacaaactaaagtgcttgattgagttttggaacaatatttgtgggtgttagtgcatcataagccatcctaatgggataagtttttgtatcttgctgaatggtgctacaaccccactactcatttagccactaatttaacctcgtatgaaattgtttatggtaagcctcctcctagtatttccaattatcaagctggaacctttgccgtggaagcaattgaattttttctgactttgcgccaagaaacctttcacctacttaggaagaagcttgaaaaggcctangaacatatganaaagaatg

SEQ ID NO: 22110 - DNA, 455 bp, Glycine max
  unsure (1)..(455): unsure at all n locations
agctngtccgaagggcatggctatctccagtttcctgaanatatctaanaatctcgccaaatgacggtccttctccttcttggaaggtaccacaggatatggtacttttgcagcttcattcacagctttttcacttctactcttcttttcattctcattnttttcatctttttcaattttttatttcctttttatttttctacttctttttctttntcttggtcattcaattcttttttattgaccattatttgtttctctttttcctgattatttttacctctcacatcatttttccttccatcaatacctttttcttcaacaactntcttcttgagtccaacactcttctcttcctcattctccacaaaccttttacttcttgtcatcaccaacttgccaagctgagtttcagttcttntaanagcttgtgcatngaatctacagtatctatg

SEQ ID NO: 22111 - DNA, 438 bp, Glycine max
ctcagcttctaaggaagctacctagtctataaatagaagcatgtgtaacacttgttgtaactttgatgaatgagagtcttgtgagacacaactcaaagttcaacttctcttcctttttcttccttcaatttcgtgctcccccctccctctttctctccctctttcttttcctccattgaagtatcctctccaagcttcttatccaaggctcatcttggtggtgaagctccttcttccatggcttattccttaatggatggcgcctcctctcacctcctttcctttgtcttccgctgcatctccatggtggaaaatcaccattaaaggaccccattgaagctcaaagatccagcctccatagaagccccacaagcaagcttccatcagcatggctcctcactaactcaatgtgtggtgctacaagtatagaacaatata

SEQ ID NO: 22112 - DNA, 478 bp, Glycine max
  unsure (1)..(478): unsure at all n locations
agcttcgaactacatgannattttttgaacgaaaacgaggaccacacacagtgaanaagctagaagtaatattcatgagtcatagtatacccaaatatatattcctctaactntaactcccaaatatcattcacacgattcttccttttccatttgcatttacgttcgcattttggtgaccatatataagaagggtgaaaaagatgagtggatcaatgtgtagaaagatgttcactacgcaagcagctcttttttgctgcataagccttttggcaacaactttataacaaatctaatgggcctaggggttattacaaatcaattataataattctttataaagaacaagggcatttnttnttctgcttcaatcatacatcatcactcctaccatgtgtgtgcaattctcatccattcattcacaaccactggctaaccctagctatatgcacantttgctccctntattccctttagt

SEQ ID NO: 22113 - DNA, 432 bp, Glycine max
  unsure (1)..(432): unsure at all n locations
atcactaactgattntctccactaattgggcctcgacactaagtttttttaaatttcaattgccaacatctatatatgatagttgagatttatatttttatatcatcatttttaaaaaaaatatttttcattataattntaaatgttttattttaaaatttattcaatttttttgttaatttaatttttctctatattttagaaataaagaaaagaaggatttgtacgtgcaacgttgggtagaaaacttgtattatccaattggcaacgatggcgtacgtatatcgcgtgcatataatttttgctgattaattaatgtataaaggcaaaagagtttttcccttttaaacatgttctttaaagaatagactaattaaaggcaaatatttagaatattatagggccactaagaaactctagctatgttcatat

SEQ ID NO: 22114 - DNA, 393 bp, Glycine max
agcttaagagaattgaaagaaataagttgtatcgtattttaattagctctcaacttcaaaattacaagcttaagagatttgaattcctcgactactggattggattagatataaatagtgttgatgatagaatacaaaaaggtaattatttgaaaatattgaaatttgtgaattgtagcgtatgtaagagagaaatgaggtgacagaggcagcatgaatgaattgtcgcgaagcagagtatgagtatgagaggaaggttccgcggaggaaatgagaatgatgaaaaagtggtgaagtgtgtagagagcgttagagtgatagtgatggggattgcagagaactcaaagggtctggttcttgctgtggcatcgggtgtgttcataagagcaagct

SEQ ID NO: 22115 - DNA, 435 bp, Glycine max
  unsure (1)..(435): unsure at all n locations
ntagagctttatgtctatgattgggagcaggtttatgtctatgtctatttctaaaagtttcatcttttactttccaatgatgcatttgaattgaatattatttttgtacacttatgttgggaagcatgacaagatgggtatgaatatggttcctttgaaagaacttttgcctgaagagcctaaagtttttactcttgacctcctaaaaaacatggatcctaatgatgcccaaaatgagaagtctcgtggacaaattgttttggaattgacgtataaaccttttagagaggaagacttagcaggttttgatgaaacacaaccaatacaaaaagctcctgaaggcactccacctggtggtggtctacttgtagtcataatccatgaagctcaagacatagagggaaagtaccatactaatccacatgtacgtcttat

SEQ ID NO: 22116 - DNA, 425 bp, Glycine max
  unsure (1)..(425): unsure at all n locations
agcttgcttgtggagcttctatggaggctggatctttgagcttcaatgaggtccttcaatggtgattnttcaccatggagatgcagcggaaggcaaaggagaagacgataggggaggcaccatccactagggaataagccaaggaagaaggagcttcaccaccaagaattgccttggataagaagcttgaagaggatgctntaatggaggaaaagaaagagagaaggggggagcacgaaattgaaggaataaaagaaggaaagaagtggaactttgaagtgtatctcataagactttcattcatcanagttacaacaagtgttacacatgcttctatttatagactaggtagcttccttgagaagctttcttaagaaaacttccttgagaagctntcttaagaaaacttccttgagaagtttctt

SEQ ID NO: 22117 - DNA, 430 bp, Glycine max
  unsure (1)..(430): unsure at all n locations
tgctctaaatntacattgatgtttgtatttattggaggaggttgtatgccattttttgttttaagggtagcatttcttggtaaaactaactttccaaatgtttgccttcgcaggaatcgccccgaggaagcttgcctcaaagaggtccaggaaggacaagacggccgaagggactagttccgctcctgagtatgacagtcaccgctttaggagcgctgtacaccagcagcgcttcgaggccatcaagggatggtcatttctccgggagcgacgcgtccagctcagggacgacgagtatactgatttccaggaggaaatagggcgccggcggtggacatcactggttactcccatggccaagttcgatccagaaatagtcccttgagtttatgccaatgcttggccaacagaggagggcgtgcgtgacatg

SEQ ID NO: 22118 - DNA, 472 bp, Glycine max
  unsure (1)..(472): unsure at all n locations
agcttcaacatcagaccacttccagggtgctggaactacttcgcatggacttgatggngcctatgcaagttgaaagccttggaggaaagaggtatgcctatgttgttgtggatgatttctccagatttacctgngtcaactttatcagagagaaatcagacacctttgaagtattcaaagagttgagtctaagacttcaaagagaaaaagactgtgtcatcaagagaattaggagtgaccatggcagagagtttgaaaacagcaagtttactgaattctgcacatctgaaggcatcactcatgagttctctgcagccatcacaccacaacaaaatggcatagttgaaaggaaaaacaggactttgcaagaagctgctagggtcatgcttcatgccaaagaacttccctataatntctgggctgaagccatgaacacagcatgctatatccacaacagagtcacacttagaag

SEQ ID NO: 22119 - DNA, 386 bp, Glycine max
  unsure (1)..(386): unsure at all n locations
tgtccataaaaataggctnttgaagtttgtcatttcatttcctcactaagtaaaatgggtcatttttaaggtccaacgccttaaaatgatcacttcttaaagtaaaaaagaatcacttgataagaaagaactatgtaggtctgattttctcatcccaaattgaggaatacgtaggagcaaagggaaacacccttgtcgaccacaaaaaaggaaaaaatataaaaaggatataaggacataaaaggggacgtaaaaatcaaagtcacgtttgcacattcgattaaaggctgccgtcccttgngacggacgtgtggggtgctaataccttccccgtgcgtaaatacaactcccgaacctttcaacttaaaagttcgtagatcgcgtct

SEQ ID NO: 22120 - DNA, 411 bp, Glycine max
  unsure (1)..(411): unsure at all n locations
agctntgagccaattcaaacgacaataactntntactcggatgtctgattgagtcccgtaatatatcgagaccctcgaaattgactgttgaagctctgagccatatcgagacactcgaaattgaatgttgaagctctaagccaattcaaacgacaataactattttctcggatgtcctattgagtcccgtaatatatccagacgctcgaaattgaatgttgaagctctgacccaattcaaacgacaataactttttactcggatgtctgattgagtcctttaatataacgagacgctcgaaattgaatgtcgaagctctgagccaattcagacgacaataactttttactcggatgtttgattgagtcccgtaatatatctagaccctcgaaattgaatgttgaacctctg

SEQ ID NO: 22121 - DNA, 402 bp, Glycine max
  unsure (1)..(402): unsure at all n locations
ntgagcaaattcaaacgaagataactntatattcggatgtgcgattgagtcccggaatatatcgagaggctccaaattgaaaacggaagctcatatcaaattcaaaggacaataactntttactcggatgtccaatagagtcccgtaatatatcgaaacactccagattgaaaatggaagctcgtatcaaattcaaacgacaataactttttactcagatctccaatagagtcccgtaatatatcacgacgctccaaattgaaattggaagctcgtatcaaattcaaacgacatttacttttaacttggatgtccgattgagtcccgtaatatatcgcgacgctccaaattgaaagcagaagctctaagcatattcaaacaacaataacttnttattcggat

SEQ ID NO: 22122 - DNA, 470 bp, Glycine max
  unsure (1)..(470): unsure at all n locations
agcttcatgatgaatcaagattgattcaaggagttttgatgataacaaagatgatgacaaaaagctcaaaagtcaagaacacttcatgataacaaagatgatgacattcaagaatgagttcaagattgagtcaagaacacttcaaggttcaagaggaaattgatttcaagaatcaagaatcaagttccaagaatcaagatcaagattcaagaatcaagaaaagactcaatcaagataagtattaaaaagttttttcaaaaactgagtagcatatgagtttttctcaaaacctttttaccaaagaagttttactctctggtaatcgattaccagattattgtaatcgattaccagtagcaaaatggttttcataaagctttcanactgaatttacaacgttccaattaatttcaaaatgctgtaatcgattacaagtattcggtaatcgattaccagtgtctttgaacatt

SEQ ID NO: 22123 - DNA, 422 bp, Glycine max
tcaagaattatggcctcatcaaactacttgtttcccgagggaaattctataaatagacctcccatctttaatggagtgggttaccactattggaaaaattggaaaacccgcatgcaaatatttatagaggcaatagatttaaatatttgggaagccatagaacaaggaccttatgttccctctatagtggccggttgtgcaacaatagaaaaacctagagcagattggattgaggaagaaagaagattagtacaatataatttaaaggccataaatattattacatctgccctaggaatagatgaatactttagggtttcaaattgtaaaagtgctaaggatatgtgggataccctacaagtaacacatgaaggcacaacaaatgttaaaagatctacgataaacacattaactcgtgaata

SEQ ID NO: 22124 - DNA, 396 bp, Glycine max
  unsure (1)..(396): unsure at all n locations
agctntgagccanaatcctgactcaccatanaccttgacccagggtgagaatgccaatccttaccctcggaagcaaaanaaaaggagaagagaaggaaaatttccaatcaaagaggaagcataaaaaggaaagaaaggaaattcccaatcaaagagtgggagaaagcaaaaaggaaagatagaaaattcccaatcaaagaatgggagaaagaaaaaaagagaaaagaaggaaagaaagctcctggtcaaggatcgaaagaaaacagaagaaatatgcagagaggtctttggaccggacaatatctgaacaatacagaattgtcaccaaatgaacaaaaaagaaggaaaggaaaccacgacctagaatggtcttctccctttaattaccaaccaaaa

SEQ ID NO: 22125 - DNA, 421 bp, Glycine max
  unsure (1)..(421): unsure at all n locations
ntctcccaagtcctaaatgacatttcaagctaggattaactcactttaacctccatttaccacagaattcagacttaaccttccaactctcaaagcctcactctttttccactcataacaccacattctcactttccaatcctaggttaactctacatttcatctctaacagttttccatgggcaaatctcagcatacaaacatcacaaacatcatcacaaaaccctaaaacagaatgggtatgtctaactcatccaaacatggtaatttcaacaagctttcagcaaatgtcttcacaaataatcatcacacagcagaaacctagcaagactacccatcatatctcccanaaccccatacccacgaaatttaagagagaaagaagtccacccaaaccctaaatttcgaagtcccactcgta

SEQ ID NO: 22126 - DNA, 467 bp, Glycine max
accttgttgaagagttctcgtattgaaggaaataattgactattggaacattggtaatattaatggtattagttgttgtcgtggtcatgtttttttcctcaatgaatatagtaaaaactttttattttctataaattaggaatctagatcttttagttttcattcttattattttgttttccgccccactgctagttaatttgtctgttaattgtatgaggataatgtcatcatgacataaaatattagcaaatgacaatgttattaaaaatgtcatatcatcacgatgatatcattaaagacaaaaaaataatatatatgaaataattaaaataaaagagtgatgtatttattgaggttaatattgtatttttaataaatttcagttaataattcataattggttcaacataacatgttagtaatggttcacttgaaagaaaatagactactattaaatatacatt

SEQ ID NO: 22127 - DNA, 417 bp, Glycine max
  unsure (1)..(417): unsure at all n locations
tgaagaacgagttatcaaatgtgtntttgttgggtatggatcaatttaaaaaggttattgtgcttaccatccaccatcaaataaattttatatctctatggagatgacatttaatgagcataatttttttatgttgattctacactttagggaggaaatgaaagtgaagtgcataatcatgatgttaatatgtttgatatctcggatataaaattatattgtgaagataaattatcgtgtgaggatcattctgcaggaagtaagccaatcctaaagatggacaattcttttttggataatacagtgtcttctgatcctaaccaattggctcaatcttctccataggttcgacttgactcttcagaggtaccttctgatcctatctctgataatactaatgtagatgaaactgatcat

SEQ ID NO: 22128 - DNA, 556 bp, Glycine max
  unsure (1)..(556): unsure at all n locations
ccgcctcatcttctctctcacttctatcttcatatcgctcatcttacttttgtgttnattatctagtactgtcatgaggttttgagatattcnnatagngnnnngntttgaagcccttggagaacangggattctataagacgacctgcgggctgctagatatgaaaataatantntatttaagattcctgtgttccggggaattaatgtgttgagataattataaagtgtctatgactgattaaaatgaatacatgaattatgtatcaaggatacaaataataattcgattagatactaaggatggataatactataaaagttgaagtcaaggctatattttataaaaaatggtaaaggtacttaaaaagctatttaaaactttttatcggtagtgaatgaattttaacttataaaaataaaataactaaatatttacaaaagaatgttgagtctaaactgacatcttgggaaagtatagactcagttctccttttttggaaaacaggggggatatctatgttaatctcattcacaatttttagccaatacttcc

SEQ ID NO: 22129 - DNA, 350 bp, Glycine max
  unsure (1)..(350): unsure at all n locations
tctaaactntgtacaagaatgaagctctgataccacttgttagacaagtggcctcagatatcttaagaaggggggggttgaattaagatattccaaactgtttcccctaattaaaaatctatttcactttttactcaagttatgaattcccttaatgacaatcttcttaaatattaattcaaacgaagcaacttgaatatgaatttaaagccataataaataaaggagattaacggaagagaaaatgcacactcagttttatactggtgcggccacacccttgtgcctacttcagttcccagcaacccgctgagagtccactatcttgtaaattctttacaagtctaaca

SEQ ID NO: 22130 - DNA, 349 bp, Glycine max
  unsure (1)..(349): unsure at all n locations
agcttgactagaagtagaagttnntgaatttttntatctaaacagcatgtatcatttattggagataattatgttcagttcaaatgggataagatcatcagttacaaaactctctttatgcagttacataataaaatttggaaatcataatttttggtttaagttgaaacttntttcagctattttatgcactcagtagtataagttgtggatntaagtcataataaatgaaaaaaaattagaaaaagtttgatgtgcctagctccaaggggttgaagttggttcaggctaacactaaactctagaatcaccatattcaatgatccggtttggtgaggccacaagaaaa

SEQ ID NO: 22131 - DNA, 281 bp, Glycine max
  unsure (1)..(281): unsure at all n locations
tcaataagaaatagtcactgactcgtttgcagcctagtcataaaatgcatcaacttcttcaccaacaactcatcgatgacatgcacgagtcttccctgcaacgacgattagcaaacatcaccattaaaagaaattatatggaacccacaacctttcttaatagtacacgaaccatnntaacctaaacaagcttaaaataagcttaacctaacaaagttagtaactcactaaccaatctctttcttcacgagacttcaagcgggaagttggagggatgaagt

SEQ ID NO: 22132 - DNA, 478 bp, Glycine max
  unsure (1)..(478): unsure at all n locations
agctntagaaaaggggatttggtcaaggagatgcaattgcagataacaagttatgagcttgagtgcgtttgagagtatggaagagaaacaacactatcattgtcttatcaaagctctgattcagtttgggtagggttaaacaatccaatactcctttgcatgttcatcctaaattcatacctctttaatccaatgctagttgcagaataaatcaacaaacttgttgaaacctagaatataaataatggctttctagtgtcaatctctgcaaaacatggcatgtcccttgtaataccttgaaaattaaaactcatattgtagaaagttatgtgttgtgtgaattatagaaatataattaacattgaaaattaatttcaatgaaagtttaagtcaagtagttaatttaaaattcaattatatgcatgctatctcatgtgaataatttagtagaaaatagaatttcttanaacatgttttt

SEQ ID NO: 22133 - DNA, 432 bp, Glycine max
  unsure (1)..(432): unsure at all n locations
tcccttagcctctnttccatagactgtatgacattagagcattcaaaatgtttgtcatattatttttaattgtgtatatgcctttggtttctggtcagtggtcatgaagttgttgcttgagagttgttagtttaagacatctaatctacaatgtccaatgtaatttgtagacacttttcattntcttgtttgcatcgtgatcacgacattcgttgttggacattatagtcatcatcatcacaggtacaaatttttttcataaagttttgatgctcttttttgttaccaatgcttttataacttgttaactgtgattaataagtattgctttatatacaagttatgttcatgatgagtaaaccttagattcccatttgagattgaatacaataattcttgcagaaaatttgcattaaccattgtattgaatat

SEQ ID NO: 22134 - DNA, 372 bp, Glycine max
  unsure (1)..(372): unsure at all n locations
agcttctcgatatattatgcacatgaatcggacctccgagtgacaagttatggccatttgaattnttcgagagcttccgctgctcaatttcgagcgtctcgatatattatactcctgaatcggacctccgagtgaaaagttaagaccatttgaatttctcgagagcttccgttggtcaattttgagcgtctcgatatattatgcgcctgagtcggacctccgagtggcaagttatgaacatatgaatttctcgagagcttccgttgctcaatttcgagcgtgtagatatattatactcctgaatcggacctccgagtgaaaagttatgaccatttgaatctctctagagcttgcgttgttcaatttcgagcg

SEQ ID NO: 22135 - DNA, 431 bp, Glycine max
  unsure (1)..(431): unsure at all n locations
taaagtatgcccgagtcattcatccctatgagatgttgttgaagtattggcgatcagaattgccattccttggattatagggttgaaccaagctcatgcttttacaaaaaggttcatcaagtcaagttgaaatatggaagtaaccgtcttgcaaaattggggcaaaagatgaatcgagtcacatcactgcttcatctactgccaaacatatttaggattgttgatgtccttgttacttccagtttcactttgacaaagatgtcatggaccatgttgaaaatctaaactgattcaaccccatatcctgtgtaaaaattcgcaatacttcaactgtacaccattcgcatacatccatgcttttcattggttgcattgctcattgcattctttccttgaaaaataaaataaaataaanaatgaacttaatcatt

SEQ ID NO: 22136 - DNA, 438 bp, Glycine max
  unsure (1)..(438): unsure at all n locations
agcttcttcttcttcacgaccgtttctatttgtatctgcaagcttatcgagaccgtgacacctcaccaccttaccttgtacatgttttgcgactctttcttgtctttaacatgttgtattgaataccatgggtgagtttggggaactcgtgttcactgcaaggatctttgtttgtttgtcttgcaaggatttggttngtggaacttgtgttcgctgcaaggatttggtttgtggaagtcgtggtcactgctaggtctgtttggggtgctcacattgcagtctgtttggggtgctcagtcgtgctcgcagggtctcattntgagtaaggtgattcagattgctagttgtcctttgaatgcttaatggataggtagctaggtgtctattgtaatacgtatagcaccatggcaaatgtaacaatgttctggtttttctttt

SEQ ID NO: 22137 - DNA, 473 bp, Glycine max
  unsure (1)..(473): unsure at all n locations
agcttctatggaggctggatctttgagcttcaatggtggttttccaccatggagatgcagcggaaggcaaaggagaagaggagaggggaggcaccatccacaagggaataagccatggaagaaggagcttcaccaccaagaatgtgccttggataagaagcttgaagaggatgctntaatggaggaaaagaaagagagaaggagcttcaagttaggatgctttaatggaactttgaagtgtgtctcataagacttttatttatcaaagttacaacaagtgttacacatgcttctatttatagactaggtagcttccttaagaaaacttccttgagatgcttctttgagaaaacttccttgagaagctagagcttagctacacacacccctctaaaagctaagctcacctncttgaaaagcttccttgagaagctagagcttagctacacacacttctttaataactaagctca

SEQ ID NO: 22138 - DNA, 440 bp, Glycine max
  unsure (1)..(440): unsure at all n locations
ttcgtaggtgaaatcaggtgcagccatttcccttagagtcctctcacggngtggaggttgggccatgttctcagaatgctcaaaatcagaatgttcaaaactataatgctcaaaatcaggatgctcaaaattaccaaccacaaaatgctcagtctcaccaataataaaatgctcaggatgctcaaaaggtacaaaatgatgcctaactactctatgaaatgtcatatctatctcaggatcaaagggttgtaagtcagatggattgcctctagtcatacactacatttagcatgcacaactagttgccttcttatgcaagtaatattgtaggtttgaactacaactaccctcaaattatatccaaatgaattgaaattntatgagcaacaccctanaatcatganaagatgacacacaaatnttcaggcaaaaattcaaag

SEQ ID NO: 22139 - DNA, 450 bp, Glycine max
  unsure (1)..(450): unsure at all n locations
gcctgatgcctgatatgttttttctgatggcagtggtcctagatgcagggaagaatttctccaagaacaccctcttaaggtcatcccagctgaaaatggacctgngagcaaggtagtacaaccaatcttttgctactccctccagagaatgaggaaaagcctttagaaagatatgatcttcctggacatcaaggggcttcgtggtggaacaaacaatatagaactccttaagatgtttataaggatcttcacctacaagaccatgaaacttgggcagcaaatgtattagtccagtcttgttaacatatggaacaccctcatcaggatattgaatgcacaagctttcataagtgaaatcaggtgcagccatctccctaagagtcctctcacgaggtggaggttgagccatgttctcagcaaaatcagaatattcagaatcgcccctcaaca

SEQ ID NO: 22140 - DNA, 419 bp, Glycine max
  unsure (1)..(419): unsure at all n locations
tggtaacctattggaggctcccaacacacttccaatgaaagacctttttgttacaaaacttgaacgcaatgaaggtaagtaaattgccaattacaaaattacaaaacggtcctcaattttggtggttgttctctctttggtgatttactcaatttggagtgattcttagtccaatagctcttaagttggttggccccttgcttcttgactcaaattcctcaagggatggcaccaatcctcctttctaattccctatatggcaactcacaaacaaggagacaaagagacaagcaataaccaaagaccaaaaaaaatgaaatgaaagctaaaccaatagagttttaacaagacaaattttcaaggattattcaacaattaaagcaatgaaaagcacataanagcaagctaggactcaaaga

SEQ ID NO: 22141 - DNA, 460 bp, Glycine max
  unsure (1)..(460): unsure at all n locations
agctnggagaagatcttgaagaagttntttcttttacatgtccaactctcttgagtggcatttgtattgattgttgtattgtgtattgcatcttagtctctatcatttcatatgtgcatcatgcatcatcttgtaggagtaaggagaaagtttctaaagttagaaaatttctcctgaagttaaaactctctgttttaattgattacatccttatagtaatcgattacacaagttattttaagctagcagagaagtgtctcatattggtttaatcgattacaagcttgtcgtaattgattacatagttttttgagacaatgattgattcattcaggagtcttttctataatcgattagcatgtgctataatcgattacttctcttttaaaaagtgtttcagaagtgatcaagaacactntaattgattacattgaggatctaatcaattacattggtcttg

SEQ ID NO: 22142 - DNA, 383 bp, Glycine max
  unsure (1)..(383): unsure at all n locations
tgatgtgccatcattttcttctattttctaaaccctttntgcaccattttaattactgattggtcttaattgtcaattaattaggcaattntattatttgggcccatttagctaatttgatgttnttaatctaatttcaggaattaatgaaacattgngcttaatccggattttggttgtggacttgaagagggcaaataaagcagcgcataccttagttaatttctacttaggaaatttcgcaattntattttatattgttcagtgtttatttcgttttgggccagagtattgtaatagggcccagtgactntaagtgactctttntaaatagcagccttgggattcgtgcatggcattctgttatgctattttcattattc

SEQ ID NO: 22143 - DNA, 405 bp, Glycine max
  unsure (1)..(405): unsure at all n locations
agctngaaggcaaactggatgcattggttaacttggtaacccagctggccttgaatcagaaatctgtacctgtcgcaagggtttgtggtttgtgctcctctgctgaccaccatacagacctttgcccttccatgcagcaacctggagcaattgagcagcctgaagcttatgctgcaaatatttacaatagacctcctcaacctcagcagcaaaatcaaccacggtagagcaattatgacctctccagcaacagatacaaccctggatggaggaatcaccctaacctcagatggtccagccctcagcaacaacagcagcagcctgctccttccttccaaaatgctactggcccaagcagaccatacattcctncaccaatccaacaacagcaacaacctcagaaac

SEQ ID NO: 22144 - DNA, 355 bp, Glycine max
tgaaatgaggaagtgtagaagggtgagacttcttgcttttattcgttgaccacagagtggtacctggagatatgtcgcggggctcaggagaccttggggacgtcaggtggggtgctattgcccaaaaccatgcttgaccaatcccgacccaacccgggcatagtcagacagtgagaacctgtgatgtacctaagcaggcgagctcctggcagtcaacagataaaaggaacaaagaccacaaagcaaggaggcttgtgtggtggctggcaagctgtgaatcttgtgtgatatatgggttatggtctctggtaatcgattaccaagggtgggtaattgattacaaggcttaaaaatg

SEQ ID NO: 22145 - DNA, 427 bp, Glycine max
  unsure (1)..(427): unsure at all n locations
agctntagctngagacggagtgttagaaaaattaaccaaattttagaagagattcataatagattaagattttttatatattttttctttatttagtctttatataacatatctatatatttaactttatacaggaatcaatggacatcttacccatatcttcaaccaatttagtaacccgtgtttctttctctttttctcttccttaaaagaatcatcagctgtttcagcatttccctctaaattaacatgcagatcagtgttttcgtcatctgagattaaatccctccttttgtagggaaggtatgccaactgtaaacaaaattgataattagaaaaatgcatatacaaggaatgaattaagcagagtattgtcatcttgagacattaatatgtaaaacagaanattaaatntcttgatattaga

SEQ ID NO: 22146 - DNA, 416 bp, Glycine max
  unsure (1)..(416): unsure at all n locations
nttgagtgaaacaatgtgactcttcacttttaaatttgaatttcaacgttcaaggacactggtaatcgattaccaaaacattgtaatcgattacagccttttgaaaatatttggaacgttgtaaattcagtttgaaaacattntcaaacttattttgctactggtaatcgattacaacaatatggtaatcgattaccagagagtaaaaactctttggtaaaggttttgtcaaaaactcatgtgctattcaaagtttcgaaaaactttttaatacttatcttgattgagtcttttcttcattcttgaatcttgagtcttgaatcttgatctttattcttgagatcttgaatcttgaatcttgattcttgtttgtaggctttcttcttgagtcttgaattcttctttattcttgaact

SEQ ID NO: 22147 - DNA, 372 bp, Glycine max
  unsure (1)..(372): unsure at all n locations
agcttgtctgcaataccatagggttattagttntaaaagcattctctgtttaagaaaagataagaagggtgattcaattgttcatgccttggttactgaataacttccgttgtgcttagcaattcttttgtggtggcatcccatgctctaatgtcacaacccaatcataaaggagcctacatatatgtatataccaaaaaaaatgtacttagtatgcanaatatnattttcctcaagcaattctttatatggaaatgtctaagcaacatgtgttaannattttggtacaagttaccttagctaatgcccatatgctgaaatgagcgcgatattcttcntgtgtcatgcctccatttccaacttctagcatgt

SEQ ID NO: 22148 - DNA, 427 bp, Glycine max
  unsure (1)..(427): unsure at all n locations
tgtcagttgtgtcatgtgtattttttttaaagctatacactagtgaaatagtgatgactgatgagtcataatattctgtgatacaaatgtatataagtgcatatacaatatgcatatcataacttaaagaaaaaaataatatacatacatatatgtttaagaactaatatcacatttacactttatttgggctgattattagttntatttattttttaaataaaactagtttttagtttctaatttgaggattttttatttctggttttaaaagtttaatgtcaatcttacaattttcttaaaaaagataaaaaaaaaacatgtagggctctttacatgaagttgtgataaaaggatccagagcaagagtataataaaatagaatataaaatattttagtggcttttgtgagttaaactcatattgg

SEQ ID NO: 22149 - DNA, 424 bp, Glycine max
  unsure (1)..(424): unsure at all n locations
agcttgcacttcttcactttccttaggaatttcagcctttntcccacttagacattttagctntgggagccaagtcatcccttgcgttctagacttcaaccacttgtgatagccgccgatgacgccattgctacttcccctaagctccttatcttttcttcccactctattccacaatttacgaattttctgaagtatcttcgcattagcttcagtgaaacttcgcgcaatgaaaggcgcgatgatttcctctgacggtgcacctctcataaggtatcctaactgtcttatggccagtatgggattataattaatacaaccnctcatccncatcaaagggacatttangaatccttcacatgaacataacactcctggcctctcttctttcactatgggaacccaactgatggacgtcccgtca

SEQ ID NO: 22150 - DNA, 398 bp, Glycine max
  unsure (1)..(398): unsure at all n locations
ctagagtgagaaacanagagagcccgaaaagaagagtggggccaaaacaagttctgaggggctctatggggcaacaacaacgaactcaagcttcgaagggtcgaaagggacgagtcaagagtggaaagtttaatgttagaggataagttgaaggcttgtcaaaggtcgaagagaagtttgatcgagcagttgagtaagaccgaagagaatatgttgataatcatcgaccagtataaagaanagttgaacctagttgctagccatgagcaaagactagaggatgagcatgcaaaggtatcggctctacaagtagaaagggaagcgagagagtgatataatcattgcatggtgaagctatgaaatggatggatagattttttctactctgaatggagtca

SEQ ID NO: 22151 - DNA, 296 bp, Glycine max
agcttgcttctacatgatggtcatccgtttctaattgtttgttgagaatgttgcagttccctttgctatccgaagactatcaagtccgatggcatgcagagacgaacatagtcatctacttcccttgtcgagagactcaatgtctattgaccaaagctactgaagtctcccctactatcttgagacaagcaagtccaatagcatgcacggaccattaccattatccgcttttgtcgccttcaaggcaccaatgcttttgctgatgcacctgatgtctttatgctctttctattgac

SEQ ID NO: 22152 - DNA, 286 bp, Glycine max
tattgggcattaaagtttttgaacttcgattcaaatgcatctagtgaacacaggaagctccaactccatgaattggaggaattgtggtttcaagcttatgagaattccaagctttataagcaaagagtaaaaatttatcatgacaaaaagttgtcaaaaagaaattttcagcttggtcaacacgtattgttatttaattatagattaagattgtttccaggtaatctgaaatccaagtggttcggaccattcatcatcaaagaagttatgccacatggagcagtga

SEQ ID NO: 22153 - DNA, 397 bp, Glycine max
  unsure (1)..(397): unsure at all n locations
agctngaaggcaaactggatgcgttggtcaacttggtaacccagctggccttgaatcagaaatctgtacctgtcgcaagggtttgtggtttgtgctcctctgctgaccaccatacagacctttgcccttccatgcagcaacctggagcaattgagcagcctgaagcttatgctgcaaatatttacaatagacctcctcaacctcagcagcaaaatcaaccatcgcagagcaattatgacctttccagcaatagatacaaccctggatggtggaatcaccctaacctcagatggtccagccctcagcaacaacaacagcagcctgcttcttcctttcgaaatgctgctggcccaagcagaccatacattncctcacnncatccacaacagcaacaacc

SEQ ID NO: 22154 - DNA, 381 bp, Glycine max
tggaatatttcaagcaagagtttggagtgcacattgaagttacaaagatgtggagagccatgaaagaagcaaagcaattagtggaagggaatgagaggaaacaatatgccaaagtatttgattatgcacatgaattgttgaggagcaatcctggatcaacagttaagatcaacacagtgccaagtccagaaggtccaccacaatttcagaggctatatatttgtcttgctggctgtaagaaggggtttgttgctggatgtagaccattcataggtctagatggatgtttcctaaagagtgcatttggaggaaacttgctctctgctgttgggcttgatggcaataaccacatctatgttattgcttatgctgttgtggaca

SEQ ID NO: 22155 - DNA, 467 bp, Glycine max
  unsure (1)..(467): unsure at all n locations
agctntatgtccgatcgagtagagatataagcatacataatactcctaacaacaaatgcatacaaaattacttccgatcgagttactttgatatcttccttacattcaagctgcaaagctttatgtgtgatcgagtacaaatataagcatacataatacttgtaacaacatatacacacaaagttactttcatctgttttcgttccaaatcataaaaaagaaacaatacttttatcattaatttttctttacttttttttattatatcaattaatttatgttgtgcacgttctcttctctttctatttctttntgttctataaatatattaaatatatacaaatacaatttctatatgaacagaattttttttgcctaataagtagagtacttttttgtagattacaattagtgtctaataagtttaataatttaaaatntaataatgaacagaaaagagcacttat

SEQ ID NO: 22156 - DNA, 376 bp, Glycine max
tgtcctcatcttgaacaacatttttggaacccaatataccctctaagtatcgaacatcatcatcattcaactttgagaatctggggttcctttgaaccgacccagccatagaaccaaagcatttgtgccgaattccaacaccccattgtttggtttccgcgaaatttcttgaaggattgaaaaaagacaaaacttgacgatgatccccgcgaacaatattgctcggtaactgcgtgaatttttcatcaaaagctgtccccgaagttaaccgaggacatgacgttgctgaaggaagaagaggtgagttcattctgcgatggaagaaggggatgaaggagcgtaagaggaatctgctattgtgattcgccattgtctc

SEQ ID NO: 22157 - DNA, 460 bp, Glycine max
  unsure (1)..(460): unsure at all n locations
agcttatcgtanaaaaagttaaactaatttttattatagattaggcacccataatataaatccttttttcactatatgaaaaatttatatatatatatatatatatatatatatataaatatatatatatatatatataattaatttttacaataattattttaaatattatacgtattacaatatctcattactttacattgtaaaacattttacaatgaaaaaactcctagattctataaatattttcttttagagttacaattttattacacggcaactgacgtgtcggagttggtaacattgattttctttnttttggaagatgtgtgtggaagttacgtttagattgaaaatattcttaaataaaaattctattgtgagggaacgcgtnttcaaatatttttgtattgtagtaatttgtatgggtccaaactgggtttcttggtctaagaacatg

SEQ ID NO: 22158 - DNA, 434 bp, Glycine max
  unsure (1)..(434): unsure at all n locations
tattntgatcaaatcaaattataaattactagagtgatataccaaatatattcatagttttttaaaaaaatgaactaatatttcgaaaggaatatttttttatggttagcaataaacaattggcaaagaaaaggaccggaaggtgtagtataccatgaatatgaaatatgcctttatcaagcagacagcagtgtctatatttaataatccagatatgatgatatatatccactcttcttaaaattatggtgtgcttcattatcaccacaatcatcgattgtgaagtggggacaaaacctagttttatttacacaccttggaagaatctttattgtccatcaaatttagccatcattacagagcaaagtagaaaacagctnttcaaaacaatatcatatctatatatccaatctctcttacatatccttactctg

SEQ ID NO: 22159 - DNA, 447 bp, Glycine max
  unsure (1)..(447): unsure at all n locations
agcttgtgactcacaatcgtgctaagccatattctgcccctcccgggaaatatggaaaccattctggaggacagaggaccagtggaggacttcaaccagttggtgggagttctcagccaattaacagggtgtctcagtctgcgggtagaggtagtggtggtagtggtgctcctgctattgttactacaccactcangtgtgggaagtgtggtcggcttgggcatattgcacgtgagtgcacagatagagaggtgacttgttttaactgccaaggtaagggccacctcagtaccagttgcacatatccgaggagggagaagaggagtggaagtctgaataatcagagtggacgaccaaggaccacagggagagtgttttctcttagtggtgctgatgccgcacagtctgatgaactcatccaaggtatgtgtttcataagtcaagttc

SEQ ID NO: 22160 - DNA, 437 bp, Glycine max
tgagatgaggaagtgtagaagggtgaacttcctgcttttattcgttgaccacagagtggtacctggagatatgtcgcaggggtcaggagaccttggggacgtcaggtggggtgctattgcccaaaaccaagcttgaccaatcccgacccaacccgggcatagtcggtcagtgagaacctgtgatgtacctaagcaggcgagctcctggcagtcaacagataaaaggaacaaagaccacaaagcaaggaggcttgtggtggctggccagctgtgaattttgtgtgatatgtggattatggcctctggtaatcgattaccaagggtgggtaatcgattacaaggcttaaaaatgaagacaggaggctaagatggtctctggtaatggattaccacggggtgtaatcgattaccaggcttgaaaacgaggtcaggaagct

SEQ ID NO: 22161 - DNA, 482 bp, Glycine max
  unsure (1)..(482): unsure at all n locations
agctntcataagtgaaatcaggtgcagccatctccctaagagtcctctcgcgaggtggaggttgagtcatgttctcagtatgaaaattagtaatggaatgctcaaaatcagaatattcagaatcaccctcaacagaatgctcagaatgcgcaaaatgctcaaaatgaccatgatgcacactatgcctaactaatctatganaggttttatctatttcaggatcaaagggttgtaaatcacctggatttcccctagtcatgcgctatatgtagcaaataatgtgtttctcaacaagcacctaacaagggggtaaaactacagctatactcaaacgatatcaaaatgagctgaaattntgtgaggaacaccctanaatcatgaaaagatagcacanaanaatttcanacaaaaattcaaagtctaactatgaaaattacctaagcaaagtttagaanaataggacaataatacttganaaataa

SEQ ID NO: 22162 - DNA, 434 bp, Glycine max
  unsure (1)..(434): unsure at all n locations
tggaggactgtatgtttcgcagctacatggtctctatctggcttgttagaaatgatgtgcaattcaatagggaggatgcagatgtaaataaagtggtggacctaataatgtacagatcttggtcttggcttaaatctaataagttggatgatttcagttactctttttatgtatggtcaaaggaaccgagttattgcctagaaaatatgcagaataagagttcaatcggtacagtatacattgatgcaggggagacatgcaatttttataaacttgagatcaagaagcataagaaaggtatgaattagaggtcactattctggaactggggagcaagaaccactattctgaagaattagaggccaaacgtcttgaattgcatctccatcttgcaaaatgtgaatcatccttaaatattnngttctgttcaatat

SEQ ID NO: 22163 - DNA, 413 bp, Glycine max
  unsure (1)..(413): unsure at all n locations
agcttgtggaaacccaactgtcttctatacactctctttngncacaaacagctcctagcacacttccttctcaaactaaaattaacccaaagaagaaacatgtcagggctataatgacaagaagcaagaaagctagagagaatatgaagcacaatgggggatccacttcagatgccacagaggaggttcttactaaagagaacctagtgccagaaaaaaaggtagaggaaagggagatactaacatctcccaaggtaagtattcctttccctcaaagggtaaaaaataagcaataagatgagcagtttaataagtttattgatgtaatgatgagactgcacatcaacattcctttaattgagattatttcacacatgccaaaatatgtcaagtacttaaaagacatactttat

SEQ ID NO: 22164 - DNA, 293 bp, Glycine max
  unsure (1)..(293): unsure at all n locations
tctatagaaggttcgttcctaatttctctacaattgcatctcctctcaatgagctggtgaaaaagaacgtggcatttacctggggtgagaaacaagagcaagcctctgctttgctcttagaaaagcttacctaagcacctgttctagctcttcctgacttttctaaaacctttgagctagaatgtgatgcctctggagtgggaggtggagctgtattgntacaaggtgggcaccctattgcttattttagtgaaaaacttcatagtgccaccctcaactaccccacctatgat

SEQ ID NO: 22165 - DNA, 381 bp, Glycine max
  unsure (1)..(381): unsure at all n locations
agcttactaactaattagaccaacccanataaatntaacaaaataaacccaaaagaaaaataaatgaaatatacaaataaaaagtaaaaatatcacaaaataaaaaaatcctcaatatttagcgggataaaatttcctaaagcattaacatgtgtcttaataaaactcagaaatattaagttaaataatttagtaatgaaaatatgtttttttctcacaaaaaatagttttaattcttaaaattagtaaaaataaattattttaattcttatttttcacttccctaagaatttaaatgaaattttcgtaattttgagtattaaatgaattgacattncgtattttagaaattgatataatataatgtgctgctactcgttt

SEQ ID NO: 22166 - DNA, 409 bp, Glycine max
  unsure (1)..(409): unsure at all n locations
ntacattaattatttgaatagttntggcatttaaaaaacttttttattacaattttatatttttaacctaaaaaataaatttttaaatcaaattcttggcatgaacattttttattgaatcaagtaggagaatttatactttntttgtcagcaattntttttaatataaccaaaaaaagcaaagaagaatttacgcttaacttaggagaatgaacatgagacttaactaatttattgaatatgttattttatctaatataacatgaatattttcttatgagatgaagcaggaaaatttataaaagcatagatttgatgcatgatttattgtaaaattttacattatcttacaaatatgaacaataagcttcttaattaagatattaatcttttttggaaaattaaagta

SEQ ID NO: 22167 - DNA, 388 bp, Glycine max
  unsure (1)..(388): unsure at all n locations
agcttatcacaccagaagaccactnttacactaggagttggacaagaaaaccaattagtttgttagagtcacacagcttgtacgacttatatagggatcacgtgttttgcatgatctcgcttgtcggtgtacatttggctgtcgggattggcaccacgaaggtgctctttaagtcggggtcaaaactttgctatggttttccttaacaaactgaaggttctttaatttcggttgtaataggctagcgcaatatccagaactatatagtaaatagaacaaatttgaaaaaaaaaactaaagaaattaaattagaataatcatactaaaaagaaaagaagcacgcttcgcagganaaaaaaaaaagtggcttctgatctcaatttggagt

SEQ ID NO: 22168 - DNA, 352 bp, Glycine max
  unsure (1)..(352): unsure at all n locations
tgctctaaatttacattgatgtttgtatttatgggaggaggttgtatgccattttttaagagtagtgtcccactggtaaaactaactttccaaatgtttgccttcgcaggaaatggccccgaggaagcttgcctcanagaggtccaggaaggacaaggcagccgaaggaactagttccgctccggagtatgacagtcaccgctttaggagcgctgtacaccaccagcgcttcgaggccatcaagggatggtcgtttctccgggagcgacgcgtccagctcagggacgacgagtatactgatttccaggaggaaatagggcgccggcggtgggcatcactggttactcccatg

SEQ ID NO: 22169 - DNA, 435 bp, Glycine max
  unsure (1)..(435): unsure at all n locations
agcttgtaatcgattacacacatactgtaatcgattaccagaggagattttcagaanatattctcaacaacaacatcttttcatttggttcttgaatggccatcaaaggcctatatatatctgacatgagacacgaatttgctaagagtttttcagaacaacaagtatttattctctcaaaaagaaaaatcgttttatcctcttaagaattccttgtccaattcaattgcaattgattaaggaatcatttgagtgctcatattgtaaaatctatctctttcaagagagattcattcttcttctctttctaattcactaagggattaagagaccgagggtctcttgttgtaaaagaattctaaacacanaggaaggattgtccttgtgtgtttagaacttgtaaaagggatttacaagatagtggaactctcaagc

SEQ ID NO: 22170 - DNA, 410 bp, Glycine max
tgagatgaggaagtgttgaagggtgaaacttcctgcttttattgttgaccacagagtggtacctggagatatgtcgcgggggtcaggagaccttggggacgtcaggtggggtgctattgcccaaaaccaagcttgaccaatcccgacccaacccgggcatagtcggtcagtgagaacctgcgatgtacctaagcaggcgagctcctggcagtcaacaaataaaaggaaaacaagaccacaaagcaaggaggcttgtggtggctggccagctgtgaattttgtgtaatatgtggattgtggcctctggtaatcgattaccaaaggtgagtaatcgattacaaggcttaaaattgaggacaggaggctaagatggtctctggtaatcgattaccaaggggtgtaatcgatta

SEQ ID NO: 22171 - DNA, 429 bp, Glycine max
  unsure (1)..(429): unsure at all n locations
agcttggaaaaggttgttttcaccttctcgctaagccaatctgctggcttagtgagcatccgctaagcgcaacactcctgggctaagcgcgaggaagaatccagaagaagatgagctgtacaggttcgctaagcgcacctcttcatctctctaagcgcaccgcttcagttcatccactaagtgagaaaggcgtgctaagccaaaaatcactaacatgcgctaagcggtccatacatgcactaagtgcatgagcacgaacaaggccacctatttaagcctgaaattagattttgtgaagggagtttggactgggattcagagctttgcatgtctagggtttctagagagagaaaggtccaagttccagagagttttgagagattntgctatgtgaagatctgcagagaccagagcttgaagcagaagtcg

SEQ ID NO: 22172 - DNA, 399 bp, Glycine max
tgagatgaggaagtgttgaagggtgaaacttcctgcttttattgttgaccacagagtggtacctggagatatgttgcgggggtcaggagaccttggggacgtcaggtggggtgctattgcccaaaaccaagcttgaccaatcccgacccaacccgggcatagtcggtcagtgagaacctgtgatgtacctaaacaggcgagctcctggcagtcaacagataaaaggaaaacaagaccacaaagcaaggaggcttgtggtggctggctagctgtgaattttgtgtaatatgtggattgtggcctctggtaatcgattaccaagggtgggtaatcgattacaaggcttaaaattgaagacaggaagctaagatgtggtaatcgattaccaagcttgaaaac

SEQ ID NO: 22173 - DNA, 358 bp, Glycine max
  unsure (1)..(358): unsure at all n locations
agcttaagtaagttgtttctcaatgagaggaattatatgaggtgagatgactacatgggaacttgggttttgcttatatacaagatacaagataatgtctcanataaagagtttatccctttgtaagaggtgattatgcaagaggaatgcaaatagtacattntttaacacttttttttntacgagtatctcactaaatatgtgagtcctatttttcatttccaaatctcactttaaaactagtcagattcgtaaaaaatccaatcaataaaagacggtgttaaaattcaaagaatcgattgttgccacttcttttctttntacaaaaaatgctgccactcctcgaatatgtaaaaac

SEQ ID NO: 22174 - DNA, 352 bp, Glycine max
  unsure (1)..(352): unsure at all n locations
tattagttntagaccaaatagaaactatattctcatgtaatttatagaatgactttattgaaaagatgcttataatgtgatcgtattatgataaagatgtattcacgtcattggctaaaatttttatacataggttaaaatggtaatttgatttctctatttttataaatccatgattttagtttccatcttttaaaattgagatatttagtccttcaattttctaagattcttaattntggtcaattcattcatttgagatggttaattgttaattgattaacgttgatcatttatctggtttttattntcattttttattaccgagtaaaagaatnttaaaaaaaaaata

SEQ ID NO: 22175 - DNA, 351 bp, Glycine max
  unsure (1)..(351): unsure at all n locations
agcttaactacaacctcttcatttgtctgaatagtagttccttcaacaacatagcagaattaacacaccgaattcacggaaactaagaaatttcacagtaaatatgcaaaaattgacaaacaagtggaagaagaacgcaccgagatagatctcctagaaagatccgctactgatnttctgaaaaatcagaatgtccttctttacctcctccgcgacgaagtccaattggccaccacaaagacggtgctctcgtcggcggcctcggtggccaccaccgcaatggtggtccactctgtggcgagcaacctccttccttcgaagctccggtcctacatcaccaatggcatccac

SEQ ID NO: 22176 - DNA, 326 bp, Glycine max
  unsure (1)..(326): unsure at all n locations
tgtattattgttctaccagcaattaaaaaccagcaattntttttaaagttggagaaaaattgaaattttataaatatttaattttaatcatttttttattatctatctaatcacttaaattcaatttttgttttggaatctcttttgtctatatcaaacaatctcaatcttntttcattcctcatatactttcattcctattcattcatatcaaccaaacacaccttaaggagaaccagctcttcaacgttcctactcagtgagaggtatatcctatcctttctttatttcccatcatccggtgattaagtgagaagtaatttaca

SEQ ID NO: 22177 - DNA, 370 bp, Glycine max
  unsure (1)..(370): unsure at all n locations
agctnttatgtgaaaggatgtgactcttcatatttgaatttgaatttcaacgttcaaaggcactggtaatcgattaccaaaacattgtaatcgattacaactttttgaaattaattggaacgttgtaaattcaatttgaaaactttttcaaaacaattttgctactggtaatcgattacaacnaattggtaatcgattaccagagagtaaaaactctttggtaaacatgttttgagaaaaatcatatgctactcaatttttgagaaaaacttttcatacttatcttgattaagccttctctttattcttgaatcttgagtcttgaatcgtgatcttgattcttgagatcttgaaccttgaatcttgatct

SEQ ID NO: 22178 - DNA, 392 bp, Glycine max
  unsure (1)..(392): unsure at all n locations
tctatatctaaacatgtttgtttgtcattgttttttcactttctttntattatctttcccttgtgatataacttttgttcttcctatgttctgacaaaactttacctctaattagttttttcttttgcagtacatattgtggagaataatntatttacgaataaatacccataaataatgtagtggtaacattcttccaacaaaagccatcaaaagtgacatcttattttattttatttatgaattagtgttgaagattacagaaattatgttctatttttgtttcctctgtatcgcaatagtgactacaaggcaaaatttctctattggttatgttctctntntggttaatattttcagaatacctgttctcatctagtagcatggcactc

SEQ ID NO: 22179 - DNA, 378 bp, Glycine max
  unsure (1)..(378): unsure at all n locations
agaattttaataatttgagaagaaccctgggggaccctcacccgaccaagaaactgaccaaaacctaattttttctttttggaccaaatattgccaggtgagggcaaggtaattttcctcccaataaaacctggatgcaactgggaaccgattcccaaaataactaaaacttggacggtattcaagtcaatcctcgtcttgcccttgatgttaaggagcatcccaatcaaacatttttcttcacatgcataacatcaatacaatatctaacggctagattagaccagtatggaaagatcaagaaattgaacatcttcttccatatgcaactcttacttttatcccttttttgggtctttgccaatacaatatcaggcn

SEQ ID NO: 22180 - DNA, 429 bp, Glycine max
  unsure (1)..(429): unsure at all n locations
tcttagtctcagatgatgcagctaagtttgtagctatctcatgcactcctctaatgactatggcatcatttctggcgctaaactgctgagagttggaagccatcttctcaattaaatttctagcttcagcaggagtcatgtctccaagggctccaccactggcagcatctatcatacttctctccatattactgagtccttcataaaaatattggagaagaagttgctctgaaatctgatggtgagggcaactcgcgcatagttttttaaatcgctcccagtactcatacagactctctccactaagttgtctaatacctgagatatccttcctgatgactgtggtcttggaagcagggaaaatnttttctaagaatactctcttaaggtcatcccagcttgtgatggaccttggagcaaggtaataca

SEQ ID NO: 22181 - DNA, 249 bp, Glycine max
  unsure (1)..(249): unsure at all n locations
gtgtctactattcatttgngataaatctcttttctctaattattggggggccctactttgagctacccaaggttctccatctttgggccgtattcattggaaagaancctgcccccctttttgcacatgttcttgaagtgcatcctatccgatgggccttttcttcaatgggcatgggcctttcctttagatgatccacctttcccatttccgccatagcatgagggtttttaatcgttgtggaatgca

SEQ ID NO: 22182 - DNA, 285 bp, Glycine max
  unsure (1)..(285): unsure at all n locations
agcttagccaataaatgatattctccaaagtaaagtagtaatagggtattaacaagtgatatattacccaattcttcataaccaagttactaatgttggattaaaataaatgcttgaacattggctagaaagaagacgagaatgatacttggtaagcacacgaccaccaatgctaaatgcagactcattaatgatagttggtattggaatgcttaacacatcacatgccaacctacaaagatatggatagcagtcttggcggtccttccaatagctcanaacatc

SEQ ID NO: 22183 - DNA, 405 bp, Glycine max
  unsure (1)..(405): unsure at all n locations
tgaganatgatacggtttccttcctcccagagggcattccaggatctcttcaaattcttccgccgtgggtgttaactgaaagtccccaatggtgaagcacctcaaaggctagtcataatattgggcgagggaggcaatggcctccgtggagacctccgctatggttaggtcccgcatcttaccataggtcttgcgaaaggctcatcgctggagttgacccatcaactgccctaactttttcagactggcgactcctaggctcttgatcttgacctgatagaacctctttttgagcccaggtgcctgactcgatcccatgtttttactaaagtggaataaaaacctgtgccaatcaagactccgacatcggttacgggaaaaatggatgaatgcatgaagaaatgc

SEQ ID NO: 22184 - DNA, 364 bp, Glycine max
  unsure (1)..(364): unsure at all n locations
agcttgcaagaagagactaaaattntaatatgattaaagttgagaaatagaatggattaatgacaagtgattgtgtcacgttgtatgaggagacacttaaggggagtctgtgcatgatttcctaaattaaataagtttttaaggttcatgtgttcaagtttgtaacatgttgacattagactggactgttgtatatggtccattgtcatttatgttatatttctttgttatgttttcctttatatgtttttaagtgttgtaacctagaaacattatgtaatgaatattttaaaagtgatatttgtcatggtatttttatgatcttgtgtgtatgtctattggagnggaatttncttttttgaaa

SEQ ID NO: 22185 - DNA, 390 bp, Glycine max
tctcttctcaaccacaagacctatcttatatctcgtatcaaattataagagtgagaagaagaagaagagagagaggggagaaaccttgtagtagagggaaccggcattgaagagagggcgcagaggcttgtcaattgaagatgaaagcctgcgaagcgccattgccatcgccatttctcgcacacacagaacagagacaaagtgtagtgtgtttgtgtgtttttgaagaagaagtcgctcgttaatcgttatcccaatcccattgcgagtgctctctatcggtttttcgcatggcgccacgcggtgggacccatcctaagattttagttcctcttttttcttttttcttttttaaataaaataataattttcaacgtattcgtctaatta

SEQ ID NO: 22186 - DNA, 391 bp, Glycine max
agcttgtaacctttggttccttgaagatgtcttaacactttctttgcaactttctggtgctccaaaacttgcccaaatatgctcaccaattctacttgaagttattgatgaactcctcttgtatacatataatgtcttgtttgtaagtatgtagcaaagttgagaggagcaccacaagatacgccactgtttgaaatctcatcgtttacatgatcgtaatcaacatcaatgttaccattgtatgtatcttgttcatcttcaacaatcatgttatgcaatataatgcatgccaatataatatttttcattgtatcgatgtgtcaattatgcgaaggaccacatgtaattgcaaatcaaaattttaacacatcaaatgctctctccacatcct

SEQ ID NO: 22187 - DNA, 425 bp, Glycine max
cggaaaccaaatcgttttgagagcaaacattgtttgaggcaaaggctcaaagtagtagttgatgacgtggtcttgaatgagagcttgagaatgaagaatatcctctcccaccttaaaaagaatctaattttgcaaaaagaattaaagcacaaaattgcacccatccttagatattatgtcctaatacttgtgatagaagtggccaccatacccatcaagcctcgtggccctagagccactcatagtgaaaactatagatttaatctcataaagggaaggaagatcagtaagcataacattatcatggttagataccaatctaggaataagcttggaaaccaaatcattttgagagcagacattgtttgaggcaaaggctcaaagtagtagttgataacgtggtcttgaatgagagcttgagaatg

SEQ ID NO: 22188 - DNA, 210 bp, Glycine max
cataattttgtgggaaaagcttcctagtattaagactttctttcttctagttgtatcttacaagattaccgcaagaatatcatttccaagtaactaacaagaacatacaaagcttcttttaaacatatggcagtaacacagtatctaagaactactacatttatgaactttgcatttaccatagaacaaattggacacaaaaataacatg

SEQ ID NO: 22189 - DNA, 423 bp, Glycine max
  unsure (1)..(423): unsure at all n locations
gagcaagcaatgaagatgtaccaatgaagcttgtacaaatatttgcacacctctacataaactcctacaagaattaactccaatttttcattttgttgtcttttgggcttgaatccttattagcccatagttttaaatagagattttatgttatagcttagggttccaaatgttgtgcatgaaaaggacaagggatttgagatgttgcatgatggctttgatgcttaaggattcatcttccattatttctccatcaattgcttcttcccccatggttgtgaatggctgcgtntgtaatagcccgtttcctttgtttgtttaatataaaataatgaataagaataaaaattaggtcattagatttctcactatatataggaacttttaacccataacagctttacaaaatattttttattcctt

SEQ ID NO: 22190 - DNA, 370 bp, Glycine max
agctttgagcaaatttatacgacaatatctttctagtcggatgtcttattgagtcctgtaatatatagagacgctcaaaattgaatgacgaagctatgagcaaattccaacgacaataactttttactcggacgtctgattgagtcccgtaatatatcgagacactcgtaattgaatattgaagctctgagccaattccaacgacaataactttttactcggatgtctaattgagtcccgtaatatatcgagacgctcgaaagtgaatgttgaagctttgagccaattcaaacaacaataacgttttactcggatgtctgattgagtcctgttatatatcgagacgctcgagattgatgttgaagctctg

SEQ ID NO: 22191 - DNA, 342 bp, Glycine max
  unsure (1)..(342): unsure at all n locations
gcttcaacattaacttcgagcgtctcgttatattatacgactcaattagacatccgagtataaagttattgtcgtttgaatttgctcagagcttcaacattcaatntcgagcgtctcaatatatgacgggactcaatcagacatccgagtaaaaagatattgtcgtctgaattggctcaaagcttctacatgcaatttcgagcgtgtctatatattacgggactcaatcagacattcgagtaaaaagttattgtcgtttgagttggctcagagcttcaacattcaattccgagcgtctcgatattgacgggactcaattagacattcgagttaaaagttatt

SEQ ID NO: 22192 - DNA, 313 bp, Glycine max
agcttctagcacactccagatattttctcaaagatcccaacggttaaatcatggaaagtgtttgggaagtgcaaccagatttgagaagatcaacggtaacaaagctggtagcgttctaccgggcagctacggtagtttctctagaagcttcattaagaggcttcctccagaagcttcattaagaggcttctagcacactccagacatcttctcaaagatcccaacggtcagatcttggaaaattgttttgcacagttgtagaccacatttagagaagatccaacgcgttatgacggctgcgcagtggttttac

SEQ ID NO: 22193 - DNA, 293 bp, Glycine max
  unsure (1)..(293): unsure at all n locations
tctagtctcaattntgaacgtctcgatatattaccctattcaatcggacatccaagtaaaaagttattgtcgtttgaatttcctacgagcttccgttttcaatttggagcgtctcgatatattacaggactcaaccggacatccgtgtataaagttattgtcaattcaattttctcagagcttcggatctaaatatggagcgtctcgatatattacgggactcaatcagacatccaagttaaaagttattgtcgtttgaatatgatacgagcttccnattctaatttggagcc

SEQ ID NO: 22194 - DNA, 364 bp, Glycine max
agcttcaagagctttgatccaacaagattattaatgagtagaacaaagactctttatgttcgacagctaaagaaataatgcaagagctaaaaggccctctcaagaaccgcaagcaacacgagcatgttgaaaatgagtcaatgaatgcattgtctacatggaccgaagttttcaatgaactgaagcgacgccattttatttgatatgccaaatcttcttttgttgtagattcttgaacatattttttaatgttaatattttttaatttccttttgaacaatttgcactttaattatctaagttaagggaatgtttatttcagttatcattggtctgtatatttttaagtattttccatttatcg

SEQ ID NO: 22195 - DNA, 382 bp, Glycine max
  unsure (1)..(382): unsure at all n locations
tctccaatgaaagaganttgatagtacatggatctagtcagataattctttgatgtttttgcttggagctacgccgaactgaactagatcgaaaggtaagtgagttagctcaagctcagagcatgaaagaaaatagataagaaatgtgatttctgatctgaagagtttaattgctatagtggaatttgttgaatttaggaaggctcacagggttgatgggatatccttacatatataagaatttttctggctctagtcaaatggatttaggaaagcttccacatgacattctcaagatagtattctgcttgaactattcttatcgaaagctcaaagtggcttacctagcggaagaatccgactaagttttgtcttgtacatg

SEQ ID NO: 22196 - DNA, 378 bp, Glycine max
agctttgtgcatttaatgattgataatggaggacgcttcattgtcttccatgtgctctttcatgtctcatttagatactctaagttttcactataaatagataaagtctacaaatgcaactcactagaccttgactaacaatacctacattgagaagttaagtccagcagttcccaaatggaatcaaacacatcaaggtttcttttgaactcttcaactttgcactcagttttctaccaagaaaaacaagatgatggcataattgatctgggtcttagtctaggaactgttcgacatgaagcttaccattcttctgccaactgtatgggttcacccctccttcattcttttaattcttcatttttctaaattctcata

SEQ ID NO: 22197 - DNA, 390 bp, Glycine max
  unsure (1)..(390): unsure at all n locations
tgctgaactccatatcaataatggaaatacttctatgtcggcgaccatgactacttacatgtgtaacttggaatggttttcccttattgatcaactggacatacttcactgatgtttggttaggatcattacagccttggattgcaagaacaccacaattgtggcgttctacagtggagaaagggaagctaaatgtccccaaagttccacagtcaaatgagtctggacaatcatcatggtgcccattaacattcccagcggagagaagaaccaccattacacaagaaatcaaaaggattacatacaccacacacattttcacctcagaaaatagaagcaccactaccatggaatgactatactggttgcatacaccacagntctcacact

SEQ ID NO: 22198 - DNA, 360 bp, Glycine max
  unsure (1)..(360): unsure at all n locations
agcttcttaantcttatgatnnngagttacctcgtgcactcttctaatgactatagcatcatttctggtgctaaattgttgggagttggaagccatcttctcaattaaattcctggcttcagaaggggtcatgtctccaagggctccaccattggcagcatctatcatacttctctccatgttactgagtccttcataaaaatattggagaagaagctgctcagaaatctagtggtgagggcaactcgcgcgtaattttttaaatctctcccagtattcatataggctctctccactgagttgcctgatgcctaaaatatcctttctgatggtcgtggtcctgcaagcagggaaattttt

SEQ ID NO: 22199 - DNA, 403 bp, Glycine max
tttggaaggatcaagaagtgccttatgaatcctcccgtgcttatgccaccagtacctgaaaggcctctcattttgtacatgacaatcttggacgagtcaatggggtgtatggtggggcaacatgacgaatccgggaagaaagagcgcgttgtttactacctaagtaagaagttcacgacctgtgaaatgaattactccttgctctaaagaacgtgttgtgctttatgatgggcatcccatcgcctaatgcagtgcatgctgagccatactacctggttgatatccaagatggacccggttaagttcatctctgaaaagccagctctcacgggacgaatcgccctgtggcaagacctgctatccgagtttgatatagtttacgtcatccaaaatgcgatataat

SEQ ID NO: 22200 - DNA, 338 bp, Glycine max
  unsure (1)..(338): unsure at all n locations
agcttccaccatgatgctctcattgttgatgtatttgcccttttttgtgaccaggtcctttagaaattntgtacacatgggcatttgttgcaaggcctcttcgaagggtatggtgatttctaacttcttgaatatgtcaaggaagcgggcaaagtatcactccctctccttatttgatggcaccaagggataagggatgtcctttactgaggctatgagtatctccctcctatcttccttagctaactgattggtggtcttagtggataagacctttccacccatttccttgctctcttcgttttcttcatcacccatttctctattttagtctctct

SEQ ID NO: 22201 - DNA, 418 bp, Glycine max
tgttcaatggtaatagaggcaattagaaggttagacatgcatgtgtactttgtgagaagttaaccaactaattcatttgttgtgactttcttaaaaaaaataaaaattgtgaagaacggcttctctgccaacacaaccaactttagtcaattagggtgtgttgtttggagaaaaagaggataaaagaaagtagaaatcaacaaagtgagattcacatttctacactttagttttaaatttttatctcactttaattatttttcatttctttccactaacagacccttaaaatttgaaaaaaataatgtggacaatttagtcaactcactaacactattataagcaagtgggttttaatatttgaaaagcattacgcaataaaaaaaattaaatgttaaactgctaatcatgaacaaaa

SEQ ID NO: 22202 - DNA, 71 bp, Glycine max
tttattcttgtgtaatcatggccatagcggctcccggggggaaatggtattcccttaccatttcaccccac

SEQ ID NO: 22203 - DNA, 343 bp, Glycine max
ttaatgcaagtgtcaccatgcaattagaaaacaatcacaccttggtgcatgtgttattttatgatatatatctatatatatacatatatttttttaaaagcattttatgatatatctatatatgtgtacatatatatatatatatatatatatatatatatatatatatatatatatatgtatatatgtatatatgtatatatgtatatatatatatatatgtatatatgtgcacatatatagatatatacaaacctcccccaccgcggcgcgtttctttcatttacctgcccttctccccccgcacgcgaaataaatcctcatccactgcgctcgtgtgccg

SEQ ID NO: 22204 - DNA, 425 bp, Glycine max
cgaaggtgtcgaaatcctacccctccaaattgtttttttattgataatttctcccaattgaaccaatggattccattctcttgattgttgttgctttcccaccaattattttctttagttcctcttgaagtgtagaagaaagaagaaaaacacccatgcaatatgatgatatagactgtgctagtgactttaaaaaaatttctttacctgctttagagatgaacttccttgaggaacccaaagatagctcttttccttctccctatgaccgatggtagccccagatattttcctattccaatggttgttgtcactcttaaaaaggatgagatgaattgcctattgttttgagatgtattggagctgaatagaatttttgattcctagaaattaattaattgtccaaatgtcatctcttacatgtc

SEQ ID NO: 22205 - DNA, 375 bp, Glycine max
agcttctatataagctgaaccattttatcaataaacactttttgagttttattcagaaaattagagtttatctcttttatcttagtgagagtgattctcctaaattcttgagtgattcaagaacaccctggctgtatcaaaggactttcacaacctttgtgtgttgccctcgctggaaagagtgattctttccttcctatcatctccacccttgttctttcaaaccacaattccagaaaatccacctctgcccaaaattatctcgtgaccataactcccattttacacactcaaattaagtgattcttgatcctaaattgaatttcaaaacgagatctttcacctcgttttggaatcacctcatttggagccctg

SEQ ID NO: 22206 - DNA, 346 bp, Glycine max
  unsure (1)..(346): unsure at all n locations
cataagaacaaaatngcctcaatcatttccaaatatgcatgttaattatgaagcatcaacaagaatcaagccaaggctattgtgcaagcaatcaatggggcaaaacacaccaaatgattatgatgatggatggatcaaattctcacaaaggtaaactcatcactctcaaattgagctttcaaaactatcatgacatgtagaggagaatcaaggatttcaagtcacaaaatgtcaagaactcttattttcaaaacaattacccattactggagcatgttcacttagttctcgaaaaacattctaggtcttacatacacactaattctacccatactgtggacctatg

SEQ ID NO: 22207 - DNA, 114 bp, Glycine max
agtctaatggagttgtttgaacaaatgtaatacaaaaaaaaaatgaaagtagatatgtctggcttgaaacttttctatccgacaattgcaagtagagacttacggacccttaac

SEQ ID NO: 22208 - DNA, 231 bp, Glycine max
tgcacaacaagtaactaattctatttttttacaaaatgaagtaactatacttccactaatatatagagtgacaacttatacggaagggacgggtgatcgaggccgtacccgaatcaaataaacatgaaaatgcagtaactaggaagtgatcctaggtcgtttcccaacgagcagtgacaaaccaaatgttcataatatacttgcagtaacagtaacgattggggggggggg

SEQ ID NO: 22209 - DNA, 276 bp, Glycine max
  unsure (1)..(276): unsure at all n locations
agcttatactcgcttagtgacctatagatcctgctaagcctaagatcaancccaatgatattcccctaactcttccttaataacgcttaacgggattacctaataaaaatttcaccaattttacttaagtattggaacttaacgaactgggtcgctcaccaactgggtcggtcagctcagaactggcgaaaagaaattgcttgcacaggatattgcttacgcgcactatcagcacaatataaanatttacgtacctggctaacaatacctccttac

SEQ ID NO: 22210 - DNA, 415 bp, Glycine max
gcttttcgattcattctatgtacccgtagtggtccacattgtgtttcgtgcatttttattctcgttttgtttactttttataccccctgttgacgtgcttaagccattttacttaagtcatttctcgcttaacttaaaaataaaataaatttccaccgaacgtttgaattgtattatccgttaacttcgattaaaatgaattccgaccattcggtcgtgccgtaaccacattggaaatcaaaaaagaggtaaaaaataatataataatcaaaaagacatcttttagtaaaataaagcgaaaaatcaatcggacgttttctctttgggatttctcattcttaatcgaattgattaataactaaagtgaaactaaaggctaaaatcaattcgcctagtcaagctcgtccataaaaat

SEQ ID NO: 22211 - DNA, 137 bp, Glycine max
tgcagctgcctcaagagttcaggaaggatatgcggccgattgaactagttccgctccggagtatgacagtcaccgctttagggaacgtgtacaccaacagcgcttcgaagccattcagggatgggtcggtttctggg

SEQ ID NO: 22212 - DNA, 391 bp, Glycine max
cttcttatccaaggctcatcttggtggtgaagctccttcttccatggcttattccctagtggatggcgcctcctctcacctattctcctttgtcttccgctgcatctccatggtggaaaatcaccattaaaggaccttattgaagctcaaagatccagcctccatagaagcccccacaagcaagcttccatcaagtggtatcggagcacaagagcttcaagtaggtgctccttaaacctccattaattttttgctttaccttctcttccattgttgtttcttcatattctctccatgtatctactcacatgtcttgtgctaaatgttgttaacatgattctttagagtttccacctcttaaacttgctatataatgttgatttgatttcta

SEQ ID NO: 22213 - DNA, 358 bp, Glycine max
  unsure (1)..(358): unsure at all n locations
agcttgtttcgattgaatttgtctcatatttcatatggtaaacgatcgatctcagccagagccaccaatatatcanaatctggaccagaactgtgtcgtattgcaagagtcatcgtctaccacgcaagttgggactgatatattttcaatttttaaaaactttaattattctttgaaatttttttctttttatccaaacgtaacacttcatttgatgacaatgaaattgaaaagaaagaaaaaaagaagggaaattaaaaaagaaagagatgaattttgaaatgaccttgacattcgatatttcaattgaattaccatataaacgaactcgtcatttaatcaagagtcaaacaagaat

SEQ ID NO: 22214 - DNA, 411 bp, Glycine max
  unsure (1)..(411): unsure at all n locations
ntaaactagaaaatcttaacatgttctttagcaatcttaatgctacgtaccttttgcattgtctagtctatttcaacacatattccctcactagagatctcattctattattttgcaacagcccagatgaaatgatgagggaaagcaaggcccgaatgggtcaaaatatggactagggtacatgttctaagggtccactagagagacatctgatatgaatgtatctagggtttttcaaaagtgaattcaaaatatagtaaagggatgcttgcacactatgcactcaaaaatgtgtatgggtattaaaaaaaaactaatgcttcacatcctgnggacaaaggaaatacatttggagttgggaaggtcatgaaagcacaagctagctggcttcatatttcattactttattat

SEQ ID NO: 22215 - DNA, 124 bp, Glycine max
agcttccaccttcacattattcacacaatattaaaaacaaaaacctcaccttctaagggcttctttacagagctgactctgaaaaatcttcaaaacgttaagaaagcctccgatattgaatcac

SEQ ID NO: 22216 - DNA, 392 bp, Glycine max
  unsure (1)..(392): unsure at all n locations
ttccnccttacgacttctcaaaattcatgattttttttctttctgttcctaatacgagaaattattgtgtaatccaggactatcacaagtctataatctcagttaatctccatgtaacataaaattttattaattcctttttgtaaattaaaaaatttggctaagtgtgacatggaggaccgcgtacaattcaataattcttgttactcttctatcatgagtttttcatttggtctctttaaaatggagtactaaatgaaaaatttgtgaaaagaaaatgaaaataacaaattgtagactacatgaatcatcgggtaaaaacaaatgtttngtggatggctcattcagaaactaattaaatgagagaattaatgaaagaaattgtgatattt

SEQ ID NO: 22217 - DNA, 214 bp, Glycine max
agcttgaagtgagaaagcgtggaagagttagtcttcctacttttgtttgttgaccacagagtggtacctggagatatgtcgcggggtcaggagaccttggggacgtcaggtggggtgctattgcccaaaaccaatcttgactaatcccgacccaacccgggcataatcagtcagtgagaacttgtgacgtacctaatccggctgagctcttggc

SEQ ID NO: 22218 - DNA, 127 bp, Glycine max
tgaatcggacatccgtgtgatatgttctgactgtttgtatctattcagagcttacgtaggcgaagtttaagcttattgacaggtcatgtgcccgaagccgagctccgagtaaattgacatgaacatg

SEQ ID NO: 22219 - DNA, 159 bp, Glycine max
agcttgtgtgtgtgttatttgctgaatcattatgcccttctcaggatgagctgattatttggctagtttattgcattggcattgggaactggttttttatccaccatactaagttactataaacatgttcttgaaaaacttgttctttgaaattcatgc

SEQ ID NO: 22220 - DNA, 305 bp, Glycine max
gacactaagagaactgaagcttaagcggcaccttaagatagagaataacaccttaagtattccaccgcttcatgacactatcaagaatacttttgactcaatccggccatcactttgtatatgtaaattagtaatatcacaatcaggacatatcatggtcaggctgcaagcatctgaaccaacgactaaatgaatatacagtatgtcacttgaatgactgacacagaagaatgatactagtgctaaagctcgacaaagaaagacagcggctactagtcctctgcatatcaagtcaaacacctcat

SEQ ID NO: 22221 - DNA, 322 bp, Glycine max
agctttttgtacaagctatcaacactattacaacaaaaatttaaaagactaaaatttaaatactaaaatttaaataactaaaacataaagcataaactatataaactgatcaaaataaactattcaaagtacaagacaagaagataaagatcctgtcaatcctcctgcgggtgatcctctgcatgctcattaagatccaacaccggagcagctgatggatcctgtatagtccgttgctctggctccgatgctagtgcagatggctgggaatcctcggggatgggtgctggagaggtatgaactggagaaagaagctcctgag

SEQ ID NO: 22222 - DNA, 272 bp, Glycine max
aatctaagctgatctttagtgtgtatctgtatcttttttccttttgaactattcagtttgaatgcgaactttaattatcttttaattcgttcctaaagattgatcgccaaatctgttgctaactgcacaataatctgttcaagatataacagatttatgtgttcagtttttccggcacgatgtcctggacattgtttccgacatccgggatcctgcataatctgttaaagatataacagatgtatgtgtccagtattgtcgggcaggatgtc

SEQ ID NO: 22223 - DNA, 106 bp, Glycine max
tgccgctgcagcttttgcagtcaatttcaggaggctttctcgagatgatcttttcccgcaataattaccccaaatctggtggattaaggagaaggtgtccctcctc

SEQ ID NO: 22224 - DNA, 104 bp, Glycine max
tgtgttagagaagattgaggagtggacgccttgtttttaattttgtccaaaggatactgggggtctagtgaatgtactaagcatgctcgaagacattgcactgc

SEQ ID NO: 22225 - DNA, 159 bp, Glycine max
agcttccattgttgagtttttgcttcccttttcacgcattgtttcactccctacaaagaaagtgcactttgccttggttatttggctcttcattggtggggtttggggctttaattgctcatattatgccaaaattctgaagcaattcacatatgaaac

SEQ ID NO: 22226 - DNA, 126 bp, Glycine max
taagaaactaagctgggtgatgttgccgtactgatgggtaccatgaggtgttttctggggtttgacccatgcgggtgttgaagagatggcatgggcatctcctttcttcctttccgcccctgtagc

SEQ ID NO: 22227 - DNA, 336 bp, Glycine max
agcttgaagacttgtacatcaccaaatctctggtaaattgtctctaccttatgcaagcatgtattcatttaagatgcaagaaaataaaacggtagaagaatagttagatgtctttaataaatcgattcttgatcttgaaaacattgatgttactattgaggatgaagatcacgcattagtgttattgtgtgttctacctaagacctttgctcatttcaaagaaacacttctctatggaagagattctctcactcttgttgaagtccaatcagccttgaactctaaggaattaaatgaaagaaatgaacaaaggccttctgtacatggggagggact

SEQ ID NO: 22228 - DNA, 381 bp, Glycine max
tgacaaattctttttattttttctttcaaggcactgctttctctgtgtcgagtgaccgtaattgcaatgataccggtaatgttttgagtagtccgctttcaatggggtgttagcccttcttggcatggccaaaatgtctacagctaaggcctcatccatgatatgagatctattggctgtaaggggagtgtagcaagcataacacggttctcggggtggtcgatccctcttctcgttgtcgcgagctttgttggagttgggcttatcatgtctttcttggccgaaatggcatccgcccacacctggtgaggtcgactagtgacaaattatgtgcttaaacgggctgccaaggtgtcgaatgatatcatggagtttgggggg

SEQ ID NO: 22229 - DNA, 376 bp, Glycine max
agcttcaaggctttcaaagccagaggatcataacaaaacttgatagaaagtggagcacaattcaagggaaggctttgccttgttgaaaatcattcgattgaaacccaacagccagtgcagagccaacaagcgaaacaccaaataatgctgagattctctggaaatcaacaagagcctgcgagaaacctctccctcttgaccatcaaacgcattcaagaaacgcagatacatgctcaaaacgacatgacacaggatagggtcaaaggaatgaatcattccaaacaactgcaccttcagcatggaaggttgcaattccaacgccacagccacgggaattatcatacacataaactccatcatcctgctaggagtcatc

SEQ ID NO: 22230 - DNA, 341 bp, Glycine max
tcatgcaaacggcttaaaataaaagtattaccttcttatatttaaactttgccaattgatttttcccacttgtaatgcaatggtgcaagggagttctttcatgatagtcacacatgtttacatcagcaccaaattggagcaacaactcaaccatcagtgcactgccagaatgacatgccatatgtaattatgaccatccacggaaacacctatctgtctcagtagtctcttcaactctcagacaggcttcaggatcatgctgatgccctttggcatcatcagcatggtgagactcatcataatactttgcgtttatcagatttgatgttgatgtgacaata

SEQ ID NO: 22231 - DNA, 233 bp, Glycine max
agtctctcccctattttgctataaatatggggagaagtgaagaagaaaggggttcagccccttaggcacttctctctctctcgaaatagctgaggaaaattagttccgtgaagaaaatccaagccgaggcgcttccgtaacgtttccgtaacatttccgcgagtaattacgcgaagattctcgaccgttcttcaagattaatcgtccgttcttagacttcttcagtcaacaac

SEQ ID NO: 22232 - DNA, 425 bp, Glycine max
  unsure (1)..(425): unsure at all n locations
agtgcaaatcaagtcactcccgcattttatctctagcatgcattgtatgttggtctcgtcctttgtcacgggaagccggaaggtccatatcaccttcttaattgtacacatggggcactgcgcccccaaatgcacaagtaagaagagataattttccgggctctcgtgtccgtaaaatgcattcatatcatgcaccacataagcatctcttcataacatcataatggacatatcctgcatttgtccgttatcatattccagcctcacattttgcatgagtcatggcatcatcatgcatatgcgttcaacaaactnnttgatctgcaaaattgcataccatttgttttcatgtttgctcatccttgcgttttcctctacaaaacaaaaacaaaaaagggggaagcgtgaaacttcacactacattc

SEQ ID NO: 22233 - DNA, 258 bp, Glycine max
  unsure (1)..(258): unsure at all n locations
agcttgttgagttattgtgggatgtgactaatatttgggcttctagatgtacaagtatccttttctttcataacaatattttcatgtgaaatgaaataatatcaggtgaaaaaatgttaaacatctctatactacanatgtggatgatgtaagtaatttcaatttcatagtctcctttcattatgtaataattaattttttttatgttntatttgattaacaatttacattaaaactattcaaataagtttatggatg

SEQ ID NO: 22234 - DNA, 426 bp, Glycine max
taacattacaataaacgcataaaaaaagaaagcaagttttaattataataaacataataataagtataatattgattaataagcataatttgtcagttactctgaaatttctattgtgacaacattaggtagtggcaaaattaagttgaatctcattttttttaaggattaacttaatgattgtgtatttttttgtttgagtctcattttttggataagctactgtgacattagaaatttcagagcaataaatagattatgctcattaatcaatattattcttattattatgtttgttctaacttaggcttgttttttttaagtgtttattgtaatgttatgcttacaatgattaaaaaaagggagaagatgaagattaaattatatttttggtaaatagtcattttcatccttgaatgtatagag

SEQ ID NO: 22235 - DNA, 382 bp, Glycine max
  unsure (1)..(382): unsure at all n locations
agcttcctcggngccattttctgcgaatgcaaacatttgttttagttagttntaccagtgggatactattcttaaaacaaaaatgacatacaacctcctcccataaatacaaacatcaatgtaaatttagaagaagcttatgcgcatatttccttacaaacgttctcttgcacaagacattctattaaccaaaaaaatgcacccatatacaatcaaggcagcttcgttacctagattatttacacgtacttccaaggtgtatttgttacttacatcacacacctccttggctaaattcacatacatgcatactcaaagcattttggggtaccaaaaattgcacatgtgcacatcttggtattttccatacctatacatacac

SEQ ID NO: 22236 - DNA, 268 bp, Glycine max
  unsure (1)..(268): unsure at all n locations
tgctctaaatntacattgatgtttgtatttatgggagtgaggttgtacgccattcttgttttaagagtagtgtcccactggtaaaactaactttccaaatttttgccttcgcaggaaatggccccgaggaagcttgcctcaaagaggtccaggaaggacaaggctgccgaatgaactagttccgctccggagtatgacagacaccgctttaggagcactgttcaccaacagcgcttctaggccatcaatggatggtcttttctcctgg

SEQ ID NO: 22237 - DNA, 283 bp, Glycine max
  unsure (1)..(283): unsure at all n locations
agcttgagatgaggaagtgttgaagggtgaaacttcctgcttttattgttgaccacagagtggtacctggagatatgtcgtgggggtcaggagaccttgnggacgtcaggtggggtgctattgcccaaaaccaagcttgaccaatcccgacccaacccgggcatagtcggtcagtgagaacctgtgatgtacctaaacaggcgagctcctggcagtcaacatataaaaggaacaaagaccacaaagcatggaggcttgtggcggctgcccacctttgattttt

SEQ ID NO: 22238 - DNA, 407 bp, Glycine max
ctataagcgcgggtctgggagacaaaggtcaagtggtctcgatatgcgaagatgatgttccgagtacattggatttggtacgaccatgccctcctgatttccagctgggaaattggcgagtggaggaacgccccggcatttacgcaatgagcataatgtaaacctttacgggttttaaaagctctatagttgggcctaggctttagagtttttccttttgttaaggctttgtgtcttttgtttttgaatttctaatacgaggacctttcttcatctgttcctgcgtctctacccattctcatacatttgcatgttcacttctttttttgaaacggcagatccgatgacgagtcctccgaatgtactaatacctgtgacccgcttatcgacttcgagcaagatatgaa

SEQ ID NO: 22239 - DNA, 90 bp, Glycine max
agcttcagccatccatggttaggtaccttcttttaccttctataggggttttctgaagcatattatacaatacacataggtggcgatggc

SEQ ID NO: 22240 - DNA, 245 bp, Glycine max
cagatttagtggttgctagcgagaggatcataagttttgtcttataagaggcaaatttgattatcctgctttgatgaataagaagcctgcggctaatggaaggaataataatgacggagaaacccatggtgtggttgccacttctactacgccaaatttcccatttgcccacaatatcaattattattcaatatcagtactcatattacccaccacccgtacagccaaaaacgcccaattattca

SEQ ID NO: 22241 - DNA, 103 bp, Glycine max
  unsure (1)..(103): unsure at all n locations
agcttgctctaaatttacattgatgtntttatttatggtatgaggttgtatgtcagtnangcnccaanaaaagtgtcccaccgttaagactaactttccaaac

SEQ ID NO: 22242 - DNA, 306 bp, Glycine max
  unsure (1)..(306): unsure at all n locations
tagaatattgcagcaatattatattccatcagttcgttaactatcacgcttagntggagtctgcaaagccccaatcattcaacactttgctgaaacaatttctggtactacaactattagaagctttgatcagcagtcaagatttcaggaaacaaatatgaaactgactgatggatattctcggccaatgttcaatattgctggtgccgtggaatggttgtgtttccgtttggatatgttgtcttctatcacatttgccttttccttaatattcttaatatctattccacacggattcatagatcc

SEQ ID NO: 22243 - DNA, 66 bp, Glycine max
  unsure (1)..(66): unsure at all n locations
agccttgtactaaggcagaggcatatgtanctttaagnntgggtaaaggccgccaggaatctatgt

SEQ ID NO: 22244 - DNA, 419 bp, Glycine max
  unsure (1)..(419): unsure at all n locations
ntcaggttttccactacgattggttcagtaccattgttgaacacaaacaagtgcgcttggttcatcactgctagctcaggatagacccgggacaaaatgtttgtcttccctcctgctccaaaactctccacaactgagtgatcaatcttccattcatttgaaaaaacaaagaatattaaataattatacattagtattttggagctcataaatgctatatattgttgttgaaatcctgatccatttgtggataaattagttagctttcattttttagaaaattagttaatttgttagtagtctgttgctgaaaaacagaaaatagtgtgttaagttgtaattctcagtttcatcttttcagccctttcacaatgatgtattaatacaattgatcattcaataagataagctgaatgagt

SEQ ID NO: 22245 - DNA, 290 bp, Glycine max
agctttatacaattaatatagaacctatattctaatgtcacattctatcatagcgttgtgttcccgtgtcctctagcatgaggttcttcatagtcattcacctattcatctactcccctgaacacaagttcaagatcatcacaggatctcaatacaacaacacacagagagtgagttatcacattcctagctaatagagaaacaagacaattaaatatacatattatataaatgagatatcacttgcttaaacatagctcacgtaacttcaccactttgtcattcaaaat

SEQ ID NO: 22246 - DNA, 249 bp, Glycine max
tgccttgctgatgggagtgggatattatccctaagtttctcatgaaaggggatgtgttttacggtttggacagaaaggagggtatgtctcccttggtgtaatgacaattttgggtgttaacaattttttaaattatcgtcaactttttttttttctctcttctacacattatttttcttatttttctctcttttgctaatattttgtttgttctacatctaaataagaataaaaatgtgcataatgatt

SEQ ID NO: 22247 - DNA, 252 bp, Glycine max
agcttgtcttcatgtacttggtgggtctttattaacgaaccctattattttattcaacccatttttgcttgggatctttctacctgggatttttctacacaaaaattcttaaaaatcaatttatataccaaaataaaaccctgttccctttccaattccattaaaacaaacctttcttaatttggaatggttttttaataaaaaaggaaggtattgggggtcaaaaaatggaagggtctcaagtgcaatatt

SEQ ID NO: 22248 - DNA, 216 bp, Glycine max
tactcacgcttcttaacattcaaggcaagacaaaagatggttggaattctcttctttatctagctgggatgggtatacgagacctgttacatccaaagtctgatggttagaaaatatacttgcctctagcgtgtcatactatgtctagaaaggagatgataagtttgtgtcattgtatttgccatgtcaaagagtctttaggaatctctggaagca

SEQ ID NO: 22249 - DNA, 296 bp, Glycine max
agcttgcctaattaacctgaaattgagttattatgattattaaacacacaaaatggaaggacttagtatttattacctatacttaacaaaaaatacttattacacttccaaataacccttaattggaagaagttgataccatttacctgaagttcataccccaaaagtaagtggtttcaccgacttacacttaacgtggcttgtgggcttagccttgtcatcacaaactgtaaatttttggatttctagatgatcgcgctaagcacattcatcactgctaatgaacaaaaatgatg

SEQ ID NO: 22250 - DNA, 348 bp, Glycine max
agcttgaagcattttttacaacagagagtttcatctccatatcaggtgttgattggccaaactgctaggctatcaatttgaagttaagtacaaacctggcttagagaatagagccgctaatgctctgtccagatgtcatggtgaggtagaaatgaattctattatttcttttcccttgtgggctgatagacagaaacttttggatgaaataactaatgacccgtacattcaaaagttactgaaagaagtgcaggagtctcctgatgttagacctgagtttcaggtgaaacatggagttttactttatcatggcaggctggtgatttccccctaatcaccctctattcc

SEQ ID NO: 22251 - DNA, 425 bp, Glycine max
  unsure (1)..(425): unsure at all n locations
tgcttgtggggcttctatggaggctggatctttaagcttcattgatatcctttaatggtgattttccaccatggagatgcagcggaagacaaaggagaagaggtgagagaaggcgccatccactagggaataagccatggaagaaggagcttcaccaccaagatgagccttggataagaagcttggaaggatgcttcaatggaggaaaagaaagagggagagaaagagagaggggggagcacgaaattgaaggaataaaagagggaaagaagtggaactttgaagtatgtctcacaagactctcattcatcaaagttacaataagtgttacacatgtntctatttatagactaggtagcttccttgagaagctttcttgagaaaacttccttgagaagcttctttgagataactttcttgagaag

SEQ ID NO: 22252 - DNA, 375 bp, Glycine max
  unsure (1)..(375): unsure at all n locations
agcttcccgtatccgtacttggaaggattcttgattactgtcttntncctagggcaggaatcaagtaacaatttcttgattttgggttcccgacccgcacttcaactgtgaaaaatattttccaaaaaaaagggggaacccttaaaaaaatattcccagcgatggaggattttggcggcccaaatagcttcttcccatgttgagagagagatgatcaccatgatggtagacgctctgccagtgttctactatgagaagctagtaggttacatgccgtccagctttgcggatctagtgtttgccggggaaagaatcgaggtaggattgaaaaaaggaaagtttgattactgtttcttcccaaatgcgaatgccaaa

SEQ ID NO: 22253 - DNA, 387 bp, Glycine max
cttgcggatttggtcttcgccagtgaaaggatcgatgtttgttcttaaagaggcaaatttgatcatcctactaggacgactgagaaaactggggcaaatgaagagggtgagaaagagggagaaacccatgctgtgactgccattcctatacggcccagtttcccaccaaacccaacagtgtcattactcagtcaattacaaaccttctgcttacccaccacccagttatccactaaggccatccctaaatcaaccacaaagcctgtctaccgcacttccaatgactgaagacctcctttagcacaaatcaaaaaaacaccatcatatatgaatttctcagcctaaagcctgtaaggttcaccccatattccgttggcatatgctaaa

SEQ ID NO: 22254 - DNA, 407 bp, Glycine max
  unsure (1)..(407): unsure at all n locations
tccaaccatatgatcataaganagggaactagcagggcaattctcctgtggatccaaaaccatgactttaatggccatctgagaagcagcttgacatatcattcgaccaagttgccctcctcccagaaccccaacaaccacttcagttagtccatgaacaggtgactcatcattcctgcacacaccaataccaaattttgggcttttcatgagattttcaggttcagacacttctaatgaccagaaattttacatttatcttcctaagttgaagaaagctgagaaaagggtcaaaacccctacaactagaaaacaagcgccaaaaataaaaatgcaaaaaataaccttagagaaactgcatcatcctgtgttgttgcttgacaagcaagatggggttggtcacactg

SEQ ID NO: 22255 - DNA, 292 bp, Glycine max
agcttaggctaaattagttatactttcataagctatttaagctaagtctagtccaacaagagggatctgaggatgaagcttattttaagttaatctaaacctaggagggctgtctaaattaagcctagtccaataagagggatatgaggacaaagctcggattgatttaatctaactagggatcgaggtttaataatttaagctatagcatagaacacaaaagcacaattgattagagaaacatctttatatacatcagctggtctggtagaaagacccaacatctttacct

SEQ ID NO: 22256 - DNA, 329 bp, Glycine max
tgaccaatcccgacccaacccgggcatagtctgtcagtgagaacctgtgatgtgcctaaacaggcaagctcctggcagtcaacagataaaaggaacaaagaccacaaagcaatgaggcttgtgtggtggctggccagctgtgaactttgagtgttatatgggatatggcctctggtaatcgattaccaagggtgggtaatcgattgcaaggcttaaaagtgaagacatgaagataagatggcctctggtaattgattaccaaggggtgtaatcaattaccaggcttaaaaacgagatcaggaagctaagagggcttctggtaatctatt

SEQ ID NO: 22257 - DNA, 243 bp, Glycine max
agcttgtaataagcttgacatttcttttataattggtgaatgttctcatatgaagttttgtcatcaccttcgttctcagtgtccccttgtgttgggctctacttctcttactcaagcattacaaattaaaaaatatttgaagtaaaattgtaaaagtaaaatagtaaattttgttcctaaccattaattttaatccaacggttataattttttaaattgagattctacatttttttttttaaa

SEQ ID NO: 22258 - DNA, 423 bp, Glycine max
ttgagcatggagtttctttaaataaaaaatatcaaataacaaatgttctttttcaaaaaataaaactattttttttagtaaaataaatattttaatatgaagctatatatatttgcacaattaattatatctatcatttttaacaaacgttgtaaggtgttaatatcctacataattgtgaacatatatttgattaacaaatgttgtaaggggttaataccctacataatcgtgaacatatatttgatttcaaggatcggtttaagaaaagattttctaacatttttcctttaaaataaatattgatgatgattccattgaaaactatctttgccttgtcaccccgattttctaatattttgttggttgtatttctttaaatctctagatgctgcacaagtaagtgacatgacaaatgcaatt

SEQ ID NO: 22259 - DNA, 363 bp, Glycine max
  unsure (1)..(363): unsure at all n locations
agcttcaaaacccatgccttttcttttttagagttgaggcagaagaccaccaactagctagtagtttcctatatcttctggagtcggttggatccaaaacataacacaaaatctcctttgatttgtcgttccacanagcataaatccaggtttcatcgagtttgtgctttcggcgataacataaccactcttcactgcaaattaagtccctccatctcttagagacacacttgaggacagaatgatattttctaggaattcttgccaggcacataagagaaatatcatcttgaaggccacaaataatttgataatttgtggcttctacttcattgtcactatntgatgattctttccttatct

SEQ ID NO: 22260 - DNA, 424 bp, Glycine max
cttggcatctaagatatggccatttgaatatgctatgtgctgaaattgctacactccaaagatacggtgcaggggctgcctaaaactggagagcttgagttgtgtgaaggttgcatttatgggaagcaatcaagaggatcatttccaacaggcaaagcatggagagcaagtgagtgccttgaacttcttcatgcagacttatgtggcccaatgaaaatagtctcactcgatggaagtaagtatttcttgctcatcacagatgattacagtagaatgagctgggtttatcttcttaaagcttagtctgaagcatttgaaagctttaagattttcaaggctatggttgaaaaacagtctggcttgtatgttatagctttgagaatagacagaggtggtgaattcttgtcaaatgaattcattactt

SEQ ID NO: 22261 - DNA, 364 bp, Glycine max
agcttgcatttggaattgcgaaagccttactccatcattaggattagtacctgacatctcaaacaaacaaatcaaacgtaacaagacaattatagttgctgtttgaatacctcacccactcaagtgtatcacacaattatggcttttctctaatgaaacactcttgccttttaccactctaattccccttgagttcttaggcaattcaagagattatggccacaacaaagaacaattcaccaatatgtgtaaggtaaggctagacaaggaaaaggttaaccaagaaaaaggctaacaatgtttttaagcacaaatgaaggaaataaaattcagaatttatgaattcaagtaacaatcctttatg

SEQ ID NO: 22262 - DNA, 266 bp, Glycine max
gtgagcaaatttaaacgacaataactttttactcggatgtccgattgagtcccgtaatatatcgagacgctcgtaattgaaaacagaagctctgagcaaattcaaacgacaataacttttgactcagatgtccgattgtgtcccgtagtacatcgagacgctcgtaattgaaaacggaagctctaagaaaatccaaccaccattaccttttacctcgagggcgggttgaggccctcaaaatatttagacccctcaaattggaaacc

SEQ ID NO: 22263 - DNA, 113 bp, Glycine max
agcttgtctcttaatataacggggtggtttcgttctggatgagaagcaatgagggtgtctagcaagtgagttctgaaagccgaaacctcagattcagcgacgatgccttcttt

SEQ ID NO: 22264 - DNA, 278 bp, Glycine max
tgagcttctcaaataggataaatcctgtctagattctatctttccctcattcttcatccctattcttctttcgtccccattaacccctaaaatgtaaagcttatcatgataatgagaggctaacccctggttgttgggagtctatcagtgaatactctgataatgtaattatttatgtactatctattgaatgctatttcaatttttattgctccttttttgcgcttatagttatagactgtgatatgatcattcttacttatgcatttgtttatgat

SEQ ID NO: 22265 - DNA, 270 bp, Glycine max
agcttcaaccaaaatcttgcacatgccttcttaacttccttgcaaagcaaattgtcgaaaccaccaagagatatcagaattaatcaaaatcaataataattgatgaagctgaaaatcaaaatggtgatagatgtgtagcactttttttattgacaaatattagttatgcaatgttatttttttgttagcgaatggaatcaaaaatgcgaccttttccctccctccctcctccttttactacccaaccaaccgtataactccctatgtgta

SEQ ID NO: 22266 - DNA, 380 bp, Glycine max
  unsure (1)..(380): unsure at all n locations
tcttggtctcatacttggtatactgacattcgtcacttttggctacaaatttcgctatgtcatccctgagtcccggccattggaaattctctgagagacgagcaatcatctttgcgacccccatgtggccccctatgggcgtggcatgatattcttcaaggagagaagatattatcggaaggtcccgcgtgaaccaaatgcgtnccttcttcaaaatcagatcattagcaatggtgaagttgggatgtgtctccggagaacacacgatgtcttcgtgctgcttgctatattgaggatggtaccgcattttctggcgtagctcctcgtgaacagcccagccagggactaagagtatcattgatagagaattggtgtgctcc

SEQ ID NO: 22267 - DNA, 162 bp, Glycine max
agcttgtctttggtttagatgtgatttatacatgatttatgacttgtaggatcccatttgggccaaattggatgaaggccagaaggatttccaaatctggcccatttgggccacaaaaagctggccaaatttgggtaaccaaatttggcttttgggccaaaa

SEQ ID NO: 22268 - DNA, 315 bp, Glycine max
tgcaagctttaagagaagttgcaagagaaaggacaacaacctcaatgaggttgaaactggattcctggtataccaacaaaggctcttggcaaatggcttttctttaaaccaccattggacccccttcagaagatagaattcagaattgcccctggaccattgggttgatttcaataaaatcctggaggatttgaaaaataatgaaataaggcttgaaagggggataaagctcttttgcttcttaattccttaccaaaatcctttgaacatttcaaggatgcaatcctttatggcaaagatcaagacattgcccta

SEQ ID NO: 22269 - DNA, 253 bp, Glycine max
ctcatctgtattgtcttcgtgcgattactttttctctctctatgaatattatctcgcaaattccaacgatgaaggtgtgaggaatagaatctcaaaccacatatcaaaatttcatgaaagtccaatggttaacgaaattgggatcatagttttactgggacggttttggatttttgccgaaaaagaaaatgttatgatgcgaattgtatgtcttcaagctccgatatcgtttcataatttccctacggtggga

SEQ ID NO: 22270 - DNA, 370 bp, Glycine max
  unsure (1)..(370): unsure at all n locations
agcttaagctccttcaactgcacaaggctcttaatatttgaagagtatccttgtggaaccttcacccgacgaagacactgacaaaaacttatcttctccttcttggacaaagtatggcaggctgggggcaagtaaattttcttcccatcagaccttggatgcaactgtgatcttatacccatatcagctagatcttgacgggtattcaagccatccttcgtcttgccttgaattttaaggagcgtcccaatcacactgtcacaaaaatttttctccacatgcataacatcaatacaatgtctaacgtcaagatcacaccagtatggaagatcaaagaanatggacctcttcttccatatgcaactctgac

SEQ ID NO: 22271 - DNA, 428 bp, Glycine max
cgaagttaccgtttgaggtgctgtaatgacacatgattagaactagtaatgaccatatcatcaacataaataagaagacgaacaataccagctgcagtggtttgaataaataaagaagaatcatatcgactttgagtaaaagaaaaggcaaggagaatagttcgaaatttttcaaaccatgcccgtggtgcctgccttagaccatatgaagaatgtttgagcttgcatacaccaacagaagaagaaaacaaaccttgtggaggggtcatataaatatcttcagctaggtcaccatgaagaaagacattcttcacatccatttgatggagagaccagcccttggaggcagcaatagatagcacagttctaatagtagtcattttggccacaggtgcaaatgtctcatcataatccactccatattcctg

SEQ ID NO: 22272 - DNA, 369 bp, Glycine max
  unsure (1)..(369): unsure at all n locations
agcttgtcaaagatgaaaacttcgtttgttagttgagtataacgataactatacgaataacaagtctcaaaattatatagcaaaacccaaatgctgctaatcccttccatccaattatgagacaagaaaacactattaaattgttggggtcaggcttacaaaatgcagagtaacctatcatactatattttcaccaatcttgaatttaatttcttaagcctatttgcattatcagtcatcacttttctatactgtgcagggtcatctatcatactttacctgtttaccatcctcgtctaacatatcttctctagtaggttntgaagcattctcccccttaccagcagcatggttttcaggtgacccggg

SEQ ID NO: 22273 - DNA, 426 bp, Glycine max
  unsure (1)..(426): unsure at all n locations
ctgcggatttggtcttcgccagtgaaaggatcgatgtttgttcgaaaagaggcaaatttgatcatcctactaggatgactgagaaaactggggcaaatgaagagggtgagaaagagggagaaacccatgttgtgactgccattcctatacggccaagtttcccaccaaacccaacaatgtcattactcagtcaataacaaacctcctccttacccaccacccagttatccacaaaggccatccctaaatcaaccacaaagcctgtctaccgcacttccaatgacgaagaccacctttagcacaaaccaaaaaaacaccaacaaaaaggaattttgcagcaaaaagcctgtagggttcaccccaaattcggttgtcatatgctaaacttgatcccatatccactcaataatncaatggtagccataa

SEQ ID NO: 22274 - DNA, 374 bp, Glycine max
agcttcatccgcagatccctcatgtaagactagacccgttttagacagccctcttaggtttagactaacttaaactgagtttcgtccacagattcctcatgtaagactagactcagctcaagtagcttacggaattttagcctaatttagcctaagcttcgtctgcagatccctcatgtaagactaggcctaaactaaacaacattattgtaacaacataattaaaaccaaacttaacccgcagatccctcatgtaagattaagtttcgatcctgcttcaatcaagttctaaggcaacagtacatttcccaatgctaaagttgtaacaccctgagatattataagttataaatcgatgtttaattgtatttatt

SEQ ID NO: 22275 - DNA, 355 bp, Glycine max
tccatcaacttcatacatcaaggttccctgtgagggattaattctggcattgggggtccttttttccaaattcaatgatctacaccaattcatatgatcctacagtagataggacatttcataggttaagtagaaataatagaagtgtcgtaagcttgcatattagtgtagtgcaatagtgataacatgtctgattctgtttttcagcactattctagttatagagcatctgagtctgaatatagtgtcgatacaatcgttgacttcaaccagactcttaaggaattagctactcctgatgatgtgtatcaaccatggtatttttatatcttagagagaggctaggtatgagcta

SEQ ID NO: 22276 - DNA, 365 bp, Glycine max
  unsure (1)..(365): unsure at all n locations
agctttgtgtaatcgattatcacttatttggtaatcgattaccagtgactgtttctgaataaatcaaaagatgtaactcttcaaaaaagttttgactntttcaaattggttntaagtttttctaaaagttataactcttctaaatggtcttcttgaccagacatgaagagtctataaaagcaaggctttgttttgcattttcaattaattcattctttcaatcttgaacacttattcatacaatcctttacaagccttgaatctctttgaacttcttcttcttcttcgtaccaaaagctntccaaagttttctagttttccaaaccttgaaaacttgtgttattcatcttttcattatcttctcc

SEQ ID NO: 22277 - DNA, 423 bp, Glycine max
tcaggctgctcaattgctccaggttgctgcatggaatggcaaaggtctgtatggtggtcagcagaggagcacaaaccacaaacccttgcgacaggtacagatttctgattcaaggccagctgggttaccaagttgaccaacgcatccagtttgccttcaagcttcttagtttcagatgatgcagatgggtttgtagctacctcatgcactcctctaatgactatggcatcatttctggcgctaaactgctgggagttggaggccatcttctcaattaaatttctggcttcagcaggagtcatgtctccaagggctccaccactggcagcatctatcatacttctctccatattactgagtccttcataaaaatattggagaagaagttgttctgaaatctgatggtgggggcaactggcacat

SEQ ID NO: 22278 - DNA, 348 bp, Glycine max
agcttgtttcacagcattagcatccattctatctacctgcacaaagtataaatatttacttccaaaaaaatttcaaaaaatgtagttcacgaaaagactacaacacattcaatcagcacatgtatatatcatagctatcaatcttggattgcaacctgccaagcttaagctactgctaaccagtaacaaaattgctatggaagtagagcaaacagtggaatggctgcgatgccaaagttttagataaaacataaaaattatttattatttatgatatacatatatacatgcttacaagcccaaaaacaaaaaagacaattataattgaaaagatagacacaacaagag

SEQ ID NO: 22279 - DNA, 422 bp, Glycine max
tcacaagaaagaatgattcgcatagattattcgtgtcttattttttcgaagtttcttcttttatagctttcatctccaagtattcattgtctcacaatggttggattctttactctggtcttcgtctgaagttttgagcccgttgcattaaatgcacatcctttcttcatacaaaatccatgctaataggttagcgtgtcttgtacttcagcaggaaagttacttctttcatcatagcaggtctgcaacaacaaagcgcaactttgatgaggatcaatgtcttccagactgtggacttcatttattcttcataggactttgacaaattataggaaaatcttttctgcatgaaagaatcttcgataaaaattattaataaaggttttaaatgcattacttaaatgctacatcagatcgcctta

SEQ ID NO: 22280 - DNA, 307 bp, Glycine max
agcttatcacccacatcgccaattgattaatagcttttaatgggagtcaggaaaatgaaagtgcgccgaaaccattaactggaaaaaaagtttatgcttggatcaaaggtatcctaactatttttgggtagaacccaaagaaagcatcatctgagactaacatatagaaaaaaaggtcaatgttctttgatctttcgtactggtccgatcttgatgttagacattgtataaacatgatgcatgcggagaaaaatgtttgtgatagtttaattggcacccttcttacattaaaggcaagacaaaggat

SEQ ID NO: 22281 - DNA, 419 bp, Glycine max
tggagatgatgcttcaatggaggaaaagaaagatagtggggggagcacgaaattgaaggaataaaagagggagagaagtggaactttgaagtgtgtctcataagactttcattcatcaaagttgcaacaagtgttacacatgattctatttatagactaggtagcttccttgagaagctttcttaagaaaacttccttgagaagcttcgttgagaaaacttccttgagaagctagagcttagctacacacacccatctaaaaactaagctcacctccttgacaaaatacatgaaaatacactaaaaaaaagtccctactacaaagactacccaaaatgccctcaaattcaaagcgtaaaccctatactacaagaatggccgaaatacaaggcccaaaagaaggaaaaacctattataat

SEQ ID NO: 22282 - DNA, 295 bp, Glycine max
  unsure (1)..(295): unsure at all n locations
agctagcatagggacctgttgattagaatcncttancccgttttatatatcacttgtcccagatgggtggatgcaagggcccacgtgttccccattgattggttcggtcttatagataaaagccactctctatattgatgctgcttccttgtaccttaggctgactctccgcgattagacactgtatcccacccatactcgtcttattctttgtgaatgccatctggatgataacatccactgttgttcgtgcctcatctgggtgggacccacttgcaaaatccgtgagccttca

SEQ ID NO: 22283 - DNA, 606 bp, Glycine max
  unsure (1)..(606): unsure at all n locations
cgggttgatgagctgcctagcagtacancncnacanntnnnngnaanacanacctgcntgtagtncagaacaggaactcacacgcgaagagatgtgcaatattattttgttgtngtatgtaaacaagcaataatcatcgactcttcttgtgcattggttataatagatcaccactcttatgctatatagaggaatagtcttcactaggtacattacaccaaatgtctgagctaccagaggagctcttatcatagaaagatgtttgatttacacacggtctaaggcatatggtacagtgtatctagcgttatgtctcatctttagcatataatagctacatttatcgactacaccgtacatatgcttgattaagcggggtacactccttatgggcatgaatcgttgtcactcctgcgctgngcactaagagtgccaccatcctctgggtctgcaagtccattactcatcttcttgggtatcattgaatgaatatttgcggaacctctctttatcgggcacatctcacaaatattgtggttgtgactatgtattaagtcgggatgacatatatcactctgttgtgcagcatcgtctgatcttaattcg

SEQ ID NO: 22284 - DNA, 282 bp, Glycine max
agctttgcactttatgcttaagcgccactcactgctcgtttgattgccctggagtacctccatgatacgcggaggtcgcgtcggggttgtaccatctcgggaaaggagactggtagattcttctaggggtcaccactgccaactggttggcgattaaggatggcagcaagtccccatatgacattggaatcggcgcgaactccggaagcttctttactggagggctcctccccagattggaacttgcgccaggatagaaatctccggcgggacaaggccttg

SEQ ID NO: 22285 - DNA, 415 bp, Glycine max
tgcaaacagatttcgcaagggtcaccctaccagcatttaaaatagttctagctttccacgtacttaaccgttgatggacttcgtccatgataagttggaatgttcctcgtgatacctttttatgaaaaataggtaccctaaggtattttccaaggtcatcagtacactgattacccatttcctcgcttgattacccatctcctcgctcgattgattcctatgtgacactcaaacatttttagagaaatgcatacgagatttctctaagctaatcttctgaccagaactcttgcaaaataaatttaaaatattatgaatcaagtggacttattctagagaagctcccgcaaacaaaagcaagtcatctgcataggtcaagtgcgatcaggaacaaaactagactacaacaatatta

SEQ ID NO: 22286 - DNA, 323 bp, Glycine max
  unsure (1)..(323): unsure at all n locations
agcttcggattgtaagtattggattggatagctcgtgcttccaagctacanaataaattgaacccaaatatgatactcctcgttttttatataaaattcaattacttaatttatcanattcaaaaaaaaattaattgatatcaataaatttattttacatttataactttnttttaaattttccttatcaataatatttcatctcttctaatagtttattaatatattttgtttcttattttaatgagagatgtttttagtataaaaataattaatacaaaaaatattataaattgagttttataaaaaaaaataaacatcaa

SEQ ID NO: 22287 - DNA, 419 bp, Glycine max
tcacaaatttccatcattaaattgagtgctcatctattatgtttgttttcagtacttattagacaccaagttacatcaagcaaacattaacctagataaaaaagtggtttcattgggcaaattgtttaccttcagataaacaaataattaaatgtcaccatcattgcctcatgttgcttactttctgtaaacaaaaagaagccattacaaaacttcgttcgcacctgtaacacacagattttcagacactgcaatcgtgaatctatagtagataaacaatgtcttctttctacttcatacaaatagagtgctaaaaagatggtctcaaaaccctaaatagtgaatgatctgaaaagcccaaaattagagaaaatgaatatcaacattaaagtagactcgggaatggcaatgaaattata

SEQ ID NO: 22288 - DNA, 339 bp, Glycine max
agcttctgcgagcaggcatgaacgtgtttcgcttcaacttctcccatgggtcccacgagtaccaccaggaaaccttgaacaacttccgggcggcattgagaacaccggtattctctgcgccgtcatgctcgacaccaaggcacgatacgaccaccagattcgattttcatattccatattctcccctttttgttcgatttggatttattttatttatttatattctcatcgccgattttgttttgatttacttttaaatcttgtgttttaattgctaatgtttatgattggattaggttatgtataagccggtgctattattattattatctaattcta

SEQ ID NO: 22289 - DNA, 349 bp, Glycine max
tagacatatcacacatatcaacttattgtgggtgtattaaacaataattgcatgatctactggacaaaattaatgcacaagtacaaagtttaccttgtggattttcagaaatatttcttcaacaaatacttaaaatgatatgcgttagtatcaattgtttgactttatccttgacaattgattgtgtgttatgttgtcttgtttcatgccaggtatgtccttgttttagtgtgattattgaggtatatgatatgatattattactttaaattttgaatcttatcatttatgtgcttatttctttggttctattatattttagattctgttatacacaacttgttcttaa

SEQ ID NO: 22290 - DNA, 150 bp, Glycine max
  unsure (1)..(150): unsure at all n locations
agcttgtaagcagggaggtgagacttgttcttgtccccatttaagttattatagaatgtcttttggtaccctatatggttagctcatttnctttatcatactcaagcactaccccttccactgacatcaactaagtgtttcatgttgatt

SEQ ID NO: 22291 - DNA, 391 bp, Glycine max
  unsure (1)..(391): unsure at all n locations
ctgtagagcatgcctgcttgcgtgcaatctaaggagtggtgtcttcatgctgtatattgatcgtttctgagtggaaaatcctaatttggttaagcctgaaattctgcagcatttgcaaagcagattcaaattaattgaagttatgtacgagcactgtagctnttacaaaaataagcactacagcttatttaaggcataaattctgtagcatctgcagtatatgggtggaaaaagagtgggagtggaaatttaaatggagaagacacttgtttgacagagagcttgagatagcatattgtttccgtaatgatgttgctggcagctgtattcatattcacaaaaaaagatgactggagaactttgacaaggactttgccttcacctacagcta

SEQ ID NO: 22292 - DNA, 264 bp, Glycine max
  unsure (1)..(264): unsure at all n locations
cctcataagaaagtgaagtcaaaaaatgctaacgcggctgtattttgttcggaaggggancctgcccatggatatttaggatcgagctatccgcaaatggaccccaaattgagaaggaccgtttaaaagcacatagatctattcgaatggtgcttatcgattagaggaattatccctccacagacgccctatgagtgtactcggtccattttcgataaagggcaaaccaacattgctgctggtagacttatgcatagatcattg

SEQ ID NO: 22293 - DNA, 279 bp, Glycine max
agctttaagcataattgaaatgtagatgctctattagtttgttttcaatccatactgaggtacttgcattttgtggttctaaacatgtaattaatgttgtttctttattcttggtaattatttgtgattggcagaaacatagactttatttgaagagatctagtggaatgacactgcaacaaaatgggatgccatttcctaacacaatctcagggattacagaatccaatattgttttcagattgtttaaaatgaggtttagtggaatgacactgcatg

SEQ ID NO: 22294 - DNA, 331 bp, Glycine max
gaatctaagcttggcgtagccatatggaaattaatgtacatgacgactgtttatttagtttatgctaaatcacgtaagtgaactagaatcttaccactaatggtatcgcacatgacatattgtgtggatataatgcggttgttccataccaaggtagatgcgcctataggctatagctgcaagtgtgtatgctcaagacatggctgcattatctcaagctgacccatacgacgttctcagctcctataaatcctcacaatattcgttagcagatataatattattttttaaggaaaataatatgttggtaacctctgatgtaagcataaaa

SEQ ID NO: 22295 - DNA, 304 bp, Glycine max
agcttacaaatgttagctacagcttccttactttagttgttcctcgttattttttaatttttgtttccttatgtcttgctagtgacaacattccaataatttatttttatctattctttgaacctcttatactcacactatcatttcttaggcctaatggttatgcctattaatatttcctgtgttttctgctaaagtgttttgctgattacagatatagaactcatttctgattccttctggtatgtagtccatggacttgatatgtatgatcaaaccatattctacccttctcacgctattc

SEQ ID NO: 22296 - DNA, 418 bp, Glycine max
tggagttggagcattgattatgctgttgtgatgttattggttcatttgcttgacagatcaaagtgtctttagttatgatcttcttctgggtatctgttaagagtctatgaagctgtaccaaatttcctagtagcttttagtttgtttaattcagctgaagggttgtttattgttgtactgttgcttcttggtacgccttgtaccttgatacttttcttattaatgaaaagtattttgctttgttaaaaaaaattaacaatgttttaaacgagcatataaaattaaaaataaatgtttatttaattactcaataagtattttgatttgattttcttaatttatcatttaaataaaagatatttcaactttttatttaaataattaaatctctttgaatgatattaaatacaattaatta

SEQ ID NO: 22297 - DNA, 290 bp, Glycine max
agcttcaaccaaggggtgatggaccatttaagtgcttgaaagaatcaatgacaatgcttacaaagttgagctgcccggtgagtataatgttagttccaccttcaatgtctctgatttatctctttttgatgcagatggagaatccgatttgaggacaaatccttctcaagagggagagaatgatgagggcatgaccaagagcaagggcaaggatccacttgaaggacttggaggacctattgatgaggacatgaccaaaagcaagggccaggatccacttgaaggacttg

SEQ ID NO: 22298 - DNA, 413 bp, Glycine max
taggctaaattagtctaaactttcgtaagctatttaatctatgtctattccaacaagagggatctgaggatgaagcttagtttaagttagtctaaaccttggagggctgtctaaattgagcctaatacaacaagagggatctaaggatgaagctcgtaacaccctgatatatatatctatatatttttagtaattatgtttgatgtttcattatttgttgcattatttttatccgtaattattttcaaggaggttaatttagttaatagaggagtgtgggtagataaggatctagcttctcaaagaagcctcttgagaaagcttctcaaacaagccaggaggaagcttcttgaggaagcctcttattgaagcttcttgaggaagctacatgatctgactccgttaaaacacta

SEQ ID NO: 22299 - DNA, 321 bp, Glycine max
agcttcctcggggccattcctgcgaagtcaaacatttggaaagttagttttagtgggacattactcttaaagcaaaaatgcatataaccctcttccattaaatccaaccttcatggaaaattaaaagcaggcttatccccctaattcttacaaacgttctcttgcacaaaacacttaaccgaaaaacatgcgcctattacaatcaaagcagcttcgttacctagattatttacacgtacctccaaggtgtatttgttacttacatcacacacatctcctcggctaaagtcacatacatgcatactcaaagcattttggggc

SEQ ID NO: 22300 - DNA, 422 bp, Glycine max
tcagaaaactatataagataatgctatggcggccgcttctcaatatagctagggaagcggaaccggtgctacagcccgcaataaacttgggccgagatagaaactcgacggttttcggtcggaggtatagtcctcaagcctacccttatggtttgcctccggacttcactccccgtaccgctccagacgatttgagccaagcccctaccttcgaggggcaactccctcctcatgccgactgtcctctgcaagaagatgatgaaggagatgcccatctaggccctctacgtcccctcaaggatccggccccccatgaattgccccaaccaaacatagtccgccacgtcccgtctccacccgcacccgttaaagaattcgttccctttgcaaaagacaagggaaagattgatttacttgaagag

SEQ ID NO: 22301 - DNA, 187 bp, Glycine max
  unsure (1)..(187): unsure at all n locations
agcttctctcataagataaaatcaacnttttcacttaacttgtataaaactctctcatctaacttgtccaaaaactgaagtgcaaaagttgattttagcttataagaaaatatcaattcatttggccttaatttctttctctattatcgaaataggccctaacaatgaacatacataacataccctt

SEQ ID NO: 22302 - DNA, 305 bp, Glycine max
tgagctggccgctaagcgagaagacgacttgttgagtttgtcttgtgtgctaagcgagttgtctaaatattaaaaacacttgtaatttccttcttttgaatcctcctcatggtcaaatattaaaaacttcattattccatttaaaacaacaataaagtagaggtattctaataatctttaatcaaaattgactattaattaaactcaaatttcacaattaaccgaaatacgaacccacaaatcaaaaaatttaatttctatatgttcctttaaatattatgaattcctaaatatattcaaaatca

SEQ ID NO: 22303 - DNA, 154 bp, Glycine max
agctttgaaaaatgttgttttttcatcttttgctaacccaatctgctggcttagcgagcgtccgctaagcgcaacactcataggctaagcgtgaggaagactctggaagaagatgagctatacaggtttgctaagcgcaccgctttatctcact

SEQ ID NO: 22304 - DNA, 423 bp, Glycine max
  unsure (1)..(423): unsure at all n locations
tgtttcanaccatagatggatttatttagtttgcaatctcatagactttgagtcacttaatacaaagttttctggttgcatcatatgaattgtttcttcaatgtcaccatttagaaaaacagtcttaacatccatctgatgtagctctaaatcacagtgagctaccagtgtcattattgttctaaaagaatcctttgaagatactggagaaaaaggtttctttatagtcaatgccttctttttgggtaaatcctttagtgactagacgagccttatatctctcgacatttccctttgaatcccttttgcttttaaatatctatttgcaaccaataggtttcacacttttaggcaatttgaggagatcccaaacgtcattgtcttgcatagatttcatctcatccttcatggcattgatccagt

SEQ ID NO: 22305 - DNA, 145 bp, Glycine max
  unsure (1)..(145): unsure at all n locations
agcttaaagtatgccctttcattcanctcnatgagatgttgttgaagtattggcgatcagaattgccattccttggattacggngttgaaccaagctcatgcttttacaaaaaggtttatcaagtcaagttgaaatatggaagct

SEQ ID NO: 22306 - DNA, 180 bp, Glycine max
  unsure (1)..(180): unsure at all n locations
tctagccaaatggacttaccttgaattaattccttngttatcccttttgagccttgtttccctttccttgttttgaagctcactacaagccttaagtgaaaaaccatgatatcaccatatccttaaggaattttggagctttggaattgttttgggaataagtgtggggggtttttgttt

SEQ ID NO: 22307 - DNA, 354 bp, Glycine max
ttgatggtgtcgagaagacatcacgtgtttgtttcttttaaaagggggagaatgtgaatgtatgtagacatgattttgatgatgtcaaacaagaatctaacaaggctgcttcaaatgataagcatttgcttcaagaataattcaagattgctttaacaaacaaagccttgtttcaagattcactaaagaccaagccttgccttaaaacaaagtgctttcaagacatgcaaggctctggtcatcaattaccaagaagtgttatcgattaccagaagacagggttgataaatagctgttgaaaaaggttttgaatttgaattttcaacatgtcatcgattaccatatgtctgtcat

SEQ ID NO: 22308 - DNA, 290 bp, Glycine max
  unsure (1)..(290): unsure at all n locations
agcttcttagttncatatgattttgtatctacctcgtgcactcttctaatgactatagcatcatttctggtgctaaattgttgggagttggaagccatcttctcaattaaattcctggcttcagaaggggtcatgtctccaagggctccaccattggcagcatctatcatacttctctccatgttactgagtcctttataaaaatattggagaagaagctgctcagaaatctagtggtgagggcaactcgcgcgtaatttttaaatctctcccagtattcatataggctc

SEQ ID NO: 22309 - DNA, 398 bp, Glycine max
  unsure (1)..(398): unsure at all n locations
tntggaaggatcaagaagtgccttatgaatcctcccttgcttatgccaccagtacctgaaaggcctctcattttgtacatgacaatcttggacgagtcaatggggtgtatggtggggcaacatgacgaatccgggaagaaagagcgcgttgtttactacctaagtaagaagttcacgacctgtgaaatgaattactccttgctcgaaagaacgtgttgtgctttagtatgggcatcccatcgcctaatgcagtacatgctgagccatactacctggttgatatccaagatggacccggttaagtacatctttgaaaagccagctctcacgggacgaatcgccccgtggcaattcctgctatctgagtttgatatagtctacgttaccctaaatgcgat

SEQ ID NO: 22310 - DNA, 240 bp, Glycine max
agcttcagcaaagggatcacaggtcattacgggtaaattggcgaagcggttttatggaccttttcaaattgaggaacgcattgggtctgttgcttatcgtctcaggttaccggcagaagctcgcatacaccctgttttccactgttcattataaaaaccattcaaagggtcactggaatcccgtccacaagtttactggccgaacacaattatccagcatcaacccttgatcatgccttt

SEQ ID NO: 22311 - DNA, 410 bp, Glycine max
  unsure (1)..(410): unsure at all n locations
ntacaagtgtttacatactgaatatacatagtttatgtgaaaccaattctctgtggatacgatactcggtctttccgttttatactacttgtacgaatcggtacactagccgacaacaatctaacaagtttttggcgccgttgttggggaatttctttccacttagatagtatgatttagtttgaaaatatttattctttattctttgattatttcttgtgaatagttagaattcaattttatctcttgacttgcgacaggagatttagctccattagatttggagattgaagctacttgcaggagaaacaacgcagaaaggaggagaacaactttacaagagaggacagtctatccaagtgccaagagaactcttttatccgaatcatcttcatcatttctagcagact

SEQ ID NO: 22312 - DNA, 372 bp, Glycine max
cgcagctgcagctgggtgtcaataattatgtttataataaattttaaaacatattaatggaaataagagtgttttttattactaatgcaattaatcttaagatatattcaattctccttcaattttatataggagtgtcactaatcagtaaatcattataataagtattctatggttgtcacttctcacaataaaaaatacactcccaatctttcttttgagattactaaaatcccaaatattctttgttgaccctaagtcattttttaactttccaaacaacaaagttaattagcaattacagcacgaacacaaaaactttgctaagcaacacccatggatgatcgttcaatgaagagagcatagtttatc

SEQ ID NO: 22313 - DNA, 299 bp, Glycine max
agcttgagataaggaagtgttgaagggttaatacttcctgcttttattgttgaccacagagtggtaccctggaaaatatgtcgcggggggtcaggaaaaccttggggaccttcaggtgggggggcttttgccccaaacccaagcttggcccaatcccaacccaccccggcctaattcgtcagtgagaacttgtgaattacctaaacaggcagctcctggcagcaacagaataaaggaacaaagactacaaagcaaggaagcttgtggtggctggccacctgcgaactttgactgatatg

SEQ ID NO: 22314 - DNA, 250 bp, Glycine max
agcttgaaggtaaactagacaccttggttaagctagtaactcaactggtcctgaataaaaaatatgtacctgttgcaagactctgtggtctatgctccactgccaaccaccatacatacctttacccttctgcgcatcaatcttgagcaattgaacaacctgaagctaatgctgtacacatctacaatagaacttctcaccttaaccgcaaaatcaaccagagcagaacaattatgaccctcgcagcaac

SEQ ID NO: 22315 - DNA, 386 bp, Glycine max
  unsure (1)..(386): unsure at all n locations
agcttaaatctagtttttaaatatacttttgagcacatactcaacattgatgtaatttaattaaaaatttaatgacaaatttcttctattttttacacaaacaaccatataaaatataaaactaatttaattacaaatttcataaaaactatacattgaaacttctacaaaaaaattactttaaaaaaattataatacaaatcacgtatgaagaatagctaccacacagtataaaatataaaatataaaactaatttaattaaaattataaaactaatttaattaaaaaattaataaaaactatacattcaaactgctataaaaaatgacttanaacaaattattcctacgaacctgatttagatattgaagcctcaagaagcaaa

SEQ ID NO: 22316 - DNA, 420 bp, Glycine max
  unsure (1)..(420): unsure at all n locations
ntactaaaccaatcacacacatacacacgcgcgtgtgtatgctcactcacacgcacacacacacacacatgcatacatagcatgaaattctatgattcaaaatatttaactactaaaattaaattcatgcatgcacaaatgacacaacatggaattttctttgttagtctaagttttaatttttcagggtgttacaactctaacttattttaattatttcacatcatataactagacactttaattagtcaccaaataattaaactaaaattctatctttaaactaattgtatggtgatttacaaaaataccctccactctaaactcttatgacttaattacccaatttctaattccatgatatctagatcaccattaatcaaccttaattatccccacttaatttctaaccttacatta

SEQ ID NO: 22317 - DNA, 332 bp, Glycine max
agcttgaaactagtgcaacatattcgatttttcaatgactataaatgacaagataaatagtgcttatgtagttttaattatcttgtatttttgaaggtgagtactgatagatcgctcactttctatgaaggcgatggtaatccaaatctaaatgttctgcgagatatcttgttgacatattcattctacaactttgatcttatttattgtcaggtaactatgcagtggatcttggacttaattctatctattgttaatatcatatatgttgaacaccatgatgttggagtcaattgtatatgttgctaatatgatttacctcggttcttcac

SEQ ID NO: 22318 - DNA, 422 bp, Glycine max
tacaaactacatagaccggtaagggtacgtacactgttttttctgctccaacatcatccatagatgacccccacttgtttcgtgtcatcccgttaattttaattcatatatactttcttttttatcatgatcatattgatatttaattgtctgttcttgggttagtataagaatttatctttatttcatacttcttgttgaattattttgtttggtggtgtttatgtctaaatatcattgaaggatgatataaaaatagtgattgcttttgctctaatcatttatggctaatgataggatggagatgggtttagtaaagtttatttgtggaattcactaaacccatatgttataagataaaggactggcaaagtattgaaatatgtttttaatgcaattaaagggaatttaaaagggaaaaa

SEQ ID NO: 22319 - DNA, 202 bp, Glycine max
  unsure (1)..(202): unsure at all n locations
agcttatatctttntncttgaaatgggtctactgatcactattaataattgactgcgccatttgttcttatatgcaatgcaacagcgaaatgcaaaaatcaaaagtctcacacggtacccacatgtccttccaatctaaaaaattcaaagaattgaagatatcgaaatctattatattattttagacttatactaactttat

SEQ ID NO: 22320 - DNA, 412 bp, Glycine max
  unsure (1)..(412): unsure at all n locations
tctacttgggcctgtcttaaacctgtcctatacttgattcttatttngatataattttatgttgtttgattgctttcagatcaaaaagtatactcataattcataaatcataacaagttttttttttcttgttttaatcacttttcactcttgctggtgtctaagatgtgacatttattcttctgtaatcttgctaacaaaggaggagaaaaagatttaacaaaaaaaaagagttgtttcatttttaatgttattaatttgacatttttaaacaacattagtaatttaatcttttaattatttattttaatacgtatccctttttgcttcaatctaatattcttttgctaagataataatctcataggtgataaaaattatcataatcatcaacaaactaacttatttacat

SEQ ID NO: 22321 - DNA, 289 bp, Glycine max
  unsure (1)..(289): unsure at all n locations
agcttgaagatattttatcttttacctttccaactcatttaagtgacatttgtattggttgttatattgaatgttgcatcttaatccatatcatatgntttgtgcatcatgcatcatcatgagtaagtgagaaagaaatttttgttagaaaagtttctttggaagacaaaactcaattttaattaattacaatcttatcataatcgattacacaagttgtttgaagcttgcagagttatgtcttatatcggtttaatcaattacaagcttattataatcaattatatgg

SEQ ID NO: 22322 - DNA, 419 bp, Glycine max
cttgaaaagtgttgtttttcaccttctcgctaagccatttcgctggcttagcgagtgtctgctaagcgcaacactcattggctaagcgcaaggaagaatctggaagaagatgagttgtgcaggttcgctaagtgcaccgcttcatctcactaagtgcaccacttcactccatccgctaagtgagaaaggcacacgctaagccgaaattcactaatgtgcattaagcggtccagaattgtgctaagcgaatgagcacgaacaaggccacctatttaagcctaaaattagattctgtgaagagagtttgggctgggattcaaagctttgcatgtctagagattctagagagagaaaggtccaagtttcacagagttttgagagattttgatatgtgaagatctgcagagacttgatcttga

SEQ ID NO: 22323 - DNA, 286 bp, Glycine max
agcttgcatgattaaactgacaaatgatttctctttttacaaacttctctgttattcatccataacccgaaattaaatcctaaatgaacaatgcaagattgatttagggggaacaatattctcagatcttaaccataggttgataattaaaataagaggtattaaccaattaattggtaatcgagagttctaaattaaacaaggaattaggaggaaaatggtacatgtgaaatcctaattcgagtcacttttattcaaacatatatcttctttgaaactcttgtat

SEQ ID NO: 22324 - DNA, 417 bp, Glycine max
tgaagaggatgctttaatggaggaaaagaaagagagatggggggagcacgaaattgaaggaataaaagagggagagaagtggaactttgaagtgtatcttataagactttcattcatcaaagttacaacaagtgttacacatgcttctatttatagactaggtagctttcttgaaaagctttcttaagaaaacttccttaagaagcttctttgagaaaacttccttgagaagctagagcttagctacacacacccatctaaaaactaagctcacctccttgagaagcttccttgagaagctagagcttaactacatacacccctctaataactaagctcacctccttaagaagagaagctagagcttagctacacacccctataatagctaagctcaccctcatgacataatacatg

SEQ ID NO: 22325 - DNA, 210 bp, Glycine max
  unsure (1)..(210): unsure at all n locations
agcttgagatgaggaagtgttgaagggtgaaacttcctgcttttattgttgaccacagagtggtacctggagatatgtcgcggnggtcaggagaccttggggacgtcaggtggggtgctattgcccaaaaccaagcttgaccaatcccgacccaacccgggcatagtcggtcagtgagaacctgtgatgtacctaagcaggcgagctcct

SEQ ID NO: 22326 - DNA, 345 bp, Glycine max
  unsure (1)..(345): unsure at all n locations
nttcactcggagatctgattcaggcgcataatatattttgacgcttgaaaatgaacaacggaagctctcgagaaattccaatgctcattacctttaactcggaggtctgatttaggcgcctaatatatcaagacgctcgaaattgagcaacggatgctctctagaaatttaaatggtcataacttttcactcagaggtttgattcatgtgcatgatatatcgagacgctcgaaatttaacaatggaagctcttgagaaattcaaatggtcataaccttaaactcggaggtgtcatttaggcgcgtattatatcgagactctcgaattatatcaatggaagctctt

SEQ ID NO: 22327 - DNA, 325 bp, Glycine max
agctttgcggatttggtcttcgtcggttataggatcaaagtgggtatggaaagaggcaaatatgattatcttgctttgatgaatgcgaaaattggggcaaatgaagagggtgagaatgaaggagaagcccatgctgcgactgccgttcctacatggaaactcccccaccagctcaacaacatcattactcagccaatatcagcccttcacattacccaccacccagtcatccataaaggccatccctaaatcaaccacaaagtctgtctaccgcacttccaaaggccatcccatatccactcgataattcaatggtagccatgac

SEQ ID NO: 22328 - DNA, 422 bp, Glycine max
ttcataagtgaaatcaggtgcaaccatctcccttagatttctctcatgaggtggaggttgagccatgttctcagtatgaaaattagtagttgaatgctcaaaatcagaatattcagaatcaccagcaacagaatacccagaatgctcacaatgctcaaaatgcatagaatgatcaggatgcacactatgcctaactaatctatgaaaggttctatctatttcaagatcaaagggttgtaaatcacctggattgcccctagtcatgcactatatgcagcaaatagtgtgttctcaatcaagcaccaagggagggttaaaactacaactatagtcaaacgatatcagaatgagctgaaattttgtgagcaatacccttaaatcatgaaaatatagcacaataattttcagacaaaagatcaaag

SEQ ID NO: 22329 - DNA, 342 bp, Glycine max
ctttgttcaaggactaaaaacttagttaatcctttcttttctccttagtctgatcctggtttggttgctggtgcacttgctactgtcatgggttcatgcttatgttttatatcctttttctaggaaatggaccatctgaagatggcagtggcaaagatagcttcacaccaaccaaacatcttgttggtggagaaatcattctcacgatatgcacaggaatatcttcttgcaaaggacatatctctggttctcaatgtcaagagaccatctttggagcgtgtagcacgttgcacaggcactcatatagttccttcaatagatcatctttcttcacaaaagttg

SEQ ID NO: 22330 - DNA, 214 bp, Glycine max
  unsure (1)..(214): unsure at all n locations
agcttgcttccttttgatttctgacactgtctcgggacttcattcattgtccaaggacgccaagtgtctcgaagcggccaatcaaaggttgtatatcatcaaataataatccccggacgaaattagggtatgacagntgcccctctttacttacctctcatcggagataagaggaaagcaaagataggacactgatttcgtccgtcctgccctt

SEQ ID NO: 22331 - DNA, 372 bp, Glycine max
tctacttatgtggcagggcgggcttccttcactttcttgtctccaacgcgagctctgaccactgttcttccttcccgcgatgcttcttttcatgtccgcctgagtgggcttatagcctaaaccatactttccacgatttccttgggtttttatcatgctagttatgccgccattgtctttgcctaaacccatcccgggttcataaccgttccccaacataacttgggccatcattaccgccgcatcggacagacaaggttgcccaaagagggagttcacggaggaaatgctgaccacctcataagactggaaagcggttcttaacgattcttttgctgcttccacattaggcatggaggatgggcagcttac

SEQ ID NO: 22332 - DNA, 273 bp, Glycine max
agctttgcggatttgttcttcgccggctaaaggatcaaagcgggtctgaaaagaggcaaatttgatcatcctactttgatgagtgagaaagctgggacaaatgaagtggatgagaatgagggataaacccttgctatgactgccattcctacacggtcacaatttccattagcccaacaatgtcattactcagccaataacaatccctctcacccaatcatccacaaaggccttccttaaataaccccaaagtctgtctacccccttcaatga

SEQ ID NO: 22333 - DNA, 415 bp, Glycine max
  unsure (1)..(415): unsure at all n locations
cttcacctttggtcctcctcatagttgttgcattatatttcatgctctatntacatctcccactccaagtatgcctccggatcattctttcctttaaagggaggaatgttgagtttaataccatcaattcggttttgtctaggaacaccatcattttctcttctcctcctttcttcttcattatgatctctattctccatttgatccaacctctcatggagcgcatcatctcgttgtttcgttaacctcttcaaatgttgcaccaaagcttgcatttggaattgcaaaagcccccactccatcattaggattagtacttgacatctcaaacaaacaaatcaaacgttacaagacatttatagttgctgtttgaatacctcattcactcaagtgtatcacacatctattgcttttc

SEQ ID NO: 22334 - DNA, 163 bp, Glycine max
agctttgtaccttgtgcaacagtcggttagtttttgtttatattttgatgtaatctttgtacccttatgtatccctcttgatattatatatgtaatcttttctactcaaatatcacttgagatcatttcaagtgttggatcgagtggcctcaaaataattcag

SEQ ID NO: 22335 - DNA, 124 bp, Glycine max
cgaggacgggcctggattctgtgaacatgagattatttccaacgcacaccttgcgtatgacgagttttgtgtgcaatgcatgtgatctactctctcatacatggcacactccatgggtggctga

SEQ ID NO: 22336 - DNA, 350 bp, Glycine max
gtcacctgcacgcatgcaagcttgtatttaaaaatgttttaaaaaatcttttaattattatttgaatttttattcctttattaatatatatgtgaggggtagagggtgtcacagttaagcctttgttttaagaactacatctatattgagttaaataataaaactcgcgagttcttcatcaaaataaaaattgaataaataattttttatttgatttatattgcatcataatcttaagatattaaaatttaaagtacaaatttgtttatcttaaaatatattcattttacaacaatgcttactttatgactaccataagacaaagaaactcttatctatatatactctct

SEQ ID NO: 22337 - DNA, 427 bp, Glycine max
  unsure (1)..(427): unsure at all n locations
cgcttacattttacaaggccatagttaactaacatatttcatacatagccttacatttntattaaggctcatagtacttatatgcctgaagctgctttgatagtttgttaagggatacctttgtggtctaagattaaaatttatcgtatactttagtttcatcggcatgagaagaaagatagttttccatataaaactaataaacattatttaaatgatataaacatattgcatgtttccatactagataaacatcacaaaccatgaatgacacatttatcattccatacatgctacagtttatcattaatattgtccaatcagaaaacgttacatataaaaaaatctaatattcctatacagaatcaatacacccgccaaatatgcaccatatcatatgagacaattctttgcaaaacaatctatt

SEQ ID NO: 22338 - DNA, 302 bp, Glycine max
  unsure (1)..(302): unsure at all n locations
agcttgctcgtcttgctgatatttatcatgcagactnttctgatgatgaccgaggaacaattagggatcaacttgaaacttatgtgctttaagggaagaagaaatgcttctttttccacttgtgaaaatgttcaaagtttggctatgaagatggttcaaactgagaaacattnggtatttccattggtttataaacttattgagctagctttgatattgccggtgtcgacagcatccgttgaaagagctttttcagcaatgaagattatcaagtctaaattgcgcaataagatcaacgatgt

SEQ ID NO: 22339 - DNA, 409 bp, Glycine max
cttgagtcatcaaatgattataaatacgtgaccatggttcgaatttcaaagactgatttccttttatgcataacatatttccttcgtctttctaaaagtgttttgttcaatactttctcttgcgagagaagtttattgaccaaaaactcgtgctattctttttcttcataccttctctcttgtcaaaagattcaaaggactaaccgcctaagaattcttttgcttcttcccttcttcctcttgacaaaagatttcaaaggactaatcgcctgagatatcttctgtttcttaccaaagacttcaaaggactaaccgcctgagatatctttttcaaatcatctctaacttgtgtaatcgattacacaatacttgttaacgattaccggtgtttctaacgttttgatttcaa

SEQ ID NO: 22340 - DNA, 334 bp, Glycine max
  unsure (1)..(334): unsure at all n locations
ngagatgaggaagtgtagaagggtgattctttctgcttttattcgttgaccacagagtggtacctggagatatgtcgcgggggtcaggagaccttggggacgtcatgtggggtgctattgcccaaaaccaagcttgaccaatcccgacccaacccgggcatagttagtcagtgagaacctgtgatgtacctaaacaggcgagctcctggcagtcaacagatataatgaacaaagacgacaaagcaaggaggcttgtgtggtggctggccagctgtgaatcttgattgatatattggatatggcctctggtaatcgattaccaagggtgggtaat

SEQ ID NO: 22341 - DNA, 306 bp, Glycine max
agcttgctatcccctctcttataaggatttatatttcctcatccgattctgatgatgatgtcgaactacatgtctcgacatctaagagggccaagaaatctggaagaaagtgcctggaaatgttcctgatgcaccattggacaacatctctttccactccattggcaatgttgaaaagtggaaatatgtgtatcaacgcatacttgcggttgaaagagaactgtgaagagatgccttggattgcaaggagatcatggacctcatcaaggctgctggactgctgaagactgtcagcaagttgggaga

SEQ ID NO: 22342 - DNA, 170 bp, Glycine max
gcttgtgtttgcaattgcgagtgtctcgagatattatttgtctcaatcagacatccgagtacaaagcgattgtcgtctgaaatcgctaccaccttccgactccaattgcgagcgtcttgatatacttagggagaccatggtacgtcctaaaaagaagaataagtcgggtg

SEQ ID NO: 22343 - DNA, 356 bp, Glycine max
agcttggtatattttgctccgcaaatattatgttgagactagcacttggctagaaggaatttacaaaatgaaagaaaaatgggctagttgctatatgaaagatgcttatagtataagaatgcaaagtactcaacttagtgaaagtttcaatgctagtgtgaaagattatgttagatcaagcttggatataatgcaaattttcaaacattttgagcgagctgtggatggcaagcaatacaatgaattagaggctgaatacaatagcaggaaaaaacttcatcggctaaggatagaacactcaccattattaaagcaggttaggcaactctacactccaaaaatattaaatttgttcc

SEQ ID NO: 22344 - DNA, 419 bp, Glycine max
ttagtacattagcattaggatggtccaatctaatgtgctcatataatttgagagctagtactaggtgttattttgacattagaaataggatcagaaattgtatttacaatggaattggaaacttgtgcattacaactactagaaatagatttaacagcaaaatcaacactagaatttgaaagcaagaaggtgattgaagcaaaaataaagtctttaagtacaagatgtggaaacttgtagagatcatcaggacctagtgaacattgtagtaggacttcattggttccttatgatttcacaacataatgattaggacaaaaatcaaagaaaacattgttatccttagagaacttgttgacactaatcaagtctttagtgatagcaggagcatgcaataattgtttcaaggatagagtgac

SEQ ID NO: 22345 - DNA, 303 bp, Glycine max
agcttgcctcaaagaggtctcaggaaggtcataggcggccgaaggaactagttccgccccggagtacgatagtcaccgctttaggagcgttgtacaccagcagcgcttcgaagccatcaagggatggtcgtttctccgggagcgacgcgtccagctcagggacgacgagtatactgatttccaggaggaaatagggcgccggcggtgggcaccactggttactcccatggccaagtttgatccaaaaatagtccttgagttttacgccaatgcttggccaacagaagaaggcgtgcgtgacat

SEQ ID NO: 22346 - DNA, 334 bp, Glycine max
tccgttattcaatttctagcgtctcgatatattattttaccgaatcagacatccgagtgaaatgttatgaccattcgaattcgtcgagagcttcttttgttcaatttcgagcgtctagatgagttatgtcaccgaatcggacatctgtatgaagagttatgaccattccaatttctcgacagcttccgttgttcaatttcaagcgtctcgatatattatgtccccgaatctgacttccttgtgaaaagattggaccattcaaatttctcgacagcttccgttgttcaatttctagcgtctcgatatagttatgtccccgaatcggacatttgtg

SEQ ID NO: 22347 - DNA, 139 bp, Glycine max
aactatcttgattcttaattgtgatccacaaccacacatatagtcacactgtaaagtgttttggactcaatgcaactgtttcacacatgcaattgcgatgtgccacccaatttttccgcatcctcaaaatgtcaacaac

SEQ ID NO: 22348 - DNA, 317 bp, Glycine max
agcttgttaaaagcggtttaaaagaaattcgaaagtgaacgagatgaaaatgaaagcaaacaaaacaagaaatgaattgaaagtctcggattcgaacacttaccggttgaagaacgaagaacaaatgaagaacggtgaagaacgacggaaaatcttcacggatttgctcacggaaatgtctcggaagcattacggaagcacctcgacttgaattttctttacagaaacacgttttttcacctaaaacaattgaaatgcataacataggggtcagggataaatttagacagcccccttcccctatttatagccaaaat

SEQ ID NO: 22349 - DNA, 375 bp, Glycine max
  unsure (1)..(375): unsure at all n locations
ngataagaaaaattatcctttagtgtatatattatcattagcagggtaaaacactaaaattaattaatttatatagttcaagaaataattgcaatgtataagttgtagttgactagcagagggtgctcatgggccatggcctaccctgttcattaatccaacctagctcgctgacttatcttaaaaattgggccatgtctaggctcaaatttctctactagacttaagctattcaagttgggttggacctgggttcatcttaaaagtttgacaacaatctttcgctttttgcacccaacattctacttgtgcacccaacaattgtttgatatttcataaatacccttgttacttcttctttcttttaccttcttc

SEQ ID NO: 22350 - DNA, 340 bp, Glycine max
agcttcatgcagataagattttattgcttttagccacaaattttattataaatagcaacagttctctgatgcaatatacatgattatttaacttggtctaatgataaattgtattaattatgtctctaaagtatgaaaataaagctcattcagtagccaatccacagctccacacaagttcatgacaaccctttcaaagcttcaacttgatagcagtttgaacatccttatcacctcggccactgaagttaaccacaaccttggcttccttaggaagggttggacacactttctctagatatgccaatgcatgaaatgtttccagagctggaattatgcc

SEQ ID NO: 22351 - DNA, 396 bp, Glycine max
tagttaaatttatgcttgcaattttttacttctagattatctctaccaaactaaacaatgcccaacagattgaaaaataaagaacaaatatcagttggtttaccaaaaagaactcagctaatgcagggcacattatttaatgaatatgtagtgtagttgttctcacgtaatagaacggtgaacaataattatatatactaaaactaatgactgtatgacatactgaaaattatgccagaaagggaaaatccagagcatttatctcaaacaacagcatcaaacatatcaattgcctgaatgttcaagagttcatcataatataaatttcatggaaagaatattcattagcgtatataaatttctgaattcaaattttgttagacgaataaactttta

SEQ ID NO: 22352 - DNA, 591 bp, Glycine max
  unsure (1)..(591): unsure at all n locations
cgactctctcgacnttgcnntcncngnttnnnncnatnntanntctccccatccttgtntcnctcatntccccngggggggggggaggcgtgggttgatgccttcgatgcactcgcanaccanccnncnnaagcnaggaaaccaaagcgnanngagagcaaacaaagcgacgatgcattcgctcaacgaaccangctgaggacgaaggtcggtgagtgatagcaccgagaatgaacatatactcctctctccatcctgaagaaagaatcgacattatgcacaacagaaccaaagtctcaagatatgcaccccaagccgtagacctctctgttcttcatatcttgagatgagatggtggccaccgatacccacgcaagccgtcgagcgccctagagcacactcatagtgaaaactatacgacctaatctcatcaagggaaggaagacgcaccagcataacaactccagggatagagaccaatctaggaataagcgcggatatcagatcatcacgagagcacacactctgtgaagcactggcattaagtactgttcggcagctacgccctgtatgacagcttgacaattaacc

SEQ ID NO: 22353 - DNA, 495 bp, Glycine max
agcttgcttctacagccatagccaagatgcatcaatgtagcaaactttaagacattttgcaacatcattttggatattcaacaagaacatcctatttcttggcattggtaccttggtgattagattgtttctcccatctccgatggaaatactggaatctttcaagtgaatatcatagacttttttgagtaattttccgaaactcaaaatatagttcttcatatttaggacgtagtatacatttgatatgaatttatgtcttccatccttcaaacgaatcaagatcttaccttttccttttacaggaatcttggaattatcaccaaatgagacattgacacttattgattcatcaagatctatgaacatgctttttttttcttcacatatggttgcttgcaccagtgtcaaggtaccatgtgttttcttggctaccttcattacctccacgtgctaggagcactgtttcaaacttctcatctttttgctccacat

SEQ ID NO: 22354 - DNA, 550 bp, Glycine max
ccttgagatgaggaagtgtagaagggtgaaacttcctgcttttatttattgaccacagagtggtacctggagatatgtcgcgggggttaggagaccttggggacgtcaagtggggtgctattgcccaaaaccaagcttgaccaatcccgacccaacccgggcatagtcggtcagtgagaacctgtgatgtacctaaacaggcgagctcctggcagtcaacagataaaaggaacaaataccacaaaacaatgaggcttgtggtggctggccaactgtgaaacttgattgatatgtgagatatggtctctggtaatcgattaccaagggtgggtaatcgattacaaggcttaaaaatgaagacaggaagctaagatggtctctggtaatcgattaccacggggtgaaatcgattaccacgcttgaaaaacgaggtctggaagccatgagggcttctggtaatctattaccaaaggggtgttatccactaccaggcttataaaggggactggaacattgtggacgcctctggttatcctataccaccctgtgt

SEQ ID NO: 22355 - DNA, 603 bp, Glycine max
agcttgctaacccatggaagttcctaatatcttccacactttttggggtgggccattcttggatggccttgattttctcagggtccacttggacctcatttctaccaactacaaaccctaagaaaactatattatctacactaaaagtacacttctctatatttgcatagagggtgtttttcctaagaactgaaagaacttgcctgttgtttagccttccatagtcatcacaaatagaagaacaaaaaaaattgcacaagagagagaagaacagagttgaagagatgaatacatacaaagaacaagtaagagaaaaagagagagaagagtttgatctaaaacttgcactagaagtttctaaaaatgggttttttttacaaaaatgactttaactaactaactaactaactaactctgaaaatatactaagtagaaaaatatatactctaactaagaagaagtaatgggtgggccctaattaagcccacttaatctctccaataagctaattacagaatgcaacgtcccaaaattcgcagcccaaaatccaagtgcagaggctctaactttcaagctcaaaatgaccctcaaaacagcataatt

SEQ ID NO: 22356 - DNA, 674 bp, Glycine max
  unsure (1)..(674): unsure at all n locations
cttgctaccgcctgaacaattagacactgactcacatagcataatctgataacacatcagacacatcttttaatatttgtatttatttacatctaatcaaaattattaggagtcttgatttgttttaagacatagatgtatttttgatttaacaccatttctatacctctaaaacttctacacattgatttgtttgatccaactagaacaacctttgttagtgttaaaagatatggacttcttgttgatgatgattacactagatggacatgagttatgttcttaactcacaatgatgagtcactaaagatcttctataacttttgtaaacatgttcaaaatgaaaaaaggagtatgtattacttcaatggaaagtgaccatgaatgagagtttgaaaataaaatttttcataggtgttgtaatgagaatggaattttccccaacttgtctacaccatgaacactacaacaagatgatgtagttgagaaaaagaacatgtcattgaaagaaatgactagaaccatattaaatgattactaatctcttcaacactnttgggatgaggcagngaatattgcttgttatatttgcatccaataggaacttcatccaaaggacttattgtccaatggaaattatgtccatttgcattgcatttttgtgctttcatatg

SEQ ID NO: 22357 - DNA, 480 bp, Glycine max
agcttggagtggtgaaccacctgattatttttgttttatagtgtttggatcactggcctttgctcatgttaaacaaggaaagttggatgcaagggctgtaaagtgtgtgctcattggctatcctgaaggagttaaagggtacaagctatggaaattggaacctggtgagacaagatgcatcatcagcagggatgtaacctttgatgagagcagaatggcattgctaattaaggagcagaaagataacaacttaagtagtgagaataccaattttgaggtggagcattctgagaagctggagataatgaagagctggttactaagcatgacttgcccaattatcaattggctagagatagagaaaaaagggtgataaagccttcaaagaagtatggtcatgttgatattatatgctatgccctgagtgttgatgaagagattcaaaattcacaaaccatagacctggagggaagtaattga

SEQ ID NO: 22358 - DNA, 641 bp, Glycine max
  unsure (1)..(641): unsure at all n locations
ncaacaacaggtgctcggtgacgttctaatagtctcatataagagttttttctgattgcttttctaagaacacccacaatagactatcctttatctgaagttatccttttgattgatcattcttaccacaaaaacaaacatacaccccaatgcataagaacccccacgtaatagtacaaaaagtaaacgaacacaaccttacctccgcaagatgaataatgcatatgtatcttgattagtatcaatttataatagctttgtgtgtgtgttgatatatattaactattataaaatcaatatatttatcttaaaattattacattattaatgcataacctatttttttatattaaataatagaatagatactttttttataggaatagaatatatatactaataagttattagtatgagaataccatacacaatctctttaagcaaagtctgtgaataaaaaaacataattaaataaaaattccattacaaatgatcaaccaagttctctctgataaaaactaatcaacagtgagtactccctacaaataatatgactatcaaaaaaaataaaataacaaccgactgtactatgtttcaagactaaattcgttaactactctgttatggaattttataattca

SEQ ID NO: 22359 - DNA, 499 bp, Glycine max
agcttgtacagcgctaggcaatcaattcatgatatttcgaataagatttgagggtggaggatagacaaacagtgcttggcaatcaattcgtggggctacggataagattttagggtggaggaagcatgaatagcgctaggtgtcataccctaatttcgtccggggacctttgcttgatgacatgcgacctttgtttggtccctgtaaggtgcttggcacccatcattaggcaatttgtgaaattccaggacatgccgaaaaacaaaagaaaatattgatgcacaatccgtaaggttccgtgacacaccgaaaatcaaatggaagcatcgttgcataattagtgaggttccgtaacattccgtaagtcaaaaaggggatgattatgtaatccgcaaggttctgtaacattacggaaagaaaacaagtatccgtaccaaaattcgaagtttccgtaactttacgaaaaaaaagagtcacaaaaaaaaaagcagagggggtg

SEQ ID NO: 22360 - DNA, 437 bp, Glycine max
tagcaagattacccatcatatctccccaaaaccccatacccacgaaatttaagagagaaagaagtccacccaaacctgaattttcgaagtcccactcgtagccacgcacttcacgatcccgaaaatgctcttctttcatgatttggggcagaaacgggcactaaaggttgaagctttgtatggagctttaatggagaatgagggaggaagaaaggcaacgtgagggagagagaaagctgtctgaaaaaaagtgagggctgagtgaagagagagaaaagctttttggttttaaataaaagggtttcctctttttctattattttattcaagctctgccacatgtccctatttgattggagcaaaagggcccactttctctttttgactgtgacccatactcagtcacaaaagtgagaaaaatctgacctttgaaacgc

SEQ ID NO: 22361 - DNA, 496 bp, Glycine max
agcttgctatcccctccaagaaaaggaaagaattttcctcatccgattctgatgatgatgtcgaactagatgtctcgacatctaagagggccaagaaatctggaagaaaggtgcctggaaatgttcctgatgcaccattggacaacatctctttccactccattggcaatgttgaaaagtggaaatatgtgtatcaacgcagacttgcggttgaaagagaactgggaagagatgccttggattgcaaggagatcatggacctcatcaaggctgctggactgctgaagactgtcagcaagttgggagattgctatgaaggcttagtcagggaattcattgtcaacattccttctgacataactaacagaaaaagtgatgattatcaaagagtgtttgtcagaggaaaatgtgttagattctcccctgctgtgatcaacaaatatctgggcagacctactgatggagtgatagatattgatgtttttgagcatcaaat

SEQ ID NO: 22362 - DNA, 245 bp, Glycine max
  unsure (1)..(245): unsure at all n locations
gactctatanaactctcgctgttgataatggcctgtgtttccccacctgacgggtctttctttgacactcgacgcaaacgccatggctgactcggattgctgcagatcatcgcttaacgggagcatgcgatacaggcaacgagggagctgatagcgcaccgccgagaaaaaggctctgattgggagaataagtgcactaagaggcatataatgtaactgcctagggcagttacgccgtattgatt

SEQ ID NO: 22363 - DNA, 640 bp, Glycine max
gcaagcttattgataattagccatacaaatatgaatctcaatagcacagaagcacttcttgtgctttttgcatttgtcttcttggcatggggcaatgcacaaaatacccttgtgccagcaataataacatttggtgactcggctgtggatgttgggaacaatgattatctgcctacccttttcaaggctaactaccctccttatggaagggactttatcaaccatcaacccactgggaggttctgcaatgggaaactagctactgatattactggtgaggaaatatcatcaaaattgcaacttacttagcatggatagaaatagtgcacatatattattttcattcttgttgaaataatgtttccttttgcagctgaaacactgggttttaagagttatgcacctgcgtaccttaaccctcaggcatcatggaataatctttttattgcagcaaactatgcttcagctgcctctggttatgatgaaaaggctgctattctgaatgtaaagttggaataaacagtgcacacacatgcaaactcatcttggagaactaatcattattttaactgtgtttttttgcagcatgcgattccattggtcccacagttaaaatattacaaggaatactgaggcaagc

SEQ ID NO: 22364 - DNA, 453 bp, Glycine max
taaggcccctcccctggcagaaagtcaaaaaaatgagttattatagagataaaagtcagatcttggccatcatattttagtttattatattagttggatatcttattctctgctcttgtacttcatcattttataccgccaataatatttattggtataaaaaaaaattgagtaaattgcaatatgtacacctcaatttatgcaaaaaaagaaagatacactgctattttcaaatactgcggccacatttgagagctaaatgcttctgtaaatattttttgcagttctctcaagatattaaaagaaacaattgtttttccaaaataagctaatccaaacacgctcataaaatttaattaacattagaagaattcacatttttcaaacatatgactttatattcaatcatgaaaaaagttattgtataacaaaatgggattgcactgaaacagt

SEQ ID NO: 22365 - DNA, 492 bp, Glycine max
gcaagcttatcctgtggccgccaaagccttctgtttttctgttatagcctattataatcgagtagatgggccttgttctatggtaatcgattacagggagtagtaatcgattaccagatcctaaaatatggtatttcaagtgaaataatcacgaaaatcaattatttgtcacccgcaaaactacacatttattataaataatcaaaatagacaatcgtgaacaatcatcataaacaatcaaaatagacaatcatcataaataatcatgaacaataattagcaaacacaagcacttcactcaacaaaaaattaatcaatcatgaaagataactatcaaacacaatcatttttcttaatcaaaggaaacaatcatcataaacaagcataattaacagccattaaagccaatttattataaacaatcaaaattgttacgaatctaagttatttatgtctatgagtcctagtgctcttctaatatcaaagaaattt

SEQ ID NO: 22366 - DNA, 946 bp, Glycine max
  unsure (1)..(946): unsure at all n locations
tgagaatcctaagcagatacagagagaccacaaaacaacttgtctaatccgccctagatnatacatttcttaatacccnccnnncnncnnagaggttgtgacatcgataccncccctatcgaaaaaaaccccgcttcttgcggaaccggtcttggcgcgcggagaaagctttaaacaaatcccctctattacacaccattggtgaattggtgagttcccaaaatgtgcaacccatcaaatagggggcgcgggcaccccatttgggtcatggccggaaaagaagaaggaaaactccaaccaaaacacgggggagaaaatgttatcacttattaattacctccgaaccaaaaaggaaagaccaccttgtcacagggatttcaatctttaaaacggggaaaccacgggaattaaatggaaaacaaagggggttgggggggcaacatgcaacggccaaccccccaccgatttttcttcaaaatcaaggggtgtgagaaaacggcctcaagaagaaagccagacacctggtttatgggttggggatgcaccactgtccgaaccaattgtgccaaccaaactatggcggtctcttcatagagaaataaggaattcccccctgtacccgggctatactccacctggtaggggcaaaaacggggttcattaggaaaaatggacctcgatccctaaacaaacaagcgaaaaaatcgcccctgtacaggggatacctcacaccaccagcacacaaggtgatcgccaaaagaaaggggagcatcatgtttgctaatggcctcctcctgaagggagagatactaactctaaagctacggatagttgaagaagcaaaacttcgtcaatccaccaaagagtaattcttgagaagaatactgtttgtgcttaaacaacggctgggccggaaacgacctcacgcgccctactgacctcatcg

SEQ ID NO: 22367 - DNA, 538 bp, Glycine max
tcctcttagtcacctgcggcatgctagcttgtacagcgctacgccatcatcacattttttttcctacaaaagtggaaggtggaggcttacctatctttccttcggcattcaattcgaggggctcctgatagaattttatgggggaagaatcttggaattcccttgttcacatactctattctcttcccgggacccctgcttggtgacatgcgccctgttcctgacccttgtaaggagcaactctcgcggcttatggcgacacgtgaagtttggagacttcctgaactctataccgcatttttgtgccacatgcctcaaagtatggatggacttcttgaataaaacctctgcattatgcgctattatgtgaggttccgctgcttgccgatccacagaagccggctgattcatcaaagaacttagttccagatgcttgaagattcttcttaacccttgatgctggatgacattgttaactatattgtgcccaaaccaaaattccttggatttgacactaaacctggcttctatcgatgat

SEQ ID NO: 22368 - DNA, 529 bp, Glycine max
tgaacccatctttgtataggtgaaccctcttaactctattttccaaaattctagttcaattgcatttaacacaaggacatatgatcccccatcattgtgtgataacaattttgttgactagctttgcaaacaaattcttcaacccccttaacaaaagactctttcaaacaacttctaccactataacatctatcgtacatccaacaatgattcaaaagaatatagctcatattttgtatatttaagaagaaaaaatatgaacattcatgaatcacatacataatcttaaagtgatctctattattagtcgcaacaattatgatcatgttttaggtgaaaaaaatcacatacatatggtttttgtctttctaaatgaacaaagcatggaatgtaaataatataaccacaatcacaaatatacttaacacatttagaatacaaaatttcgaacaactaaaataaaaaaaccacaactaacttgaacaatggaatgtacaacgatcacgtaatacaatctcacctataaact

SEQ ID NO: 22369 - DNA, 382 bp, Glycine max
  unsure (1)..(382): unsure at all n locations
gcaagcttngacagcgctaggcaatgaatgcatgagactccttttaagattcgagggcggaggatagacaaacagtgcttggcaatcaattcgtggggctacggataagattttagggtggaggaagcatgaatagcgctaggtgtcataccctaatttcgtccggggacctttgcttgatgacatgcgacctttgtttggtccctgtaaggtgcttggcacccatcattaagcaatttgtgaaattccaggacatgccgaaaaacaaaaaaaaatattgatgcacaatccgtaaggttccgtgacacaccgaaaatcaaatggaagcatcgttgcataattagtgaggttccgtaacattccgtaagtcacaaaggggatg

SEQ ID NO: 22370 - DNA, 359 bp, Glycine max
cgacttatcatcctcaatctaatggtcgaacggatgttatgaaccggataaatgagcagtttatgcgtgcctttgctcatcatcgaccatcgccatgaggtaaggacttaccttgggtctaccggtcgggtgagacttgcaaaagtactatcactggtacctccccatattaggtcacatacgagaatcaaccatcgacaatactggagtatatcacatgctcttctttattatacgcatgggacacattactcaccacatgtgaagaagttctagatagctgaccacataaatcgcttaaagcgcatgctcaaacgaaacattgtgcttacactgaccgtgcccaagtcctctatgct

SEQ ID NO: 22371 - DNA, 435 bp, Glycine max
  unsure (1)..(435): unsure at all n locations
gtgaaaaaaaagaatgtttttttgttagaanngggggaaaagggagagtatttatactggaaattgagcacccacgggtatgagtaaaaaaggggccctataaccgggatcatgggaatataaagagatgaaggtgaatctatcatcatgctaggtctgcgggttgattgataataatgaaacctcgcctagagctttatatctttataatatgacgacgctggtattccataccgccacaatattattatcttgagtgaggatacctctagaaaacagacgtgtgagttataaattgtaggggaagagctatgagagacccctagatattttcctataggttcccgaataggggcgaaaagcacacgcgctctgtgccatttgctcgtatgcatttttgggaaatatcactattttatacctttgctagggatg

SEQ ID NO: 22372 - DNA, 496 bp, Glycine max
ctagatagtggactaactttaccaacctgaagtttatttctttgaaactaaaagcaagttaaaaggcttacttggattgctgaagatgaaagctaaacgggagcaaggatacatgctacgaggaagttgatagcacagcgcagagaaaatggcaatgaatgggagaagaaatgcactttaaggcataaaatgtaacttcctacggcagttacgccttattgctttttggcagtttggactgcctcgcttagcatgtcaactcgttaagcgagcatgcaatgacatttgagtttcaaactcatgcactaagcgggcatgctcacttaccccaattcaaaaatttcaaaattttaatttccaaagaagtttttgggcttagcacgaagctacgcgcttagcgagttctgcagctctgattggcctacaactcacgcttagcggaccataggccgcacttagcaaataacatactccttaaatgcaatgagtgggtctc

SEQ ID NO: 22373 - DNA, 428 bp, Glycine max
aaaccggaccaaaaagaggcagatgagtgcatcctactcatgtgagtgacaaagctgggacaaatgaattgccagagaatgaaggatggaccctagctatgactgtcattcatactcggtcacatgtcccatgagcccctccatgtcattactcgaccaagaacaatgcctctcacccaatcatccacaaaggccatccctaaatcaaccacaaagtctgtctaccgcacttccaatgacgaacaccacctatagcgcaaacccaaaaggaattttgctgcaaaaagcttgtaggattcaccccaaatttcggggccatatgctaactcgctcccatatctacttgataacgcagcggtaaccataacccctgccagggatcctcaaccttcatattttcgaggataccacctcaaacgcaacatgtg

SEQ ID NO: 22374 - DNA, 630 bp, Glycine max
caatctttccctttaaggaggaatgttgagcttaataccatcaattcgggtttggctatgaacaccatcattttctcttgtactactttcttcttcattatgatctctattctccatgtgatccaacctctcatggagcgcattatctcgttgtttaggcaacctcttcaaatgttgcaccaaagcttgcatttggaattgcgaaagcccccactccatcattatgattagtacttgacatctcaaacaaacaaatcagacgtaacaagacaattatagttgctgtttgaatacctcatccactcaagtgtatcacacaactatggcttttttctaatgaaaacactcttgccttttaccactctaattcccctggagttcttaagcaactcaagagattatggccacaacaaagaacaattcaccaatatgtgtaaggtaaagctagagagagacaacgaaaagttaaccacaaaaaaggctaacaatgtttttatgcacaatttgaagaaataaaattcagaattaggaattcaagtaccattctttatacaaccaatatattaccttaaagaaattctttttctttaagaagttttaaacttgaacctttccccccttttttttttt

SEQ ID NO: 22375 - DNA, 430 bp, Glycine max
aaagcgctaccctgaccagggagattgtcatcatcaaggctgaccacaagcaagcacgacaacgctatgcagagagcctgagggagcatcatatccttctacaagggagcctgccgagcctcaccctacagaggctaaagccactcaagtcatgagcattgacgaagagtctcaaatccacgagatgaattcgacataaatccacaagatgacacctttaacagaggcctgatacccatcaaagagcttgtcaagctgcaactcaaaacctaaactcagacagtgcacacgggttagtagggaccttaccagccatgagcattggcacatcaccgacgtgctacacaaaaaatgtaatttgtttgcctggaagctgtctgacatgctgggaatccatcctaacataatctaccacaaactgtccatttgt

SEQ ID NO: 22376 - DNA, 489 bp, Glycine max
  unsure (1)..(489): unsure at all n locations
tttctcgctgcaaaatccacttcttggttggtgtttttggtttgtgctaaaggtggtgttcgtcattggaagtgcagtaaacagactttgtggtagatttaaggatggcctttgtggatacctgggtggtgggtaaggagaaggtttgttattggctgagtaaagatattgttgggttggtgggaaacttggtcgtacaggaatggcagtcacagcatgggtttctcccttatcctcaccctctttatttgccccagttttctcagtcgtcctagtaggatgatcaaatttgccccctttttttttttttcagacccacatcggtcctttcactggcaaagaccaaatcctcaaagctttgaaggtgtgtaacccaccatttttttcatagtagaacaccggncacgtgtctactatcattgtgataatctctttctctgtttttgggggtgctacttgagttgccaagcctttccatctttgggcgtg

SEQ ID NO: 22377 - DNA, 584 bp, Glycine max
agcttggtaagatcccatcagttgatcttatttgtttttaaaaattaaaaaaaaaaaataaccaactcactggtaagtgtccatgtgttttccagagttcataaaactaattaaaattcaaatattcctttcaaaaaaaatattagaatagtgaatataaaaacctggcctctgcaaaacctggaatagaaaaaacgaaaaggcccaaagcatcccatccatcgatcctccaactccatatttggcagtgtcagaacaaaaacatgggcagtgtcagaacaactccaaaactccaaccaccattctccttctgaatcttctcctctcctcattgcaatggccgcagctttggagtgctggtcgcgccgcgccaccaccaccgtcgacgaggaccacgccgtcctcatgcagccacccgaacaggacccaacaataccccaaccaagagactcttcttcttttttcattgttcacaagaagcttaaaaaactcacgcgcaacgtctccgaagccattgctttccttcaaaaactcccttacagcagcagcacccgtagcgtcgagttcttcaaacccgacgcgcc

SEQ ID NO: 22378 - DNA, 566 bp, Glycine max
cgtcaggaagcttctcaacgacgcgagcttagttattaaaggggtgtgtgtatctaagctctagcttctctaagaatcttctcaaaaaagcttctcatggaagtttctcaaggaagtgagcttacttattaaaggggtgtgtgtagctcacctctatcttctcaaggaagtcttctcaaataagcttctcaaggaagctttctaagaaagattctcacggaagctacctagtctataaatagaagcatgcgttacacttgttgcaactttgatgaatgagagtcttgtgagacacaactcatagttcaactgatctccctttgtcttccttcaattacgagctcccccctctctctatctctacctctgtcgtttgctccattgaaacattctctccaagcttcttattcaaggctcatcttggtggagacactccttcttccatggactattcccaagtggatggcgcctgctctcacctattatcatttgtcttctgctgcatctccatggtggaaaatcaccgttacctgacctcattgaagctcaaagatccaacctccata

SEQ ID NO: 22379 - DNA, 554 bp, Glycine max
agcttctatataagctgaaccattttatcaatatacacaagttgagttttattcagaaaattagagtttatctcttttatcttagtgagagggattctcctaaattcttgagtgattcaagaacaccttggctgtatcaaaggactttcacaacctttgtgtgttgccctcgctggaaagagcgattctttccttccattttatgccataacttccattttccatcatcacccttgttctttcaaaccacaattccagaaaatccacctctgcccagaattatctcgtggccataacttccattttacgcactcaaattaagtgattcttgagcctaaattgaatttcaaaacgagacctttcacctcgttttggaatcacctcatttaaagccctgtagcttcagttattgccatttctatatttctgtccagccaccacttaacctacgttttaccatctcattcatccattttatgccaagaaccaccttattaagacccaccaaattagccaccttattttccatccttttcttaatcattttccgcatt

SEQ ID NO: 22380 - DNA, 502 bp, Glycine max
tctaatctacgcttcccattcaacttcgagcgtctcgttatattatacgactcaattagacatccgagtataaagttattgtcgcttgaattttctcagagcttcaacattcaatttcgagcgtctcactatatgaccggactcagtcaaacctccgagtgaaaagatattgccgacttaattggctcagagcttctacattcaatttcgagacgatcgatatatgacgggactcggtgaggcattcgcgttaaaagttatagtcgctcgaattggctcagagctttctcatgctctttcacacgcttctacatatgactgtactctatgcgacatccgcgcaaaaagatattgtcgatcgaataggctcagagcttctaccattctctatagagcgtatagatgtatgactggagttaatcggacatgcgtgctaaacgatattggcgtttgagctggctcagagggtctacattcaacttctagcgtctccatatattac

SEQ ID NO: 22381 - DNA, 281 bp, Glycine max
  unsure (1)..(281): unsure at all n locations
gtttggaggaggaagcggggacctttttatantttttcaagaagggaagggccctctagacaatgtctgagaaaccatcctagtcacctaatgataactaattatgtgggccattaaatatatcttatgttggcaatagccgagaagcccatgaatcctttcgggggcggagtatgtgactgccatcctcttggccttggctaacaatcggggaaggtcttgagtcccgttcaagggtagagcgaaacgaacctttcacatgggttgctcttggtggaaag

SEQ ID NO: 22382 - DNA, 727 bp, Glycine max
  unsure (1)..(727): unsure at all n locations
gatccatagccctgaatcacgantttganntctcnctngngagtgaaataatgtggtattttttaaagggaatataaggtttggcttgaagataaaatttttaaaggaaggattgaattgatcatgtttataaaggaaaaaattaaagtaaataaaattgaaatttatatgggtggaagggatgaatgcatgaagaaaagcatatgaaacagaagcattttatgaatactgaagcctgggaaattgtttcttcttagatacacagtcttggggtaacacagagcctgacgtatgcttttaataatgtgacacagaccctttgttggtttgcctgagaaaagggaacaatacaaaaccttgtgcaggaagcatatgccaaaagctttcaacaagggggaatgtaccattagtaccaaccattatatctcaaaacaaatattaacgcaaaaagggttccatgacgggttattgccatggaaactggacagaaaatgggcaacacatcgggggtttgtttccttgccccatatttaacggactctttatgggaaggtagttaaaaggggtttttagtgaaaaattcctaagggggcataatttcttttgggaggtccttatagggtttatttaatttgaaaaaaaaattgtaccagtttgggttaattaacacacattctttttcaaaaaaaataaactgtaaaagagagtctacttgtatcataattcg

SEQ ID NO: 22383 - DNA, 329 bp, Glycine max
agctttgcactttatgcttaagcgccacacactgctctattgattgccctggagtacctccatgatacgcggaggtcgcgtcggggttgtaccatctcgggaaaggagactggtggatttttctaggggtcaccactgccaactggttggcgattaaagaaggccgcaagtccccatatgacattgtaatcagggcgaactccggaagcttctttactggagggttcctcccccaattggaacttgtgccatgatacaaatcgccgtcggcacaaagccttgcaagagtcggggctcgagcaacgactcttagtggtggggcagatgtg

SEQ ID NO: 22384 - DNA, 380 bp, Glycine max
taaagctaagtctattccaacaagagggatctgaggatgaagcttagtttaagttagtctaaaccttggagggctgtctaaattgagcctaatacaacaagagggatctaaggatgaagcttgtaacaccctgatatatatatctatatatttttagtaattatgtttgatgtttcattatttgttgcattatttttatccgtaattattttcaaggaggttaatttagttaatagaggagtgtgggtagataaagatctagcttctcaaagaagcctcttgagaaagcttctcaaacaagccaggaggaagcttcttgaggaagcctcttattgaagcttcttgaggaagctacatgatctgcctcggtaaaaacacta

SEQ ID NO: 22385 - DNA, 564 bp, Glycine max
  unsure (1)..(564): unsure at all n locations
agcttcactactagaaaatgaacttttaacattttctattttttactttcaacatcggtttttaaccgatgttgaaaccaccgacgttaatattatcaacgttaacatcggttttcaaaaaaccgatgttaacttgcactacacgacatcggttatttacaaaaactaatgtcatataataagaaatataaaaaaaaaagcaaaaactaaaaaaacaacatcgtttttggttaaaaccgatgttgaattatgtattttaaagtgttttctacattggtttttttagaaccgatgcagaaagtgtctttacaacatcgattttaggccaaaaccgatgtaaaaagtgtctttaagacacactttttatatcggttatggcctaaaaccaatgttgcttttaaggaactttctacatcggntttagaacaaccgatgttgttttttgcaataaaaaaatgatattttatttgtttttacaatgaaccaaccaaaacctttcatgattttctccaaagagaattctttattcattagttaagcatagaaaaagatagaattgtgagt

SEQ ID NO: 22386 - DNA, 408 bp, Glycine max
tgagatactcctaaacataataacaatttcttacgagatgtgacatgcttctaatgagatccgggaatagattttgacaactgcaccctgttaaaagttgttatcgctgtgaaagcctgaactttttcccaattatagatgggttttttcgaatctttcgatggttggtatgcggtgggatattccgagagaaaagcccttcttttgatcctgatatatgctatggctgctttattacgattttgggttcttgcgtgaacgatatggctagacgtgggaaatcatacgagtgctgtcaagagactaagcgatctactgctgggtcttgcccacgaagtggcggtgccgcacacaagtctccgactatatgaagccccgcttccacatgggcactccataggctacact

SEQ ID NO: 22387 - DNA, 528 bp, Glycine max
agcttcaacattcaatttcgaccgtctttatatgttaagggactcaatcagacatccgagaaaaaagttattgtcgtttgagttggctcaaagcttcaacattcaatttcgaccgtctcgatatgttaagggactcaatcagacatccgagtaaaaagttatggtcctttgtattggctcagagcttcaacattcaatttcgagcgtctcgatatgttacgggactcaatcagatattcgagaaaaaagttatcgtcgtttgagttggctcagagcttcaacattcaatttcgagcgtctcgatatgttacgggactcaatcagacatccgagtaaaaagttatggtcctttgtattggctcagagcttcaacattcaatttcgagcgtctcgatatgttacgggactcaatcagacatccgagaagaaagatatcggcgtttgagttggctcagagattcaacattcaatttcgagcgtctcgatatattacgggactcaatcagacatccgagtcaaaagttattg

SEQ ID NO: 22388 - DNA, 590 bp, Glycine max
  unsure (1)..(590): unsure at all n locations
ttgagccaactcaaacgataataactttttactcggatgtttgattgagtcccgtaacatatcgagacgctcgaaattgaatggtgaacctctgagccaattcaaacgacaatatactttttcacggatgtctgattgagtcccgtaacatattgagacgctcgaaattgaatgttgaacctctgagcaaattcaaatgacaataactttttactcggatgtctgattgagtcccgtaacatatcgagacgctcgaaattgaatgttgaagctctgagccaatacaaacgaccataactttttactcggatgtctgattgagtcccgtaacatatcgagacgcttgaaattgaaagttgaagctctgagccaattcaaacgaccataactttttactcggatgtctgattgagtcccgtaacatatcgagacgctcgaaattgaatgttgaagctctgagccaatacaaacgaccataactttnttctcggatgtctgattgagtcccctaacatatcgagacgctcgaaaatgaatggtgaagctctgagccaactcaaacgacaataactttttactcggatgtctga

SEQ ID NO: 22389 - DNA, 560 bp, Glycine max
agcttcttattttcagtagatgaagatgattctgtggccacatcaaggactcctctaaggacaatagcatcatttcttgcactgaattgttgggagttggaagccatcttctcaatcagattcctagcctcaacaagagtcatatcactaagagctccaccactggcagcatcaatcatactcctctccatgttgctaagtccctcatagaaatattgcggaaggagttgctccgaaatctggtagtgaggacagctttcacacaatttcttgaatctttcccagtactcatacaagatctctccactaagtttcctgatgcctgaaatgtcttttctgatggcagtggtcctagatgcagggaagaatttatccaagaacaccttcttaaggtcatcccagctggtaatggacttgtgagcaaggtagtacagccaatccttcgccactccctctagagaatgaggaaaagcctttagaaagatatgatcttcttggacatcaaaggatttcatggtggaacagacaatatggaactccttaagatgcttatgaggatc

SEQ ID NO: 22390 - DNA, 291 bp, Glycine max
ggcgcccatcttacatggaaacattttgcgatgggttccgggacgagacgaccctctatacgatttagaatttcggcactttgaactctgttggaatcacaacatatggcactatgcaaaaatccgtcatgtctgctggcggagatgtcccctatacttctacagtcctcaattttctctcaaggagatcgagcgctctcctttctgctactgctgggggcggtgcgtttctgggacataaccacaggagaagctgtcatgactggtaggagctacgagcctggtgtctgt

SEQ ID NO: 22391 - DNA, 515 bp, Glycine max
agctttttggagtagaaacatgggaccaactcattttatttcaaaaaaggaagtcgtatctagtcaaggtctgagagaccatacaagtttcctaatgatttctaattatgtgggccattaagtctatcatatgctgacaatagccgagaagcccatgaatctcttcgggggcggagtaagtgtctgccatcgccttggccttggctaacaatcggggaagttcttgactcccgttcaaggtaagagcaaaccgatccatccacatggttgcctcttggtgtaaagagtcgatcacccttcctctagcctctttttccgcatatacttgggcatactcatccgcgattctatactcgtgggccgtggctagacccaactcttcttggtacttggcgatgatagctaacatgttggtttctgtctcgcatagacgctgagacaagcttcttttggaccttgaacaagcaatcaactcctcttttaaaaccatgctatgtgctcgcgactggtccctt

SEQ ID NO: 22392 - DNA, 539 bp, Glycine max
gccgctggagttgccccatcaattgccctaactcttttatactggggattcctaaggttttgaccttgacttgatagaacctctttttaaatgaaagcatttgacttgatcccatgttttactaaagcgaaacaataatctagtgcaaatcagaactccgacatctatcatgggtggaatggatgaatgcatgaagaaatgcatatgatacagatgcaatttatgaatacgggagcctgggaaattgtctccttcttagatacaacgtcttggggtagcacagtgcctgacgtatgtttttaagaaggtgacacggaccctctgttggtttgccaaagagaggggatcaagacagaactcgtgcatgatgcatatgcgaaagccacaacacggggatgtacatagtacgacaatattcacaaacaaatataagcaaaagggtacatgacacttatgcatggcagtgtgaaaaatggcacgcatcgcgtttgctccgtgcccctatttaagggacctatatgggaaggagctaaaagggc

SEQ ID NO: 22393 - DNA, 464 bp, Glycine max
tgcctgcttctacttatgtggcagggcgggctttctttattttcttgtctcaactgcgagctttgaccactgctcttccttcccgcgatgcttctcttcacatctgcctgagtgggcttatagcctaaaccatactttccacgatttcctttggcatttatcaggctagttatgccgccattgtctttgcctaaacccattccgggttcgtaaccgttccccaacataactcgggccatcattactgctgcatcagacaggcagggctgcccacaaaatgaatcaatggaggaaatgcttaccacctcaaaagactggaaagcggtttctaatgactcctccgcggcttccacataaagcataaaggatgggcagctcaccaagatgtcttcctcgcctaataccatgaccaaatgcccttccactaccaatttcaacttttggtggagtgttgaggaacaact

SEQ ID NO: 22394 - DNA, 608 bp, Glycine max
tgtctcgcggtttcggtagagaatgaagcccaatctgaccttcacgattttcttcgaggtaaccgggattctacgcttgttccttgttagattcagcttgtctttgcatcttttcttactttggaaccatcattgtatgtttttacgctttctttgaaaaaccctagagaaagagactttgtaaaagttatctttttatgaaatgggtgttattttcataaccttcactgaaccccaatcacattggcgtgatcagaatttcaaaatgatgttccttttgtagaatccgaaacgccgttagccttttcatgtagtgacatgagtatttgactcagagtattgttgttaactttatttctaaaatccatagtaatttccttcattttggcgtaatagagacttgtgttggatcgacaagcgtgaacaagagagagacctctaagtgacgcaaagaggaaccgatgggaagctcacgataggtgaggcgagtttattataaaatttaccgttttgacaccataattagggtcaaggaaccctactatgagaatatatgtctgtccctattgcatgccaaattttctttatagaaaaacaaggttttaact

SEQ ID NO: 22395 - DNA, 761 bp, Glycine max
  unsure (1)..(761): unsure at all n locations
cgcgatccnttatacttagagacgccanntataaacccccgggcgacagcccacgaaaaagagcgaggctttatttttataccatcaaaaagcagcgggctctgtgcaataacctgagtatttacttggccgaatgatagggtataaatatgatgtaaagtgtataataaagctactggttgccaatgccaggtcccacaagttgatactcccctatcaacgctcacttgaagcagcttaacattcttaaaaccggggcactgaagttaatcacaaccttggctctattaggaagggttggacccctttctctagatatgccaacgcatgaaatgtttcacaagcggaatttatgcctttaagtcatgaaactctttttaaagctgcccttgcacaaaacccaaagtgtttattcaccaaactttatctgatgcctcagaagcatttacatctgcccacagagaaaaagaaaacataaccatttcccttaaaggcatatgatggaaaatggcaagatggggtgataccaaaggaattttggtcatgccttttttactaccccattatttatattgccacccactccctatatattgctttatatgataccaaaatcatatcaggaagcgcccacgccctctaggagttaagaaaatacttgcggaagactaccttcaaagggggatggttgaagttttgacacattgagtgggcgccattgggtctcccactataaccaccttggtacttcctagaaaccg

SEQ ID NO: 22396 - DNA, 729 bp, Glycine max
  unsure (1)..(729): unsure at all n locations
ggtcatgtacccgttgacgccccnccttataatacccccgctgtgcaaggaggctcccctacctacagctattttttctcgcagcctaactagcccggcggattggaaactctggaagaccatttcatcgtgttacccaaaaacaacgcagctcttggccggcacattctttaatgaaaatggagggtatttggtcctcccgtatacaacgggggacaatatatctttcttctcatactcatgactgtgtgacatcctcgagaactttgcccngaaggggaaagtcacagcatttatctcaaccaccagcatgagacatgtcatttgcctgcatgtgccacagtccatcaattttaactgtccacggagaaacctttagtagcgtgataaatcattgaagtcaaatttgtacgacacaaaaacttttaaggagaaaacaaggcacctgagcctacatccttgggattttgagaaaggaacgcacgcccctttcctttgaattcccccccccctaacccatatttatttaccaaacccggatcccactgcagtggtacctaaccattggagcctgttccgtcgactcctaacgaagtttctggggggcctcaacccagagatcccctaatcctccatcaacctctaagtttccaaaattaaccctggaatggccatgatggggtataacctaccctggccattatatttcgccgggccaacttctcggtt

SEQ ID NO: 22397 - DNA, 336 bp, Glycine max
ttttaaggggagaagattttttttggccacatcaaagacttcagctaggactatagttaaatttcttgcgctcgacctgctgggacacggaagccatcttctcaatagattcctagcctcaacaagagacagatgactaaacgctccaccactgtcgctaacattcacgcttcgcgacaagaagctagcgcttacctacacacaacgcggatagaatctacactcactcttcatgccgaggaccatgctcatacaagtcattgcctactacccagacttcttacaatgccctgacatacaaggctctgatcctatactacgtaaatgggcaaaaaa

SEQ ID NO: 22398 - DNA, 213 bp, Glycine max
aatttgcaacaggtaccggtacggaagatccctctaaggatgtagcattccgaacctgtaaaccttcttggcaacacagagaatggcactatgaaagatatcagaaatacctgcggcgaggatatcccccttaacctctagaatcccacaatctctcccaaacgtcactgaagctcttacactggctcctacttggggctggggccttcgcgg

SEQ ID NO: 22399 - DNA, 371 bp, Glycine max
gcaagcttgaaagaaaattgttgattggagcctgttttatcctttctcagacgggacagaggcccatcaaattctgaaagcaatgtacatttctcatctgtcctgtctaacttattgagaggaatgagtaacacaaatcaacattcatgcccggtggttctataaccatatttagcccaccaccgccttttttacttacccattatatgaaacgcacctctcccttcaacttatttatcatttgataaagccttacacgaccatctgttgcgtcctcgataattagcattggacgaaatgctcctccaccttccatacggggaagaccttttttctagcacatcgtggaacccacatcttgttttgctcct

SEQ ID NO: 22400 - DNA, 629 bp, Glycine max
ttacatggagctatatcatgtggtatcaagagcattttcatctaggtgatgttcttttgattcctctatctttttgtttggtcaattcactttaattccttgttcttcatcttcttctccatgtatctcctcaattttcttgtagtttggtgttgtttagtgtagatcaaaaaaaataaaccgattaaatcttagatctacacttgctcttgcatttctatggttcaaattttatagataaactcttgaatcatgtttttgtgttgattttaggttctatcattttttagtcataatattcttgttttgaacctttagatctcaattttcttgcaaaatattgattagaaaagaaaacaaaaaaatccaagtgtaaatcacttcattcatgttgtcttagagtcatgtttagtcataataattgtcacattatgttctaagtttgaattcaattttgattttgttgattgaattataaatacatttgttcatgtattcttgcaattcttaccctatcatttaaatttgagtctaattcatgcatggtatttagttcataacatgttctaaatcaattcctagaagtagtcttgttgttgaacttttttttggtttctaaagttcctata

SEQ ID NO: 22401 - DNA, 597 bp, Glycine max
gcatgcaagctttaactttaccaaatggatcttatgccttttaccatcatgtttttacatgtgagctaccattatagttaaagttaattgttttatttactggtaataataaattaacataatagagggtcatcaaacacttatattaattgacggttggacgtgaaattattttctcttaattagaggtctcacgtttgagcctaggcatatacttgtgctaaatacttaaatgatatacacgtagtcttaaaaaaattctcatactctttaaagccacctttttttttttaattcttcacttttcacaatatgtaataagttttatattaaatattcaacacaattaaaaaaatattttttttatctttagtttaatgtggttttgaaaagcaaacacatttttactccacaataagaaattacatataaatgtattgtatttaacttagatgtacaaatttgacaaaatattaacacataattaccggttcatgcttataagacgaagtgttatattcattaatgtaacaatggtgtgtgccaatatcttattgggtttatgtcattagagtctatgcaaaaaaagcacttttt

SEQ ID NO: 22402 - DNA, 227 bp, Glycine max
ggtttatgcccgatggtactgctcggaaccttattgatctatccttggagaactgggagtgcggttttttgtgtttagagtaggcgcaccatcttagctggatacatttatatgatgccactgggccctgcttttcctttatacttgccgagattacggaccttaaactttttgggaatgacatacgtcgggcactaaacaaagatctgtcgtgtgtgtggacgatg

SEQ ID NO: 22403 - DNA, 197 bp, Glycine max
  unsure (1)..(197): unsure at all n locations
tgtgaaaantatttttttttgtgtctcgcttgtttnttccctggatccccccccctccttgaccacctcaccaatgaagaanagannnnagagangttaannnnagaagaagggattgtggatgataggacctatatatcttttgagcggggggcacggtggaaaaaaaaaaaacttttcttactttcatcttatac

SEQ ID NO: 22404 - DNA, 403 bp, Glycine max
aagtgatgaggtgcaagcgctaaaggcaaagtttgaaagagcccaggtagtcaaagagaagttcaagtccatagccatcaaagtctgaagagagtatgatgaactaagggacgttaatatggccaccgatgaagccttggaatgagaaaccaagaaggcccgaaaggaagaacacgaccataacaagttttgaggggctttatagggcagcaatagtgagctcaaactctgaagaggtgaaaggaatcatcatgggtcaaaggcatgatctggaaggacgagctaaaggcttgccttaggtcgaaaagaaatttgtcccaacagttaaagtgagactgaagggaatatgtgggccatcatcgatgagtgccaagagaagctaaatctagcggcgacttaccag

SEQ ID NO: 22405 - DNA, 385 bp, Glycine max
gcttgaaagaaaattgtttattggattttttaattgtggtcacagacgtaacagtggtccaccatattctgaaagcaatgtaaatttgtcatctgtcctgtgtaacttattgagaggaatgagtaagacaaatcaaaattcaagcaaggtggtgctatatccatctcaagcacagaaacacgttatttacttatttattatatgaaaagcaccagtaaatccaacttatttattatatgaaaagcactagtaaaaccaactctaacgaagtcgcttattggatcttgaaaataagctacttgatgataccattagagcaaatacctttttataacaaagacttatcccaccaaccttgcttaactcttataaaaaaatcttttaa

SEQ ID NO: 22406 - DNA, 480 bp, Glycine max
tggggctatatcacgaggtatcaggacctttttcttctcagcgatgctctttgcatacctccatctttttgtatgcacaatacactttaactactggaacaacgtctaattactcatgcatcccctcacttttactgtattctggggtgatgtacagtataacataaaaaatattccggctaagcctgatagcaacacttacccttgcatatgtatggctcaaattatataaataacactcttgaaacatgcagttgtgaagataacaagcactatcaattattagtcataatattcatgttgaagaacctttatatcgaaatcatcttgcctaatattgattgcataagaacactatataatccatgtgttaagaactacattcatggtgacttatagacaggtttaggcctaaaaatagtcacattatagttctaagcttgaattcaataattgagtttgttgattgaattatagata

SEQ ID NO: 22407 - DNA, 570 bp, Glycine max
agcttgctgctcgagccatcaaatgtgttttctttgtatattccaaattacagaaaggttaccgatgttattttcctgttcacaatcgttattatatctctgcaaatgtaacttttttttaaagaaaaaccatactttgctccctccatgattgagtccaatactcttcaagaagtttttcctattccccatcttggtccatcaccttctttgcaggaatcagagtcaactgtagattctaccatagatattcctaacaatcctccactcgagcagactcaaagatcacccatcgtatattgacgtcgtcctcgaattcctgacacagaacttgaaggtaatgaaagaccagctgaatcacttcctactccagcagacaacccgatcatggacctacctgaagagaatcttgacttgcccattgctcttaggaaaggtactcggtctacatgtaatccttatcctatttataacttcttaagttatcatcgtctctcttcttcgtaccattcttttgtttcctctttatctttagtttctcttccctaaaaactttgttaagcacttgat

SEQ ID NO: 22408 - DNA, 605 bp, Glycine max
tgccccacccgttatcactgagcattctacatttgactaatcttatagtaccaagattctctagaaatccaatgcgatttggcaattccctgatatttccattgaccatgttcagtgtagtaagaaatgctaggtctccagtagattctagtaaatattcaagatttatgcaattcattatctcaattttcctcaataatttcggctctccaatctcatttggcaaatttgtgatggttgttccatctaactgaattcaatgttttaattgaattttccaatttgctgatccaactgataactccctcaggtaatataaagaaccaatgatagaagggagttctttaattgtggtgctatttaaaaaaagttgtgcccatgatatgagattgcctatagaatcaagaattacaatgagagattcacaccacatcaaattgagtctcttaaagggtattcaatgatcccattaagacagttaattcttgcaatgaacatagatgtcctgtagaactaggtacccctctcacatattggcaactttctaaaacaaagagcttcaagttttgtgatgcgaaaaaaatgactgtgggcactctactgct

SEQ ID NO: 22409 - DNA, 518 bp, Glycine max
agcttgttactctctggtaatcgattacctttttttgtaatcgattaccagaagcccaacatttctgaaaatgatttttcaaaggtgtaatcgattaccatgactttgtattatatttctttggttgaggtgtctgctcaatatgttatggttgcttatgcagaaacattacatcaaacatatagtgaaggaaggagctcttcactttttttgtattgtagtaccctttcttgagtgctttgattttggaggatatttaatctccatttatctgtacctgttctgtccttagtcctttatttttgttttaattatttaaaaaaaacttcaagttaagcagtatttacatatctatttgattcttttcagtacataaatatgagaaatcagagggtatcacttctcctgaaaaaaaggtttacaacccctaattgggttaaggtcaatctggtatataccctcttttaaaacatataagactgatgatcgggtgtcttttaaagagcttgaatttggat

SEQ ID NO: 22410 - DNA, 628 bp, Glycine max
  unsure (1)..(628): unsure at all n locations
caatagaccccctcaacctctttttcttaatcaaccatcgcagagcaattatgacctttccagcaatagatacaaccctggatggtggaatcaccctaacctcagatggtccagccctcagcaacaacaacagcagcctgctccttccttccgaaatgctgctggcccaagcagaccatacattcctccaccaatccaacaacagcaacaaccccagaaacaaccaacagttgaggcccctccacaaccttccctcaaagaacttgtgaggcaaatgactatgcagaacatgcaatttcagcaagagaccagagcctccattcagagcttaaccaatcagatgggacaattagctacccaattgaatcaacaacagtcccagaattctgacaagctgccttctcaagctgtccaaaatcccaaaaatgtcagtgccatttcattgaggtcgggaaagcagtgtcaaggacctcaacccgtagcaccttcctcatctgcaaatgaacctgccaaacttcactctattccagaanaaggtgatgacaaaaatctacctaacgatttctgtgcaggtgaatcttcttccacagggtaattctgatttgcagaagcagcacattcccccctc

SEQ ID NO: 22411 - DNA, 475 bp, Glycine max
gcttttttgagaaaactaccttgagattcttctttgagaaaacttccttgagaagcttctttgagaaaacttccttgagaagctagagcttagctacacacacccctttaaaagttaagctcacctccttgagaagagaagttagagcttacctacacaccccctataatagctaagctcaccccatgacaaaatgcatgaaaatacaaaaaattccatactacaaagactactcaaaatgccctgaaatacaaggctaacaccctatactactagaatgtaaaaaatacaaggcccaaaagaagaaaaaaaaacctattctaatatttacaaagaagagtggacccaaccttggcccataggcaaaaaaagctaccctaaagttcatgagaacccttaggccttctttatcagctctagcccaatcctcttggagcctcttgctcatggctctggtgactgggcatttcctagg

SEQ ID NO: 22412 - DNA, 588 bp, Glycine max
tctcttttattgtgtaattattatatttttttaatccttgtatttggctatgtttttatgacatttgaatacttagtatttcttttaatacttgcttagtatgactgaatatgatgattatattgacttgctcttggttgtttatgattatgtgatttaaacttaattactttaatgatatatgactagaggtatgcacttttatttggttattatgaatgacttctggattatatgacattctatgaagtattatctttctaagattgatgaatggttaagatatcttgtttgattgtttttctattcgagtgtatgtcatttatgtggtttttatatatatatatttgatctattcatgtttcttgcttcatgattgatttatattctttcatgattgtcttgtgaatgattaatagtatatgtatgtttcatacttgttacgcactttggctttttgttgatgcccaagggggagagaaatagggattaaatcaagaactctcatgagtaattcacttatttttagatttgcccacattcaacaacaaaggggggagaatttatgtgagtgatgaactaggaaaa

SEQ ID NO: 22413 - DNA, 589 bp, Glycine max
  unsure (1)..(589): unsure at all n locations
catgcaagcttctatataagctgaaccattttatcaatataacacaagttgagttttattnagaaaattagagtttatctcttttatcttagtgagagtgattctaataaattcttgagtgattcaagaacaccctgactgcatcaaaggacttttacaacctttgtgtgttgccctcgtcggaaagagtgattctttccttcctttcatcttcaaccttgttctttcaaaccactattacagaaaatccacttctgcccagaattatctcgtggccataactcccattttacacactcaaattaagtgattcttgagcctaaattgaatttcaaaacgagacctctcacgtcattttggaatcacctcatttggagctctgtagcttgagttattgccatttctatctttctgtccagccaccacttaacctacgttttaccatcccattaatccattttatgccaagaaccaccttattaagacccacganattaaccaccttatttttcatccttaatcaatttcccggattttccattcaaggttaatcctagacgatcctaagtcaatccttatgccatgaggg

SEQ ID NO: 22414 - DNA, 830 bp, Glycine max
  unsure (1)..(830): unsure at all n locations
gcgccattgggcacagttanggcctcncngnnntgntgnagggtttcgtntcattnttatgaaagcngaangagaatgggagtagagttttgtttatggaaaattatgttgagggtattgggttggggaaatggtgaggtagtattccgcccccgccaccactaaacgatattcgtcaccccgacatctggacaatnntnnttgggggnaggctcgttgggtgaaaatgtgtnttattaaccggagtacgatggaatccactgccttggagtgggataaaaaaagttacccgtggcactgagcgctaggttttgtctggcctaaatcacgtcaacccttttgtttcgtgctatgaaaacaattctccacacctttgcaaaaaaaaaatatttcgcatactcggcatccattgccatatttcatatcaatcgattgaataggaacactcattagcgcgtcaacctgccgtgaaatactcccgacttggaatttttcagctcgcatttgcgcatttcttctatcaaaacacgccttcttggcctcattctgctcttcttaaccttcgaggaaattttcctgtattggtattcgcctacaaatctactacgcacggccggctgtggtgtttatgctcggagcttaactcacgcgtatttttcacgaagataacgcgcattgtctgttccgctacgggaaaacaatgacgcgctagatcgagccaaaaaaaatattttagctcggtattttatccggaacaatgtaatagctctccgccgcgcatagatagaagacatgacgcccgggcccatacatactacattgtacaggcg

SEQ ID NO: 22415 - DNA, 540 bp, Glycine max
tgccagctttgccagttagcaccccaattcttttttatggattcccaatcattcattcgggaccctttaacccaaactcgggaaatctctccagctccacctatgttgcttataagcaccaattcgaaatacactctcccattgatggtaaatctgatgcctccacttcttttgcacccaactctgcataatataaatgttactagctagcctaattgtttttaaaccacatgtatcctttacgagaaacaaaaaaaaaggtttatgacatatggcaattgacataacataaagatacttacttgctgtacaaaattggtacaatgccagctttgtacttggctattgtctgaaaggcaggttgagacatgtcaaagtgtggtctaggaggattacaccagccaccattgtcattatggagcgcgaagtttggtaggcacacaattgtggcatgtacaacaatggaagtgcccctgatgcaccattgtagcacttgccttgcgtcacaaactatcctatagcaaccaccacatgaatttc

SEQ ID NO: 22416 - DNA, 404 bp, Glycine max
tatctcatgtggaaaaaagagcattttcatctaggacatgatcttctgaaacctatctatatatgatgggtcaacacactttaattcctggtacttcatcgacttctccatgtatatacacaaatttcttgtaggtgtgacgaagcttagtgcaaatcaaaccaaaccccccgattaaatcttacatccacactcgctctagcatttatatggttcagaattttatagacaagctctggaatcatgttacagtgttgattttaagacctatcattttatacacatcctattctcgtgttgaacctttaaaactcacttttcttgcctaatattgaggataactcaaaagaaaaaactccaggtgcatatcacatcatacatgttgtgttatagacatgtttaca

SEQ ID NO: 22417 - DNA, 535 bp, Glycine max
ataaggagtggtgtctcttgttccacattgatggtttctgagcggaaaatcctaatttggttaagcctgacattctgcagcatttgcaaagcagattcaaattaattgaagttatgtacgagcactacaacttttacaaaaataagcactgcagcttatttaaggcacaaattttgcaacatctgcagtatgtgggtggaaaaagggtgggagtggaaatttaaatggagaatacacttgtttgacagagagcttgagatggcagattgtttccataatgatgtggctggcagctgtattcacattcacaaaaaagatgagtgaatctggaaaatagaccctactggacaatattcggtatttttgacatgtgaatcaatacttccattatgatgggaatctatgacatggtgtcaaatgcatggaggcttttcgcagaaaccgtggcagcactattccaacacgcgttttggtttgctagtataattcgtcttaaccgatggagaagttggtggctggccctcacatggacagt

SEQ ID NO: 22418 - DNA, 298 bp, Glycine max
acatactgaatcgataccatagttattttcaaaaatattcctaacagtcccatctttttgtgtggctcttgaatggctatcaaaaggcctatatatatgtgacttgagacacccaattttacaagagtttttcagaacaaaaaagccttatgctcttacaaagaaaaataattttatccctcttacaaattccttggccaaaactcttgtgattcataaggaatcatttgagtgctcaaattggttaatctatctttttatagagagatttcttcttctcttcttcttcattctgaaa

SEQ ID NO: 22419 - DNA, 742 bp, Glycine max
  unsure (1)..(742): unsure at all n locations
cgagatttttttgactctgagcgcgacccntatagaacgcagctgcagctgnactcttggtaggaagaccttatgttttttccacaccacaagcccacgggatttaaaaatgctggccacagcaactcattagcaaaagaaagtggaaactcaccttgggacgaggagtctgctcaatatgtaaggggggcttatgcatatacattacatcaaacaatatttgaaaggaaggagcgcctcacctttctctggaatatgtagaaccctttgcttgaaatgacttggagtatggaggagaaaaaggtccatttatgctgacccggaaacatcctcatccctttagtgataggtaaacctgtttgaacaaaacgctcaccggttaactggataacaactcatatggattttttcagaacttaacagtgaaaaagagaagggatttttttccttaaaaaacggaaacaccccaaattgggatagagcattgggggtcaccccttttgacactttttgactgccaaccggggtcgttgagaaccctgtttgaaaaaggaccagtgcttaccccttaaaaaattattctctattgaaaacgaactggagaaacctgaaaccttttgaatgattactaggtgtaatctggctcccccccccacatatgctaaaatctgcctttcacaaatcaacgccccaccacaccccttaatttagggcttcattaaataatcaccctcttttctcg

SEQ ID NO: 22420 - DNA, 406 bp, Glycine max
acaagaaagaggtttttttatagagaggggggagcacgagattgaaggaagaaaaaagggagagaaattgaacattgagttgtgtctcacaagactcttattcatcaaagttacaacaagtgttacacatgcttatatttatagactaggttgctgacttgataagatctcttgagagcacttccttgagaagcttttttgagaaaccttgcttgagaagctagagcttagctacacacacccctctcataactaagctgacgtaattgagatgctgacttgggatgagtcattgagaagctagagcttatgtacacacacatgtcatttagctgatctcacctccttgagatgagaagctgaagtttactacgctccccctataaagttaaccgcacccccatga

SEQ ID NO: 22421 - DNA, 288 bp, Glycine max
  unsure (1)..(288): unsure at all n locations
tttggctngntgaggtactatccaatttcataaaatgttgtatctatagcattttgggagagccacacgtctgtatgactatgatggtctaaatgttctgtctgggatgtgattttggctggctaggctttaatctaattgtttatatgacgagtatttaaatttcccttaaactcttcctttctttttttttatgattcaaatgacttcaaaatattcttgcaaatatattatacttattggtatgatgatcatgtcattcttgaccagcgaatattatgtcaatgt

SEQ ID NO: 22422 - DNA, 432 bp, Glycine max
tttttcaaatctcaatatacgtggccaagagtgattatggatcttcattcggtaaaccttgactcatatttctaaaagagttggtatctcctttgagtgagttatagtagctagacgcattcctaattatcagatgctctaggccatatgctggcgacattaataccaaaggctgctttctctgcagtttggatatgctgacattactttttgctaacggatacacactgatgaacttttgatgattttgaccactttctccttccctcattgtaaactaaacttaaaccctgctctttatccatattgatgaaacatgcccatttgaaagggtgacatgccaggctcactgacgcactttcaaaaggatgaaagaatggcagaatgctcataagctatttacagctgtaccccactaaaggaactaatgaa

SEQ ID NO: 22423 - DNA, 786 bp, Glycine max
  unsure (1)..(786): unsure at all n locations
agacgcgacntttttttgacatctgagnanncnccncnnnntattannnctgctgccgcgcnagatnagangggcgcgttgaagggcggaatttttattagttcccaaaacaggaaaataggtgcagagagagctataggacgtatacgccactgcacaccacagacagtttgtgggctatctcctacaccgctaggggagggaccacccctattttatatcaattcaatagccgagcactccgagataccgataccttggttccttatacactgaaaagtctcaatctaaggaaaggttcaaaacaatttaagatggagatgaaaatcgactccacaatagaataaagtggggcagatctgactcggggggtgaatacactggcagatattaccgctcaagggaaaacttggtgtctatacactcccacctcttctaaaatattatttcccattacgcaactcagacaaataatactactccccccatccttgtcattagggtaaaaaaatcctgaccggattgggtcttagacaatatttctcatttccaacagccctcacattatcgatataaattttaaccccacactaaaaaaattgagaaaaggagttcacacaatttgcctgggataggaagaaacaaaatccatgtgacacccgttatccctctctagggaacgcatagggctatgtcccatttcgaagaccaaacctcttggggggggagaaaccctttcaacaaaacatcgtgggcgactaacctaagagtcgttgttttcacggc

SEQ ID NO: 22424 - DNA, 978 bp, Glycine max
  unsure (1)..(978): unsure at all n locations
ccccatgcaacatactgaaccccctcctatattcctgtcctancacctccataattaacgcctctanaccctttcttcccccagcccgcagnnttgtttcctacttgacgagcccgtanaatcacaactcacgctttaagaaagcattcttactagaatgaacccgttttctttttattcccagcatctattacataagccgttggctctaagcatattattatttattaaacagcagcaccaccccctcttattttatgcttcaacaaatctagagataaaatacttgctgctcattaccacgacgcgtagtgtggttgcgtcttttatcttactcattaccaaagcatttcaccaccataatttccccaaaactgggcaaatttgctatgaaccaaagtacctttatgaagaagtctcctacacctatagaaggggagggagaaaactgtctcgctccaggtgactgcaacacaaatactactcaggctgactaaatgggtagcagcgggcgcgaaaaatatccatgccccctaagtcgaacttttgtgacctacaataggcatactcttaccanttaacagaaatcggtccgtccattcatcaatccaatgagccacaccattctatccttataactccatgagaaagaatagccaggaaatccacttacctcgcctgatgactttgagccgtctccaccaataacaacagatcaacaccattccctttacgtgggaggcagggcggaattttagaaacccattcgatttattacatattcattgacgaaaacttgtctgttacctccttagataatccgttcgcgggcgtagtgatgtcaatactcgtgtggaggaatacacacaccacattgatgtggggcaccgcttccctagccattcaatatntgtcacccactatctgttggctagcaacaaatggggcacacgaacccggcaaaccaagacctcaacg

SEQ ID NO: 22425 - DNA, 696 bp, Glycine max
agcttaagggaagaagatgaaccaattcataatcatttctgcataattctagttgggtacaacttttggctcgttgaggtagtattcaatttcataaaatgttgtatctagagcattttgggtgggtcacacgtttgttgactcgctgggctaaatgttctgtctgggatgtgattttggctggctaggctttaatctagttgtttatatgatgattatttaaattttccttaaactcttcctttctttttttttatgattcaaatgactttaaaatatttttgcaaatatattatacttatttgtatgatgattatgtcattcttgacctgtttatattatgttaatgtgattgcattgttgaagtgatgatataggtatatgttttacttattgtagtgagaaatacccttaacgttctattgatgaaggatttgggttatgtttgttgatttcttgctgatgagataatgatgtgaatttatggatatcttgagttgtgttggttgatttcctaatgatgagataattatgtaaatcgatgaatgtcttgagttatggtggttgatttctgatgatgatatgcacatcattttatgaggtgaatatggggatgttgataacaagatgataattgatgataattactcttgccttggaccctccatttatttgggaaaggaaaccctggccttt

SEQ ID NO: 22426 - DNA, 615 bp, Glycine max
tgacaatttttcaaatctcaatatacgttgccaagtgtgagtatggatcttcatttggtaaaccatgaaacagatatctaaaggcgttgggtcctcctactgagtaagttgatgcaattaaagatgtttttctaattaaagatgttcttgtgttctatgctgaggacaaaaataccaaacactgattcctcgagagtttggactaatttaaatcaaactttgttcacagatccctcttgttgaacttagcctaatttaaacaacattatactcacaacataataaacaaaactaaaaccctgcacattatccttagtgtcgcaacaagcccttttgtaggcgtgcgaggcgaggctcacgggtgcgcttttcaaaggaggaaagatgcgcggagtcgccatcaacgtttaattgtggaaaacgtcgaaaaaaccgaaggaaaccggtcaacatgaaaattctaagttcaggagttgtatttacgtttgaggaaggtattagcacttctcacatttgtctcaaaggacaacaacctattttttagaattgtagaaattgtggtaccttaactcttatttctttttattttttgaggtcgacaaaagcggggttttt

SEQ ID NO: 22427 - DNA, 604 bp, Glycine max
agcttaagctccttcaactgcacaaggctcttaatatttgaagagtatccttgtggaaccttcacccaacgaagacactgacaaaaacttatcttctcctttttggacaaagtatggcaagctgggggcaagtaaattttcttcccatcagaccttggatgcaactgtgattgaatccccatatcagctagatcttgacgggtattcaagccatccttcgtcttgccttgaatgttaaggagcgtcccaatgacactatcccatacatttttctccacatgcataacatcaatacaatgtctaacgtctagatcagatcagtacggaagatcaaagaaaatgaacctcttcttccatatgcaattggtacttttatccttcttttgggtcttccaaatacagtattgaggtgttgaacccgctcatatacctgttcaccagtcaatggtattggcgcaacattgtgctcttgactttcattaaaagctcttttcagtcgtctggaaggatgattggggtgtataaaacgaccatgcctaatatacactatttttcttccatgttttagttggatgtagcttgtgttttcttcacagatggggca

SEQ ID NO: 22428 - DNA, 566 bp, Glycine max
ctctggagtagaaacatgggaccaactcattttatttcaaaaaggaagtcgtatctagtcaaggtcttagagaccatacaagtttcctaacgatttctaattatgtgggccattaagtctatcatatgctgacaatagtcgagaagcccatgaatctcttcgggggcggagtaggtgtctgccatcgccttggccttggctaacaatcggggaagttcttgactcccgttcaaggtaagagcaaaccgatccatccacatggttgcctcttggtgtaaagagtcgatcacccttcctctagcctctttttccgcatacacttgggcatactcatccgcgattctatgctcgtgggccgtggctagacctaactcttcttggtacttggcgatgataactaacatgttggtctctgtctcgcataaacgctgagacaagcttcttttggaccttgaacaagcaatcaactcctctttcagaaccatgctatgtgctcgcgactggtccctttcttcccttcgcaacttgagttcactattgctaccccatagagctccgcgaaattt

SEQ ID NO: 22429 - DNA, 912 bp, Glycine max
  unsure (1)..(912): unsure at all n locations
ccccccggccaatccgcgcgacaccaccggtccgcataggaacnggaagctccgtcgccacttcccgacaggctcttgtcacgcggtgcaccgcccccataagagcgcggcgggcgccagcgagaagggatgaagcagacatgttattatacccaagcaaaaaaacatcgggcagaaaaaagcgatagacggtttggaatacgaagacaaacaacaccacttgggagggcgattttcgccaaccaaccctcctcggggagagggtgcaaccaacaaattttgataatccatctcgaaaagaccgatggacccccccaaataacggcctcacctcgggtggccttaacacaatgaaagagggcaccaataccccgggagaaggggccaaaacaccataaaggggggagaaggaaaaataaccccaacaaaaaaaacaaagagggggcgagaaaaggagcctggggggggggagaacaatgggcacaaaagaaccggtgaaagggaagaacaccggtccttatacacccacaaccacccaacagaaagtaattgcccccccccgagcacagacccaaaaaaaaaaaaccccccccacagccggttttaagggggaagaaacaccccatgggagggggtgttgaacacaatccgccacaaccaaagccccccacaaacaaattaaatgtttaaacccccctgaaccaacaaggggggaaaaagacacccctaatattacccccgggggaagaagaaaaaaacgcacggcgaactcggaagactccccctcaggggacgcacaagaggcgagaggcccctcttctagacaccaaacccgcggggggggggggaagaaccccctacgacaaacacaaaggcgccccagaaaaaaaaacacaagggttccacccaccg

SEQ ID NO: 22430 - DNA, 536 bp, Glycine max
taggttctaagagagcattcatccatatatcaacctttttctttttattccagctctattacttgcctttctgcacttagcttttatttttcttaaatagcagcacacacacttttattttatacttaacaattttttatagataaaatacttgctgcttattagatgactgtatgtgttgctcttttcttaccattacaagctttcaccccataattcccccaaatttgggcaaatttgctatgaaccaaaatttccttttatgaatgatgctctcctacaacctaagagaaggtagaaggagataaactgtacaggctcaaggttcaatcaaacaattatactttcagctcaaaatgggtgcaagggataaatatatcatgcacaaggtaagctttttagctaagtggctatcttcaatcaaaacatggccttcatcatcttcaatttcacacattcattttatactcagagatttatgcaaaaatcattactcaatgttacttgttctctcacaattaaagatcacactttca

SEQ ID NO: 22431 - DNA, 503 bp, Glycine max
agctttgtgtaatcgattaaacttatttggtattctattaccagtggttgtttttgaataaatcaaaagatgtaactcttcaaatggtttttgactttttcaaattggttttaagtttttctaaaagttataactcttctaaatggtcatcttgaccagacatgaagagcctataaaagcaaggctttgatttgcttttcaatataactttttacattcattcaatcaatcctttacaagccttaaatctctttgaacttcttcttcttcttctttgtaccaaaagctttctaaagttttctggttttctaaaccttgaaaacttgtgttattcatcttttcattctcttctccctttgccaaaaagaattcgccaaggactaaccgcccgaattctttttggctctctcttctcccttttccaaaagaacaaaaaactaaccgcctgaattcttttgtgtctcccttctcccttggcaaagaaattcaaacgacacaggctg

SEQ ID NO: 22432 - DNA, 564 bp, Glycine max
ccgcttgaaccagcagcagaaaatgacactcaacccacattttgctctattgtctgctgacaacaatctcaattgctaaaataaaatacatcagctttgaaaaaatcaatttcttaagaggataagtcataagtgagtggctaattacctcagtgtagggtacaaagaaagctttcaaaaaaggataaatcaaaagaggataagaggataagtcataagtgatttaattgcggtttttaattgtgattcaaaagaggataagatgtaatagtaatgaaaatgactaaggagacttgaattaagaagatgatgattggtgtttcctatctatgaaacttgtatttgacttttgttggtatttaacacacctatgactttctattgttaattatgatcatgaattcagaataatttgttttatcatttttgagaatttgtatgcatacaatatacattgataaactataaaaatttcagaataacagctatcttgctatagcgttttatggggtcagacgctactcactggcatctggtattcagaactctaattctggtatttga

SEQ ID NO: 22433 - DNA, 539 bp, Glycine max
agcttagtcgatattagattggatttgttgttttcttcgtcacagaattccaaatgtcattgtccaacttttcaaactacaaccaaaacgtacgccaaattgctagtgaccaacattataaatgaaatgtagcataaaatatcagctttaatttttatttttgtagcttctaggttcttcccctcacccctttactagctttagtttaatttaattttttgtttattttctcagagatagaaaagggagctttcagctttgggctttggtttgtgttaactctttcgaagatatactccaacagccgcaagactatttaacaaattatatatctttcattgtattaactccttgtggactactttgatagtaccagactactgtgcgagtgtggcttgcaacacttttgagcaatgattagtcagtgactacaatttatcaccgatagaatatggattcacaaatgaaatcaatttggtgtcttacgcaacttgggaagaagcccctatttacaacttatatacgtatctttacttttg

SEQ ID NO: 22434 - DNA, 387 bp, Glycine max
ttaccggagtgatggttgtttacatgaaggggtgccaagggggatgaagggcaaacatcgcaaggagtgcgaagaggactacgtaaggggtgtgagagcttctgtgaagggagatgttacggttcacaatttggggaacggggagtgttgcccctactattatcattaaaggcagttttatttacgcaaaggtatttgggcatgccagaatcaccaaacggtgtgtaggaagctacgacctacaacaattaagtcattacacacccatcattctattcagttcacacttcatatagacattaaacgctttcatctacaaaaaaaatacatatcatgatatcactcgcgtgaagagttgcgtcacgcctctccgcccactttgatggt

SEQ ID NO: 22435 - DNA, 342 bp, Glycine max
ggctgcctgcttgtactaatgtggcacggcgggctttcttttccgcctagtctccaacgcgaacttcgaccatcgatcttacttaccacgatgcttcttttcgtgtccgcccgagagggcttatagccgaaaccacacttgccgcaacgctcttggtgatgtatcaggctaggatatgcacgccgggttgtttcctaaacccataccgggttcattgacgatcctccacataactctggccatcattaccgctgtatcggacagacaaggctgaccataaaaggagtccgcggaggaaatgctgaccaccgcatgagactggagagcagcttgtaacgatta

SEQ ID NO: 22436 - DNA, 459 bp, Glycine max
cgaaattgaacaacggaagctcttgagaaattcaaatggtcataacttttaactcggagttcaattcatgcgcatcacatatagagacgcttaaaaatgaacaacggaagctctccagaagttaaaatggtcataagttttcacactgatgtccgattcaggcttatattatatcgagacgctcaaaattgaacaacgaaagctcttgagaaattcaaatggtcataactttttacactgagggccgattcaggcttataatatatcaagtcgctcgaaattaaacatcggaagctctcgagaaattcaaatggtcataacttttcacacggatgtccgattcgggcgcatattatgtcgagaggctcgaaactcaacaaccgaagctatcgagaaattcaaatggtcataacttttcacaccgatgtccgattcaggcgcataatatgtcgagatgct

SEQ ID NO: 22437 - DNA, 363 bp, Glycine max
agcttcttcagtggttgtgcaaggaggaatttttgtaactcaaatatcagaaaaaaagtctatgaaggcttaatcttaatacatctgtgtcgaaattacagggttatgttttaggtgttgagggaggaaattgacagaatacaaactttgaataatattcttattgtgcattgtgaatttgtgatgtgttacagagtgatacaagacataaagcactaaacttcatttataccaatatactaaatcataattctaactgaataacgaaataaatcacgggatcataaataaatatctaagataccctagattattccaagacataatcaagatagtgttggatattcttcaaacgctatcatt

SEQ ID NO: 22438 - DNA, 569 bp, Glycine max
ccgtcgtaccaaacatgctaaaatacgaaaatggtgggaatatacagctagatgatgtcttcatgatcatgtgtgtactcggtggcatatgatataaacattacgttgtgaaggatagggtatagcttaactaaaggcataagtgtgatactctattgtgtccactggctgcctatctcctagaccctctctatggctttctgtacaagaagctcttatatgaccgcactacagttgcgaatgacgcggggatcatacgtgcagaatgcattgtgaccgattacagacaccgagtgttacaccatatcatctttccttgttaattattcagatgaaatgatatgttggaactggaacttagaggttaacacgtcgacgtctaatcttacaactaggggtattgtggcttgcatcacattccttccaaggatatggattgataccatattttacagaaggatcctatttatgttgtcccttagaggcagcatacacaaatttagtggttagggaacacttaaattgcctccatctagcggctaccgtggacatgaccttcttggcatttg

SEQ ID NO: 22439 - DNA, 319 bp, Glycine max
agcttcagaattcaatttcgatcgtctcgatatattacgggtctcaatcagacatctgaggaaaaaagttattgtcgtttgaatttgctgacagttcaacattccattttgagcgtcttcatgtttttcgggacttaatcagaccttccagttaaaagttattggtgcttgaatttgctgagagcttctacatttcattttgagcgtctctattttttaccggactcaatcaaacatccgagaaaaaagttattggcgcttgaatttgctgagagccctaacattctatttcgagcgcctggatgttttaccggactca

SEQ ID NO: 22440 - DNA, 422 bp, Glycine max
gctttcagcaaattcaaacgacaataacttttttcctctgatgtttgattgagacccgtaatatatcgagacgatcgaaattgaattctgaagctctgaactaattcaaacgaaaattatgatttgctcggatggctgattgagtccctgtatacatcgagacgctcgaaattgaatggtgaagctctcagctaattcaaacgacaataactttttactcggatgtctgaatgagtccccgtatacatcgagacgctcaaaattgaatgttgaagctctcagcagattcaaacgaccataacttttttcctcggatgtctgattgagacccgtaatatatcgagacgatcgaaattgaatcctgaagctttgagctaattcaaacgacaatactgatttgctcggatgtctgattgagcccc

SEQ ID NO: 22441 - DNA, 770 bp, Glycine max
  unsure (1)..(770): unsure at all n locations
cgccnagacggnntttgtgaccccgctagatacgtccngggacactataaataccccccgccccatcgactccctaatgtcccgtcgctcgggctgttgtttttttatgggcgcctgacaacgaatgctctactggcaaacattggtcggcggggacctctgaggatgggaactaaccctataaaggatcccgtcctcccgtgtagaggggaacctacttccctggtttggctctaaatagaactagggggcataggatgacctcttgataacgatgggcggatccccacaaaacccgaatgttcattgcggttcgcttattgacagccagcatgacgggtatatgggggagacatgggtgcgtctcgcgtggatacactacgcctgacaagcattggggactcctctccctcaaactggtagttgacgagtgggggtattgcacacacctatgacctgcaagtgagaactttcatccttcaaatggaagcacttgaccggtcaccgtgttataatttccatgcaaggatgaacctctgctaggcttcttatactgtgaataacaacgatacagcgctagcgttgaatggaaccgagactcccatatgctgtaggcactttaaaccaagcctgcttattaaccaccccgcaacttttagtgaaagtagaccctctggcaaatgttatacgactgggaaaagctgggttgaaccccccatccttacggggcacacttcgcaaaaagcgcccccttataaattaccaatggg

SEQ ID NO: 22442 - DNA, 247 bp, Glycine max
cgagaatgataaagttggataacactactatacaattttttaactattattgcatgagagttgctcatctaaacctgagttctcttcaattagtacctgatatgagttgcaattggaaatatctaccaattcgatctctctcaatgtattggctccaattttcactggcgttcttttctccctctcttttaaagtccattacaaacccccttaaaatccggctaatataagtaggatatgataatta

SEQ ID NO: 22443 - DNA, 305 bp, Glycine max
ttataccttgatggggtggggcattattttgttcttgttcatagaaacatcaaacgtatcaattgctacctgcagttcattagtgcctgcaacaaccctcatggtgtaaaagtaggcgccaaaaacaaatgctatcaaaccctgaacgactaccaaattctttggcttaagaggaaggcttctatacaccataattctagccgtcttgatcaataggggaagaagggctagcacattctttaacatttacagttaccctctgtggaggcaagggctttaagcacaatatataatgagatcccttt

SEQ ID NO: 22444 - DNA, 758 bp, Glycine max
  unsure (1)..(758): unsure at all n locations
cgcggccttgtgacatccttgtgacgtgcccgcanctttgaaaactctccccgcgtggacccatgctcaagatctatgatgagagtgaatgttttgcccggagaggcctccactagaatgggttttatgcgggggcaactgacacttacattttgtttaaatgggagaggggtggttgcaatcaaaggatgaatcccaaacaatgtttgccttcagcggccgactatttcttatattgtcgaagagcttcttttcaagagaatctttaccccctccagacagtaagaaggggcagggattatattttagaagctcttgtgccgatatcctgaatgcttgtcatacaccatataataactctcatctatttattcaaatgaaatgatatgtttgaattgaaacttaaaggtaaacacaatagcatctaatcttccagttaggggttttgtggcttgcatcaaaatccctccaaggttatggatttataccatatcttaccgaaggatcctatctatggtgtcccttaaggcagcatacacaaactcagtggtttgggaacacataaaatggcgccatcttacggttaccgtggacatgaccttttgggatttgggggcttctttgataaacaaaattggcctgccccaattaattgggttggtaacacataccgcatggatataattttcaagtctttgaaaaaataaccctctcttgtgaagggtgctctactcaaaatgtctctttttacattagcg

SEQ ID NO: 22445 - DNA, 493 bp, Glycine max
agcttcgccaaagggcatggttatttccagtttttttttatatccaaaaatcttgtgaaatgatgatctttttctttcttggaaggcaccacaggatatggtacttccacactttcttccacagcctttccacttctattctttgcaacattattgttttcatatacaattttttcattttctatttctttttctttttcttggtcctccatctctttattctggaccattattttctacccttttttctgatactctttacccttcacattatttttcttaacctcaaaacctgtcttttcactcaattgttccttggctaccacattttcttcatcctcaacttccacaaaccttttactcctggacatcacagccttgcattccttcttaagatattttccgtatttgctccaaagctgcttgatgacttgttagctatctgcttggccaattgtcccaatctgacctcaagggtctttaatgctgactc

SEQ ID NO: 22446 - DNA, 624 bp, Glycine max
tatcaacttcaacttaaaataagcttgcctgtcaacatcaaaaaaaacttaaaataagctctaattcaaagattggtggcagagtttcttacaaaagaagatcaatttattatttttttcactgtttagaataaactgatttcctagtttaatataaatgaaaaaggattttaaatagagaaatgatattccaaacaaaccatacaatcatagatttttttcttttcattaaaaacaacatgcgttcttaaattttgctgagacaaaggtgtttgtcacaaggagatagaacatataccaaattttcaatcctatacatgcacaataaaataatttatgagtggccaaattacaaaagcattaaaacagtatcggagaactttattccttcaaatggattcacttgactggtctcggttttattagtctaatgtaaggtctaagtactacaggtctaattagaacaaaaaacaaaatgataaacactcaaatgtagaaatagaacttatattcaacatatactttaatacaacattcaagtcaagccacatagatagagaatttcagctacttgttgtagaaggtagacccttttgttaaattttcatatgacatgtgaaaaaa

SEQ ID NO: 22447 - DNA, 575 bp, Glycine max
agctttagacctttgatggcatgttggcatcacctttattcttgttcttgtcaacttcaaacttatcaattgctacctgcagttcattagtgcctccaacaaccctcatggtgtaaaagtaggcaccaaagacaaaagctatcaaacccccaacaactaccaaattctttgccttaggtggaaggctcctatatcccaaaattctagccatcttgatcaataggggaagaagggttagcacaatttcacacaattacaattaccctttgttgatgcaagtgcaaaaagcacaaaagataaaaagataaataattctaaattgtgataatgaggagagtgaaagaaagtaaaaggtagacatttccacaaacagaataagggcaaggcagccccaacacaattgaaagaggagtaaaatgaaacgtagagaggtggtcaaattatttcatcaaacaaaaacagttttgatgggtattactcatattgctacaaagaaaacctttcaattaagtttctatgatgaaccagacagcattcacaaaatcaaaatttttagaaatgatgacttaatatga

SEQ ID NO: 22448 - DNA, 533 bp, Glycine max
cacgaatagatcgaggataatgccccaggttcaagttcatttttggtgttgcaaagccaccattccgccaaattcaatttttgtgtacaatgcatgaaatagtttattactacattactggtgattgtgtcgcccatattaaaccaaaaaaaggttgctgggtccatctcatccataccttgtgatatgagaatggtctttttaatggatggtgttactcctacaaagtgaaacaaagtgcaatagaatactaatatacaacaaatgtaccgatattcatgatgcttgtctctcgggatataatgacaataaaattagtggagtaatcagagagtttcatagaatagatacttattaatttacataatcagcaatgatacatatagacttatgtattgtgaacatcatattaacatcttcaatgtcattggatttatatctttctatatcatatgatacatcttatgatatatattatagtttgtctttttcaactctctgtatgtggaaaataacatcgtggaacatttatc

SEQ ID NO: 22449 - DNA, 521 bp, Glycine max
agcttgaggataaagacttcccaagctatttatcttctctctcaaagaggctctctacttggatggttaggaatgaaggctcctacccttatttatactactccatctccacaatgaatggtggagattacttgtatcctaggatgaagattaattctctagaatgctccacacattctaggagtctctacactcttttattccctttcatactcttccataaggttccagcccacacatctccagaatattccagaggtttccacatccttccataagcttctagagagttctacactactctagagttctccaggatgttctagaaaattctacacttttctagagagctctacaattttctagaacctctccgatttgttatttaatttgatatttatttatttatttgagatgtttctttgctatcttaagtattgttttcaattgaacttatttaacaaatacataattttaattcaattacgtctatatgatacttttttatattttatttacca

SEQ ID NO: 22450 - DNA, 493 bp, Glycine max
aatcctgactcaccataaaccttgacccattgtgataatgtcaattcttaccctcggaagcaaaaaaaagggggagagggaaaatttccaatcaaagaggaagctaaaaggagagaaggaaaatttccaatcaaaggaaaaaaagagaggaaagggaattcccaatcaaagagtgggagaaagcaaaaagaaaagaaagaaaattccctatcaaagaatgggagaaagaaaaaagagaaggagaagaaggaaagaaagctcctgatcaacgatctaaagaaaacacaagaaatgtgcaaagaagtctctggaccagacaatatctgaacaaatacagaattgtcgccaaatgaacaaaagaaagaaaaggaaaccctcacctaaaagtggtcttctccctttgattaccaaccaaaatcctgtgcgtcggtgacttgttcgcctcgcgtcggacaaaaacagaaaaagataaagcctactaaaaaatctaaag

SEQ ID NO: 22451 - DNA, 393 bp, Glycine max
agcttcgccaaagggcatggttatttccagtttcctaaaaatatccaaaaatcttgtgaaatgatgatctttttctttcttggaaggcaccacaggatatggtacttccacactttcttccacagcctttccacttctcttctttgcaacattatttttttcattttcaattttttcattttctatttctttttctttttcttggtcctccatctctttattctggaccattattttcttcccttttttctgattctctttacccttcacatcatttttcttaacctcagcacctgtcttttcactcaattgttccttgtctaccacattttcttcatcctcaacttccacaaaccttttactcctggtcatcacagccttgcattcctcctt

SEQ ID NO: 22452 - DNA, 486 bp, Glycine max
  unsure (1)..(486): unsure at all n locations
ccctattttggcaatacctgatttttctaagggttgtatcttggaaactgatgcatcaggaattggactgggagcaatattattgcagaaagagaaacccttagcttttttggagcaaggctctctcaaactcgagtcagtgtatgagagggaattgatggcggtggtgttagcagtgaaaaaatggaggcactatctgttgggtaagaaatttataattagaactgatcaaaggagtttgaagttcttaaatgagcagaggcttatgagtgaggaacagttcaagtgggctactaaattgattggttatgattttgatattcagtataggccaggaaaggagaataaagtggctgatgcactatccacgcagttntcattttcagcaatttcaatggtgcaagaggaggaatacgctgattgggaggaagaaatacaagcaaaccctccattatatgaaatatatcaagggattctgactaaaac

SEQ ID NO: 22453 - DNA, 510 bp, Glycine max
agctttgaggttttgatgactaaggcaaatatttcatttttctatcactaaggttagcagccatgatcaaggcatcgtaatgttgctgcacaaagcctgaaagtacatttgttccatcctacatacgcaacatgccatgtgaggagcaagactgaataatcaaagaaaccactaccttcattaacttttccaatctcatcatagatatttagaccaagcaccaatagcaggtagcaactgtttactccagagcaagactttggcttgtacaactgaggcattttatgactcagtaggagcattttcaccgggcaagccgaatatccgaagatttcggtccattgatcccacagctatgtatttaaaatctggaccaaattttacacacgtgttcttccctgagaagaaaaagttcgagttgtgtattagtaactgaacaaacatgagatcatcaaacccttcaggaataatgaacaatgggaaaaaggtattaaacctgttccacataaa

SEQ ID NO: 22454 - DNA, 439 bp, Glycine max
cgaggtgattacaatggggaaatgctcaacccggtgttgttgtgtggacaacatcctgcaacatggtggtgatgaatcctcttttgcacagaattaaggaggcaatgaagggtgaacctcatatatatataaaacaaaatctatgtacacacacttaaaaagaagtggaatttggtgtggtcacaaacgtgtatatgttcctcaacttgaaggtgactaaaaacaataatattgcatgcttatgaaattaaagccttaaaaaggattaatttttttctaaaaaagaaaacaaattaaagacatcaagaaggtgacataaaaagaaagtagtatagagagagaagttgtgtatgctgtgttgtgttagctaacatgatggggtgtatgagggtgtcaaaaacagagaaagttagttatgtgcatatatataggaattgat

SEQ ID NO: 22455 - DNA, 571 bp, Glycine max
agctttgatggtgtcgagaagaaatcacatgttttgtttcatcaaaaagggggagaatgtgaatgtatgtatacatgattttgatgatgtcaaaagaggaatcaaacaaagttgcttcaaaagataagcatggcttcaagattaatacaagattgcttcaacaaacaaagccttgcttcaagattaactcaagatcaagccttgccttaaagcaaagtgctttcaagacattcaaggctttggtaatcgattaccggaagatagggttgagaaatagttgttgaaaagagttttgaatttgaattttcaacatgtaatcgattaccatatgtctgtaatcgattaccagcaacgaaactcttgaaattcaaattcaaaagtcatgacccttcaaattataactgtgtaatcgattacacaaacattgtaatcgattaccagtgaagagtttttagaaaatatgccaacagtcaaatcttttctttggatttgtgaatggtcatcaaaggctataaataggtgacttgggaccaattttatgagagagttttgattgatcaaaatgtcttat

SEQ ID NO: 22456 - DNA, 479 bp, Glycine max
accacttgtgaaatagagccatgagggtgggctcatgggccgctttgggatagacaagactgtggtcttactcaaagaacagggatattggcccctgtgacaacctacccttcggcgggagggcgatgcatggctcacgggtgcgtcttcctagaaaggaaaatgcgcagagtcctcacccacgtttatctgaggaaaaagtcggaaaaatcacgagacgtgtggtgtacgaattctaatcgtgagaggttccggagatgtttttacgcacggagaaggtcttagcaccccactcgtccgtcacacgggatggcaacctttaaccaagtgtgcaaatatgacttcaaaatgctttattttcccctttcttatgtctgtatgtgtgtatatgctattgatgtacataatattcgtgaggtcgactaagggtgtttccctcgctcctacgtatcctcaattgcgatgaggaaattagacct

SEQ ID NO: 22457 - DNA, 567 bp, Glycine max
agcttaatcttcaaataaagcactattaatttttattattaatgatgaaaagaaatataatactagctatcattcttacttcttatctagcatgcatgctcatgttggccaccaccctcagcttcccatgcatgggactggcatccaatttcaaggaaattatcttattggatctttttatgtggttcccactggaagatacaatctagccttattttcatccacttgaattaaaaaaaagaagaagatcggtgtattaattaaatcaataaaaagattggtatcccactttttttagctttattttacattaactttgatatttagtaggtgaggtagaaaagattaaaggaaaaatgagtttttgatggttttaattggtgagagaaaattaccaatgaaacagattttgtttatttttagaaaaaatagaaaagctcacttatctttgttaaatcatgattctcagaataaacataataaaattatgtataattaaacattatttatatcaatgaggtcccctcactggttttggtcaaaccaattagtatcctatgcttttaa

SEQ ID NO: 22458 - DNA, 479 bp, Glycine max
aggatatgccccaggtataagccttttttttggtgctgcaaatgcacccccctctctttttaaccttgtgtgctgttagcataagagcctttaatacattgatccttaattcaaccaaaacttaataataaaaaaaacaatcagattgaccaacaagcataactgcaagaacattggacaagcatggaccatcttcatataactcttactctcagctggaaaaaattgaactcaaactcattgttatgtcattttcgatcgagacactttcttttttgcacaggaaaaaaatagctataattaatatttaataacgagtggacagatatgaggtgaaacaagaacggaccgagtcaaagttggtggaagaatgtggaccagttccttgctacattcctttgggtagaggaccatgagcagtatgtttcttaaacttaaacttggtattaatgtaatgattttaattttaattaaattca

SEQ ID NO: 22459 - DNA, 539 bp, Glycine max
agcttgtagagtgtagactcattccttacattttaaacatgaacaaaaccaagtacagtgatggttatttttggagtttcaattctactaatgctacattgctcttgttacaaaactgttagatttctagtataccaagagagttcccaccatattgcaaaaaacaagccagctataaactcaccatattgcaaaaaaacaaggcagctataacattgtaataaacttcagagacacaaaagcaccattgaaaatcaaagacacaaaagcaataagaagatgactgcaataaacaagccagctataacattgtttgatatttgttcagactttaattacagcaaatggtaaaaacttaatgagtgcattacaaggccttcaaatttaacatagacacaaaagctagttccaaaataaaaatagcctaaacaaaatgaaaacaagccagctataacattgatgtgcccaactactcctaggctgctcccttaactgattcgtgaatgttgtgtttcattggtgttgccacctcctttatg

SEQ ID NO: 22460 - DNA, 244 bp, Glycine max
tagcttcttggttggggcggcgtaagcgaattttgttagtgatctatcatgaaagtgaacgccccctgatcaaggcatgatcttggaaggctcggattcgaacacttaccggttgaataactaacaacacatgaccaacggtgtagaacgacagattatttttaccgatttgctcacggacattgtctagaagcattactgaagctccttcacttgaattttcattacagacacacgttttctg

SEQ ID NO: 22461 - DNA, 474 bp, Glycine max
tgcaaaacagatttcgcaagggtcaccctaccagcatataaaagagttctagctttccacgtacttaaccgttgatggacttcgtccatgataagttggaatgttcctcgtgatacctttttatgaaaaataggtaccctaaggtattttccaaggtcatcagtacactgattacccatttcctcgcttgattacccatctcctcgctcgattgattcctatgtgacactcaaacatttttagagaaatgcatacgagatttctctaagctaatcttctgaccagaactcttgcaaaataaatttaaaatattatgaatcaagtggacttattctagagaagcttccgcatacaaaagcaagtcatctgcaaaggtcaagtgcgatcaggaacaaaactagactacaacaatattatctccactttgttgatcaggaacaaaactatgttgacaaggcttaatccaatgagtca

SEQ ID NO: 22462 - DNA, 755 bp, Glycine max
  unsure (1)..(755): unsure at all n locations
gagtgcnnagtgagactttcgtagaacncncnnttannaannagctgcatgctgccagcgaggagaatggatagacaggaaatatggctggtttttatctcgaccgaggacaaacaggatgcccgccattatatgcatgaccccaaagccaaaatgaagatttggaaactttatgctacacaggatatgcatgcacgtatgtgaacgcttaattgacaaaaccctctacggtcataagatgctcaagctcataatacattttctctcttataacccaacccaatggtgcaacagattactccttaacaagactttggcttgtatcaccagaacgcatttaatgctcagtgagaacatccataccgggccctccggtgtacaaacatttctgaacaatggtcctcagctatgtatttttaatcaggaccaaatgatacactcgcgttcttaaataagaaaaaaaagtcggagtagcggcttatgtaactgtacatcccaaaattcacacaccctctctgattactgaacaacgggaaaaaggataacccccgtttaaataaatcagggaggttttgaaaattcacctttatatttctaaaatctattggtaaacctgcttagctaacggccctggaatttattctaggttcaaaaaaaaatattaagggtgaccacacaccaggttgaaaatattttttttggaactcaaacaccccccaaattaataaaaaaggttcttacctataaataaaccg

SEQ ID NO: 22463 - DNA, 342 bp, Glycine max
ttttcggagaaacatgaatgtttttgtttagggctgttcatgtgtcctccattatcgagtttgtagctatgttccatgattgcctaagtgagcatcctcaaggcaatcctccattctcacccttttttggagccacatgaatgctattgcttaaagctgttcatgtgtccttcattttcgcgtttggagctgtgttccatgattgcctaaacgaggaccctcaaggcaatcctctattgtcacccttttccggagccacatgaatgtaattgcttaaggctgctcatgtgtcctacattttcaaggtgggagctgtgtaccatgattgcctaagagaagacc

SEQ ID NO: 22464 - DNA, 790 bp, Glycine max
  unsure (1)..(790): unsure at all n locations
cgagacgcnttttgatcttctgtagcaacccccnnnnnnnnanngngccggggcaggcaggcgcgaacaagagggagggggaaatgtttttttctcaacaccgcacaaccagggagggggacggagagagaaaaccacaccccacccccacgggacgagcagcgcagaacagccagaaaacgcgcaggcgcacgggcgggcaaagcagggcacagagcaaagaccaggacgcgaacggaagcagacggaagggaagagggcgaaggagaaagcccacacagggcgaccgaaaagacgaagaacccggaaaaggggggatgcgagggacgccgggaggacaggcgagaaaagaagcaggcacgccaaggagaaagcgagaaaaaggaggagggcacagcgcgcgacccccaaggggggaagcggcacgcagagggaaaaccaagaggggaacaacggaaagacgccggaaaaagacgacaaaagagcggagagaggcagaaagaaccagaaggcgaaggggcagacacggaggaggaagaccgagcggcggcaacaaaagaacgggcgagggagaccgaagaagaacaagagccggacgcaaggcggcggagaaacgcaaagcagagcgaggggcaggacgaagaaagcacgagacaaagaacacgggcaagggccgagagaaagggagcgaaggcacacagaaccagcagaacccaagggacagggaagaggaaaagggaagagagaaggaagaaacgaaacgaacaggggggccagaaacaacgggaag

SEQ ID NO: 22465 - DNA, 988 bp, Glycine max
  unsure (1)..(988): unsure at all n locations
caaaacctacagctcacgatataccacacactctctctctctttgactctttactcttatctcgatcatcacacccncnnntccgagaaaggcnttttgttcatcccttacctccggggactttaaatacaccccccttccgaaactccgcaagagctcctagagcgggaaatatttttctacacacttctcacacaaacgcactagaccggaaacacggcgatactctaacaatataaacactttgccgcaacctacacttgagcgtttgtgaaagcggggcacaatataaaaagaggcgtgggacgtaacacgctntcacccttgtccaacaagagaacaggtctcttatcgggacttatagccccctgactgtaggagcctccttgtggcccaagaaaggatggggacggatacaataacacacaatcctcgcacacaaagggcgcaaacaccatcgtgccgctttgcaatgtccacacaggaccatcatagaaacaaagtctcataggagataaataggacattaaaagatggatttccttccttggagccaccaaatggaaagacaaaaaaaaaccctccatgagaacaattaaccgccccctggaccccacgtggctccaanactttgaggtgaggaggaaaatggagtgtcccctcccacctctggagaaaccaaccccgtacaaaaggggagaactctcttgcggggagccgcaatacggagagcccctctttcccgggagaccttcacaggaaccccgtcttttctgggaaacgtatacaaagagacgacgggggacacaccagataatatttctttctaaacaaaagaaaatcagaaccctattttggcgcgtgccgcaaagggcgccaataataccccacattttggcgctcaaaccaacacaattctagaaaagaacaccctcttgtggaaattagaagaagcctctccaaccacatggtgcgccctgcaacacag

SEQ ID NO: 22466 - DNA, 395 bp, Glycine max
  unsure (1)..(395): unsure at all n locations
atagcatcatttcttgccctgaattggtgggagttggaagccatcttctcaatcaaatttctaacctcaacaggggtcatatcaccaagggcttcaccactaatgaaggccgcttgcacacaatttcttgaatcttttcccgtacctatacaaactttcttcactaagttgcctgatgcctgaaatgtcttttctgatggcagtggacctagatgcacggaagaatttctccaagaacaccctcttaaggtcatcccagctaaaaatggacctgngagcaaggtagtatagccaatcttttgccactccctccagagaatgaggaaaagccttttaaaagacatgatcctctttgacgtcaggaggcttcatggggggacaaacaatatggaact

SEQ ID NO: 22467 - DNA, 478 bp, Glycine max
atgaaaaaaaaaaaatccgaaagcttttttcccatgaaaacatgaaggatagacaaaagctagaacacaagttttatacttgtttaatcaacttgagcaatgtacagttatctttccaccttaaaagaatttcactaacataaataagattacaaacaagttttctatcacttctaggtacatagaatattctctgtgttatttttgactacaaatacaaacaatatcttcccttgaaacggtaaactcgagtgttcattaaaatgacactattgctagctttaacagacaacaaagtgtatgaagattacaaagatcaactctcaaagaaaagataagaaagtagtacaagtattaatagcattgcaaagtaaaggatagatcctttatgcaaaacttgataatatttgattagatactaaattatttatcattttgaaataggttcctagattattattaatattattatgtctat

SEQ ID NO: 22468 - DNA, 544 bp, Glycine max
  unsure (1)..(544): unsure at all n locations
agcttgccagccttatttaagaatcgatttttatcttgatttcaaacttnttccatattcacaactaagaaatcaaaatacatcctcttacgcctaccttttaatataaggaagtctaaatatctctctagggagcatgtgttgcggatgaaaaaaatggagaaacattttttcaccttaactctaggaacttcttatgacagaaagtctctagacgttataatattaaattttcaagaaaatgtaccaaagagtcatgtgaaccttttgctttatcggaaagcaattcattgttagcaaagtattagggaggaacaggaagtccatttatagacactcaaatagacaaaacaattccaattacgatcttcttttaaaatttaagggaacatttttttttattcatatgaagcacatatacgacgatagaatatcagcatagcacacatctcaagaaaggtgatgcaagcctttattaatcttggttgtgcacgggtattggcacgcagcaactaatctaagaatttttgtgatttgcttaatt

SEQ ID NO: 22469 - DNA, 225 bp, Glycine max
ggctactgctagacagctcatggtctctgcctgaccttcgttatgaccactgcacacattgtttggcctgattgttgagaacagtctcgctagagctgacacaaactataaatttaatcgcgggtttacattccagggttggaaacctagtcggggcatctttcacacagacatttgatacatttgaacatcctatacaaggcttattgcgtaagttaaccttcc

SEQ ID NO: 22470 - DNA, 632 bp, Glycine max
agctttgtccataaaaatcacctaaaaaccatttttaggtccaacgccttaaatggtccgctttgcttttattggttaaacatggactttcgaaagcctaaaatcaacacataactttttcacctctttcaaaaaccaagagatcattaatggtccaataccttaatattttctctcctttcaaaaaaatcaaaagatcgtttaatggtccaatgccttaaacgaattttgtttggtcaaaatatatcttgcaaaaaaagataaaaacaacttaaccaacgtttagttctcgaagaactacgtaggtctgatttccttaccacaattgaggaatacgtaggagcaagggaaacacccttgtcgaccacaaaaagataaaaatcataaaaggcataaaaagacatataaagcgtaaaagataaaataacacatatcgaagtcatgtttgcacactcgatcaaaggctaccgtcccttgtgacagacgcgtggggtgctaataccttccccgttcgtaaatacaactcccgaacctttcacacttaaaggttcgagaccacagctttctggtttttccgacgtgttttctcaaataaacgttggaagcgacttcgcgccattttcttccatgga

SEQ ID NO: 22471 - DNA, 606 bp, Glycine max
  unsure (1)..(606): unsure at all n locations
taccacactaccgcagctccggccaagctatcttgaaagaagtgtattaatagcttttcatctttagaatgggcgcccatcttacggcagtacatcttgagatgatttttgggacaagtcgtccctttatacttgtcaaagtccggcactttgaacttcgggggaataacaacattgggtactaagcaaagatccgtcatgtctgcgaacggataatccccaaatccttccacggccctgaatgtttcctcaaggagatcaagcttcctcctttcttcagttgccggaggcggcccttccgtggacaaaactattggtggtgccgcgatgttgggttgaggcaacgtgcctggtgccggcccttcggggatcgggggatagaactcgacatcccttcgagcatagacttgagggtctttgtggacttcgtcgggctgctgaggaggctctctctcaaggacgggagaagcaatgtggcccgcatcttcttgcaagacgggtggtgaatagttgggcggcaatccataagggtgagccgctcggntgtatcccaagtgaagggctgcatcatgccccagtgtgtcccttccctgtctactatgtttg

SEQ ID NO: 22472 - DNA, 414 bp, Glycine max
agcttgttctcaacttgtttgatttcacctttattgtctttgaacgtggcttttgttagcagaaacttaagaacagcgtttaagcctatgggttacctcaaatcagaaggaatttacttagttgaccctcttgctgacaaaacaaacttgaagaagtctcagcctgtgaaattattgtccgtggatggtatcagaaaggcattgaggtttgtcattattaacatgggcacagtacccgctgggctatattgcaaggacattctactttttttttactccacttgaatccttttgcagtctagtattaataataatttctataccagcaatgcaggaaaagtaacaacagcttctcatacgcaagggattaggtttctttctgaggttgcaggtaattggactattttgtaacta

SEQ ID NO: 22473 - DNA, 129 bp, Glycine max
actttcgacacgtgcaaagtacggtatattttgcaccgacaaagagattcactgccatatacgacatgacatacccatagcttataactattagggacctgggatgaactctgagagattttgtgacta

SEQ ID NO: 22474 - DNA, 375 bp, Glycine max
  unsure (1)..(375): unsure at all n locations
agcttgctctggtatcatgtttcctttttaaactcatccatgtggnttgttttaggttctgttgtttatttatttttggggaagggaaaggtggactaaggaaccattgaattatcaattgcatttcaactatatggactatggacatataacagcagtagtagtagtctcttacacgttgcttgtgatttttgtaatttgagatgacatggacagatgatgaggcaatgctgaatttggtaaacttaatttctaatgaggagtagcatgaatgaatttgtgataagggcataagatgttttatttggtggattcataacagctggccagcgcaaatgctactttttttattcttcaacgatttaattaataaag

SEQ ID NO: 22475 - DNA, 465 bp, Glycine max
ctgctctaaaggataatcatcaaatgtgtgccacatatatgcctcgtctctagaccatagcactttgttagcattttggaagtagggtttgtgaacaatggctattgtggtatttttctttgtttgatggaaaaaatatcctctttgataagtaaaatcaatgacctttttcaattctcttctccaccaagatagtgaagaaaactattcaagcctagtctgtgacgccctctacccctcacattatgtactaataatagaaggaataagaaatcataattaattaaaagtttttaaaacacatttaaataaaatcctttcaaaagggcaaaagactcacattcacttttctaacatcataataaaacttgtcaaaataaataataaatcatctcggctcaaaacaaggtcgtccaagacttcatgcaattaatatagaaacctataccccaatgtcacatctta

SEQ ID NO: 22476 - DNA, 312 bp, Glycine max
aggacaaactccggcgtctgacgcccaggctgtaaattgaggggaagagatggtccccccctccttggaaacaccccctggaaaggttaatttctgaccatacccagagggcttttataagtgacaccctggagccttttagagggaacttcacatggcgaccgcggacccgccaaaagtatggtatacccgagagccaccacttctgcgcgcgcaatgaccaaatcaccctccggggcggctggcgaccaaatctaaaaaccttcccccgggtggataacagagcgtttgtcttggaagcccacggccccg

SEQ ID NO: 22477 - DNA, 499 bp, Glycine max
agcttgctaacatctacattaataatatgattcttaatgtgaacctcccgaggttcaataggaagaacagacaagggccttcagatcaagaggaaggaaaatcccaagagagaggatgatgcaatcctaccccgcaagggcattgaatagaagactccaagtagattggaccagagatgtaagagaaggccctaggattctcatgagccttagggtagattttgggcccatgggctaagtataagcccacttatctttgtacatattagattaaggtttcattattttggaccttttatttagggttccataatgtaggtagagtaccctagaaatgtaggatttttcagcccttgtattttacggtacctagactaatttttgtattaggggtagttttataatttcacatgcattaagtgaatatttgatgtgtgtgttggaaaataaattgaattgaattgggagaagcctaattcaattaaagtttagaggggga

SEQ ID NO: 22478 - DNA, 390 bp, Glycine max
tttggggctccccccctctcttctttctttccttcttctttttcttcattgaagcatcctctccaaggctcatcttggtggtgaagctccttcttccatggcttattccctagaggatggcgcctcctctcacctattctcctttgtcttccgctgcatctccatggtggaaaatcaccattaaaggacctcattgaagctcaaagatccagcctccatagaagccccacaagcaagcttccatcaagtggtaatcagagcacaagagcttcaagtaggtgctccttaaaccttcattaattttttgctttaccttctcttccattgatgattcttcatttttttctccatgtatctactcacatgtcttgtgataaatgttggtaacat

SEQ ID NO: 22479 - DNA, 540 bp, Glycine max
tgctttactacacctctatttaaccctattttatatttcaatgatatatgagatacaataagctcttgatcaaatgacagccgccatggaaggcatgaaagatcaaatgaccttttccaggtatccatgttacctatatatcaaaagggggacaacaccgtggtcgtagctgtcctctccaacaccgctgttgacggagattcgctcacctactcacactaatcctgactggccaacctgtttctagcatggtaagataaggacgacatagcctacgcttaactctcgaacaactacttgggcctgatttgcttaccactccagatgaatacccccgaacccaggcaccacccttgtcgaccaccgtgcgcatcaaaacctccaacgcctatgatgatgtatcccgcgtaagagataaaacatcacatggccaagtcatgtttgcacactctatcaaaggcttcccgtccatagtgacaaacagcgtggggtgctaatacccttcccggtcgtatatacatctcccgaacctttcacact

SEQ ID NO: 22480 - DNA, 537 bp, Glycine max
ctagaacagggtcaagttattcctcttcactaccttaaaaagaaatgcaaacacccgcgccttaaggtcaaagcccaaaccttttttgaacaaaaccccgagttgtttgacgtctactacaaccgcattcagcccaaaacggaaccagtccacttcctccgcaccaccaaccacattcaccggttcctcgaagaagagtaacacgttttttgcgacaacaaagcccttcatctccacttctttattctgattttgaatgaatctgcttttgttgtctcaaaaaagagaaactcattttttcttaccattttttcggcctcttcccatccgctttggcaactcaattggaccaatttgattgcaattgaattttaggtttccctttcttccactttgttaaattttttttcctcttttgagttgcttattttctaatgggttgtgtatgacatgagatggcttgtaattggtcgtaggaaagaacattagattctcactacttttggggatcaaacagaaagtttgtggtatttatgc

SEQ ID NO: 22481 - DNA, 366 bp, Glycine max
  unsure (1)..(366): unsure at all n locations
agtgacctgcaggcgtgcagcctggctgggcgatgaagtggtcggaacttttttttaccgtggntcctttatatgaccaccggagcccataaattagtcccatttaggtgatgcgtgactgaccaaattccctttctgagagagatgtgaatatgcacatgagatctaagatcacaatttaagaaggggggattcccaaggcataaccactccagagtatgagagaggaacacaatttaagaagtggccggatcctatactatcacacaactaactaactaactaacaaactcttcaaactacacaaggaataaaagaaattcccttttttttatttgtgtgtatccccctgcttaagcttgacat

SEQ ID NO: 22482 - DNA, 416 bp, Glycine max
actctataaaaccctcgcgctgaaagggcaaaaagaaaaaaggctcgcgcacctcctctgaaagcatgcaagatacactcaggctcccgctctgggcacagactcgagtaaccaactgaagcaccgtgcagatctctttcaccctcatgcgaactttactaacataggctaaaagaccatgcgagagttctatcactgctatttacatataataggggcggagagatttttggctacgaataccaacactaactctccttgctactgtatacagggctgtgcagcaatacgacactctagctagcagtatcagacaacaaagtgtatgaaaacctcttagatcaactcttttggaatatatacgaatgttctacacgtattactacttttgatagtaaaggatatatcctttctgc

SEQ ID NO: 22483 - DNA, 482 bp, Glycine max
tggctcaacctcctcaaccgcaaattgcaaattcacatttggcatggattacaagacgcagtaacacaaacataggaagatggataaccactcacatgctagctagcacttagtaccatgtgacacagtgacttagacactatcggaacaggcagaacagatgccccctttgagggaattgcatataccaataagagtccgtttcttgatttgtagttcagatggagcccttcccaacggtatccaaggtgcagccagctaaacaaatgacaagtaagttttagccactcattaaaaagcttatattagacacccctatctttattaaccaccagattggtagactatggctcataaaaaaaaaaaaaaaagaagattgatagaccatgggagcaatttcctaatgaaaatggctttttttagaaggaaaaagaggggagactttggattcccctaaacctacccaaaatggaaaaaaaaaa

SEQ ID NO: 22484 - DNA, 362 bp, Glycine max
tagcctgatggaagttatatagagtagaagatctgatatatgacctgtaagctgctgtgatgcttgattatcttaacagaaaactcttttcataattcttccccattttcttggttttctagctattctattggcatttttgatcattttcatgcctaatgacttctttggtgactgaaagatctgggtttagtcctttcagagccatccattttggcaaacacttatcctttagtgatcttgcaagattgtacctccattgtttttcaactgtttcagacgtttctcatttttgcaatttgcaacatcttcattctagaatatcagtgttttttctattttggtccatgtaagtaacattt

SEQ ID NO: 22485 - DNA, 833 bp, Glycine max
  unsure (1)..(833): unsure at all n locations
cgagaggggttgtgattttgtaganacanccnnnaanaanaancagccggctgcgggaccgggcttggtggaagagagcttaatgtttttttaccccaaccccaaccaagggagaaagtttattttaactgcccccccacccttgctgtgacaatgaaaataagatttgctacaatcttgtcggtgtagctcgggatatatttaaggaaatttaagtcgaataaccgtgtggcttttgcaaggcatctatgggtgcactagcacttccccaaggatacaaccggcgtgaacttctctgtactgctgacagagaaatgtgggtgaaccaactgatttaaagggtggtcggttctaagtaactagtaacagttgcacttaataacattagtgtgttttttaatcaaagctggtcgcctaaactggtgggagacccctcatccattttcttgtaattaacgtgaatggggtaggagaaccatacaccttttttgccactatggagaagccaatatgaggggaatacggctctaacagtctcctctctatgataaatactatgactacgctagttgctgaatatcacaatgaagccttctgatgcttacctgcagaacacgccttgtctaaaagcttggggccaattgttaaacctttgtgtcgcattgtcacttctgtagagtagatcccatctttggccattgattctttatcatatctctgccgaccggtgcccaattaaaacatctaagggatactgtgatataaacccccgtagtgatcttgccgtgaccatcttcctgctacgttagtctgctcattatctatattacgcg

SEQ ID NO: 22486 - DNA, 515 bp, Glycine max
tggagaggatgcttcaatggaggaaaagaaagagggagagaaagagagaggggggagcacgaaattgaaggaagaaaaaagggagagaaattgaacattgagttgtatctcacaagactcttattcatcaaagttacaacaagtgttacacatgcttctatttatagactaggtagcttccttgagaagatttcttgagaaaacttccttgagaagcttctttgagaaaacttccctgagaagctagagcttagctacacacacccctctaataactaagctcacctccttgagaagcttccttgagaagattcataaagaagctagagcttaggtacacacacctctcaattagctaagctcacctccttgagatgaaaagctagagcttatctacacaccccctataatagctaagctcacccccttgacgaaatacttgaaaatacaaaaaattccctactacaaagactacttaaaatgcctcgaaatacaaggctaaaaccctatactac

SEQ ID NO: 22487 - DNA, 752 bp, Glycine max
  unsure (1)..(752): unsure at all n locations
ggagatttttgtttgctgcgttgcagcgccccnnanagnngancggccggcaggcaagcttcgaggaaacgcatacgacaagaactctttgctgctgttgcacgaaggggaaccgcacgagctgtgatatgctaaaaattcacaccagcagctatgagaaaaaccaaacgacgataactaataacgcggctgacctattgcgtcccataatatatcgagacactggcaagtgtatacagaagcacctggcaaatccaaacaagatttacgtttggctcggatgtacgcctgcggcctgcactatttgcagacgctcggcttggaagaagaagactgtgccacatttccagccatcctatctttaaaactagaccgatcttttgatatctggttattgctgcacccctcgcacgaacaaatgaagcattctggccattctaacgtccaacctattgaccctggtgcactattggccccggagtatatgggaacctcaacatctgcacagtgtggtatctatatcactggaacgctgctattctactgttgctatcctaccccctacatgttatgccccgtacttcctccctatggttgtgacaatgcaaaacatcgacttttctacttgtgcaccctcagtctatcccgtgtaatgccccctcttaacggccgtctgtaggggctttagtgttccttcctatcataatttgccaaatcccccttccaatctcgccgtcacgtaatctcacacg

SEQ ID NO: 22488 - DNA, 939 bp, Glycine max
  unsure (1)..(939): unsure at all n locations
cggccgcgtnnnttgttgacatcgtttgaacngngcgngctcnnntattggaaaaaancaccgtctcatggtttgagctagctataatccagatagcagggngctttatctatttcgttcttcccgtanccttaaagaagagaagtgcgtattgtaactgtgtccctataagcgtctcaaatctttctacatctctttattcggtactaacatcattatgtagcggtgacctgaacgtctggaacctatcacacacgtntataaacagctcctatagaacgtgatgcacatttctcattatgaatctctccagactttcaaaccatctatcgcgtccgtcgtatcttttatacaaggagctaccactgtgactttgtcgacttacaagagccattggtccttcaggaccttttaattcatgagatttgagattgaatcatgcctcaatgtgtgttcctcaaataacagacaaaagcgtcctatctctgtctatatccaatgtattatcgggccatttgtgccctatctcagcttgtttgctaacatcccaattgggacgccaatttgcattagccaatctgaaatgttcaagtttgcgcctcttacttccgccattgtcgaaaagacatatctaactgttgttgagaatggtgctttaatatactcgttgttgtggatcgacaagcagaatggcttcgtttatcggagcctaccgaacaatccttactaaatccaaatatatattgggggatcacacctcttttcaagcgatttgtttatcaatccggagccttgtcttcttttttatctactccccactccccccacctccgtttctctactctaatctcttgtacaattcgactcacaaatgcctcctctttcctgatgatagtggacctcctaattctatcggcgctcttagacgctactctgtcg

SEQ ID NO: 22489 - DNA, 870 bp, Glycine max
  unsure (1)..(870): unsure at all n locations
cacgccttttatgacgtcttgcacaccccnnnnannngnnnngnaggcaggcgagctncaacacnagggagatgaagcagccatttttttantttggcgggccgaaacggcgggcaggggcaattatgggaacttcgagcccccgcactcatggcactcatgttcaagaccactagctgaatatgattttggtgataggccataccacgagcgcaggtgcgaaagcactatgtacagcggccgtatgcctccttacaccgctgatgtccgggccacaccgacagccaggactattagtctagccgcagagcagacctctacaccttgtctaagcctctgtcccgccattcgggcatcgattgccgccagtactccgtcacaccctgagcgtactcccacgaaaccccttatggcatgtccctttcgcgaactcagcgcaaaggaacacagcttgtaaggtgaatctcccgcggggcctcttcttcctagcaattctccccctgggtgaaccacatggcccactcagacacccttctggggaagtatgccccttgaggggaggctttcaacattgaaagtagtaccgtccttaaaaggataccgtggcatatatccccggcggttatagactggccaatacaaatcaacacggggtttccactccacagatcacaaaacgacaccttactctgttgaaccctccagcaacaaggaagtaactgttatttgtacccacaccacccgcgaggaaaccatcttctacgtgcgccgtcttaccgaatttataccaagaatcacctggcgcggagctatcccatattgaaccggttcgcttggcacatggagattaacaggcttctcgccgatccg

SEQ ID NO: 22490 - DNA, 376 bp, Glycine max
  unsure (1)..(376): unsure at all n locations
aaaatcggaaaatgttattgaagtacagcttgtagtgggtaaaaagttatacctgatgagtgtagttagctagctgtaatcttttttgaaatagaaagaatacaatacgttccaggaatcaagttggaccaaaagttctaagttaaattttttaaactctttacatattaataatgctagaaaaatgaaatcatggcaggagaggcttaaactcaacttcaattcatttcatggtttcaatcttctaggaaaacccgacacatctaaaggtcaggttaaagggtccctttgaagttaacatcagcttgtnattaaggactaggccatacaaaaataattatttggtgcttactatcattttcaactattcaatttc

SEQ ID NO: 22491 - DNA, 490 bp, Glycine max
agctttgaggaaattcaaacgacaataacttttttttcttatgtccgattgtgtcccggagtatctcgagacgctagaaattcaaaacagaagctattagaaaaatcaaacgacgataactttttacacggatgtcccattgagtcccataatatatcgagacactcgaaattgaaaacagaagcacttagcaaattcaaacgagaataagttttgactcggatgtccgattgtgtcccgtagtatatggagacgctcgaattgaaaacagaaactgtgagcaatttcaaacgacaataactttatactcggatgtccgattgagtcgcgtaatatatcgagtcgctcgtaaatgaaaaaagaagctttgaggaatatcaaacgacaataacttttgactcggatgtccgattgtgtcccgtagtatttcgagaagctctaaattcaaaacagaggctttatgaaaaatttatggcgatatcttttttca

SEQ ID NO: 22492 - DNA, 467 bp, Glycine max
caattacgagcgtctcgatatcctacgggacacttttctgacatctgagtcaaaagttattgttgtttgaatttgctcagagcttcagttttcaattacgagcgtctccatatattacgggactcaatcgaacatccgagttaaaagttattgtagtttgacttttcttagagcttccgttttcaatttcaagcgtctcgatatattacagggctcaataggacatccgagttaaaagttattgtcgtttgacttttcttagagcttccgttttcaatttcaagcgtctcgatatattacagggcgcaatcggacatccaagttaaaagttattgtcgtttgacttttcttagagctttcgttttcaattacgagcgtctcgatatcctatgggacacaatcggacatccgattcagaagttattgtcgtttgaattggctcaaagcttctattttcaattaccagc

SEQ ID NO: 22493 - DNA, 276 bp, Glycine max
tagaattcagtctttgacagttgtaaaggatactacatttatgtaaaaagaaaaaaaggattatgcagtgaacatgctcatggacatttatataaagcacaggaagctcaacaagcagtattagtgcatcatacataaaaatagtaagctggccacactcacttactacacttatatagaaattatgaagttaatcaggacaacattttaggagtgtattaccctataccgcacacacacacgagaacttcaacacagaaaccttgagtatccctg

SEQ ID NO: 22494 - DNA, 410 bp, Glycine max
aattgtccaccgatcgagtttggatatagcttttcttgaagtgtcagtcttgttaccaagattttaagaaatctgacactgtcatgcgcgcggttggattgtgtgacttgatattgtgagaaattgcggacaaatgcggatacagttgcaatcatgttgcaaccagagacactccacaaacatttacattgtggtcgaaaacatggttgcggaccatgtcataaaaccttgaattatactgctgacaactaacattatcggtagcattagagatacatggaggcttttgcactgctcttgtgggttctgaccatcagatgaaacttgcagctacgtagcacatatcaggcatatgatgctatggatgaaattacagctgctttttcaattggtttcaatcctgccgggac

SEQ ID NO: 22495 - DNA, 309 bp, Glycine max
agcttccactcttgggagatgaagctgcctttttattcatgggtggggttgaaacggagggcataggccaagatgtggaacttagagccgatggactcatggcagtcatgtcaagtccactagctgaatatgattgtgctgatggcatagacgagccagtggaagcatatacagggcgcaactcttgaggtttgtgggcagagaatctgacttttataacgcagccactctcatcgttgcaaatgcttgtacggtagtgggcaggatagcaatctggacttaaaaacaccatgagcattctcacaggaa

SEQ ID NO: 22496 - DNA, 416 bp, Glycine max
agacgattttttataatatgtcccattagccgcaggaccattaatgaaattcagcctcatgtttttgccttcttaactggctacaaaaagatgtgtctacgaaacaaatggaacagcagaaaaagcttctttcagctaagagtccaactctgaattttcataactcctcttggaagagtacagtacatacttttagttgttgatgaacaaatttgcggataatatttcaacacattcacgacttgttatgcatgtgtacgcaatattgtctattaattttcttatcaacgatcaatatcacttaattttgtaagcgagctgttcacattaaaggagacgaatccgagtctgccgagacgagttatcttaattttatagtactaacaaaaatgccgtgtagctgactcaatgtttat

SEQ ID NO: 22497 - DNA, 200 bp, Glycine max
  unsure (1)..(200): unsure at all n locations
catgcaagcttggacattttcaataagaatggcctttgngtgatattaacgcaaattatgctgagatggaagatatagaggaacaagaggatgagttatagttaatgaccctcatacattgtctagaagggaagaaggatgagtgattattaaactagggatgcagcaacaacattatagtgacacggagtgggtctcat

SEQ ID NO: 22498 - DNA, 241 bp, Glycine max
gagtgcttttttttcacttgaggaaaacatgctaggttgatgtgcttgtttatcagtttagcggatgtcggaaatagtctctatgcctttatttgatgaaaataggtggcctacttaagaacttggactggttcatgagactatgaaatgtctttgtagttatcctttaaacaacgatagcggtgatgcaccctttctgtaaagaacagagacttttcgaacttgatctcccagattgggg

SEQ ID NO: 22499 - DNA, 329 bp, Glycine max
  unsure (1)..(329): unsure at all n locations
tacccacccccanctatagataaatatttttttttacagccacacacacatattttaaaatttaaataagacatactaaattatactgtgatgtttgaaattattaaggaaatctatgccattaacatgtcttcttgaaagatttcaacatcggacaacactgcccaaaaaaccaactgcatgtttctttcgtcccaaatataagattttattaattaatccataaagaaagctgattaatttaattataatatcaaatttaataataatttatattttttaaaatattatcccttaaaactattgagattccccctcctattattttt

SEQ ID NO: 22500 - DNA, 390 bp, Glycine max
cttggagaggatgcttctttggaagaaaagaaagaggtattaaagagagaggggggagcacgaaattgaaggaagaaaactgggagagaaattgaacattgagttgtatctcacaagactcttattcatcaaagttacaacaagtgttacacatgcttatatttatagactaggtagcttccttgagaagatttcttgagaaaacttgattgagaagcttctttgacaaaactatccgtgagaagcgagagcttagctacacacacccctctaataactaagctcacctccttgagaagcttccttgagaagattcataaagatactctagcttaggtacacacacctatcagttatctaatctaacgtacttgatatgagaaggtagag

SEQ ID NO: 22501 - DNA, 368 bp, Glycine max
agcttgttctggatatgactagctcttatttctatgatgttaaaaaagaatgtgagaaacatttgcaaaagccttgctttattgccattggatctcctttccttaggactgtcttaaagatacatattgaacctgagctactgcataaggattctgtccttaaagtggaaagcagacaagatcttattttctataagggtgggaaactagttcttagtaatagtgctctggctaaattcatcagtggttacaagaaatatgggaggattggtgaactttcaaaacttttacttagtattcaaggggaactaaattcagtggcagggtccagtttgtgttctgatgtaattggtgcttgtattcagtta

SEQ ID NO: 22502 - DNA, 341 bp, Glycine max
caattttttgaaacccaaacaaatgaaattttggaaacccttccccccataaaaggattgttgggattttgtggggttaagtgatggaaatttgtggtagacatttgcagatcatggttaagactagaggattaggccatgcgttaagtagggttgttgccaaaggtctggggagaggggatggtgatgattttgacggtgctccccagcgccgaaggccgaccgcatcggcacaaaggcgacaggtacctatcattgttgacgatgttgtgcctacggtacctgtggactcacctgcagtaccagaggcagaggctgctgtagttggggatgaacccatg

SEQ ID NO: 22503 - DNA, 408 bp, Glycine max
agcttgtgtgtggtccaaaggatcatcttttttttcttcaaactcagcttccatgactcattataataatacttggcaagctcaagatttggatgcttatggtagaagaagtctgagatgggtgcaaaaatattacatgatttatagctactgcaaagattacaagcgatttcctcagggtcgacctcgtgaatgcaggctttctagattctcttagtgcgggataagtaaatttaaaattaatttgatgattttttcatttgtgtgtatttaaaattccactcgaatacggctgaatttgagcaagatcaatttgattttacttttgcttgcttgaaccgataatttcatctcttgttatttacctatttctcctactctttctaaacaatgtaaaattattaaaac

SEQ ID NO: 22504 - DNA, 744 bp, Glycine max
  unsure (1)..(744): unsure at all n locations
nggggcggtnntgctacntgcatgacnagcgncnnntatagaccnnccccggcaggatgaaagtaaaacgacgatgggagctttttttgtctatgcagtatatacttcccagtgcttaccaaaaggacagcttgcgacgtgctctggcgtcatattaagaaggtatctcgcttttcttttcaatagcccttgatcttcgccgaacgtttgaattgtattatctcgaagctccggttaataagaattacgaccgtactgtccagccgaatccacgttgacattattaggcatgcattggctggttgcttgctcgtacaagattttctgaagcaatgaagcggatgataaatctgacggtttctttggagatatgacaacttaatccgagtgcgaatgggcttatgaggccctatggctcttatccatattactagggctgctagcacattatacatggcaactgaagtttgtcagttgatgtacacgctaccagaagatgggggcttatgataggtcctcacgcctctgggtgacccactttttttagatgaaaataactcgctcgtgaatataagaccgatctatgggcacgatgggctcatccctaaattgagaaatacgtccgagcacaagggaacaccgcctgtttgccacaaattacggaaaaatattattagggtatctggacattaaagggggcgtaaaaacgaagccacgtgtggccattctattaaaggtggcggn

SEQ ID NO: 22505 - DNA, 380 bp, Glycine max
agctttggacacatgcatttcctacatagtttatcagatctcgtcaatttatcaaattttaatatcctttgctatcatcaaagctatgagatttttaggggcttagacattctctatgtccttggttccgatgatccttagagagagaaaaatgttcgatgaagtattcaatgtgacaataaatgtcttcaataatttgtcactttgatatgaaaaaacaagccactagtcttgcttttcctgtttataatcttgtagtaggagacaaatatgcttttcaatcagaaaaatactctactatggtcaatgtgcaccttttgaagaagtatgcaactctgtaccattgactattccttggagtttttctagtacgctttatg

SEQ ID NO: 22506 - DNA, 499 bp, Glycine max
gacacttagaatcccagcttagctccacaagagcttgcacatgaatggagtccttttgagtcacttgtgttttaagtgctaagttctgttgcttgtttatcaattttgattatgtttgaatttgtctctgtgtctctatttgatcaagaaatatggtatcttttaatagttgtaatggtttttatatgaatgaaatgttatggtcttttcccttttaacatcatatgtttttctgtttttattctataaataactgtgactttttggccttgttatgccaaaaagggggagaaagaattgcattacattgtatattacattagcattgcgttagaaaagattagtgcactgcatacatacattcttaaataactatacttaatgatgatgatgatatgaattgatacttctcttagtgttcaaaactttcaggtttgtctaagaaaagtctctactctcagaactttccaatgcactcaaatgggcattcaagtttggc

SEQ ID NO: 22507 - DNA, 864 bp, Glycine max
  unsure (1)..(864): unsure at all n locations
aacgaaacccggaccacanaccacacgcacgcgcggccgcggcggggaacgccccanncaaacaaagcttgatgcaccatgtcacaacccnnnnaaanaccccagcggaaaaaaagaaaggcgagaaggaggggagactattttttataaaacagacaagcaacgcaggaggggggagggggagagcgcgcagcaaacgaggcacgcagacggaacgggccgaggcaagccccgggaggaaggcaacacacggcacagagagggcgagcgaaagcacaaagaaacgagggcgacaacacaggcagaaaagcggacaaagaagggggacaagaaagaccaaagcaccaaaacaaaagagggaaacgggacaaaagagcaaaggcgaaaaggagcaagacgcaagcagagaaagagaagcaagcgaaagaaaacgaggccaagaccacgaggcggggaccgaaacaaaaacaaagaggagaaaagcgcgggaggcgaaaccagagccggaggacaaacacccagacccacagcgggacgaacgagagaaccaagcggaaacaacggggcgcgacaaaaagcgccgaaaaggagaaaacgcggaacaacgggggggagaaccggaacacaccaagcgccgcacgacgaagaagacaaaacaagaggggaagaaaaaaccccggaaaacgaacgcgagacgaaacacagaagcaagagaggaaaaacacgccagcaaacaaacacgagagaagagccggggacaaaaacgcgcgcagagaccgataagcacccacaaacaagaagccacgccgacgaacaagaccgaggaaacaaacaacgggcaccaagacagaaacaggagaagac

SEQ ID NO: 22508 - DNA, 344 bp, Glycine max
  unsure (1)..(344): unsure at all n locations
tggtcctgttaatcaatgtgaggaaaggaaagctcaatacccatccacatggaggtgccccggggtggattgcattaaaaacaattttgatgcatccattaaaacacatataggctctggtttggtgcttgtggccagggatcatgaaagatctgtgccgtangactggtcctgagacctaaaagagattttgtattttttagacatgacatgtgaggaccataaaaaagaactttagatgtgctaagaaatccacttaagaaatttgcattggaaatgtccttagggtttactaggtttggtgttggttttcaatatatttttgcattagaataaagatgttt

SEQ ID NO: 22509 - DNA, 397 bp, Glycine max
actctataaaactctcgcgcgtgagcgaatcagatcgctcctacattttaactctatcttgccttgtatggcatgctagtcctttgtcacgggaagccggatggtccatatcaccctgttaagagtacgcatggggcactgcgcccccaaatgcgccagtaaaaagagaggatcctacgggctctggtgtccgtaaaatgcattctattaagcactagtacaaacactcttaaagaccgcataatggacataggctgcgatagtccgaaatgatattccagcctcacgtattgcgtgagtcataggaatataatagcgattggcgccaacaacaacttagatctgcaaaatggcataccaaacgacttaatgtgagcgcatacttgtgttttcctct

SEQ ID NO: 22510 - DNA, 872 bp, Glycine max
  unsure (1)..(872): unsure at all n locations
gagccctgtgtgctatcgttgcaacgccncnnanaaaagaaccgcgccaggcaggctgcgcagctcncgtgcgccagaacctctctcccttcttttccacccccccccccggcaacaagttcatctaatcgggctttccttcctgtgcacccacatcgctgggatgtatccacaacctttcgacgggggcgcataacagggtatgttgattcagagactcgtaggaagggccaccaattcttgttcctcaaggatcgcaccacgtgcattgcatgactttctagaattctctgactcacgggcaacacgcaatcttaaaacattacctggacgactttatcaccacgggagcaacccaccactcccctcgaaaaccggctgaatttgagtaagcaccattcggaatcactcttgctagccggaaccgactaatctaatctccggtgattaaccccattctccctcctccttccacaaccacggtatcatctataaacaccaagagcacctcctcactaactaaaggtgtaccttcacaccactccccgtactaccccgggcccgacccccccgttactaccctactactttcaccttgagtctctttttccccatcactcactcgatcactctgcttagtgcattcaccgactctctcangcgcgcgcgccgctctcgtcctcccactccgcactatcaactccccgcagaagcaaatgtcattcattcctctgctcgatgcactctctcacttgtcaggcaccgccatcgacaccttgctagctccacgaccactccgccgcgactccgctacatgtctcctcacccaatgtatctgctcgactcacacaaacgaactcactactccgcct

SEQ ID NO: 22511 - DNA, 690 bp, Glycine max
  unsure (1)..(690): unsure at all n locations
gaccggggtaaatatgcatgcaaacncanntaagaaccacccgcacgataaactagacccgaggggccatttttttaggaggatatcttccggctacaaaagaagctggcagtgctctggtgttataagaggttctgctttaattataatgccctagtttcggcgaacgttcaaattgtttatccgaaagcatccgggtataaaagaatttaccacctgttatgttccagccgaatccacagcggacatttatgggcaggcataggctggatgcatgcttgaacaagatcttctaaggcaatgaaggggaagagaaaattgacaggtttctcttgggataatgaaatcttaatccgagtgcgaaagggcttatgaggaccttttggctttattccattttactagggcgcctagccattaaacatgcctctgaagttggcattgatgttctgctacagaaaagggggctttgatagatccacgcctctggagaccaacttctaaggtgaataaaactcctcgatcataaaaaacgatgcagggctgaatgctcacctcatattggagaaaaccttcgagcacggggaacaccctttgctcgcccaaatcacgaaaaatacaaaaatcgcaccacgacctttaagggggcgtaaaaacagaccccgggggacattcctataatgctgacgg

SEQ ID NO: 22512 - DNA, 906 bp, Glycine max
  unsure (1)..(906): unsure at all n locations
caccaccggcgaccagagcaccaccaccgcccacgatcgtggcgccgccaaccttcngcggccgctgacgaccccntcccccccaccnncacaccccgaggcagagcntttgtagtcaccgccgttgcaaccgccccncnanagnnganccgcaggcaagcaagccggagncnaaaaaaggaagagagacggtcgcttattataaacccccctaccaggcgcaaaaaaggcaataaaaagcatgaccaaacaacacggaacgcaccactaatacaaaacacgacaaacgcgaagaacaagaaatactgcggccaacatcataaataggacccaacgaacaaaatccaacccttaaaaaaataggtaaacaacccaaaggcaccaacacaaggcaccagccgagacgcctcacccaagacaccccaaggaagacaaaaccgaacacggccccgctccaccaaggggctacacaaccaagacaccacaggagggtccgcccgaaccccaatcatagagaacacaacgctcagcgcaccgcacccaaccccgtcgaaaaagaccggccgttcaagaacctgtccgccaaagcaggaccaccagcacaccggccgggccgccaacaaaccggacgacgaaaagcgccacccccgcgccgcaactcaagaagcgagcccaggggggcgggacaaacacacggagcgaccggcgggacaacccccggacgcacaaacgggcgagctccgccaacaaacaacaacggagcgccggggaaacagcagccgccaccacaccaccgaccaggcggcaccccccccacacgggataaagccgcgcaccacaccccgcgagcgcccccccccgaaacaaccgcgacgccccgccccccagtacacaccgcgccacccc

SEQ ID NO: 22513 - DNA, 309 bp, Glycine max
gcgacactatataatactcccgctcggtcctgttaatcaatgtgaggaaaggaaagcttattacccgtccacatggaggtgcccccgggtggattgcattaaaaacaattttgatgcattcattaaaacacatataggctctggtttagtgcttgtcgccagggatcatgaaaaatctgtgccgtaagactggtcctgagacctaaaagaagttttgtattttttaaaaatgacatgtgaggaccctaaaaagtaacattagatgtgctaataaatccacttgagaaattagcattgaagatgtcctta

SEQ ID NO: 22514 - DNA, 242 bp, Glycine max
  unsure (1)..(242): unsure at all n locations
agctttggagtttccaagtgccaattcgtttttttctgtagtccagtcttcttctggcttcaattcatcagtgggctctccttctgtgtccagcatcttgggatgttcccagcctttgatgacagctttccaggttctgctatccagcgatttgaggaaggccaccattcttgctttccagtattcatagttgcttccatcaagaattggtggtctgatccctgatnntacttctttctcca

SEQ ID NO: 22515 - DNA, 346 bp, Glycine max
ctcaaaatctatgtatctaaaacccctctatttggtggattttcaaggttttagaagtgaaaatgagaatgggtaactttggagcaaactcccatctcaaacaagtctataacattaatctaagctcgctcaaactggttttacgacgaaaactctaccgaatcaaaatttgactcctcaacacccaatttaccctagaaatggctcttgccttcactttggtcactcattttcctcctttgcacagcccaagctttcccacggtcctaaatgacattttaaactaggattaactcgctataacctccaattaccacctaatccagatttggctttttaaattctc

SEQ ID NO: 22516 - DNA, 432 bp, Glycine max
agcttgtagaatggctggacatgatacatgttttttttggtttggttcaaggataaaagggatgccccacattattagcatgacacaaatgcaaaaatgatgatttggaaattttatgcaaaactggttatgcatgcacctatgcggacactcaagtgtcaaattgttatggtcatgtgatgctcgggctcaggattcatttcctctattttagtcaacccaacgtttccaaaatatgttcttttatcaatttgtgcattcatccgagtccattttgggcgtctgggaaaatcttcacagcattcacccttcaggtgtatacacattttttcaaaaactagttatgatcagtgaatttttccaaagaaaagttggaagtcatctcttttcaagcatgttggttttttagctcgaacacttatttttcttttc

SEQ ID NO: 22517 - DNA, 483 bp, Glycine max
tggaactaaactttttttctctaccacttgctatccacaaactgatgggcaaacagaggtagtgaataagtctttatccacccttttaaggctcttctgaaaggcaaccataagtcttgggatgactatcttcctcatgtagaatctgcctacaacagggggggttcattgaaccaccaagcattccccttttgaagttgtctatgggttcaatcccctaacatcgctagacctcattcccctcccactggacacttcttttatacataaagaaggggaatcttggtgagagtttgtaaagaagttgcatgagagggttaagaaccacatagagaaccaaacaaacgtgttttcaactaaaggcaacagaggaagaaaaaaactatttcttaatgagggtgactgggtttggctccatcttacgaaggatagattccctactaaaaggaaatccaagcttagccctagaggggatggaccttt

SEQ ID NO: 22518 - DNA, 630 bp, Glycine max
agcttgagtcttataaatgaaaattcatggttgtattataaaatctcactaaaagtgtataaaatgttaataaaaagtattattaaataagaagtaactattatataatataaaatacattaaaagtttattaactataaatactgtgtccatctttatatataggaccctttcaactaatttcaacccttaaataattagttaatttagtcaatggtattaaatttatcaataatttgtgttgtttttccaaaattaaccttattattttaaaattaattatgtcctcttttcacttaattgtttctcatctagttactactctaggttcttctcgaatcctaataataaagaaaataagtttatctcattgtactcatccccttctaaaatggctgacgtttaagattttttcacacaaaataagaacaacaataaataagttagggatcaaaataattctactaaaatatatttcatctcattgctttaatttatgaggtgataaatggtggtagttgaaaaattgtaggacaggcattaaattcatgtatttattaagggctaaattgaaataaaaattttgatatctcaattaaaaataatagcattaatctatttaattttttg

SEQ ID NO: 22519 - DNA, 564 bp, Glycine max
ttggtgggtgcttctttttacacaatggcaaagcatttgttcgcggtaacttttccgatgacatgaaaatgtagatgttgtagattgaaggatcttgtatctcttagtttaggtgttgattttgatctttttacatgtcaaaacacattttataggtgtaacattgtattgactgtttaaatagacatgtgtattcttaaaatagtttatgtatcttctacatgctttaagataatcattcatgatggcttacataagcttttcaatgcaaagcaagttttttattgtgtaattgattaccagtttttgtaatctattacaagatgaaaatactagcacaagaaccaactactattgagatttagccgaaaaaaacattgaattaatcgattaccaaatgtcgtaatcaattacaaggcttgtttcaagtgaacgataagctctgtatataaaaataatcgattaccatttatcgtaatcaattatagtgcttctaaaacacttagattgcttgcttgttggacatcgaaataattgattactagttattataatcaattactt

SEQ ID NO: 22520 - DNA, 731 bp, Glycine max
aataacactttttgccctttcatgaagtccttcttaattatcatgctatcatggaacttcttggtattttctttgtagaacttggcattctcatacgcttctagacggatctcatctaactcactcagttgcaactttctttcctcaccagcttgatccatagagaagttacaggtcttcactgcccagtatgctttgtgctcaatctccactggaagatgacatgcctttccaaacacaacccgataaggagacattcctatgggtgctttgtaggcagtcctatgtgcccaaagagcatcatctatcctgggactccaatcttctctacttggatgcacaatcttctctaaaattctcttgatctccctgttagaaatttctgcctgtccattggtctggaagtggaattggtgcccctaccccaccgccccttccactctcactcttcgccgtacctgtctcgttttccattttcatcacacccgctccttctcactggcctgcctctctccacctcattcgtttatttctcagtggtttctcttccctaccttctcccaccttattaaccagcctcctctagcttaccctctttcctttgtatctttcccactgttctttgcactttaccttttcccgtctcccttcgacatcctactttaccatcctctgtcatcatcttcctcctttcattcattattccataacatcctctgtctctgatcttc

SEQ ID NO: 22521 - DNA, 703 bp, Glycine max
  unsure (1)..(703): unsure at all n locations
tttgaaccctttagtttcgccgcgccactatatactactcctgctgggaacaaggtctatcaacattaacacccaactcgtattttcgggtgaatcccctaatgtatggtaacgccctgaaatgctggcaaagggacctccatctttgttcacccaccagaacttgaaaaaccaaggtccatggggaataatacattccttctagatacttctaacatatttaaggacaggggggattagacagatatcaccctaattggcttctcaagaaccatcgatattttggccctaatttaatcaccattattatcttgaataagagtattttatcctgattaagaccattgttattntgttccactgagatgagtatacaaattatatatatacctccattatgccacccagaatttgttttttacactgcaaaaaattataactcctcacagaatttacagttatatacctaaggatatatctaataataaccatatatttatgatgataatactccccagtggctataaataactgttctacctgaaaattaaattgatttttttactgaaattactgttaaacataggatcattgcccccaatggtttactaaatatgcggaaaaaatggaaaagttaagttttcaattatccttactcatagaaataaactgattggtataacgcttccatcacacatacccc

SEQ ID NO: 22522 - DNA, 365 bp, Glycine max
cgacccgcggcatgcaagcttctgaagaaagagatgaggtgcattctctttaggcaaagcttgaaagagcccgggtagtctaagagaaattcaagcccataaccatcaaagtctgaagagagtatgatgaactaagggacgttaatatggccaccgatgaaacctttgaatgagaaaccaacaaagcccgaaaggaaaaacacgacccaaacaagttttgaggggctttatagggcagcaatagtgagctcaagctcccaagaggtgaaaggaatcatcacgggtcaaaggcatgatcttgaaggacgagctaaaggtttgccttatgtcgaaaagaaatttgtcccaacagtttagcgagactg

SEQ ID NO: 22523 - DNA, 430 bp, Glycine max
ctcccccgtaggatgctccaatggatgctttgagagagggagatatggatagaggggggatcacgatattgtttgaggaaaaaacggagagaggttgaacactgaggtgtatttaacaagactgttattcatcgtggttcctccaacgtgctcacatgcttctatttatacactatgtagcttgcttgagaagatatattgagaaaactttcttgagaagctcgattgagaaaactttcctgagaagctatagcttagctgcgcacacccctctaatatctaagctcaccttcttgagaagcttccttgagattattcataaagaagctagatcttatgttcacacacctctcaattaggtgaactcaactccttgggatgagaaggtgaacctcatctctcaccccctattatagttaagctcaccccc

SEQ ID NO: 22524 - DNA, 601 bp, Glycine max
agcttctagtcgtacatagacctccttattggttcgggccaacaaacgttgcatctgtgcattcatcgcatccagtaacagacattgagcgccgtccaactgatgatactcgtcaccaccaccacctgctccagccataattcaacaggaaaaaaaatgtgcaataaaaattattaaggtttcaggacctcacaacactctactcacgtgtttaactcttagatggtagtacactcgtgtttaatgctctcaataggcttttgtgtaatgtattccctcttgccttttaccactcgtgtttcctcttaagttcctggatgaaccaaattagacacacaaggttatataaaataaaaggaaagacaatataatgatcacaaacagatttgatttgggataacaacttggactagatttggataataatatattagattggctttggataacaagtgagccttaatttgggtaacagatattgataacacataagatattatagataggatacccgatattatattaggtaggataaccaaataagataattatggtgggaaacagataggacaaggaaaacttcaaaagctcataacttttg

SEQ ID NO: 22525 - DNA, 120 bp, Glycine max
ttttggcccgacgtgggctgatgttttcttggccgagtgcatgggaacatgccaatgtcggccgaaacacaacctcggttgaactcgcacgaaaaaccctagccgacctacattgaaagt

SEQ ID NO: 22526 - DNA, 383 bp, Glycine max
gcctgccagcttgaatttgggttagacatgattgattctatgatttgggacttgtaggaattgatttgggcaagattggatgagaggaagcgtgattttcgaaatctgcacttatgcagaattttgctgccgaaataggtgccgcctgattttaccttggtgcacaaaatgcttgtgtgagtgtgactgtggaactgaatattcatattgagtatttgatgcaacccagcgcttcccaactatgcccttttatcactttgcgccttcatccgagtccattttggtgcgcctgggaaaatcctcacagcattcacccttcaggtgtatacacatttttttcaaatcttgttatgatcacgtgaatttttccaaagaaaagttgg

SEQ ID NO: 22527 - DNA, 594 bp, Glycine max
ttggctttgaggacttgctccaatggctcatcatgtcttctattgaacctttcttcataggcttgaagagaacccatcaattggtctacagtcattgagtctaaatccttagactcttcaatagcacaaaccacataatcaaatttagcgattaaggagcgaatgatcttttccaccacacgaacatcttccatattttctccataacacttcatttggctcacaatagccaacaccttgttgccaaaatctgagatagattcggattccttcatatgtaatgattcaaactctctacgtagagtttgtaggcgcaccttttttaccttatcaacaccttcaagggaggttttcaaaatctcccatgcttctttggatgtgggtacatttgacaccaacactactagaagatgcatgatctacatcggtcacaatcaatgttctacaacggtgcatgaccgtttttgattataatgatgttgaaacttaaaaatttcaacatcagtccataagcgaacgttgtagtaagctgttttttttctacatcggggctatactaatgactgatgtagaaacattggttctgctttttga

SEQ ID NO: 22528 - DNA, 103 bp, Glycine max
agccggtaacacatccaagagcaggcgtgtttttttattataggactgaaacagacatccgagtagtaagttactgtggtttgtagttgctcagagcttatgc

SEQ ID NO: 22529 - DNA, 217 bp, Glycine max
tttatacaacaccctctctgtgcgccgtcatacggccttaccatgaaacttgttttttcgggagaatcccgttatgtatcctaacactctgaaattgaagataagggctcttacctatctttaagacacaggagcttgataatctgctgtccgagtggagtcccccaatggatcgagacacttttaacagttatatcgaaacattggggaaaagaaa

SEQ ID NO: 22530 - DNA, 312 bp, Glycine max
ccgacaccgaacaaacacttgtccatgcttgggggctcgccacactagtcaccctcctacttgtgaaggctattcactagactttaaacaaacctcctcaatgtgggataatttcccttgacactggacaaactctttcactcgtatgcctgctaagagcttgggggcttatgtactgaccaaggtacacaaaacacacgtgtccgcctacatgacactccgagacacaatgtcaacccttcacgtcagtcctgggacaggagcacgacatccaaccttgagaggcgagccccccacagacaaggtatctct

SEQ ID NO: 22531 - DNA, 545 bp, Glycine max
tgtattattgttctaccagcaattaaaaaccagcaattttttttaaagttggagaaaaattgaaattttataaatatttaattttaatcatttttttattatctatctaatcacttaaattcaatttttgttttggaatctcttttgtctatatcaaacaatctcaatcttttttcattcctcatatactttcattcctattcattcatatcaaccaaacacacctttaagagaaccagctcttcaacgttcctactcagtgagaggaatatcctatcctttctttatttcccatcatccggtgattaagtgagaagtaattttacattgggcttttgtcctcaaattgtggcacaaaaagtatgaaagttggcatacatgcatccgtatgtctacactcaaacgtcaagtcatccaataaatggggtaaacttacggacatgtgatgaatgctatctctctgcggtccaagcctttcactggttgctccccttctcatgtcatttcactagctgcagaacacaacttaatacatgaacaaggat

SEQ ID NO: 22532 - DNA, 735 bp, Glycine max
  unsure (1)..(735): unsure at all n locations
gagagctttttgattcgtgagcanccccnnngnnnnnnanccggcgacgcancgcggcacgcggggggaagagacattattgtttataccccaccacacgaccggggggggcggagagaacgaccacgcacaccccccccaacgcgacgacgagcgaaaagaggacccagcggaagacgagggcgcaaaacagcaagcgggggacagcaccgagacaagacggaagcaacatccagaagggagcgggcaaaagaaaagccgaacgagcccccacacgacggaggcgccgagaaggggcggaccagaacgcggaaacgagcccacaagacacgaacgccgccaaggcgaggaacagccgaaaaaacgaagcaaggaagtgaccaccacggagcaagacacaatgccggaaaaaagcaagcaagcaccagagaagacacgcccgcagaccgccggaacgaaacggccgggggccgccacccaaaaggcgcaagccgcgcaaagggagccaacgagcaggagcgccagaacgcccgggaggacgagggcaacaaaggagcacgccacgcgcggaggcccccacagagacgcccaaaacagaagcgccgggcagcccaggcggggacaccgccggaaaccgccgggccaccccaagggacaaagccccagaacaaaagaaacagaaagccggaacggaacggaaaggacaacagagcagaaaacccgccgcgcaaaaac

SEQ ID NO: 22533 - DNA, 801 bp, Glycine max
  unsure (1)..(801): unsure at all n locations
cacacaccgacgagccctgcgccccaccactaaaccatacttctccataaacgacccctncnacccccgccagggttgatcctgccgcacccggacctaaaaacccccgccgggaatggaagccaccagggagggagattttctttaaggcggccgggaaacggtggaacaagaccggccagcgtagcgcaaagccctaaaacacccaccccgcggcagggaaaggggcacacagaaccagaccggattggctaaccccgacacccccggccagttcaaacccccaaacaggggcccgccccacaagaagagggcactccgggggacaaaggacaaaacaggcgagtgaacagaacccacaccccgggggacggaaggccaagacaccgcttaccatcccagctctcgccagggggcagagaacaagaccaaacaagagggcatgggccccgaaaacggggggcccggacgggaccccagaaggggagacaaacctaccgcccaggggaaccccaaccccaccggaacccaaggtttccacgaaaccgaaagggaaaggggtggaacacccaacctgagaggaccacgaacaaacgagaaggcgcgcggcgaccggaaggaaccccctgagggaccacctcagacccaacggagggagcggttaccccccgggggaaaccacaaaatccttaacaaaaaataacaccatatggtccccagggggcaaaaaccccggggggggacccaaaaggggacaccgccccccgggaaagaaaagcttggcccgggggccccaacaag

SEQ ID NO: 22534 - DNA, 255 bp, Glycine max
gggacggagaactggcctttgctgatgtatagcatggaaagatgcctgcctcggctgaaaagtgcttacgcattatttagcctgaaggagagaagcggtacgatctataggtggctgaacaagcggagacaagatgcagtatctgcaaggatgtatccttagaggaaagcataatggctatgctaagcaacgatcgtaaggataacaacttatcttctgaaaattctcattatgaggtggatcattctgagaatc

SEQ ID NO: 22535 - DNA, 590 bp, Glycine max
  unsure (1)..(590): unsure at all n locations
cccatcaattgggctacagtcattgaggctaaatccttagactctttcatagcaccaaccacataatcaaatttagcgattaagggacgaatgatctttttcaccacacgaacatctttcatattttctccataacacttcatttggctcacaatagccaacaccttggtgccaaaatctgagatagattcggattccttcatatgtaatgattcaaactctctacgtagagtttgtaagcgcaccttttttaccttatcaacaccttcaagggaggttttcaaaatctcccatgcttctttggatgtggntacanttgacaccaacactactagaagatgcatgatctacatcggtcaccaatcatgttctacaacggtgcatgaccgtttttgattataatgatgttgaaacttaaaaatttcaacatcagtccataagcgaacggtgtaggaagctgttttttttctaaatcggcgctatactaatgactgatgtaaaaacattggttctgccttttgagggccgattttctacatccgttttaaattaagcaacgatgtggactcttattttctacctcggtttaa

SEQ ID NO: 22536 - DNA, 192 bp, Glycine max
aaatgttttctgatgcaccattgaacaacatttctttccacttcattggcgatgttgaaaagtggaaatatgtgtatcaacgcatacttgcgggtgaaaaagaactgggaagagatgccctggattgcaaggagatcatggacctcatcaaggcggctggactgctgaagactgtcaacaaattgggagata

SEQ ID NO: 22537 - DNA, 530 bp, Glycine max
gacactatataatactctcgctcgtgttattggtctaccatcaattaaaaaccagcttttttttttaaagtcggacaaaaatcgaaattttatacatatttaatatgaaccattcttttattatctatctaatcacttaaatccaattttcgttgtggaatctcttttgtctatctcaaactgatctccatctttcttcattcactcatatactgtcattcctatgcatgcatactcaccattcacaccttaatgagaaccagctctccaacgtacctactctctgagaggtatatcccacccattcgttatctcccatcctcctgcgattaggcgaaatgtaaaattaccctgggatggtgtcctcaaattgtggcacaaacagtatgattgttggcttacatgcatccgaaggtctaccctaaagcgtcaagtgatcctgtataggaggtaaaccttgagacatgttatgaatgctatctctatgcggccgatcctttcactgtttgctcgccttatgatgtccttcc

SEQ ID NO: 22538 - DNA, 362 bp, Glycine max
tcatcgaagagattattatagttgtaatcatagttgtaatcatagtcatactcgaaagcagaaggcgaagtgtggaggtgaagctgaagaagatgggaagtgacgttgtggcagaggactccataccagtggcaacagttggtatgattatgattccaagaccaaagcctattggaaggatctatgagattattcttaaacttcaaaagtgtctcacgctcacttgtgatgcacacactctctctgcatggggagcgtaacaaccaaccgtggagacagacaagaatataaatggaggaattcatgatcacacaagaatatatagaaaacaagtgttgttggtggttctgcatataaatcat

SEQ ID NO: 22539 - DNA, 452 bp, Glycine max
  unsure (1)..(452): unsure at all n locations
ngtctcctttccttgtgagtgattntggcacgcaaaatttcaaggttatacaaagagtccataaggcatgggaaaacccgttaaggaaagatgaagaacttatgggcattcgtaatggcatcattggtggttatcatgaatagctgaaagttcgtacacggcgtttagattggctcgccaagttaaagattatcaacgaagagaatttcgaagctccggaagaggatgaagaagtccgagctctaaaaaccgaactaggaaaagcgagactcgccaaagaaaaattcaagttggtcactaaagacgtccggaaagagtgtgccgggttacgagaagaaaatgcagctaccgcanaagcccttgaacaagaaaccaagagggctcgcaaggaagagcatggtcgtgacaaatttcgtggagcattgtgggggcagcaacagtgagctcaagct

SEQ ID NO: 22540 - DNA, 334 bp, Glycine max
agagcataatttcaataatgggatgtgaattaaatttatagttgcaaaggatttttatttgttgaatttaaatttttttaatgttgtctgctggtagagatatattttatgcttgtgtgtgattattgttgcgaaattcaacctatatttcttttttttttctgaagaattgttcttaagaataaaatctgatgtcatgttattgcaagtttgattggtaaattttgaggctttggttgaatataatatatacactatagtctaaccttcacttcatcgttatgccaatctgatgtatgaaatgcagaacgtgaagcttgctaaatttgctctc

SEQ ID NO: 22541 - DNA, 429 bp, Glycine max
tctgggggacatcttgacttgctttccaatctgacattcaccacagattctgccttcttctattttcagattgggaatgcctctaacagcacctttgtcaatgattttcttcatgcctcttaagtgcagatgtctaaatctttgatgccatattttgacttcatcttctttggagaatagacatgtggaggagtacctggtttcttgaggtgtccataggtagcagttgtcctttgatctgctgcccttcattagaacttcactcttctcatttgtcaccaagcattctgactttgtgaagtttacattgaatccttcatcacacagctgactgatgctgatcaagtttgcagtcagtcccttcaccagcagtactttgtccagactaggaagtccatcatggactagctttcccattccagtgatctt

SEQ ID NO: 22542 - DNA, 256 bp, Glycine max
  unsure (1)..(256): unsure at all n locations
aacgaatgaagagacgtcgaagaacggttcaaacctttgcgagattcctcacggaaaacgttacggaaacgtttccgaagcgcctcggcttagaatttcttcacggaaacgatttttccaagcaaattcgaaagagagagaagtgcctaaagggctggaccccttccttcttcatttcctcccctatttatagcanaataggggaggtggttgccgccccagctcgccaggcgagctcagctcgcccaggcgagca

SEQ ID NO: 22543 - DNA, 411 bp, Glycine max
  unsure (1)..(411): unsure at all n locations
gggttcgaggtacttacccgttgaagatcgaagaacgatgaagaacgaatgaagaacgtcgaagaacggttcaaacctttgcgagattcctcacggaaaacgttacggaaacgtttcggaagcgcctcggcttagattttcttcacggaaacgatttttccaagcaaattcgaaagagagagaagtgcctaaggggctggaccccttccttcttcatttcctcccctatttatagcaaaataggggaggtggttgccgcccagctcgcccaggcgagctcagctcgcccaggcgagcagggttgcttcctccagaagcaaccgccttctggaggaatcttctggagggcccaagtgggcctgtgtgctattngcacccncattttactaagtacaccaccctctgctgttt

SEQ ID NO: 22544 - DNA, 200 bp, Glycine max
  unsure (1)..(200): unsure at all n locations
tctaccttntatttctctaaagtgatgatcgaatatgctctaacttatcctagggactccgagtaaatgagcattgactcatagagaacatgtaatttcttctaaaaaaaatgatgcacatggttagctcgcttgggcatgctgagctcacctgggcgagcaccccctgcacaaattagtttaaaaagaggggggggggg

SEQ ID NO: 22545 - DNA, 292 bp, Glycine max
  unsure (1)..(292): unsure at all n locations
ctcagcttttagcttctactaggcgtatnttgatctcccgtgggtgctctatattgnaggaacgtgctcaaatatgtggcgcaaggtttgtttgattacttgcttgactggggtgaatttggggtgctgatgacatggtcctacagcctctatatgcattctgaatcaatgcgacatgccggagcgcccccgtgattctgctatagacgccttaattcgctgccaccatgtgttcggcgaaatgtcttcatggcattagcgcatggttgtctaatggaaacatcccatgcgg

SEQ ID NO: 22546 - DNA, 245 bp, Glycine max
gatgactgttgggttaatgtgaagaaccttgatgatgactcttttatttattgctactttatgcggatgatatgctaatttctagtaaccatttatgtgatgtgaatgagtcaaaatctatgttgggcaaagaagttgaaatatatgacttgtgtgctacccaaaagattcttgggatggatattcaccatgatttaagatccaaaaaaactattgctctcacaacacggcaatgttgaaaaaat

SEQ ID NO: 22547 - DNA, 244 bp, Glycine max
  unsure (1)..(244): unsure at all n locations
ttttcaattacgagcgccttgatatattacgggagtcaatcagacatccgagtcaaaagttattgtcgtttgacttttcttagagcatccgcgttcaatttcgagcgtctcgatatattgcatggctcaatcggacattcgagttaaaagttattctcgtttgatttttctcagagcttncgttttccattacaagcgtctcgatatcctatggcacacaatccgacattcgagtcataagtta

SEQ ID NO: 22548 - DNA, 510 bp, Glycine max
  unsure (1)..(510): unsure at all n locations
attgannncctttggantcacnnctttgataccgttagacattccgtgacactatagatactcaagccttattaatgaatattatattgttaggtgtatgcacaattataaacctgccgtgaggagctgaatggtgaaaggttaatcatgaaaggtcttaaaccagttgtgacatcacctgaagaatccaatggtatcacagtttcaaacaacaatcctaagctgcaactaatttggggcaccaccatgtaccaccttgatgacctttcttttgatgctactagtttgccagatgtgtatactcaatttcgtaaggcatgatattttcaattgaagttttgtttcagtgctgcttatgctcgctaatgggattcaaaacttgcagcttgttgaaaccaaatgtactatacgctcatgcatcaaactaccagcatctcttggaccacctccacagttcaggattggggatgccttccttattagagcagctgggacttagctcacagaggn

SEQ ID NO: 22549 - DNA, 443 bp, Glycine max
  unsure (1)..(443): unsure at all n locations
aggagtgtgaggtgatactaagcattcttttcattcttggtccgagtctatcgataagccaggattttatgcaaaatggttttggctccatgagtggtaatgaaaataaagagactgtaatgcaggttcctgaagaactttctgaaataaaaaatatgaagaacatgtatatccaactaactctatcagcacttcataccttggaacaaatcaggggtagaagctcaactgtaagcatgttcccatcttctccaaacaactaggctttgcaattacaagagaattgaaagaagaagataaattgcactagagaaagcaacctagtatctaatagtgagaataacatggatctacttgtgtttgacatggctgatatatagagacaatgcaccatccatnagttactcggaaatattacacatgatggggtgactctcagctat

SEQ ID NO: 22550 - DNA, 421 bp, Glycine max
tcgcagaaacaagctaaaataactaagattaccagaacagttttaaattgaactacaacaaaatttactacattaaatcagtttaatactgcacataccgatgagacatggattaaacttctcccatcagttacatcaaaggggtttgagtacttcggtgcatttggaagggctgagggaggctgtaaatgaaacaccatatcaattaatcaccaatccatatctaaaccaagaaaagagacaaagttagtaactatgaagcatagacacttctctttgaagtgtcaccgtgttggacacgttttcaacactggcacacttagacacttgttcgacacttcttattaggtgtatgattcaaaaattactttttgttgacttgaacacttaaatcgtcacccttacacaattaatacacttg

SEQ ID NO: 22551 - DNA, 400 bp, Glycine max
  unsure (1)..(400): unsure at all n locations
acttgatgccttggtcaatctagtaactcttcttgccgtaaataaaaaatctgcaccttttactgttgcaagagtctgtggtctatgttcttctgctgatcaccatacagatctctgtccttctttgcagcaatctggagtcaatgaacaacttgaagcctatgctgcaaacatttataatagaccttcgcagtagcaaaaccaacaacaacagaataattatgatctttcaaacaatagatacaatccaggttggaggaatcatccaaatctgagatgggcaaatcctccacaacaacaacagcctgtcccttccttccagaatgttgctggtccaagcagaccatatgttcatcctncaatacagcagcnacaacaacaacaaagacaacaagtaact

SEQ ID NO: 22552 - DNA, 436 bp, Glycine max
gcttaaagtatgcccgagtcattcatccgtatgagatgttgttgaagtattggctatcaaaattgacattccttggattatagggttgaaccaaactcatgcttttacaaaaaggttcatcaagtcaagttgaaatatggaagtaaccgtcctgcaaaattggggcgaaagatgaattgagtcacatcactgcttcgtctactgccaaacatatttaggattgttgatgtccttgttacttccagtttcaccttgacaaagatgtcatggatcatgttgaaaatctaaattgattcaaccccatatcctgcgtaaaaattcgcaatacttcaactatacatcattcgcatacattcatgcttttcattggttgcacggctcattgcattctttccttgaaaataaaataaatatatgaacttatcattgtataaaa

SEQ ID NO: 22553 - DNA, 407 bp, Glycine max
  unsure (1)..(407): unsure at all n locations
gtaagtgcgggtctgggagacgaaggtcaagtgtttttgatatgcaaagatgatgttccgagtactttggatttggtccgaccatgccctcctgatttccagctgggaaattggcgagtggaggaacgccccggcatttacgcaacaagcataatgtaaacctttacggttttaaaagctctatagttgggcctaggctttagagttttcattttgttaaggctctgtgtcttttgtttttgaatttataatacaaggatctttcttcatctgttcctggtctctacccattctcattcatttgcatgtttacttctttttctaaaacggcagattcgatgacgagtcccccgaaggtactaatacctgngacccgtctatcaacttcgagcaagatatgaatcaag

SEQ ID NO: 22554 - DNA, 319 bp, Glycine max
gacacttaaaactcaagctgagaatggctagacatgaacatttatggtttggtttggttcaaggataaaagggatgccccacattatttccatgacacaaatgcaaaaatgatgatttggaaactttatgcaaaactggtcatgcatgcacctatgcggacactcaagtgtcaaatttttatggtcatgtgacgctagggctcaggattcgtttcctctattttaatcaacccaatgtttccaaaatatgttcttttatcaatttgtgcattcattcgagtccaattcgggcgttcggagaaatttcacagcattcacc

SEQ ID NO: 22555 - DNA, 361 bp, Glycine max
tgagactacaagattcgagcccttactccttgagcattttatggtatcttcattcgaggaaagaggggtcttttcacttattgaaccctaaccttgttggctttggaagctaggattcattgcatggagatatgatgcccaaatattcgtagctacttccttggctggaatcggaggatatgttgttttatatgaaaattctacggttaaaaatgagttctttgggtgttaaaacttaggattagccttaaatttcacttgaatcagagttttctagcaaaagttatcaatgaaacacgtttaaagacattttgttaaatataaatttgtcacataactaaactgataatgggagctatat

SEQ ID NO: 22556 - DNA, 241 bp, Glycine max
ctcttagcacagaagaatgaacaagttgcctttgttctggatgatgcacgtatccttgttaaaggtgacaattctatccactgtcacataattgacttatgcttagcagattatgcttcaaccctttaacaagtaaaacattatctatagaaggatagggaggaatacatactttacttgcaccagctatcagaactttttgattccctctgaaagtgacaaccccccggacataaagctt

SEQ ID NO: 22557 - DNA, 352 bp, Glycine max
taagtattttttgtaagcataggtaataaatacttagtatttttcattttgtgtgtttaataatcattttctctcaatttcaggttaattaggcaagctttggaaagtgttgttttcaccttctcgctaagccaatcagttggcttagcgagcgtccactaagcgcaacactcctgggctaagcgcgaggaagaatccagaagaagatgagctgtacaggttcgctaagcgcacctgtcgcaacctacccttttgcgggtgagcgaggcaaggctcacgggtgcgtcttccatatgaggaaaatgcgcggagtcgccaccaacgtttattgaaaggaaaatgtttgaaaaac

SEQ ID NO: 22558 - DNA, 219 bp, Glycine max
aaaaaaaaaacttggtccctaaattgacggttattggcagacaacggaagcttttaactacaagatagggaggagatcctaacatatatttccttaattgaaagaaactgaattacattacctgaaaatggcactgctaaataaaagcccataaaggcatatctttgagatcatgcccctaatataaaaggtggtgatcccatttgaaggcaaaattag

SEQ ID NO: 22559 - DNA, 406 bp, Glycine max
  unsure (1)..(406): unsure at all n locations
agatcacanaaatgagaggagagtgaggttgcaagctcttggtcttgcacaccactttatacttgtgttgaatactaaagtgtgatcaccctagccttgtagtgtccatgaaaattgagaggtggagatgagagtgtttatctttcttggtctaaataggaggtgaaagaagagagcatttagttcactctttgctaagtcaccaagatttgaaaataagaaatgaagtaaatgtgtgaagtgaggtatagagaaaaagagagtggtgaagagattgaatgggtgagtgcgtgtgattgggtgagagtgtcgtgcaagcatggtcagccctacttgtgttgatgccatgaaatgatggctaagatgtggattacactgtgtaattaactcacacaatgtaacccta

SEQ ID NO: 22560 - DNA, 439 bp, Glycine max
  unsure (1)..(439): unsure at all n locations
tcanaccacagcaacacanaatctaggtgtccaaaacctctcaatttaatggattttctaggcttgagaagtcaaattgagaatgggacaaatttgaagcaaactctcacctcacacaagtctataacatcaatttaaacttgtttaaactggatttacgcttaaaatctcaccgaatcaaaatttgactcttcaacacccaaatttaccctagaaatggctctttgttcactttggtcatttgtttttctctctagcacagcctaacccttctcacatgttctaaatggcatttcaagctagggttaactcattttaacctccatttaccacagaatccagatttagtcttcaactctcaaagcctcactctntttccactcataacatcacattctcactttctaaccctaggttaactctaccattcatctctaac

SEQ ID NO: 22561 - DNA, 449 bp, Glycine max
  unsure (1)..(449): unsure at all n locations
cgccttaggtggtttgaacatgtatggagaagacctgtttattccctggtaaagaaagtatatcgggtgaaggttatccctaattgctagaggtgtactataagtgaagcaattaagaaggattcagaggtcaatattcatttatagagtatagacatgatttgcaattgaactttattgcatcttttgattcacgtagttaattctacccaaagttgtcatcgtgacgagtgatcacatgatgtgcactataatggcgctttagtaccattgcgtcgcgactcacggctatgagctgctccattgaagctattgcagtgcagctctttgttgcacctgaagcggngcaaattgtggtgcggccacatttgtggatattcatggcattagatggcacaacttagatttatggttgaaaacccttgtctactactgcaatactgcatcat

SEQ ID NO: 22562 - DNA, 390 bp, Glycine max
ctcaagcttatccttatggcctgcctccggacttcaccccctgtgtcttcccggaagattaaagccaagcccctactttcgaggggcaactcccaccttatgaagactatcctgggcaagatgatggggaaggagatacccatcttggccccctgctccacctcaaagatccgtccccacatgaactaccccaaccgaacatagtccgccatatcccggcctcacccacaccagtaaaagaatctgttccctttgcggaagataagggaaagattaaggcgcttgaagagaggttaagagcagtcgagggccttggcaattacccattctcggatttggcggatttatgtcttgtgcccaacatcgtcatccctcccaagttcaaagtac

SEQ ID NO: 22563 - DNA, 349 bp, Glycine max
gttaaagacctcatccatgggcatgctttcggcttgagtttctggaacagctacaccagcaccaactgtgtctgcactttcactcaaagggctgcagatataaaatataattataatgaatgtatcgcatatgtagagctttccctgattagctcacacaatataattcattctcttctgattttatctttaatctgcttaactctaacttagtagacttaaaatgctcaatcatgtgttaacatataaaccagaaagggtaagtttcaacccaaacaatgagaagacgaattgcactcactccgaggttaacataactgtgtatataacaacataatactgtgtatct

SEQ ID NO: 22564 - DNA, 280 bp, Glycine max
tgtgctagtgagatctttcatcccatcttctattcccattaatgatgaaaatgaactaccaccacccagagaagaaaccatttttatcaaaggttgcgcttctacaaatttcggtgttggtgtcccaggactattgatatcattttccttggtagtatcatgcataccatgcaagttagctgaaagaggcatcatcttctctatgttgttgtcgccattggaagggccaatttgtgacagttctggacgatgagtaaccttatgatagtctccaatttct

SEQ ID NO: 22565 - DNA, 359 bp, Glycine max
  unsure (1)..(359): unsure at all n locations
tgtgctagtgtgatctttcatcccatcttcaattcccattaatgattaaaatgaactaccaccaccaagagaagaaaccatttttatcanaggttgcgcttctacaaatttcggtgttgttgtcccaggactattgatatcattttccttggtagtatcatgcataccatgcaagttagctgaaagaggcatcatcttctctatgttngtgtcgncattggaagggccaatttgtgacagntctggacgatgagtaaccttatgatagtctccaatttctttatcacaggaatttgtattgtaacatggcattccatccncagattcaaattgtagtggctccagttcattctcaagtg

SEQ ID NO: 22566 - DNA, 388 bp, Glycine max
  unsure (1)..(388): unsure at all n locations
gacacttaaaactcagcttagtcaacagaaaatccnatgttctaagaanttttgttgaaaaagcataacaagactttttgtgattggtgtaaagatacaatcttttcagatgacaatgtttcaaaaacattaacaaagctagcagatgggcctaaaagaaatgttataacttggaaaggatacgacataaacaagtattcattctacacaaaagcacaagatgacaaaagtacaatgcagaacagctgggtcaccctaagggctgaatctcaacacttcgcaagtgtgaatgacgccaatccctgtgtagtgtccatcccttactttgggttcaatgatgacatttgggagcttaactatgtgaaatttaatgtatgtatttttaaat

SEQ ID NO: 22567 - DNA, 302 bp, Glycine max
gacctataaaactcagcttgatgccacgctgctcactcagctttacaacatttgtttcattcattatttgacggaactatggtccgtgtatcgcattgataactagagaacatgacagcgaccacgaatagctgctttcaagaatgtgatcaactggcatttcatgtgagagctctctaatattatgaaccaccggcacataatgcaggtgcaatctgttgaagaaaatcattactctaaaaatcaaagtgtacatgccaccatgagtactccgacctgaaacttgttacgtgatcagacta

SEQ ID NO: 22568 - DNA, 434 bp, Glycine max
  unsure (1)..(434): unsure at all n locations
nttcgattcattctatgtacccgtgtgtggccacattgtgttttgtgtatttatattctcgtttcatttactttgtatacctccttttgatgtgcttaagccattttatttaagtcatttctcgcttaacctaaaaataaaataaatttccaccgaacgtttgaattgtattatccgttaacttcggttaaaacgaattccgaccgttcggtcgtgccgtaaccacgttggaaatcaaaaagaggtaaaataataatataataataaaaaaaatatcttttagtaaaataaagcgaaaaatcaatcggacgttttctctttgggatttctcattcttaattgaattgattaataactaaagtgaaactaaggctaaaatcaactcgcctagtcaagctcgtccataaaataagtgtttgaagtctgcatttcaa

SEQ ID NO: 22569 - DNA, 438 bp, Glycine max
  unsure (1)..(438): unsure at all n locations
tggaccaggaattattggatgggttggatgttgaatttttgttgttcctggcgcggagatgatggtactgcgggtgaaccacaagctgaaatttcttttggtgaggtagccatggaaaagcagagacgttggaatgatttcgtaaatctcagaaagctattgggaaatgctggagaaaacacgaatgccaagcagatataaatttgaataaagaatgtagaggggcgtgtgaagcaacggtcgaatttgctttgtagtgaacgtgctattaatgttaagtgattcgtttgggcacgttcagattgcagtagctgctataattcctctagcagacaaatgcccagcttgcctctcagttnttcacactgatgtgcattcaaagcctttgtgaaaatatctgctatttgttcctcagtgtcaacatgcttcagtgtgatc

SEQ ID NO: 22570 - DNA, 429 bp, Glycine max
tcaaaggcttagacaatggagtataagtgtttaagaatttttaaaacaaatggaactactccttttaagagctggacttatggaggaggaaagaacaagcatagctaggttccttagtgggcttaatatggaagtgagggacaaggttgaactccttccatatatggacctagatgagctagtccaactttgtataagagtggagcaacaacttaaaagaaagtcttctttaaaatcttaaggctttcactcttatccaaggaaggaccaagcccaaggaattttggaggctgcaccttgaaaacccaaggaagataagggtaagaccatagagaaatccacccctaagactagttcccaagaaaggactagcaacataaaatgtttcatatgtcttggcagaagtcacattgtctcttaatgccccac

SEQ ID NO: 22571 - DNA, 398 bp, Glycine max
ttgtaagacttaattcacccactctcttaagttattaaggtctcttgtccaacacactcaacccccaaacacttttgtgctgaagcaataaacactacttgttatttacaaaacagaatttatataagaccaatcttaaagaagactccctatgaattatggaagggacataagcccaacatttcttatttccacccatttggatgtcagtgtttcattctaaacaccaaagataaccttggaaagtttgactccaaatgtgattctggaatcttacttggatactttgaatcatccaagggatataaagtgtataactctagaaccttgactatggaagagtccattcatgtgagaattaatgacaacaaacctgacactacaatgtcggagctaga

SEQ ID NO: 22572 - DNA, 451 bp, Glycine max
  unsure (1)..(451): unsure at all n locations
tctatagaagggttgttcctaatttctctacacttgcctcacctttcaatgagttggttgatgtgtcattattttctcctatttcttaactctttttatcaccaatttaatttctgattaactctaattgtcgaatttattatttagttttatcaattgggcccacttgactaatttggtgtttttaattcaatttcaggataattataagcaattgggctgagccaaattggacttgaagagagaagacaattttattagatttcgtctaatttcattttattgcattcagtttttatttaagtattttatttcatcttagaccaaaataatgtaatcaggcccagtgactttgagtgatccttataaatagcagccttgggattcgtgcanggagtcgattattctattattcagggagttanggtttacgtttggagctgggattact

SEQ ID NO: 22573 - DNA, 417 bp, Glycine max
  unsure (1)..(417): unsure at all n locations
tatctatctgggcaaggtcgtaccatgattcatctgtgtgcccgatcttatcgtttttctaaggcagcaggtcatctccttctcgaatttgatgcttgtgtgcattgagtatgatatgtaagttgtttctcttcgaatctcgattattgtagatgacctaggtgctgtctgtatgtgacaatggcggatcggccatgtcatattagtggaatgttgattctaaaatataaaataaaaattctaaaaaaaatatttgtatgtctgaaaaatctgaaaatgaacactattttcgataaataaaagacagacaatattatctcaaaccaaataccaccattacttcntttaatcacattacgacttacctaatagtgagataaatgtgcataatatgcatgtgatcttaaagatgcttac

SEQ ID NO: 22574 - DNA, 442 bp, Glycine max
  unsure (1)..(442): unsure at all n locations
tcagctaagagaaggtatctcctttctgaagaaactattggtgttagcgttttgacttctgcagngntggatatcattcacacttaaccattaattcagagtattattatatcatgattcttgactttctgtaatttgttgcacactactgctatttatattatgtgtctgcgctcttgagactaaggaatgttcactatagaattaataaatttaagttttatacaatcaaaacaattattttaaaatattctaacatctaaaatatcgttagttacaaatcttttacatcttttataaatttaagaattatcatttgagtttgctggtagaaaaattagtgaacatgtatataagtagaattctataaattcaatactatagcattcttaaagtggaatattctctacatgattaaaagctagtattcaccaatttatat

SEQ ID NO: 22575 - DNA, 362 bp, Glycine max
  unsure (1)..(362): unsure at all n locations
cttgcagagctttggatgagattttgagagattgtgagggttctagaggtggaggagacatccccactacttgtatttcttctatctttcatcttctcttctcattggtgtaaaggaagcttccctactatggagagctaaatcctcagntggttcttcctatggggtacttgatgtaaatactttcatatctatttaatgatgttntatgtgttcactatgctatcagtacttaattctagtgtgcctttgccttgatcatgcacttgcatgcttagttagggtcactcaacattgggaaattgtttgatccttataacctgataggacagggctagcttatcgtattttcacgagacatt

SEQ ID NO: 22576 - DNA, 303 bp, Glycine max
tctacttcccagggcttacaaaagggaaagttttgcaagttgtgctggtgtgcatctaaagagggtatctgcatttatcttcatgcccttgttcctggaaaaatgttctaattatttttctgaaagtagcgtctatttaaatcttagcattttattatcccacaaattttaggcaaacattttcggtcatgcattggcttgttgcatgcttgtacatgtctttctgaggcagtgtctggttgtgaaaatttgatgtttcgttggtagtaatgagaactaaatacgtgtgcgaatgggattatg

SEQ ID NO: 22577 - DNA, 446 bp, Glycine max
  unsure (1)..(446): unsure at all n locations
ntntggcaaaggaagaagaagaattatgagtaggaatgtatttttaaataatcgtaaaggttgtaaaggttaaaaggtttctcaaaagttgttcaagaagttgtttgaatgcaagtcaaggtcttgcttttatagactcttcatgtctggtccagaaaaccattggaagagttataaccttgagaaaatcttgagaaaaccattggaagagttacatctcttgaccttttattcaaaacttgtcactggtaatcgattaccataaccatctaatcgattacacaatgcattttatgaaaagatgtgactcttcacaattgaatttgaatttcaacgttcagatacactagtaaccgattaccaatatattgtaatcgattacaccatttaaaaattatttggaacattgcaaanttagtttaaagctttttgaatcacattttatc

SEQ ID NO: 22578 - DNA, 285 bp, Glycine max
  unsure (1)..(285): unsure at all n locations
cttggttgacatacatgaagaaacaaagaatctctcacgtgtggactgtgctcacattctagtattcactttgtccctttagatgatatcttcatcgctaaggataatcataaatgacaagatttgactggtgagaattgtgaacgataccattgtggcggtaaatcattgacgttataacatgggtatctatagaactaacgaacattgaatctccaatgaaggaagtcaaatggagctcaaaataggctcatccatgttagagcactttatggactntgatct

SEQ ID NO: 22579 - DNA, 443 bp, Glycine max
  unsure (1)..(443): unsure at all n locations
taatacatgtattctatctattaaataaatatttctatatatatatctataannatagacacaattcaccttaaacctatacctacctataacttaaaataaatctatcatattcaattgttttttgatgatggggtttcttgttgtcaaataacatttgtagagaggaagaggattgtgaagatgccaaactaaatagaaattctatcataaattattttctctattgtttgtcgaaacaaaggaaaatataaattcttaaaataacttattatgccatcattttctaacaagttcttctatgtcatttctatgatactaaaaaaattgataactatctcactaaaccacttgttttcaaagtgttgagagtcaacttactatcatggaagtcaataagatntactcttcggtatatgagctcggcccacatgttcttattg

SEQ ID NO: 22580 - DNA, 437 bp, Glycine max
  unsure (1)..(437): unsure at all n locations
taaatgcatgtgaaggagaaataaaagaagtggataacttattattattatacgtactatgatttgtgccttgatttcctgtgtagtcaacatcgggttattgttggcatctttgagtgagataaggatatcaaggaaatcctctccatgaattttggacccttcatcccattctttgattcgctgctcaatgatgggatcatgatacttgcccacagtttctatggccttcttcaccttgccctcatgaccatctaagtcaagtcccctcaagcaagggacatagtcagaaactctaaagtcataaatgtatntaagcattgtgaaaatggcatcaagatgttccacttcctcactaccaggccctccatccttcttaccctccccanagtacctcctactannagtcaatttcttcatcacattgcaacaatagt

SEQ ID NO: 22581 - DNA, 350 bp, Glycine max
  unsure (1)..(350): unsure at all n locations
tcatgctgccacaagtacaccagagaaacatttacactcttagtctaattacgacttgtgttaaatttttgacttgattttgtactctaagtttgaactttagagatagtagatcttactctcatctattgcttggatctagtctcattttcttgacttgaattttttgcttgagcttgtacttcaaggtatgttttatttgtttgtgacttctagggtacacttaatcatttgatgtacactggaacatttgccacaaataataaataaagagcattaaatatattaatttattattagtgattgaaattcaatntgtttaacttatacaacatctatctatggtaaaa

SEQ ID NO: 22582 - DNA, 441 bp, Glycine max
  unsure (1)..(441): unsure at all n locations
ctcaagctntgaatgctctattcaatggagttgacaagaatatcttcttactgatcaacacatgcacagtggccaaagatgcatgggagatcctgaaaaccactcatgaaggaacctccaaagggaagatgtccagattgcaactattggctacaaaattcgaaaatctgaagatgaaggaggaagaatgtattcatgacttccacatgaacattcttgaaattgccaatgcttgcactgccttgggagagaggatgacagatgaaaagctggtaagaaagatcctcagatccttgcctaagagatttgacatgaaagtcactgcaatagaggaggcccaagacatttgcaacatgagagtagatgaactcattggttcccttcaaacctttgagctaggactctcggatagggctgaaaagaagagcaagaatctggctt

SEQ ID NO: 22583 - DNA, 184 bp, Glycine max
ccccagggccttgttggatttctccgaggacactgggtgtttaagaggtgtgatccctgcaaattgatatatagcgtctgagattatctgggctacatggacactcacctatgtcacgatggcatagatcatctggcacttcggcagggggaggtcacaattatggttgttggggaggacgaat

SEQ ID NO: 22584 - DNA, 368 bp, Glycine max
cagcttacaagatgatgcggatcgaacttttcctaactgacatcatgcaaatttctttcactgattggattgaaaactcaatagccgacatccgtcgtgaagtagccgtctgatatttttcagcagacattgagcaattttttttgaaaaactctcgccggtagataatggttcttttacggtagaggaagttttctcgttttcgtgttgcaaataaaatttacaatgtaggttggttaggcttttttgagcgagctcaaccgacgttttgtttcggccgacaatggcatgtttccatttattcgcccaggaaaacattatcccatcttcgcataaaaatatttgttaaccgacctcatgcatatttg

SEQ ID NO: 22585 - DNA, 430 bp, Glycine max
  unsure (1)..(430): unsure at all n locations
tatttgttacattcaatcaactataagaactgtaatatgttaaaaatatttttggttccttatattcttactaaaatttatttcagttctttatttttaaaagatttattttggttctaaaaatatttgccctcctgaaacagtgacaatttatttatttattttaagacataatttttaattattttttgattgatttaaaatatgagacttattctattaaatttatcaaacttgataagttcacgtgaaaagtgaatccaagaaaacattaaaattagatttttaaattttttgatggctcatgaaatttactttctccatgtttgcgactntntattntaagcattagttgagttctggttaagaaaatgagtatggtatagcaagagtgttagtaatgtattctttctaacatatattttattac

SEQ ID NO: 22586 - DNA, 439 bp, Glycine max
  unsure (1)..(439): unsure at all n locations
gtaccttagataagggtaaaacaatataaaaaatgttttccagaatatacggctaattaatttgagaatatggattatgtaaattattagttcccctgcagaagtcaaaacatactcaatgcttcacaattcaactatttttctacaagggttccaattgtctttctcccttgtgttaaaaagaatgtgactatgagtgaccataaaacattcctttttttttatcccccaatacataaataaataaaaaccaaactcaaccttaaacaaataaaagttccaataattattaagacgcaatttgtatatatagcagtccaaggacatgacacaaaacaattaacaagtataatcaaaacccatgagtccacaccatcaaacaaaagaaataagaaaagtcatcttaacacggctagaatattcangtatatgtagcatt

SEQ ID NO: 22587 - DNA, 308 bp, Glycine max
taatgaagacaccaatagagagagggttggttaatggttatttgtttcaactctgcttcttcagcgttgaaaggcatcaccacccccactctgcttcagcccagagtgctactttacgacgccgtttaccatctttgccacagaggtattcatttccctttcccacttcttcgttcttcaggatcatcactctgttttaacttcctattcaattcatgaggttagtgtgttcgtttgatccaactcgttgcttgttcactgcctcgggtagaataaaaatgtcacctctattaatgggtatgtatgta

SEQ ID NO: 22588 - DNA, 446 bp, Glycine max
  unsure (1)..(446): unsure at all n locations
ngaggataaagacttcccaagctatttatcttctctctcaaagaggctctctacttggatggttaggaatgaaggctcctacccttatttatactactccatctccacaatgaatggtggagattacttgtatcctacgatgaagattaattctctagaatgctccacacattctaggagtctctacactcttttattccctttcatactcttccataaggttccagcccacacatctccagaatattccagaggtttccacatccttccataagcttctagagagttctacactactctagagttctccaggatgttctagaaaattctacacttttctagaaagctctagaattttctagaacctctccaatttggtatttaatttgatatttatttatttatntgagatgtttctttgctatcttaagtattgttttcaattg

SEQ ID NO: 22589 - DNA, 409 bp, Glycine max
  unsure (1)..(409): unsure at all n locations
tcacaccacagcaacacagaatctatgtgtccaaaacttctcaattcaatggctnttctaggcttgaaaggtggaatttagaatgaggcaaatttggagcaaactctcacctcacacaagtctataacatcaatctaaacttgctcaaactggatttacacctaaatttccaccgaatcaaaatttgactcctcaacacccaattttgccctagaaatggctcttggttcactttggacattagtgtttctctctagctcagcctaacctttctcacatgtcctaaatgacattacaagctattattaactcactntaacctccatttatcacagaattcagacttagccttccaactctcaaagctcactctatctcactcaaacatcacactctcctgtctaacctg

SEQ ID NO: 22590 - DNA, 396 bp, Glycine max
tgatggtgtcgagaagaaacacttgtgtgtcatcatttttaagggggagaatgtgaatgtatgtatacatgattttgatgatgtcaaagaagaatctaacaaggctgcttcaatcgataaacatttgcttcaagaataattcaagaatgcttcaacaaacaaagccttgtttgaagattcactaaagaccaagccttgccttaaaacaaagtgctttcaagacatgcaaggctctggtaatcgattaccaggaagtgtaatcgattaccagaagacagggttgagaaatagctgttgaaaaaggttctgaatttgaattctcaacatgtaatcgattaccgtatgtctgtaatcgattaccagcaacgaaactttgaaattcaattccaaagtcat

SEQ ID NO: 22591 - DNA, 390 bp, Glycine max
  unsure (1)..(390): unsure at all n locations
ntccctctttgaacaaatacccctcagccatatagaattcatcttgggcctttttcccaaaactctcgtaagtgggagagaaatgttcatctaaagcatacaagtccctaatattatcaaatcctaaaatttgagctcctagggagctaaacaatgtgtgtctcctagagagggcattagctaccacatttgtttttccctttttgtatttgataacatatggaaattgctttaggtactctacccattttgcatgcctcttgtttaacttgctttgccctctaatgtacttaagtgattgatgatcactatgaatgacaaattccttggaaacaaggtaatgttcccaagtttggagggctcttattaaggcataaagttctttatcat

SEQ ID NO: 22592 - DNA, 341 bp, Glycine max
  unsure (1)..(341): unsure at all n locations
atcatggcagcccaaattggtcgttaaactactcttgcaacaaaccattgacaatgaatcattcacaacatgcttcaccatnttttgtacatgtctgattcaatggatccattcatacaacaacacatgaaggagcaatgtttatcaacacttatgggcaaatttccccatctggggtagttttacaaactatttccccagatggggctctttttaaagattttccagcatggggcacttttggacgtgttttgcatgcatgcagcacccaaaccgccagaaccactggcgagtttggtgtctgtgagaaaatcgccattcacactggcgatacgtgcatg

SEQ ID NO: 22593 - DNA, 406 bp, Glycine max
  unsure (1)..(406): unsure at all n locations
tgagaagctagaggaaggtagctnttttgggaatctagaggaagaaagcttcttgagaagctagaggggggctactcacacccttccaatagctaagcttatcctatgccaaaatacataaaaatacatgaaaatacaaaaattccctactacaaagactactcanaatgtcttgaaatacaaggctaaaactatatactactagcgtacccttaacttgtacccttaatttgtagggtaccctacaaacctaaaatggaaaaaatacaaggcccacaagaaggaaaacatattctaatatntataaagaaaagtaggctcaacccatgggcgcaacttcttccctaaggctcatgcaaatcctaaggcctttctctgcatctctatttcaacctttttggggtct

SEQ ID NO: 22594 - DNA, 502 bp, Glycine max
  unsure (1)..(502): unsure at all n locations
ntttgaacccctttgcatgacgtcactctatagaacactcaagctngcaaaccaaatgctcaccactatcagaggagaaacctttatgttgnttcatataaacctcctcctctaaatcaccgttaagaaaagttgttttcacatccatttgttgcaactcaaggtcaaaatgagcaactaatgccaagattatacgaagagaatctttcttagatactggagaaaaagtctctttgtaatctattccttccttttcagtaaatcccttagcaacaagtcttgccttgtatctctcaatgttngcctaatgaatccctttggtcttaaagacccatttacatccaatggcctttgccccattaggcaactctacaaggttccaaactttgttactctgcatagaattcatctcatccttcatggcatcatacccataaattgactctttacaacttatggcttgatcanaagttcaggatcatttcagctccaatatatagtc

SEQ ID NO: 22595 - DNA, 409 bp, Glycine max
  unsure (1)..(409): unsure at all n locations
gtctccttgaatgctgatgggcagaacctaattatactacaatctcttcagtgatgccgtagaggagtacagattgctcgtccaaatcctacctgtttgcgttcaagtcagaggatgatgtatatacacaacatatggcatccaaagtaaccatttaggacatctgttcataactatacacagcanaagaaatgagctgagcataccaaaagagtatttattggaacccattcttccttcggaagccaccgttgcagcgcttgtcttgtttcttccggagtcatagttttctggcaaagggtttcaatntgtgacagtagaaacaaattagcagaagaaatgaaatcagtcaatcaaagagcaaatttcttattgctgattgaaacggactcataagtgcagcaacttt

SEQ ID NO: 22596 - DNA, 269 bp, Glycine max
gcactttatatatactccttatttgtagtgcactcccccttaattatatggccctccattgatgtgttttaatgccttagttgttcaatctttgccaatttcatgagacaatgtatgcttggatttacgcttgtttgtctgaattggagggttgtaggggatggccttatgcctatgttgtgttctgaaatgattgggtaggccacattgcccccattctctttctgtttatacccaaaagtgcgcccaccaagtgtctggtgaaatgc

SEQ ID NO: 22597 - DNA, 424 bp, Glycine max
ctttgaaaatacagggcatctttgccttatatagtcataggacaaaacataaaaaataacagaataaacttccatatggatttaggtcacaacccaacaattcaccaccttgaactaacatccatataggacacaaactgctccctctaagcacacaagaacttaaccccaacaatcaacattgagcaagcttaagcattgatcaaacatgctctttggaactggctttgtgaaaatatcagcaggattgtgcagagtgctgatcttatgaactttgattcttctttctgaccgaatgaagtgatatctaacatctatatgcttggttctatcatgatgaacctgatccttggccaagcatatagcactaaggctgtcacagtagatgttagcatattcttgattaattccgagatcatttatc

SEQ ID NO: 22598 - DNA, 337 bp, Glycine max
  unsure (1)..(337): unsure at all n locations
ttttttcttttatgaacaaatattgtaaataaacataagagtctaagaatattactatttcttacaccagctaatgatgacgagtacttaattattagttaataattttcatagattgattcatgaattaggaggtacttagaagaatntttacagagattttattggtttatgatcttcctataggctcgttcattntatcttattcataattgattgttgataagtaaacaaaataagctattttttttttacacttattctggctctctaacatatttctatttggtaacctatctgacaaatttttaactaagaattngccatatcattaaag

SEQ ID NO: 22599 - DNA, 446 bp, Glycine max
  unsure (1)..(446): unsure at all n locations
ggcacaaaatcctgcacaccacanatgcagaatcatcttttctaattnttttcttttatgaacaaatattgtaaataaacataagagtctaagaaatttactatttcttacaccagctaatgatgacgagtacttaattattagttaataattttcatagattgattcatgaattaggaggtacttagaagaatttttacagagattntattggtttatgatcttcctataggctcgttcattttatcttattcatacttgattgttgataagtaaacaaaataagctatgttttttttaaacttattctggctttctaacatatttctatttgggtaacctatctgtacaattttctaactaagaattaagccatatcattaaagagtgtaaaaatggtacgagaaatntgtgttgaaagaatcagnttgggtgtaaaaaaatgg

SEQ ID NO: 22600 - DNA, 275 bp, Glycine max
gctttgacataactacagccgctgtgtttttggaacatttcctacacaatatttgtgccacgaggctagaaacttggtttaaatataattgggattatattataacattgttagcctttcatataaaaatggatctattaaccctgagatgttgatattatttttacctaatcgtctgctaaattaagatgcaaaggatctttacttttgattggggtcacattaattttgtatgaactcgtaaagtatatctacaatgatctcgctggataggg

SEQ ID NO: 22601 - DNA, 444 bp, Glycine max
  unsure (1)..(444): unsure at all n locations
actcttggcaatntctgttagatgactagtcactttaaaagtcttgacttttgaaaaaatcttcagaaacaagtcacttgaagaatagtgactttaggaaatgtatttgttgaaatcaatcactgttaatcgattaccattaaggtgtcatcgattacacatcaacagatgtgactcttcattttgaattttgaaaatcttaacgttgtaaaacactggtaatcggttactaccttctggtaatcaattaccagagagtaaaactctttggtaatgattntgtgataacttcttatgctactcaatgttttgaaaaactgtcttaatacttatcttgattgagtcttctcttgattcttgaatcttgagtcttgaatcttgatctngaatattcttgaatcttgattcttcaatcttgaatcttgaatctttggaactctattc

SEQ ID NO: 22602 - DNA, 193 bp, Glycine max
tgagctgttttcttgagtttttatgccacaaataacttctttgagtgttaaaacacagggttagccttaaattttacctaaatcgaagtttctagcacaagttatgaataaaacaagttgtataacattttatatgatataaattgtcacgaaaataatctaataacgagagctgtatggactaattttatta

SEQ ID NO: 22603 - DNA, 230 bp, Glycine max
taagagaccttcaatcctataacgcaacatggcggacaaaagtgggcagttaacttgaatggacattattgtcaatgcggaaaggattctgcggttcactatccatgttcacaaattattgcacgttgtggttacgtgagcctgaactactaccaatatatggatgttggttacaccaatgagcacatcttaaaagcatactccgcacagtggtggccttttgggaatga

SEQ ID NO: 22604 - DNA, 389 bp, Glycine max
  unsure (1)..(389): unsure at all n locations
tttttntagtctcttaagttttaatgtctatttttagtctcttaactatttttactccttaagcttttaaattttttttagtccttaagtttttaaaatctatttttagtctctctttttttcagtcttacttttaatcctttaacttttctttttcattcttacttttaatccttttaagggcctataagaacaaaaaagtcaagagagcaaaaataagaatgtaataaaagttaaaagactaaaaatagataaataagtttaaggactaaaaacataaactttaaaaagtttaattaaggactaaaaagataataaaaaagagcaaaagacaaggtgtggggggtaattgaaatctactaagaaataaaaatggttattcattagtt

SEQ ID NO: 22605 - DNA, 434 bp, Glycine max
  unsure (1)..(434): unsure at all n locations
agcttagctacacatacctctctaatagctaagcttttctccttgagatgataagctagagcttagctacacaccccctataatagctaagctcacccccatgacaaaaaaacatgaaaatacaaaaaaaaagtccttactacaaagactactcaaaatgccctgaaatacaaggctaaaaccctatactactagaatggccaaaatacaaggcccggatgaaggaaatacttattctaatatttacaaagataagcgggctcatacttagcccatgggctcgaaatctaccctaaggctcatgagaaccctanggccttcccttggatctctagccctagcgctgttcgcctatcctccaccctcaactcttattcagagacccatgaattgattgcctaccgctgtttatgtgtccctcaccatcgagtctg

SEQ ID NO: 22606 - DNA, 435 bp, Glycine max
  unsure (1)..(435): unsure at all n locations
ntctcgctgcanaatccacttcttggttggtgtttnttgtttgtgctaaatgtggtgttcgtcattggaagtgcagtagacagactttgtggtagatttagggatggcctttgtggatacctgggtggtgggtaaagagaaggtttgttattggctgagtaaagatattgttgggttggtgggaaacttggtcgtacaggaatggcagtcacagcatgggtttctcccttatcctcaccctctttatttgccccagttttctcagtcgtcctagtaggatgatcaaatttgccccctttttttttttttcagacccacatcggtcctttcactggcaaagaccanatcctcaaagctttgaaggtgtgtaacccaccatttttttcatagtagaacaccggccacgtgtctactatcatngngataatctctttc

SEQ ID NO: 22607 - DNA, 443 bp, Glycine max
tcttcctgaaagcaaccaagcaagaagtaaacatgtttttatgtcatttagataaactgataaaaggtctagaggcataaaagtaaatacaaaaaaaaagaaattttctttttgaaataactgcactccattttatctcttcatttccgtattttaccccaccattatcaatttcagtttagctacccattcatctcgatttttaagcttttccaaaaatatttatcccactttctagtaaacatgaattaaaggaccaattctccctatcgcttaaagtgttaggtaaagaccaaatattagttttatatcttgtaacatgccagcataagtaagcattttcggcttgaaacatgggcaatgccaagattcaactagagcaatagggatgacaaggattgactcctaaccatttgatcatacaggactctgatattatacca

SEQ ID NO: 22608 - DNA, 440 bp, Glycine max
  unsure (1)..(440): unsure at all n locations
ctcagcttttatccaggctcatcttggtggtgaagctccttctttcatggcttatttcctagtggatggcgcctcctctcacctcttctcctttgtctntcgctgcatctccatggtggaaaatcaccattaaaggacctcattgaagctcaaagatccagcctccatagaagccctacaagcaagcttccatcaagtggtaatcagagcataagagcttcaagtaggtgctccttaaacctccattaatttttttgctttaccttttcttccattgttggttcttcattnttctccatgtatctcctcacatgtcttgccacataagatttcttatgttgtgctaaattttatttttcttgtttctttgtctaactcatttgttcatgagtgtatgaaaatcttttagcctattattttgtttgagtcaaatctttcat

SEQ ID NO: 22609 - DNA, 412 bp, Glycine max
ctaagcttacacttgataatggagaacacatgaacagcgctaggtaatgacattcattgtactccgaacaaaggtggagtatggaggattgccttgagggtccgcacttaggcaatcatgaaactcagctccaaactcgaaagtggaggacacatgaacagccctaaacaagaacattcatgtggctccggaacaggatgagaatggaggattgccttgagggtcctctcttaggcaatcatggaacacagctccagactcgaaaatggaggaaacatgaacatccctaagcaataacattcatgtggctccggaaaaggatgagaatggaggaatgccttgagggtcctctcttatgcaatcatggaactcagctccagactcaaaagtggaggacacatgaacagcccta

SEQ ID NO: 22610 - DNA, 369 bp, Glycine max
tggagctgacccatcaactgttctaactcttttatactggtgatccttaggctcttgaccttgacttgatagaacctttttttaagcgaaggcatttgacttgatcccatgttttactaaagtgaaacaaaatcggtgcgaatcaaaaccccgacatctatcatgggtggaatggattaatgcatgaagaaatgcatatgatacagatgcaatttatgaatacgggagcccgggaaattgtctccttcttagatacaacgtcttggggtagcatagtgcccgacgcatgtatttaagaaggtgacacggaccctccgttggttttccatagagaagggatcaagacagaacccatgcatgatgcatatg

SEQ ID NO: 22611 - DNA, 439 bp, Glycine max
ggccgctggagctgacccatcaactgtcctaactcttttatactggtgatccttaggctcttgaccttgacttgatagaacctctttttaagcgaaggcatttgacttgatcccatgttttactaaagtgaaacaaaatcggtgcgaatcaaaaccccgacatctatcatgggtggaatggattaatgcatgaagaaatgcatatgatacagatgcaatttatgaatacgggagcccgggaaattgtctccttcttagatacaacgtcttggggtagcatagtgcccgacgcatgtatttaagaaggtgacacggaccctccgttggttttccaaagagaagggatcaagacagaacccatgcatgatgcatatgcaaaaggcacaacacgaggatgtacatagtacgacaatattcacaaacaaatataatcaaaggg

SEQ ID NO: 22612 - DNA, 111 bp, Glycine max
  unsure (1)..(111): unsure at all n locations
gaaatcttattacagngaactaaagacattntggtgtattgcttatgctcatctaaaacatgataagttggaaccacaggccttgaaatatatctttataagctattcaca

SEQ ID NO: 22613 - DNA, 412 bp, Glycine max
ctcagctttcatcgtgaaatcacgtgcagccatttcccttagagtcctctttcgaagcgaacgttgtgccatgttctcagaatgtgcaaaatcagaatgctcaaaattataatgctcaagatcaggatgttcaaaatcaccaataatagaatgcacagattcaccagttatggaatgctcagaatgatcaaaaggtataaaatgatgcctaactaatctatgaaatgtcctatctatctcaggatcaaagggttgtaagtcagatggattgcctctagtcatacactacattcagcatgcacacaactagttggcttgtcatgtaaataaaggtgtaggtttgaactacaggtaccctcaaacgatatccaaatgactcgaaattttttgagccaccttatataatgatgag

SEQ ID NO: 22614 - DNA, 341 bp, Glycine max
  unsure (1)..(341): unsure at all n locations
tgtgtcctttctttntcagcatctccttgaattgtctttatataagagcaacttcatcgttcatgaactctntagaattgttgtatggcttttcagactcaacaatatgtactttaagagctttagaatagcttttattttcttcttttctagagatggtctctttagacatgagggcatcaaaatctttttttggaagatgatctatattctaaagatgcacttcatggactcttatgatacccaacaattcatccaaggcaagagttttcaggtttctatccttttgaatggctatggnttttggttctcacaccttgngaaagttgtctaaaatcttg

SEQ ID NO: 22615 - DNA, 409 bp, Glycine max
  unsure (1)..(409): unsure at all n locations
tcggaagaaagtgatgaggtacaagccctattggcagattctngaaagagcccgggtagtcgaagagaagttcaagtccatagccatcaaagtttgaaaagagtatgatgaactaagggacgtcaatatggccaccgctgaagccttggaatgagaaaccaagaaggcccgaaaggaagaacacgaccaaaacaagttttgaggggctttatagggcagcaatagtgagctcaaactctgaagaggtgaaaggaatcatcatgggtcaaaggcatgatctggaaggacgagctaaaggcttgccttaagtcgaacagaaatttgtcccaacagttaaagtgagactgaagggaatatgtgggccatcatctatgagtgcaaagagaagctaaatctagcggcgactcac

SEQ ID NO: 22616 - DNA, 433 bp, Glycine max
  unsure (1)..(433): unsure at all n locations
ntactgaagaaagcaatatgtcgtctctgctgcattattacagcacctatacctctaccagccgcatcacactcaacttcaaaaggtaaatcaaaatttggaataattagcacagggggagaagtcatgatcctcttcatctcctcaaaggccttgacagcttctattccccaagaaaaaatgtctttcttagtcaattcggtgagaggttttgctattttaccataatcttggataaaatttctataataccctgtgaggcccaaaaaaccacgtacccccttcacattctntggtgtgggccatgcaagaatacagttcaccttttcagggtccattgccacaccttctccagaaatgatatggccaagataatcaatntgagcacacccaaacctacactttgcttgatttgcacanaacaatgctcaac

SEQ ID NO: 22617 - DNA, 456 bp, Glycine max
taagcttcgggctgctcaattgctccaggttgctgcatggaagggcaaaggtctgtatggtggttattagaggagcacaaaccatagacccttgcaacaggtacagatttctggttcaaggccagctgggttaccaagttaaccaatgcatccagtttgccttcaagcttcttagtttcagatgatgcagctgagtttgtagctacctcatgcactcctctaatgactatagcatcatttctggcgctaaactgctgggagttggaagccatcttctcaattaaatttctggcttcagcaggagtcatgtctccaagggctccatcactggcagcatctatcatacttctctccatattactgagtccttcataaaaatattgaagaagcagctgctctgaaatctaatggtgagggcaacttgcacatagttttttaatctctccagtactatac

SEQ ID NO: 22618 - DNA, 383 bp, Glycine max
  unsure (1)..(383): unsure at all n locations
agagaaattcccaagatccatctatttaattnttctaaaaacatttcctagactacaaattatcatacacagaaaataaattgcaggctaacactgacatattagttatcatagagaaagaaattaattaaggagtaaacacttcacggaaaagaacttagcattgtgagttttaattaaatcacagtccacagtcagaacaaacacaagcaattactcaagaaggactaattgcacacacagactaagttgaaaagtttcaggttggtacaagacactactagaaaaatcacaattagtgaggggcgaaatccgttaatatatcctttaaaatccattacaaactatatcagtgacgaactctgtgatgagacacaagttca

SEQ ID NO: 22619 - DNA, 452 bp, Glycine max
  unsure (1)..(452): unsure at all n locations
tcatgatgatgaatcaagttgattcaagtagttttgatgatgacaaaaagcctaagataagtttgatttcgagattcaagagaagatgaattcaagattcaagagaagaaatcaagaagacttcacaaggtaagtattgaaaagatttttcaaaaaacaaacatagcacaattttgtttttcaaaagagtttttctcaaaattttctaagttaccaaagtttttactctctggtaatcgattaccaattacctgtaatcgattaccagtggcaaagtttgatttcaaaagcttttaactgaatttgcaacattctaattgattttttaaatggtgtaatcgattacaatatattagtaatcgattacatggtggtggtaatcgattaccagtgacaagttttgaataanaatcaagagatgtaactcttccaatgggttataaggttttctc

SEQ ID NO: 22620 - DNA, 380 bp, Glycine max
  unsure (1)..(380): unsure at all n locations
gcttgaaggtgtgtaacccaccatttntcataatagaacactggtaatgtgtcttctatcattgctatcatttctttctccgtcattgagggaaccacttgggatgccagatcctgccacctttgggcatattctttgaaagatccgtgccccctcttgcatatgctctgtagttgcatcctatccgaagccatattagaattgtactgatactgcctaacaaaggcaaccattaggtccttcgaagaatggactcgggaaggttccaagttagtgtaccaggtaacagctaccccagtaagactttcttggaagaaatgtatcagcagttcctcatcttttgcatacgcccccatcttccgacaatacatctttagatg

SEQ ID NO: 22621 - DNA, 229 bp, Glycine max
ctcagcttcgtattcaatttcgagcgtctcaatatattacgggactcaatcagacatccgactataaaggtattgtcgcttgaattagctcggaggttcacaattcaactttcaacatctcaatagattacgtgactcaatcagacatttgagtaaaacagttattgtcctttgaattttctgagagcctcaacattcaattttgagagtctcgatatattacaggact

SEQ ID NO: 22622 - DNA, 383 bp, Glycine max
  unsure (1)..(383): unsure at all n locations
aatcgacaacgattttaccaaaatcttcgntggtacaaatcctgtctcatttttgtaaatatcagtaaaattacaactatgctttttaaaaatgaagtcaaagcctgatattgaagacaattctttggagaactgtaattgaaatcgctaattcaaagacgatttttgaaaatcatctttgaagttcaagtgttatggctcttatactcgtgccctttctttgcatctcacttcgtctcaatagcttgcaccctctcagagtctctttatgccctctctcactcacgtctctgtcaaaggtgcccagcacttaccgtgaagcttccttctgccgaagcttgtgtgtggcctggttgtggtttgtttttcctcattccccatat

SEQ ID NO: 22623 - DNA, 395 bp, Glycine max
  unsure (1)..(395): unsure at all n locations
tcaacgacggtgaatcgacaacgattttaccaaaatcttcgttgttacaaatcctgtctcatatttgtaaatatcagtaaaattacaactatgctttntaaaaatgaagtcaaagcctgatattgaagacaattctttggagaactgtaattgaaatcgctaattcaaagacgatttttgaaaatcatctttgaagttcaagtgttatggctcttatactcgtgccctttctttgcatctcacttcgtctcaatagcttgcaccctctcagagtctctttatgccctctctcactcacgtctctgtcaaaggtgcccagcactatccgtgaagcttccttctgccgaagcttgtgtgtggcctggtttgggtttgttttccctcattccccatat

SEQ ID NO: 22624 - DNA, 414 bp, Glycine max
tatcattatctggctaggcgtgatttcttttacgcgttcctctaatgctactttaacttcaacttcaactccaaaagaaaaacttgtctgcttgggggtattttataatgccaagccatttgatgattcgaatgaaaaatcaataatctaacttttatgtaaaagtaattaatcctatgaaagagaggctagctcacttaattcagcggtatgtgtatggatgtttaaatctaaatcgatcagcttaacattttttctttcccactgataaaaaaaagttttaatcgatctaaaaataaaccgtaaattaattattgaagattgatgtttttttttggattagttaggatatatctctagatatcgggttttccaattaaaggccgatctttttttaaaaaaccaataaatcat

SEQ ID NO: 22625 - DNA, 281 bp, Glycine max
taaaggctcttggacgtctcaacacatgaatgtgcgctcagcgagcatgtcttgctgagcgagaataagtaaatatcctctaagtgaacctgggcgtgcttagcaccgagagagacaaagttctcgatgggtgggctggctgcgtgctaagtgcgctactctctcgattaacatcctctaaggctctgcatttgctcagcgagctggctgcctcgctaagcgaatgaagctcgcttagccaatctgtctcgctgatcgagatgttaacaacagtttacacc

SEQ ID NO: 22626 - DNA, 348 bp, Glycine max
  unsure (1)..(348): unsure at all n locations
gaatatatggattagacacaaagcattttatctgctgtatgaatgaattaaacttgcacttgttctcttttgagtgcatttttctgatttctgggtttgtgaatctcttgtgccaacaattggtatctagagttgatttgatcatgagggactgtgagagaaccttgagtgtacagagaaattggaaatcacaaatatagtttgagagaacccaatccttttttagaatacccaactttntatatggcttccaacaatgttccattactagcacctcctgtattcacaggaaagaacaacgaaatgtgggttgtgaagatgagaatgcagctgaaagcttttgatctt

SEQ ID NO: 22627 - DNA, 346 bp, Glycine max
tgttacaagcacacctttttatgaaacagatatcaaacttcataatttgagattgtacgattgccacatggctaggatgatttttgaggattgccacatgttagactgattctcttgatgcgagctcaaatctaaagagaagacactatgacatgtttgatgcaagtggaggcttctagaaaaaggattgcatgtactgccacactcggtagggagatgcaccggatatgctggattgaaaacaaataatgcatacatatagacgcattaggactccaatgtgagtgaaaccaacaaggttaggctggtcttggagagaaatcaggtctcgcggttggtgtaacca

SEQ ID NO: 22628 - DNA, 355 bp, Glycine max
  unsure (1)..(355): unsure at all n locations
agcttgtatcatcgagacagagtctntaagattaggcttaattgcaaaaagtgtccccctatttttttcatttcactaaatcggtccccatattttttaattcatatcatgttattcttcaaaattcactagcttagaacattgaccgccacgtgtccgcatataattggtcatttaagaaatattcatgtgtttaggaaatatcattattagtaactaaagtgattaattatttaggttatctccaatttatcatcattactaattaggtcactaacaattatctcacaaataattaccccaacccaaaatgtaaacttcatccactcaaaatctttaaccttcctattaccaa

SEQ ID NO: 22629 - DNA, 317 bp, Glycine max
ggcatccattgcacgcttcttgtctcataaaaaatataatataagctatgttatcatggtagcatagatgcatttagtgttaaccaatgaaataccttttttgttgcttgacaaattaggttgaacttgaaaaccagcttaagttggcaatgttggtaacttcaatgcaatagtggtataaagcaacttataattttctctgtttattctgtgttggtaatcagaatgcaccagattgttctttcttcttgcttcatacgtgtgcccacaacccaactggtgttgacaccactgaggagcaatggagagaaatatca

SEQ ID NO: 22630 - DNA, 442 bp, Glycine max
  unsure (1)..(442): unsure at all n locations
tgcaagctaggtgattganaaggtttcaatttcaagtaacaaagatgttattgcactgcaagagaggaatttctcattgaggttctcttcacatgacacaaaattcttattttccagacgtagcaggagccagagtttaactcttccattgtgaactagacgcatgcattgcaattgaggatatatattcaccttgcaaagtcaagtaaaaattcaaggatgttctgatgattgagacctccgcatattgttgggaagatgattcttctatgagaatttatccaagttttcaaggtatatagataaatgattatttgcatgaaagcattcttctatatttgtcttaccgtatttcatttacattaggcgtgtggttcagcatgcttaatattaatcaataaaacaatatgcataatattttcaaacgactctactccatgat

SEQ ID NO: 22631 - DNA, 295 bp, Glycine max
aacataatttattaagttaaaacttggataaaatgatttggtatggtggtatatttcataaattattaatttaatctcttatttcttttatcaagttttaaaaatatttatctgttctgcatctgccgcagacatatttggttgtaaagatcctatataggatcacgattctattatgtgtatgattattaattttggtgaatgtgtgattaaatattagatgcataaaaaatatgataactatattttattgtctattctattattttatgtccacttgaatttttatcttgaa

SEQ ID NO: 22632 - DNA, 432 bp, Glycine max
agcttgtctacacctttctcagaacaaataatttcctttaaaatttgcggttcaagctcttatctctcaacaatctaagctgaaaaatttactccatatgactcccagtacatcttcatacaatgattcaccttgcaactccagtggtgctgctcaaaagggaaagaacaacaaaaccagtgaacaagctgtgttgtattctagcaattttgatatttctacagacaatgagaaactccaagcacatttacaaagaatgccgcggatggtcatggaataagagaaattctgtaggaaaatgcctattcgaatggcaacagatcacaatactaacagcatcatgccatagttatgcaaaatctttgccaagctatgctcatgacactttatttttggactttggtattttacattagaatttcatatatgtac

SEQ ID NO: 22633 - DNA, 304 bp, Glycine max
tcttcgaaatcttcaagagcatgaatgtccgtgtggtagctgatgtgaggtggatgctaattctatatggttgatcttataccttgttttgataggaaaatcatgtgaatctttaattattttctttgtctgaaaattgaatagaaggttatatagttttttttgcccaacacttttcagttcttaattaggtttacatattcattgaacaagaaatacccctacaggacacaacaagcagtacggctcctagtttacatttgttggtgtgtgatctatgttggtgaccttccttcatgggata

SEQ ID NO: 22634 - DNA, 425 bp, Glycine max
agcttcctagaggtttctaattatatgggccattaaatctatcatatgctgacaatagccgagaagttcgtggatctcctcgggggcggagtaggtgtccaccattgctttggccttggctagcaatcggggaagttcttgactcccgttcaaggtaagagcaaatcggtccatccacattgttgcatcttgatgtaacgagtcgatcacccttcctctagcctctttttccgcatacacttgggcatactaatccgccactctatgctcgtgggccgcggccagatttagttcttcttgatacttgctgatgatagctaacatgttggtctctgtctcgcataaccgctgagacatgtttctttaggaccttgagcaaccttctactcatcttcaagatcagactgtctactcgtgattggccc

SEQ ID NO: 22635 - DNA, 335 bp, Glycine max
acaacccttcctttgtgttcagattgctttacaacaagagacccttggtctcttaatcccttttcagaaataagatgaagagaagaagaaatctctcttgaaagagatagattgaacaatggagcactcaaattattccttattgaattgcaagtgtattggccaacgaatttttaagaggataagacaattttggttttgagaagataagacctttttgttcttaaaaactctaagcaaatttgtgttccaaggcacatattaatagacccttgatggccattcaaaaaccatttgaacagatgtgactcttggaaattaatttttgaaaatct

SEQ ID NO: 22636 - DNA, 345 bp, Glycine max
tagcttgtttattttcctagataacggagggaacatgcaagaaggacgatataaaactatcctttttagtatatatacttcttattttgagtatatataactttttttaaaattttctacataattaaatataaaataaagattctttttttaattttttctctcataaaaaatcactaaagatgaacaaatcagattctctaatagaaattatttgttggtaaaactgatagattactttgcatctataatataataacataaacaacctaagaaattaggtcattttatacttcttttttactcttatatttcatttattttcttcattgtaggagcattgat

SEQ ID NO: 22637 - DNA, 467 bp, Glycine max
  unsure (1)..(467): unsure at all n locations
nggcatagtacttaaaacaaccaacaacatcatcctacatgataaatgataaaatcagagataaaaataaggaagaaaagctaatggtaacatcacttgttgttttggcaaaattaaatgtaaccactcaccaggtctgccagtgctccatttttcctctctgttatttgggataaagagaaacacattaaggtgtccacacatagtaaaaggtcagaaagcataaagggaaaaatgtatataaaaggtatataaaacggaagacatatagtaaaagaaagaaggtatcgttgtactcatgtagaaaacaaaataaaggcagaacaccccaaaaaatttaagcttttatgttaacgaacctgtactcatgaagtttttgagataaaaatcgcaactttaatgtgttcttccaccttttctgcacacaacatgtcaaanaatatatcgaaccattacacaaataaaaa

SEQ ID NO: 22638 - DNA, 377 bp, Glycine max
agcttaagctccttcaactgcacaaggctcttaatatttgaagagtatccttgtggaaccttcacccgacaaagacactgacgaaaacttatcttctcctttttggaaaaagtatgacaagctgggtgcaagtaaattttattcccatcagaccttggatgcaactgtgatcgtatccccatatcagctagatcttgacgggtattcaagccatccttcgtctcaccttgaatcttaaggagtgtcccaatcacactatcacatacatttttctccacatgcataacatcaatacaatgtctaacgtctagatcagaccagtacggaagatcaaagaaaatggacctcttctttcatatgcaactggtacttttatc

SEQ ID NO: 22639 - DNA, 361 bp, Glycine max
  unsure (1)..(361): unsure at all n locations
tcaagaattatggcctcatcaaactacttgtttcccgagggaaattctataaatagacctcctatctttaatggagtgggttaccattactggaaaacccgcatgcaaatctttatagagacaatagatttaaatatttgggaagccatagaacaaggaccttatgttccctctataatagccggaagtgcaacaatagaaaaacctagagcagactggactcacgaagaaagaagaatagtacaatataatttaaaggcgaaaaatattattacatctgccctaggaatagatgaatactctagggtttcaaattgtanaagtgctaaggatatgtgggatacactacaagtaacacatg

SEQ ID NO: 22640 - DNA, 416 bp, Glycine max
agcttctcgatatattatgtgcctgaatcggacttccgtttgaaaaattattaccatttgaatttctcgagagctttggctgttcagtttcgagtgtctcgatatattatgcgcctgaatcggacttttgtgtgacaagttatgaacatttgaatttctcgagacctttcggttctcaattaagatcgtctcgatatgtgatgcgccagaatcggacttccgtgtgacaagttatgaccattggaatttatcgagaccttccgatcttcaatttcgagggtctcgatatattatgtgcctgaatcggactttcgtgggacaagttatgaacattggaatttctcgagaccattcgttgttcaatttcgagcgtctcgatatattatgcgcctgaatcggacttccgtagacaggta

SEQ ID NO: 22641 - DNA, 259 bp, Glycine max
  unsure (1)..(259): unsure at all n locations
tctcgatatattatgcgcctgaatcagacttccgtttcaatagttatgaccatatgaatntctccactgtattccgtgtgacaagttatgaccatttgaatttctcgatagcattcgatgttcaatttcgagcgtctcgatatattatgcgcctgaatcggacttccgtgtgacaagttatgaccatttgaatatgtcgagagcatccgatgttagatttcgagcgtctcgatatattatgcgcctgaatcagacatcc

SEQ ID NO: 22642 - DNA, 417 bp, Glycine max
  unsure (1)..(417): unsure at all n locations
agcttggagaggatgcttcaatggaggaaaagaaatagggagagaaagacagaggggggagcacgaaattgaaggacgagaaagggagagaagttgaactttgagttgtgtctctcaagactctcattcatcaaagttacaacaagtgttacacatgcttctatttatagactaggtagcttccttgagaagctttcttgagaagctagagcttagctacacacacccctctcataactaaactcacctccttcataagcttctttaagaagattcctaaagaagctagagcttagctacacacacctctctaatagctaagctcaccttcttgagatgagaagctagagcttagctacacacccnctataatagctatagtcacccccatgacaaatacatgatatacaaaaagtc

SEQ ID NO: 22643 - DNA, 442 bp, Glycine max
ggagctcggggtctttctgaagttcctcagctgacttgtagtagaatgagacatattcttccacccaagacttgatagcatcccatatctctagcccatcagaagcataaggatagtcctcgatcaaaagtctaactccatggggagcagatggatccttaacagcaactcctctgaattaaaagcacccaaataacattgattagcacaagagttatatcaagcctgaagccctttttcttcttatgtcattgatgactctttatatgatgcattcatgtgttcccccattgtatgcactttgtgatttcttttgtctttttaatttactgtcaaacacaaaactagagctgaatcggaacaagaaactatttccaacacaaaagacttgagctgaatccaaacaacaaaaacaatatggcttgaaataaaaaaaataaaa

SEQ ID NO: 22644 - DNA, 349 bp, Glycine max
  unsure (1)..(349): unsure at all n locations
agcttcctcatggcnttcttgagaaactttctcaagaggcttctttgagaagctaacgctntaactactaacacccttctaataactaaactcacctccttgaaaataattacagataaaataacacaacaaatataatcaaacatcaaacataattactaataatatatagatatatatatcagggtgttacaactctcctacctttttaaaaatttcgtcctcaaaatttaccttactcaaacaaggatggatgagcttctcgcatttgactctctagttcccacgtggcatcttctcctgatgcacctccctagatcaccttgaccaacggaatctctttccctct

SEQ ID NO: 22645 - DNA, 249 bp, Glycine max
agcttgtcagaagtctataccgctgatttaatgtaattagagcctatagatttcctttctcttttgctttctgaaatctacctcattaaataaacaaagagatctttgttcatctgttcttgcagttccaccttttctcatatcattttgcatgtttttggttctttggtcttgattggtataaatatgagggtcgattctttgaggatcctaacaacgagggtttgacaatcgattttgatagagata

SEQ ID NO: 22646 - DNA, 365 bp, Glycine max
  unsure (1)..(365): unsure at all n locations
tctttagcttgcangtccaattgaaatgttcccgaccaatgcctagagtttatttaaaaaatgtttttggatgtaacacctataaaagaacattttcgaaaaaaaaatttatgatgagaagaagttcgtattgaagttgggattagaggctaagaggattgattgttgtgtggatggttgcatgttgtaatgatggagcgctaactaaatgcaagtttcgtaacaagcccaagtatcgtgcgaagactattggaacaatcattaaaaaaccagttccagtaaaggcaatgttctatttncttgttataccaaggttgcagaaaatatttgcattgatgcacaattgcagccaaaagacatgacac

SEQ ID NO: 22647 - DNA, 116 bp, Glycine max
  unsure (1)..(116): unsure at all n locations
agcttcanaaggagccataccaatactggcttggtagctattgttgtaagtaaactcaatcaatggcaaacaatccatccagctaccttgttgctctataatacacgcccgaagta

SEQ ID NO: 22648 - DNA, 431 bp, Glycine max
  unsure (1)..(431): unsure at all n locations
cttggaaaaggttgttttcaccttctcgctaagccaagctgctggcttagcgagcatccgctaagcgcaacactcctgggctaagcccgaggaagaattcagaagaagatgagctgtacaggttcgctaagcacaccgcttcatctctttaagaacaagaacaagaaatttgaaccatagaaaatcaaatctagctcctatagcaagtttaatcggtggaaactctaaagaatcatgttaaaaacatttagcataagacatgtgaggagatacatggagaaaaatgaagaaacaacaatggaagagaagggtaagcaaaaaaatgaatggaggtttaaggagcacttacttgaagctcttatgctctgattaccacttgacngaagcttgcttgtgaagcttctatggaggctggatctttgagcttcaat

SEQ ID NO: 22649 - DNA, 315 bp, Glycine max
  unsure (1)..(315): unsure at all n locations
agcttgacaagccggcttgtttaactaataataataataataataataataataataataataataataataataataataataataactttattttatcaaatcttatcttatccagatnttattctatctatattttattttattcagattttatttcgtccagattttatttcatcccatcttatcttatcttatccagattttattttattttatttatgggcttggacttaaaatagatttgtaagctttggggctgaggacctatataacagcaccaaggttntagtttagggagttttttttcggaga

SEQ ID NO: 22650 - DNA, 321 bp, Glycine max
  unsure (1)..(321): unsure at all n locations
taggccatagatacaagagaatgccctaggattctcatgagccttagggtaaattntgggcccacagactaagtatgagcccacttatctttgtacatattagattaaagtttcattattttttgtccttgtatttaaggctccattgtgtagggagggtaccctattaatgtagaatttttcagcccttgtattttatggcacctacactaatatttgtattaagggtagttttgtaatttcacatgaattaagtgcactattttatgtgtgtgttgggagataaatttaattgaattgggaaaagcccaatccaatcca

SEQ ID NO: 22651 - DNA, 433 bp, Glycine max
gatacctttgaaagaaccattcaacctaacagtgaggagcaaatgaaataatttcagtgtctaaaattattgatgcctgataacttttgttctttgttttccagagttttttttattaacttattaatcactgtagggagtatttgtaatgtgggaaacaaatactaaatactaaaataccatatatcacgtggagaggtgtaagtagtcagtttatcatgttttggagttggaacacagttaagttgatggagtattctcctcattacaagcaggcctgcaaataattaaccattttccaaaccaaaagcttgttgtatacacatctttaactgtttcttggttgaggatattttaaatgagaaattacatatgcaagaaagccattcatgctgccaataggtcagaagaaacttgtatcttgatattttat

SEQ ID NO: 22652 - DNA, 312 bp, Glycine max
acccatcacatgtggtactaggtggcggtcgggcgatggtgcacaacaagtttttccacatccacaatgcgcgcataaacccaccatcccctgttgcccacctccagctgagctcacgtactccgcacgtatcccatatccttgtttctctcaacaacgggtccccataaatcctaccaagcttccacaacatccaagcaaaacaacattcacacagcacaagctatcacagccaagcaaaacagagcaaaggcagaaaactctgccaaaacaccaaccaaaaataacggctattcccactcggagacccca

SEQ ID NO: 22653 - DNA, 400 bp, Glycine max
  unsure (1)..(400): unsure at all n locations
gcccgcttgttgtccctgtacacggttccggtaatggtggcattgacggcaccggtggtcatgctcacttggctgccaccataagtggtgacattaagttgcagccttttagagtcatcaccggcttgggtctgaacggggttggtgagagtgtcgaagttggagattgagaggaaggaagaaagagtgtgaaattgtaaaagttcaaccttttgcctgtcgttgagtgagttgaggaatcctgcttttagctttgagaaggcagaatcaggtggggagaaaatggtcaatcccccagaacctgacgtgaggagttgagagttgagttggttgatcaactgggtcgtcttcagaagccgaatcagaacaganaatctcttggccttactcacgatttgag

SEQ ID NO: 22654 - DNA, 381 bp, Glycine max
aaagatctaatagactcagcctaatgttcataagaatgattgttgcaaatagtattaagacaattctccttaagaccgataatgctaaagagtttatggggttagtgggagagcgctctcaaacagctgataaatcttttgttgggacattaatgagtatgctgaccaccatgaagtttgatggttcacgtactatgcatgagcatgtcattgagatgataaacattgcaacaagacttaagaccttgggaatgactgtgaatgaaaacatcgttgttcagtttattctgaactcattaccatctcagtatggcccgttccaaatgagcaataataccatgaaagataaatggaatgtgcatgaattgcaaagtatgtttg

SEQ ID NO: 22655 - DNA, 436 bp, Glycine max
agcttaggaggaataaagaatattcactgttagcatttctgttaagcagttaagcagttacgtaataacagaatgtataaaatgcaagaaaaaatgctcttgaataatatcagaaaacgcattctctagttccttcctttatctctctatctctctacccttctccttccacggaggttgcttgggcctcgaaagccaagcctaacattggtgctttcattgatcctttccgccatggccgaagctacatgatccaagaccagtgttgatcgctgggaagatgcattcgtgaagctttcagcatcaatgtcttcaaagtttgacgagctccttaaccgtataaaccagttagagatctcgcataccaattctcatgttccataggcatttcctggtgcttcattagctgcaacggcaaatgcagcttatcagttga

SEQ ID NO: 22656 - DNA, 437 bp, Glycine max
  unsure (1)..(437): unsure at all n locations
tcaaagagtcatagataattcanaacattgatgganaattggcaaatatggcaattcaaagatatattaatgacacaaagtaaagcattagaattatcaccatctagaagataacctaagttgaatgcaacaagcatatgcagaatattaaaatagaaacacactttaaatgttcaggaaattgtacacatagcaactcaccatgatatgtagttttatactaataaatatataaatattcaggacaatattgataatcttttggatcaatgtaatgtttaagtagatgttagagatagggggagcaacatgaagactaaactttggagcttgaaaaagttttatttttttacatgcccaactctttgggtgacatttgtattgattgttgcatcttagtctctatcttttcatatgtacatcatgcatcatcatgt

SEQ ID NO: 22657 - DNA, 417 bp, Glycine max
  unsure (1)..(417): unsure at all n locations
agctnggaggactatgttcggagttgttgttgaacttgcacctacacctaaacctccactttttgagctgacaccacgcctgttgaaccaatacctccacctattccttcttcacctccatttactcaacctccaccaccatcattatttctctcttcaaacccatcgcctttttgcttatgacaaaaaaggagagaaggagttttgattgtaagagcaaactcttgatagatgaaaaaatggccttggagtatcttgattttttcactaccatatattagcattttttagttttttgatttacacatatatcatcatcatgctatgctaaactcaaggggagtttaaatgcattacacatcatactgatntatgttttgttactcanacattatattatttgtcattataaaaaat

SEQ ID NO: 22658 - DNA, 449 bp, Glycine max
  unsure (1)..(449): unsure at all n locations
ngatacatgatgatgtactagatgagagtgaccttcgacgaggtaggcttgtgatttctctttatatactcatttagttttcctgacttcactttttatttctgattatgtgtcttacttggctagtgcatgctataaagcaattttgaatttgctcatacaataaggttgttttgattttaagctgggataaccatgttacaatttatttgatcaagtatttcctttacacgtcatgtttggtatttgcttacttagtgatgattttctgcatgaaaagactatgcacacactttatctaaaaatatctctttactgaggagactaagagtgagaaaataatagagaactaaagcagattttggtactgaaagaggaaatagtgcaaaatagaagcttcttcatttttgtgatgtcttggaaaggacttgctatntttacatgttaat

SEQ ID NO: 22659 - DNA, 340 bp, Glycine max
agcttcacttgaaattaagtatttaattatatggttcttgatttaatcactattttctctccccctttggcatcaacaaaaagccaaactacgtaagaaatataaaacatacataaatgactaatcatacaagagaatataaaataattaaacaagataatttaactattcatcaaacttagaaaggtaagaaatataaaaatcatacataaatgacatacaaaataatagaaaacaatcaaacaagataacttaaccattcatcaatcttagaaagataatacttaatagaatgtcatataatccagaaagttattcatattaaccaaataaaactact

SEQ ID NO: 22660 - DNA, 443 bp, Glycine max
  unsure (1)..(443): unsure at all n locations
gcttcttatnagctgaaccattttatcaataaacacaagttgagttttattcagaaaattagagtttatctcttttatcttagtgagagtgattctcctaagttcttgagtgattcaagaacaccctggctatatcaaaggactttcacaacctttgtgtattgccctcgccggaaagagtgattcttttcttcctttcatcttcaaccttgttctttcataccataattccagaaaatccacttctgcccagaattatctcgaggccataactcccattttacgcgctcaaattaagtgattcttgagcctaaaatgaatttcaaaacgagatctttcacctcgttntggaatcacctcatttggagccctgtagctggagttattgttatttctatatttctggccaaccaccacttaacctacgttttatcatatcattc

SEQ ID NO: 22661 - DNA, 385 bp, Glycine max
  unsure (1)..(385): unsure at all n locations
catgccagcagaagtgaaaaatatggaagagtctttcttcctacttttattcgttgaccacagagtggtacctggaaacatgtcgcgggggtcaagagaccttggggacgtcatgtggggtgctattgcccaaaaccaagcttgaccaatcccaactcaacccgggcatattcagtcagtgagaacctctgatgtacctaaacaggcgaggtcctggcagtcaaccgataaaagaacaaagaccacaaagtaaggaggcttgtgtggtggctggccagctatggatcttgagtgatatttggaatatggcctctggtaatcgattacaaagggtgtaattgattacaaggcttataaattgggtcanggaagtgagatgacctat

SEQ ID NO: 22662 - DNA, 337 bp, Glycine max
tgtattgtcgctcagatcttgactagttataactttctgaataaaatgagtttttcctatgtttttactccaaaagttagtgcgaatcaaatcactcccacattttatctctagcatgcattcattattctttacctacacctcacgtttggttttttaggaaatacaccataactaaacgcgccccaaggcatccctatcgcaccagatccaaatctataacgatgggtgatcaagaggagacacaggaacagatgaaagccgacatgtcggctttgaaagaacaaatggtttccatgatggaggccatgttatgaatgagacaactcatggagaa

SEQ ID NO: 22663 - DNA, 429 bp, Glycine max
  unsure (1)..(429): unsure at all n locations
agcttgtangattatggtgtacccatcacatgtggtactangtggcggtcgggcgatggtgcacaacaagttttccacatccacaatgcgcgcataaacccaccatcccctgttgcccacctccatctaagctcacgtactcccatgtagcccatatcctcatttctctcaacaccgggtccccatcaatcctctcaagcttccacaacatccaagcaaaacaacattcaaactgcacaagctatcacagccaagcaaaacagagcataggcagaaaactttgccaaaacaccaaccaaatcacagcttttctcacttaaagaccccagtaacaattccttcgttctggttcattaacccgtggatcgactcgaaaatttactggaagtctctaatacttaagcctacattttgaccggtgggatctac

SEQ ID NO: 22664 - DNA, 262 bp, Glycine max
ctaagctttccctatttgctataatagggggagaagtgaagaagaaaagggttcagcctcttatgcacttctctctctctcgaaattgctgaggaaaattattttcgtgaagaaaatccaagccgaggcgccttcgtaacgtttccgtgagaaattacgcgaagattctcgaccgttcttcaagattcatcgttcgttcttcgtctcttcaatcttcaacgggtagtacctcaaaccgagcttttcaattattctatgtacc

SEQ ID NO: 22665 - DNA, 271 bp, Glycine max
acatcagaacacatgtcacacatatgattcatctagataacgggcaatgatattgatgtcttcctttgggtaatacaccaacacacaatatacgtccatgatgatgctaataaaattcttaacattaataggcgattaaatatgcttcaattagtagaacctatttgctttgggatataagtaaaactaatgatacacacgaaccacctacgattatatttattattatgagaacaacttattagactttgtgcggccataaatgccttat

SEQ ID NO: 22666 - DNA, 406 bp, Glycine max
tcgtgctatgctgctacactagtactgtgccgcactgccgttgcattttattgaaagtgaaacaatttgaagtttgaagatggatgactcattttgaaaggtttggtggtgaccgcgcaactgttttctgacgatggcgtgggcgcttttttgatgactgtgtgtggaccttgtttgacgacaacgcataagctgtccgacaacgatttagaagcccttcggtgactgagcgaacactttccggcatacagcatagtcgcatctattgatttcttattttgttttcttatgcacgaccggttcggtcgtttgctggtaaaccgcttactgtcgggtggaccggatgtaccggtcaattgatgaatgatcaaagtcaaccctggtgccctcctgttcccgtccaact

SEQ ID NO: 22667 - DNA, 400 bp, Glycine max
  unsure (1)..(400): unsure at all n locations
agctntaggggatcattatgttggacttggttttccattgaaataaaccctgttatgcactgctgattgatgtatcttgcagaaacgagattcatttttgtttcaaatgtattcattttatttcattttgcagaaacattaacatgattccattttatttcaaatgtaatcattttccatcattagtttagcggaaccagtttcgttaatgatcaagattcaagtttcaatttgaatagttttatcttttttttttcttttggtgaattttgtattggttctaaattctaacatacggaaacacactgactaacactaaaaagtgactatgaagatgtgatccanaatttgtgacagtagggatggcaattagatcgagctactcaatagaattgtgtgc

SEQ ID NO: 22668 - DNA, 360 bp, Glycine max
taccaaaggattattgcataaactaaaagactaaaacaagtgttttactcaatcataattgctcaactagcatatgggaactaaagaatcccccaaaataggttacccatcaaataagattttaatgacattagaaagaattaaactctgaatctataaaaaaagatgaaagttaacactagatctttaactacttattgtaattcacacaggcgcgtaaataaacaagaagtgggcccttttattgtaagcccagttaagaaaggaaccagacgtggtggacaagtgtacgaactggatctcgagcctaaagaaaaatataaggtaaagaaaatcatataacatgtacctgaaacaaat

SEQ ID NO: 22669 - DNA, 324 bp, Glycine max
agcttctcccccaattttctataaatagggggagaagtgaagtgaaaaagggtttagccccttaggcacttctctctctttcgaatttgcttggaaaaattgtttccgtgaagaaaatctaagccgaggcgcttccgaaacgtttccgtaaggaatttcgcaaaggtttcgaccgttcttcgacgttcttcatcgttcttcgatcttcaacgggtaagtacctcgaaccaagcttttcgattcattctatgtacccgtggtggtccacattgtgtttcgtggatgtttattctcggttcatttactttttatacccctttttga

SEQ ID NO: 22670 - DNA, 244 bp, Glycine max
ctcagcttcaggtcaatggacaccggctgaaaccattcctcacaaatccctccttagtggatgtagtggtggaggatacctccctacttctcttccgccatgacttaggaagttttctttttctgtctccttctttacttttcttgcacttgtccaaatttattgattgctttgattgttcttgatcttttgattgtgctacattgaggacaatgtgttgtttaagtgtgagggggagggggag

SEQ ID NO: 22671 - DNA, 323 bp, Glycine max
  unsure (1)..(323): unsure at all n locations
agctnggacttcctgtgttttgggaacctctccttcctcaggtgtacccaaacccaatcacctggttcaagcacgactttctttctgcttttgttggcttgccttgcatagctcgcatttttcttttcaatttgaaccttcacttgctcatgcaacttcttcacatactcagctatagcctgtgcatccttatgcttaaacatagcaatgttaggcataggcaacaaatcaagaggagtcaaaggattaaatccatacactatctcaaatggtgaacaattagttgtgctatggacagcccgattataagcaaactcaacatg

SEQ ID NO: 22672 - DNA, 246 bp, Glycine max
  unsure (1)..(246): unsure at all n locations
tcagctgtggccatattgacgtcccttagttcatcatactctnttcagactntgatggctatggacttgaacttctcttcgactacccgggctctttcaagctctgcctttagggcttgtacctcatcactttcttccgaagctttaacctcatcgtctctcacagtctttagatttgggagccaatccaatccttgtgttcggactctcagccacttatgatagccgccgatgatcccattactg

SEQ ID NO: 22673 - DNA, 350 bp, Glycine max
  unsure (1)..(350): unsure at all n locations
agcttactntgaaatttgtgatttaatatgatgtatgctagtttatatatgtagaggtagctatctatattaataattcatgcaaataatattgtagagtgttatagtatgattccaaaaattattaacgtgtgtggagtcttgagaatactcgtggttaaatttcatgaacatgtgtatgttataccttatgaatatcattgggaatgttatgagacggttgatgtgatgctattgaatgctaaagcgtggacatgatattcgattgagaataagcggatgtgtctaacacttgatgtacatttattatatcgtgagctatgaaatatacaataacccgactagtgtta

SEQ ID NO: 22674 - DNA, 276 bp, Glycine max
  unsure (1)..(276): unsure at all n locations
ccctnggacgactatctngcaagagtctacaggacttgccaattatacatggagtggcaatacagtgatgctcgcccaaactcaatgaatgaccgatactctcaaacatcatcctttacccattcaaaaccagcaacgacaggggggactatggcgacccaatactattgctacatcgcacatgggaggacgccctaatgtcttcacaaccacttatccttgctcccctagaaacaaaagggggagaatcatattgaccatgacagatttctcgac

SEQ ID NO: 22675 - DNA, 377 bp, Glycine max
agcttgaatttccttttagtatggaatctatccttcctaagctggagccaaaccctgtcaccctcattaagaactagctcttttctttctctattgcctttagttgaatacacctttgtttggttctttatttagttcttaaccctctcatgcaacttctttacaaactctgacctagattccccttctttatgtataaaagaagtgcctagtgggattaaacccatagacaaccttaaaaggggactgcttggtggttctatgaacccccttgttgtaggaaaattctacatgaggaagatactcatcccaagacttatggttgcctttcagaagatcccttaaaagggtggataaagacctattcactacctcta

SEQ ID NO: 22676 - DNA, 371 bp, Glycine max
cttgattgcatgatgttaggttaattgttagttagaatagtgttaggggttttgatttgcataaaatgtatgtcattttgacatgttttggttaggatttgatggtctaatagaggcctaagttgaagggctggaaaagccctaatttttctggaaacggcgatgaacatgctaagcgtgccttgctgcgctaagcgagttcatcactttttgataaatatttgggtatccagatgaacccgaccctgttctgctaagtgagttcatcttttctgatgaatgattgaatgtttatgaactcactaagcgcggctgtgctctaagcgagtaatgtgtttagacactagaatattttcattgcttttgtgtcg

SEQ ID NO: 22677 - DNA, 438 bp, Glycine max
  unsure (1)..(438): unsure at all n locations
agcttatcccatgcctccttagcagatgttgcataagaaatcttctcgaatgcatcattttttaatgcttgatagatgaggaagagagctttattgtctctctttcttgagtcctttaatgtctccttttgtacttgggatagtgaagtctcatcttgtgactccttttagcatttttcaaccatttcccaaacatcatgtgctccaagaagggccttcattttgatgctccaattgtcataggtgctcccctttagaagtggaacttgaaaggataccgcttcattgcttgccataactatataggaatttcttatcagaacctaagctctgataccactntgttggaaagaataaggttataggaagtatttaagagacatggaggaggggagaatatctgaaagagagctagttttatgacttgagaaatgtttt

SEQ ID NO: 22678 - DNA, 339 bp, Glycine max
  unsure (1)..(339): unsure at all n locations
tcgaanatgaatcgaactgcatccatggattctgttctccatttgttgatattgttttgttttctgtctatatgtaatgattaaaactttgttttgtagtcttaattgcttaattatgttttgatttcatgttttgaaattcaatattgtcttcttgtgtttgtaggggtctaatacagttagttaagtaagagtgtgtaagttgttgtaagtccggtgacatcatatntaattttccattgataaaaaaaataatatagtctattgttaatggtattagtatgatgaaattcaaataattgaacttaatttgaggttaattcatcttaggttgaaatt

SEQ ID NO: 22679 - DNA, 421 bp, Glycine max
agcttctttcttggggagttctactaaacaatcttgatgtaatactcttactatctatttaatgctatttttctgtgttcattgcttctatctatgtttattttacatgcttgtggcttgatcacccatttgtatgtgtagttaggctttttaatattgaaaaatgctttaaaaccttagaacttggtagagcaagctagaaatctgtatgtctaggaatggagtgcagtgatctagttcatattatgttgtaggcttaatgcaactcttttagaacaagtttgttgagggatcaaggatgaagtctaaagagagttaggctcattcatgtgaggaatcatggtttgagtagtttctcagcataagaacactaagataacattaaataaagaaaaataccttttaaacatcaagagaaagt

SEQ ID NO: 22680 - DNA, 459 bp, Glycine max
cttagcattaagttgagtaaattgtagaaattgttccaccccgttctcatactcgtcactgattcgttttgctttcatccaacttcgatccatgtttcatctttgctattcatgacaatcaataagttatctgtcatgcatgataaactcacttttttgcattaaaggtgtggccttatcctattcaggaagacattttttatagttgaatcaaaggtacaggtaaaatctctttcaagtgatttgatgaaattttggcagcattttgtattggtcttcaggtacacaagatgaaggtggtgaatgtgtgaacaatcaccgcagtcaaatatgcacccgaagaacaatgtgaaatgcagtatactgaaatttcttcaaatcatttcaaagatcatttacctctacgtatgattgaactataaaaagatgtcatcccaaaatgtccaaacaaacaattca

SEQ ID NO: 22681 - DNA, 422 bp, Glycine max
  unsure (1)..(422): unsure at all n locations
agcttataataagaaagtgaagtcaaaaacttttaatattggagatttagtttggaaggttatcctgcccatggatagtaaggatcgagccttgggcaaatggtccccaaattgggaaggaccgtttaaaataattcagatttattcgaatggtgcttatgaggtggaggagctaacccctcagaaacgtactttgagtataaatggtaaatatttgaaaaaatataaaccaacactgctcgaagttaaaataagcatagaataagagaaatactggaaacataaaaatggcgataacagtaaattgccacaaaagggcatttgtcaatattacatcaaanagtagaatcgaaatacagaattcgaaataaagaaatcacaagttctactaattcatgaccaaatccccatacagcttttta

SEQ ID NO: 22682 - DNA, 360 bp, Glycine max
attttggatatttgacctagctaactacccattcggtatacttgctctactaaaaatatgtctttcaaagatgattcttggaggcttttaaagacggtttagaattgtctttgaagctagcgtcgtggaaagtcaattttttccatgacggttttgtgactatctttgtaaggtgtcatctttattatggtttactaataatctgtcttagaattagttttaaaaaaaatgaaaaaaaatgattctaagacaatttttgaacaaaaattgtgttagaatgatatattttctaagacgattttgtccaagaaaagtcttagaatttttttttaaaaaaataaaaataaaaattgagaattc

SEQ ID NO: 22683 - DNA, 320 bp, Glycine max
  unsure (1)..(320): unsure at all n locations
agctngcatgcctgttaaactgtttccaacttcttcctatcttcagtgtatttggtcatcactttttcaaagagtagtttgcacttatgcaccattccataacaatttgttaggtgtagttcgttgattctcttctaatgaataaatgcagcaaactctntgcggaagttctacaaaatgtgaaaatagataaaacaaaaagacatttagatggttgttgtcaaagtaagtacaatatattcaattgcatgatttgcaacatcagaatgaaaaaataaataacattattaaagttaacgatgtgggcttacaattttgct

SEQ ID NO: 22684 - DNA, 390 bp, Glycine max
gagggtgcgtaccccaccatcttttcatagtagagtaccgataatgtgtctaccatcacgattatcgtctccctttttgcacatgttatgtagttgcatcctatccggaactatatcagaatagtactgatactgcctaacgaaggcaaccattatgtccttccaagtatggactcgggaaggttccaagttagtgtaccaggtaacagctaccccagtaagactttcttggaagaaatgtattagcagttcctcatctttgcatatgcccttatcttccgacaatacatctttggatggttcttggggcaagtagtccccttgtacttgtcaaagtccagcaccatgaacttgggaggggtgatgatattgggtactaggaacaactct

SEQ ID NO: 22685 - DNA, 376 bp, Glycine max
agcttgtcacccgattaaataaatagtattgtatgtagagtctattattatcactatgcactaatcaacatttgaaaatcgctgcagttatcagacggtccatattgaatcccacaacacactaatagtgactggttatcaattgaaatgagtcttttgctataaatacaacatatatcttttccagcgagctgatgtctttgtttacacgtgacaaagttggtgttagagtactaatgacaagtacttttataggagactttacagttgtcttcataattataagcacccatagcctagcgtacgagcatagtgtaggttgcatgcatacacgaaattgaggcgcttgaaatgtaaattttattgggtactcaaa

SEQ ID NO: 22686 - DNA, 322 bp, Glycine max
  unsure (1)..(322): unsure at all n locations
ttgaaatggtgctaaccaagcgacccgtgcgtatgcacgggttgcatactagttaacataaaatcacaatatctataaaccaatatggtcagtctagtttgcataaggtcattgaagcaaacactattaccattgttgcgcatgttctaaaaaacaaaaactaagcatataatgagtagctcactctatgattagttaaggctcgaattctcacaaaaggaaacgtatctgatcttctcttaaaagaaattgtatctataagataatatttgtgaaaacaatacattaactagtatnttaacgtgaaattatatcaattaaa

SEQ ID NO: 22687 - DNA, 359 bp, Glycine max
agcttgagatgaggaagtgtagaagggtgaaacttcctgcttttattcgttgaccacagagtggtacctggagatatgtcgcgggggtcaggagaccttggggacgtcaggtggggtgctattgcccaaaaccaagcttgaccaatcccgacccaacccgggcatagtcggtcagtgagaacctgtgatgtacctaagcaggcgagctcctggcagtcaacaaataaaaggaacaaagaccacaaagcaaggaggcttgtgtggtggttggccaactgtgaaacttgattgatatatgggatgtggcctctggtaatcgattaccaagggtggataatcgattacaaggcttaaaaatg

SEQ ID NO: 22688 - DNA, 309 bp, Glycine max
  unsure (1)..(309): unsure at all n locations
ngaaggcaaactggatgcattggttaactnggtaacccaactggccttgaatcaaaaatctgtacctgttgcaagggtttgtggtttgtgctcctctgctgaccaccatacagacctttgcccttccatgcagcaacctggagcaattgagcagcctgaagcttatgctacaaatatttacaatagacctcctcaacatcagcagcaaaatcaaccacagcagaacaattatgagctctccagcaacagatacaatcctggatggaggaatcaccctaacctcagatggtccagccctcagcaacaaca

SEQ ID NO: 22689 - DNA, 416 bp, Glycine max
  unsure (1)..(416): unsure at all n locations
agctaggaatattgtaattgctacaattgatggtgttgtcaggttgtgtttggaaggcagccaactttctggtgagaacatggagatggtggtcttgaaaattatccagctagagtgtggaggtttgttagcttaacggtgatgttatggaggtgaaggtcgtccatgattgtgaagatgggttggggaggagagtaagcatgtgaaagcaccaattgatagagtgctaattctactctaccactactcttaagaaataccattatagctacagataaaaaagctaaagagaataaaataanattttgatttcactgctcattaaattgcacaccatgtattatataggaaatcttatgaatgacaatcatacctgtgtaaacatcttacattttatggaacagaaaatattacta

SEQ ID NO: 22690 - DNA, 428 bp, Glycine max
  unsure (1)..(428): unsure at all n locations
tcacatacttcaatttcacggacttcttgaaatctggaaggttccgcaatggtggtggcatcaacggtgtgtctggttatgcctctgccatatttttcctgttcaaaaatttgatttgaatacatttagctacattacataacttgatagttgatacgatcaaattgagcatttatgcatggatacagctgaagcaatttcttagcttacaatcaagcccctgaaatatatagatatgtttggattgaagtttggaaactacttttgtaaaatttcaatttccaataacaaatttcaatacacccaaagaagaacgaaataattgttgcatccagtgcaaaagtacctttgggctctttcaactntaatccaaaatacacattaatccttttccgtaacaacttttgcttgaaaaatggtaaaaaaaa

SEQ ID NO: 22691 - DNA, 409 bp, Glycine max
agcttctcaaggaggtgagcttagttattagaggggtgtgtgtagttaagtctagcttctcaaggaagcttctcaaagaagcttctcaaggaagtttcttaaggaagcttctcaagaaattttctcaaggaagctacctaggctataaatagaagcatgtgtaacacttgttgcaactttgatgaatgagaatcttgtgagacacacttcaaagttcaacttctctccctcttttcctccttcaattttgtgttcccccctctctctttctctctctctttcttttcctccattgaagcttcctctctaagcttcttatccaaggcactctcttggtggtgaagcttcttcttccatagtttattccctagtggatgacgcctcttctcacctcttttcctttatcttc

SEQ ID NO: 22692 - DNA, 421 bp, Glycine max
  unsure (1)..(421): unsure at all n locations
tgaacaaaagaagtggaatcatgcaacaaaatgtgaaacaatactacaagatgcctatattacctttcacttacccttttctcaaattggtgtggtattggccatcactcaaaatgactcttcattcatcttccgattcgcacgatcccaaatgacaagatgtgaatgcatgcatgcttatgattggaagttaagtgcaacaattaaacaagtgttatcatgttcaattttacttaaacgcttacgacaccccattaattgagccaaatggctccggattcagtgggcaagatcgagagtgtatgttcttaagaagtaaaagacacaacacaggaggttaagatgcaaatcattaatccacatttattaatgctgtgatcatggtttataaaagattttngaatttggagatcccaatgag

SEQ ID NO: 22693 - DNA, 434 bp, Glycine max
  unsure (1)..(434): unsure at all n locations
agcttataagaacaaaattgcctcaatcatttccaaatatgcatgtgaattangaagcaccaacaagaatcaagccaaggctattgtgcaagcaatcaatggggcaaaacacaccaaatgattatgatgatgtatggctcaaattctcacaaaggtaaactcatcactttcaaattgagcttttaaaacgatcatgatatgtagaggagaatcaaagatttcaagtcacaaaatgtcaaaaacttttattttcaaaacaattacccatttcttgaacctatcctataattcaaagaaaaacatgcaaagtcgtacatgcgcacagaatttgacccaactatttaactaaaaatccgacgaaactaacaacatttgacaattaacacacttgacaaattacaaacccacaaacttgcaaaacaaaaacactcccc

SEQ ID NO: 22694 - DNA, 433 bp, Glycine max
  unsure (1)..(433): unsure at all n locations
ntatacaccttgtgcagttatcctctattcggttggacctattgtttcttctaatgttcttttagaaacaaaatgcaattgtcttaaatctcatttttggttatgggaaattccatctgcatgctttcattccccataagtcgcattgtttttttttaaaaatgtgtgttcttctgatcggtttatgggtttgtttctttactaagcgtgttcacattttagtgagagatttcaagactacaatgtcttttgttttacatttcaagacttcaatgtcttttgtctttatattttcaagacttcgatgtcctctatctttacatttcaagacttcaatgtctttttgtctgtacattttcaagacttcaatgtcttctgtctttacatttcaagacatcaatgtgttctgtctttacattctagagacttcaat

SEQ ID NO: 22695 - DNA, 348 bp, Glycine max
agctatatgaaaaacatttgtacatgtgatgatgatcactataatgtccaacaacgaatgtcgtgatcacaatgcaaacaggaaaacaaaaagtgcctacaaattacattgaacattgaagattacacatctttaactaataattgttaagcaacaacttcatgaccattgacgcagggtctaagatccaatggcttcatttccctaaaacaatattcaaccaatcaaaatgatatagaataccactcactacctctacaccaaacaagtacgcgacatggaatgaagacatgctaattcacagatagtttttcctcagttcatattcatctcattacaactagaagt

SEQ ID NO: 22696 - DNA, 337 bp, Glycine max
  unsure (1)..(337): unsure at all n locations
tttttgtaataggattaaatactctgtatcccttttggtttggagaatatccaacaaaaatgtacttttctgcccttgggtccagtttagaccgagatatggagggtgtatgcataaaaacaatacaaccaaacacttttaaaggcatttcagtatgtaatcgacatgctggaaaaattgttttgaaagtgtccaaaggtatgcggtaatttaacacacgagtgggcattctatatataangtaggttgctgttaggacggcatccccccacaaatattttggaacattactctcaaacatgatggcacaggctacttcaaggagatgtttattttt

SEQ ID NO: 22697 - DNA, 304 bp, Glycine max
  unsure (1)..(304): unsure at all n locations
agcttgtaagactacttcagtctgatcaaaattatttgttttaggaaaatttaatttaaccaaaatatgtacgcttttattattcttgttattgcaaattatgggatacaagctttantttgtaacgccataaggccacttgtttgttcttccgttgaagtggaggttctatttttctcaaaatcntcgtagagaaaatctactattttttcaattcggcttaatctggtttccaaaagagaaatcctgttatttataactttatttccagaatcattttcctttttaaaatcaagaaaatcta

SEQ ID NO: 22698 - DNA, 393 bp, Glycine max
  unsure (1)..(393): unsure at all n locations
tactttcttaaagtagcatatgcctcaacctttacaaagggatatcccgaggaatagaaataagtatggatatgtacaaaaaggtcaaacagttcaacaatcttaaactccagtaaaagcaaatgttatcacatacattcaatacaatataataaatgttttactaatacatgttaatgaaacttctcacatacacaaaaaacattccatcatttgctcctcgtaaaaactccagtaaaatgaagtgtttagtttgttttcctttatatatttcattgatatgttttcagtaaaaattacaaaagtttcaccttgttgtcattcctatngtgtttcttcacaaatgtttgatcctattccctangttggatgcattntaataaaagcaatcac

SEQ ID NO: 22699 - DNA, 439 bp, Glycine max
  unsure (1)..(439): unsure at all n locations
agctntgaggttgactattagtcatccatttaaaacttgagggttaagaaataaaaatctcaatcttctggcaatattaatttataaaaggtgaccagtgttattcactttctctgttgtcttttttttttataggaggagaggaaaaggttacttatgttcccttatcgggatgaattgctcgaagctgttcataatcaccaggcatggtcccccctcttagccctctattcctttctttccttttcccatatttttttattctattattttttatattttggtgttgacaatgaatgaatttcttctctgttgtcagtgaactgtnttatatttgtattcatttgatttcattacctttttattagtattttcttgcatacagttgtatattcattcaaattaactttgaataatctctttatatgggtacttgtaa

SEQ ID NO: 22700 - DNA, 362 bp, Glycine max
  unsure (1)..(362): unsure at all n locations
tatcacgatacanagctgttgaagagagacttcaaaccaggacaacatgtattactttttaattcaagattgaaattatttcctggtaagttgaaatccaaatggtctgaacctttcatcatcaggaaagttcggccttatggtgcaatagagttgtatgatccacaatttcaggaccttgactgaacatggttggtgaatggccaaagattgaaactgtaccatggtggagagtttgaaaaggcaaacaccatcttaaatttgatataacccattgaggtatatgcgtcaggctaatgacgttaaaagagcgcttcctgtgaggcaacccaactctgatttctttcattttgtttttcatg

SEQ ID NO: 22701 - DNA, 441 bp, Glycine max
agcttatgtatataaatctatacgatggtaaagagtatatatgtggggcggcctggcctctatttgataggactcatatcgtgatcacaacattcgctactgcacattgttctggtcatcaccactggtaccaaactttttcataaattttttatgcttaattttgttacggttgtttttgtatgttgatttatggcattaattagatacaagttttgttcataaagagtgaaccttagattctcgtttgagattgaatacaatgatttctgcggacagtttgcattaatcattgtattgaatcttgaattgtccgtttagacagtttggggagactcatatttttatggtagatccatgttttaaggttaacattattttttttaatttgattatattttggtacaatgcatttctagttgttctctgagtgcatacttg

SEQ ID NO: 22702 - DNA, 411 bp, Glycine max
ggattaacactatgatggacttacttcctgatgctgaggtactgctttgtaaagtatatttcaggggttattgggatagccatatattacacctatgttcatttgttcgggttgcgttattgttgctgtatatctcatgcaggcattttccaagatccatatttcaatccttgattccaatgatcctccccaacatgaatctgtaagctgaaattatgatgctcacttttcaatctgatatttgttgcggctatcccattttaaaattgcaccaatgtcaactttcacttcaacttattcattggtgtatcttttatgcagcaatccctgtctagaacagcagatcatgatcctcttctcggactccccttaacaccaacaaagcggcatacattctaggaatgtgatgat

SEQ ID NO: 22703 - DNA, 438 bp, Glycine max
agctttcaactttcctattgaattagctataaacctttgcgtgaaattgatcttcccaatccgactttgaagctccttcctattctgaggtggccttgcttccaacaatgctttagctttatttttatctacctcaattcctctttgatggacaaggaaacccaaaaattttcctactaatactccaaaagcacatttctcatgattcattttaagcgtatgaaacctcatccttaacaaagaatcttttagatcgcccaagggctcctcaaaatcgattgactttgcaaccacatcattaatgtaaacctccaccaatttaccaaccaattcatggaaaatagcattcatagcccattgataaatggctcctatgttctttaaaccaaatgacattaccaaccattcatagatcccaagcgtttgtggacatcgaaa

SEQ ID NO: 22704 - DNA, 436 bp, Glycine max
catggtgaatcaagagtgattcaaagatgttttgatgataacaaagatgatgacaaaggtgatgacaaaaagctcaaaggtcaatcaaagaatgagttcaagatattcaagatagaatcaagaacaattcaagattcaagaggaaagttgaattcaagaatcaagaatcaagattcaagagataaatattcaagactcaagattcaagaatcaagagaaggcttaatcaagataagtatgaaaaggttttctcaaaaatcgagtagcacatggtttttctcaaaacatgtttaccaaagagtttttactctctggtaatcgattaccagattgctgtaatcgattaccagtagcaaaatggatttgaaaaagttttcaaactgaatttacaacgttccaattaatttcaaaaagctgtaatcgattacaatggttt

SEQ ID NO: 22705 - DNA, 424 bp, Glycine max
  unsure (1)..(424): unsure at all n locations
aatgcaacaatgtaactctttatatttaaatttgaatttcaacgttcaagggcactggtaatcgattaccaaaacattgtaatcgattacagncttttgaaaatatttggaatgttgtaaattcagtttgaaaacattttcaaactcattttgctactggtaatcgattacaacaatatggtaaacgattaccagagagtaaaaactctttggtaaaggttttgtcaaaaactcatgtgctattcaaagttttgaaaaactttttaatacttatcttgattgagtcttttcttcattcttgaatcttgatcttgattcttgagatcttgaatcttgattcttgtttgtaggctttcttcttgagtcttgaattcttcttgattcttgaactctctgacttgtctagattttctgagatggatgt

SEQ ID NO: 22706 - DNA, 331 bp, Glycine max
  unsure (1)..(331): unsure at all n locations
atggtcataactnttctcacggatgtccgattcaggcttataatatatcgatacgctcgaaattaaacatcggaaactctcgcgaaattcaaatggtcataacttttcacacggatatcggattcgggtacataatatgtctagaagctcgaaattgaacaacggaagtgcttgagaattcaaatggtcataacttttcaccggatgtgcaattctggcgcataatatgttgagaggctcacaattgaacaacggaagctctcgagaaatataaatggggataactcttcacacggatgtgcgattcaggcgaatcacatatagagacact

SEQ ID NO: 22707 - DNA, 363 bp, Glycine max
agcttatatccaacttttatcctatcctatccttattttattttcatatcttttcctttcttatcctatcctagcttaaggtgagttagttatgtgttataattttatgagcggaaaacaaatcaagtctaaaaatattttgatgaaaaagctaaagttcaactactataatgttatataataaagttgttttaaaagacctaaatatatttattctttctaattttatttaaacttttcatatattttttgattctaaaaataaaagacaaaataacgcggataatttcattagtatatattttactttgaaattcatagattacaaaaaagacttattatcatataagacttcttttatta

SEQ ID NO: 22708 - DNA, 73 bp, Glycine max
actactgtcgttgtgaacaatggatccatttggaaaaataaaacctaatgtggagttcacaactgtctgactg

SEQ ID NO: 22709 - DNA, 377 bp, Glycine max
agcttcttgaggaagttacatgagctgcctctgtaaaaatgctgcccagccttcgttaaccgttggatctttttgaaatatggtctgcagcttcaaaagacacttttccatgatttgaccgttgggatctttgagaagatgtctggagtatgcgtgaagcttccattcccgagagcatttctcatttgagcgtttcagcctttgctttcgtgtagcttaggaaaaatgccatttcttctcctttcttccttccaaaaccatttctagcgtcccaatcactttctccatcacccacaaccaccattagccaccacaaatcgtctttgttctccgttgaaaccccacaccaagaggaacccttcaaccgaagcggaatc

SEQ ID NO: 22710 - DNA, 336 bp, Glycine max
  unsure (1)..(336): unsure at all n locations
tcatgcaatntacgatattatctctgcaaagggatttgggagagagaatagataaattaggttcttcatcatgagggatcagggttgagtatgttagtagatataggtggagaatggaatagtattaaatagtgaaacacattaatattgcataaaggataattaggcatgctaggccccaacatattttaaattctaaatttatctttttatcatcatttttatcttatatttttcttatcttttacattaaaaatctcttatttattgtattttctaatctcttatcttttattttaaatctttatcttatctcctacctctctttatactcta

SEQ ID NO: 22711 - DNA, 367 bp, Glycine max
agcttagctacacacacctctctaatagctaagctcacctccttgagatgagaagctagagcttagctacacactccctataatagctaagctcacctccttgagatgagaagctagagcttatctacacaccccctataatagctaagctcacccccatgccaaaatacatgaatatataaaagaaaaaaaccctactacaaagactactcaaaatgccctgaaatacaaggctaaaaccctatactactagaatggccaaaatacaaggcccaaaagaaagaaaaacctattctaatatttacaaagaagagaggacccaaccttggtccatgggctcagaaatctaccctggggttcatgagaa

SEQ ID NO: 22712 - DNA, 202 bp, Glycine max
  unsure (1)..(202): unsure at all n locations
attcaattcattctatgtacccgtggtggtccacattgtgtttcatgtatttntattctcgtatatatctaccttttatacccctattgacgtgcttaagccatttatttaagccatttctcgcttaatcttaaaattaaataaatttccaccgatcgcttgaattgtatcatccgttaatttccgataaaatgaatttcga

SEQ ID NO: 22713 - DNA, 325 bp, Glycine max
cttatgaataagctcttaacttttttttatcagcaaaaatataatagtactatatataatatgaagatcagtacaagtggtactgttatatatacaacccaacacagttctttgcctaactatggggacctaatactagcaatacatcaagaattaggtgaccataagttatgaccgcaagctatgcacccaaacacagaaaggctatattctaattccccctaaacacaataacccttcctaatattgctagaccagaagtggaatggattatgaaatccctttttcaaaattcttaaaccatgttcagcaaaggaataaagcg

SEQ ID NO: 22714 - DNA, 413 bp, Glycine max
  unsure (1)..(413): unsure at all n locations
agttactagtgcatgttcgcgtntgatacacaatttaaccacttacttttctttntatgagataccactctcacttgattatgtaaaagagtcaagctcaatttctttaatttcatatattacatgttaagctcaattttttaattatcttgtataaaaataattattaaatattatattgataaagttataaaaaatttaaggaaaattaataaatataattgagttataattaagttaggaaaatttaatataataattaaactataattttaggttaggagaatgaaatagcctataggtttgtttgacccaactttttttgggcttaaaagctcttttaagttaaaataagaaataatacaactttaaaaataagtaaagttgtcatgagttttaattttatttttaaa

SEQ ID NO: 22715 - DNA, 404 bp, Glycine max
  unsure (1)..(404): unsure at all n locations
cagctttgacccaaagagcatcatntatcatccaaaatttgtacaagaattattgtgcttgtcgttggtttacccttcaacatgctggaacaactcgtttctttttcaacaaaataaaatgactagattgtattaatacaaggtaaacaaccttatttcacacatgcttctcaagcatatttgactgtagttgtgcatcatgttattagaatgagcatgaaaaagcatgttgtagatgaccagtagaaagtctcagcttgactattaacacgttccatgacatcagtggcaaggattattctaaaaaaagaaagaattgaaatttcatttcttattctttactttaattttaatgtaatatctctattaattaatctatctaatagaatagaagtataaaatct

SEQ ID NO: 22716 - DNA, 313 bp, Glycine max
gtgacacccgaaactcacgcttaagtttaagttaagacgagaatgagatcccgtatgttaccgagttagtctttttttttttaatgcacaataatcatatttgaatatgatgttatgcattctgctctaacttctcatcattaagtcaaatttagtggatcttgaggctaatcttattcagttaagttttgagaagacatatatatgtgagttataaacccaaagtcatatttaatctagtgatatatatatatctatatatatatatatatatatataatccatatttaactacgcgatatatatatatata

SEQ ID NO: 22717 - DNA, 337 bp, Glycine max
  unsure (1)..(337): unsure at all n locations
agctttntggagtagaaacatgggaccaactcattttatttcaaaaaggaagtcatatctagtcaaggtctgagagaccatacaagtttcctaacgatttctaattatgtgggccattaagtctatcatatgctgacaatagccgagaagcccatgaatctcttcgggggcggagtaagtgtctgccatcgccttggccttggctaacaatcggggaagttcttgactcccgttcaaggtaagagcaaaccgatccatccacatggttgcctcttggtgtaaagagtcgatcaccctttctctagcctcttttttcgcgtatacttgggcatactca

SEQ ID NO: 22718 - DNA, 80 bp, Glycine max
tctaaactttatacaagaatgaagctctgataccacttgttagacaagttgcctcagatatcttaagagggggggggggg

SEQ ID NO: 22719 - DNA, 360 bp, Glycine max
agcttggaagagatagattatgaacctacgcgctaacattcacattctttatgtaacacgctctatgtatagtatggaaagatcaaaaagctctctgaacatcttgcgtacccttagagaaaagacttagtgcttagattctatatcctattgtaagacgattacgatttagctagtgagccaagcaaacaacacatattttgatttgcttacagccaataatggcgtggtaggacaaagaatatggaggcattaaatcatggtgaaaatcttggttagtatgggctgaaagtgggagtggctaatgcttgtaactttgtgaagctagtggaacttggtgattgtgccagaactggacgt

SEQ ID NO: 22720 - DNA, 247 bp, Glycine max
  unsure (1)..(247): unsure at all n locations
ngangactatatctgcgaccgacaaccgtcgtgtttctatcttggcccacgtatattgccggctgtatcaccggatccgcttacctagtatgatcggaggctgccgtcgtggccatatcttctatagttatctgaaactctagcatgcgccttcgtgatagaagccatttgatcattcacagccgatatgtcggacttcatctgatttcgcactccctttcattatccatttctctggatcgagtgt

SEQ ID NO: 22721 - DNA, 422 bp, Glycine max
  unsure (1)..(422): unsure at all n locations
agcttcataatgatgaatcaagttgattcaagtagttttgatgataacaaagatgatgacaaaaatcccaaagaatgatttcaagattgagtcaacaagttcaagatcaagataaaattcaagtttcatgagaagaaatcaagaagattcaagaatcaagagaagtttgatttcaagactcaagagaagattaattcaagattcaagaaaagaaatcaagaagacttcacaagggaagtattgaaaagatttttcaaaaaaacaaacatagcacagttttgtttttcgaaagagtttttctcaaaattttctaagttaccagagtttttactctctggtaatcaattaccagtttcctgtaatcgattaccagtagcaaagtttgatttcaaaagcttttaactgaatntgcaacgttccaa

SEQ ID NO: 22722 - DNA, 281 bp, Glycine max
tcattctattcttgaaaaagaggatgagatagttgcacaaaagagaaagcttcctaacaaaaattttcatgcaggtggaccttcttctagtaattctggcttactgcaacctcctatccctcttccattcccacctagagcaattccaaacaaaaagatggaagaagcaaaaaaggagatcttggagaccttcataaaagtggaggtgaacatacctctgctagatgccatcaagcagattccaagatatgccaagtttctaaaggagttgcgcaccctca

SEQ ID NO: 22723 - DNA, 311 bp, Glycine max
agcttaaaaaaacaagaaatgaattaaaagtctcggattcgaaaacttacccgttgaagaacgaagaacggatgaagaacggacgaaaaccttcacggatttgcttacggaaacatctcggaagcgttacggaagcacctcggcttggattttcttcacggaaacaatttttttcacccaaaacagctgaaatacatagccagggggctccgggatccttagaacagcccccttcagcctttttataggaaaaagggggaggaggttgccgcccagctcgcccaggcgaccttagctcgcccaggcgagct

SEQ ID NO: 22724 - DNA, 432 bp, Glycine max
  unsure (1)..(432): unsure at all n locations
agcttgcacaacaagtaacttctttntttacaaaatgaagtaactaactacctcccactaatacatagagtgactaattagaaggaggggatgggccttgattangcccatctagtctacccaattaaactaattacaccccacaactcaaactcacagcctaattattcaagtgcagaggttctgacttcccaggcgaatttgaccctcaaaatgacagaaatagcccaagcttatttgtgtcgaaattgaatatctttttttttatctttctagggactacatatatgctccatttggagttatgtagtttcctatatgccctacacaaggcagataggtcaagtaagcacacaaattacaaaataagccacaattatcaactaagctcaatcatttgcctaatacacaaactaagttaaggtaaaaaat

SEQ ID NO: 22725 - DNA, 318 bp, Glycine max
tgagatgaggaagtgttgaagggtgaaacttcctgcttttattgttgaccacagagtggtacctggagatatgtcgcgggggtcaggagaccttggggacgtcaggtggggtgctattgcccaaaaccaagcttgaccaatcccgacccaacccgggcatagtcggtcagtgagaacctgtgatgtacctaaacaggcgagctcctggcagtcaacagataaaaggaacaaagaccacaaagcaaggaggcttgtggtagctggccagctgtgaaacttgattgatatgtgagatatggtctctggtaatcgattacc

SEQ ID NO: 22726 - DNA, 412 bp, Glycine max
  unsure (1)..(412): unsure at all n locations
agctntgagcaaattcaaacgaaaataacttttaactcagatgtctgatcgagtcccacaatgcatcgagaggcacgaaatataatacagaagctgtgagcaaattctatcgacaataactttgtaccctgatgtccaattgagtcgcgttatattcgagacgctcgaaattgaatacagaagctgtgagctaattctaacgacaataatattttactcggatgcccgactgagtcacgtaatatatcgaggcgctcgaaatagaatacagaatctgtgagcaaattctatcgaccataactttctacttggatgtccaattgagtcacgttatatctcgagacgctctaaattgaatacagaagtcttgtgcaaatctaacgacaatatttttactccgatgtctaatgag

SEQ ID NO: 22727 - DNA, 439 bp, Glycine max
  unsure (1)..(439): unsure at all n locations
tctnccccattntcttataaatagggggagaagtgaagaggaatttcgttcagccctcctggtaattcagaatcacttanaattagtgaaaaaaattggttccgtgaagaaaatccaagccgaggcgcttccgtaacgtttccgtgggtgatttcgcgaaggttttcggccgttcttcgacgttcttcattcgttcttcgtcgttcttcggtcttcaaccggtaagttccctaaatcgaacttttcaattcattctatgtacccttagtggtcctcatttgctattacgtgctttcatttacatttcctttacttttcgtacccccttttgacgtgctttagtcatttgcttaagttattntctcgcctaatcaaaaaataaaatacatctccaccgatcatttgaatgtaatatccgttaatttctgttaaaatgaat

SEQ ID NO: 22728 - DNA, 430 bp, Glycine max
  unsure (1)..(430): unsure at all n locations
agctnttcgattcattctatgcacccatggtggtccacattgtgtttcgtgcatttttattctcgttttgtttactttttataccccctgttgacgtgcttaagccattttacttaagtcatttctcgcttaacttaaaaataaaatcaatttccaccgaacgtttgaattgtattatccgttaacttcggttaaaatgaattccgaccgttcggtcgtgccgtaaccacgttggaaatcaaaaagaggtaaaaaataatataataatcaaaaaaacatctttttagtaaaataaagcggaaaatcaatcggacgttttctctttgggatttctcattcttaatcgaattgattaataactaatgtgaaactaaggctaaaatcaactcgcctaatcaagctcgtccacaaaaatagacttttgaagttt

SEQ ID NO: 22729 - DNA, 427 bp, Glycine max
tgtaggattatggggtacccatcacatgtggtactaggtggcggtcgggcgatggtgcacaacaagttttccacatccacaaagcgcacataaacccaccatcccctgttgcccacctccaactgagctcacgtactcccacgtagcccatatcctcttttctctcaacaccgggtccccatcaatcctcccaagctttcccaacatcaaagcaaaacaacattcaaaccgtacaagctatcgcagccaagcaaaacagagcaaaggcagacaactctgccaaaacaccaaccaaatcacagcttttctcacttaaagaccccagtaacaattccttcgatccaattcattaaccgttggatcgactcgaaaaatttactggaagtctttagtacataagcctacattgtgaccgttgggatctact

SEQ ID NO: 22730 - DNA, 314 bp, Glycine max
agcttcatagtaatattttacggcaacaccgaactaaaacgctatctctaccgtaaaaaaatattgtcggtcagcgtttgtaaaaaaaattgcgcaatgtcttttgaaaaacatcagtcgcggctttacaatgaccgatgtcggcaattgtaatttctattatatccctgaatattatttggatgaagtctattagaaatgttcgatcggcgtcattcggtgatgcttcttttttaaaccctgatcggtcatctttcctaactgacgtcggctagaatttttatagatcagtatcggtgaatcaaaattttttt

SEQ ID NO: 22731 - DNA, 317 bp, Glycine max
tcaacattcaatatcgagcgtttcgatatattacaggactaaatcagacatccgagtaaaaagttattgtagtttgaagttgttcagagctaaggcattcaagtccgagcgtcttgatatactatgggactcaatcagacatccgagtaaaaagttattgccgtttgaatttgctcaaagcttcggtcttcaatttcgagcgattcaatatattgcgggactcaatcgaacatacgagtaaaaacgtattggcggttaaatttgctcagagcttcggtattcaatttcgagcgtctggatatattacgggtctcaat

SEQ ID NO: 22732 - DNA, 416 bp, Glycine max
  unsure (1)..(416): unsure at all n locations
agcttgtagctgaagttcttgagaggtgctgaaattggttaggcaatagcaaaagacacattcccctgccttcatttactggaagttcaaaggtacttcatctctctcttatnttgattaaacattgtaatctttatttttatgtgtttacaacgtacattacattttcatgatagtatttttatgttacgacctctactagttagctaacaagtgtaatttattataattttttgtaattcattttttttgttggttccattggtttttattctaaatacctattcttattttataacatatatggtagtagttgtaacataaaaggtggtattgaatcttagattatgcttcttcccccaccaattattctttttagttagaaaaaatattataggttttcttcttaatttata

SEQ ID NO: 22733 - DNA, 318 bp, Glycine max
tgtagggttcaccccatattccgttgtcatatgctaaacttgatcccatatctacttgataattcaatggtagccataaccctagccaaggttcatcaacctccatttctccgagaatacgactcgaacgcaatgtgtgcttgtcacggagaagccccggggcgttccattgagcattgtatggctctgaagtgtagggtgcgaggtctaattgatgctggctgaaatttgaggagaatcgcgtgtaaatcctgacattgacaagagatgccacacatggggcaattttgaaagctgttgttaggtgtccctaatgac

SEQ ID NO: 22734 - DNA, 420 bp, Glycine max
agctatgtggattcggtcttcgctggcgaaatgatcgaagtgggtctaaaaagaggcaaatctgatcatcatgctttgataaatgcaaaaacaaaactggggcaaatgaagagggtgagaatgagggagaaacccatgctgtgactgccattcctatacagccaagtttcccaccgacccaacaatgtcattactcagccaataacaaaccttttctttacccaccacccagttatccataaaggccatccctaaaccaaccacaaaactagtctaccgcactttcaatgacgaacaccacctttagcacaaaccgaaacaccaaccaagaaatgatatttgcagcgaataagcctgtagaattcaccttgattccggtgtcctatgctgacttgctcccatatctacttgaaattcaat

SEQ ID NO: 22735 - DNA, 401 bp, Glycine max
tgaacctcgcagcaaatgtctgatgttagcttggaaataaactagcttagaaaaaaatgtggagggagtcccactatccaattcatcgagctctccaaagaggagaggtactggttgacaaatttgtattgaatgagcttgaagagggcacccttcgggtcgttgtaataggacggtgaaacacatctccaacgcaaaaacaaattcgggtcaagaggaaatttggccattgcgaaacacccatcgaaaccagttgagtaccaaacaatccatgtagaaggaggtgatttgaatgctctcctcatcacgggtgtcatgataataaaaaaataggatatcttgaaaatccacgacacaacattgaaattgtaaaatatggaacatcgagcttcatgtgacgt

SEQ ID NO: 22736 - DNA, 350 bp, Glycine max
agcttgcttgagaagcttctatggaggatggatctttgagcttcaataaggtccttcaatggtgatttttagccatggatttgtagtggaagataatagagaagaggtgagaggaggcaccattcactagggaataagccatggaaggagaaacttcaccaccaagagagtgtcttggataagaagcttagagaggaagctttaatggaggaatataatgatagagaggggggagtgggaatcgaacgagattacggagtagttgaactttgaagtgtgtctcacaagtttctcattcattaaagttatgacaagtgttacacatgtttctatttatagcctatcacatg

SEQ ID NO: 22737 - DNA, 364 bp, Glycine max
  unsure (1)..(364): unsure at all n locations
ntagccttagttgttcatcatgttgctcatgttgatccccttatctctaacatccatgttttttaaccattacaataatcttccttgtagagtgtgctgatgtaatatataacgaggtgtctgtgtaatgttttcaaatgctaatgaagtgttagtgtaattttttcaaacataaaagtaagttagtgtaggaatagaaaaaagagtggtgttatgtgtaatttgaaaaaagctcatgaggtgcaagtgtaatttgctcaaaaaataactagatttttaagttttcaaattgaccaaaatgagacaaggtttgcatcttggatcagtaaaaaaatacctaaaaataaaaaaaaaaattgattca

SEQ ID NO: 22738 - DNA, 297 bp, Glycine max
agcttatcgtcttaacataagaatcatcatattgatcattttcactttattctccattattgctctacagaaaagaaatgacacttgctaagttagcccagagttataaaattttgtggattaaaactctaattggtttaatccggactaatacagaattgacttcctaagacgccccagcacatactgcatctgctgggttactttgtgatgcaccatgattacccatgaggaaaatgccaaaacgaatatcataatggcttaattcaacccaaagattgcatcagcgcaatctga

SEQ ID NO: 22739 - DNA, 375 bp, Glycine max
tgacactatgaaactcagctatttggtttcttaatacccagtcaattatatattttctttctcactcgttctcttttttcaactaaagaaatgggtcacgactgaaaacaaatagtggtttatggcgaagaccaatgttgaacctcatgtgcaattattgaccacaaaaactgttgaagtttactaggcaacaaagaatgctaatttccccacttaagtaaggcatatccttattatcaggaatgaaccttttcaattcatccttatggtttgtttgttgatgttaaggtattcactactagttgacaaaaagctattaagatcaacaagccatacatttgatcgaatgtttttgaactaaacctcgtgctgata

SEQ ID NO: 22740 - DNA, 402 bp, Glycine max
  unsure (1)..(402): unsure at all n locations
agctcgtcaaacccaaggtccacccttggtaagtctcgaatctccaaaggcttatcaatcccaaggtctgtccttggtgaatcttgcttctccacaagctcttcaaacccaaggttcgcccttggtgagtctcgtttccctaaaggctctcaaaatccaaggtccatccttagtgagtctcgcatctccaaaggctcattaaacccaaggtctgtccttggtgagtctcacttctccaaaggctcgtanaacccaagggttatccttggtgagtctcgcaagcttatcaaacccaaagtccgcccttggtgaagtttacttcttcaaaagctcacaaaacccaaggtccggccttggtgagtctcactttccttatgctcacaaaatccaagggctatccct

SEQ ID NO: 22741 - DNA, 438 bp, Glycine max
  unsure (1)..(438): unsure at all n locations
tcagcagnctagttttcaatttcttgaagaatgctttcttgtgcttctttggattttgtctttcgattcttctcagaggaaatgtctgtcaccaaatgccttatttcgttgattatttcatcagtaaatgcagatatagattcctcttgacctgcctcttcagtcacttccttctgcacaccttctgattgatcttctctgttgccagtaattatgcttccagaacttgtgagagggatataaaagtcatctcccatgtcatttatccaagtactgtcatttagcttaagaacaaaaagaaatccagataattcttctcccaaagagagttgtactgaacttccctctccactgtctcttgactgcagaggaggacagacaggtatatatattataaaacaccacaatggcatagaaatgcaataccacattctgact

SEQ ID NO: 22742 - DNA, 402 bp, Glycine max
  unsure (1)..(402): unsure at all n locations
agcttctactctnttggatgcttaaaaataactnttatccaacaaatttcagttgatgtcttaaacatgatgaaatttggttaaaagcttaaaaaataaagccaaaatggctaaagtttaactgttccaaactttattatcattttgtgtccaaaaaactttattattattttaatcagaataaatggttagaatgtgtttatttcaaggattaaaattttatcccagaaaatattttgtgaaacaaacgttccattgttattgttttcattatttataatatttttttgcaataattattactttaatctcttataacaaatatttattgatatcaatgatgcacttttatattataacttgctaacttgacgtgatcaaacagatatatagattataaaa

SEQ ID NO: 22743 - DNA, 413 bp, Glycine max
  unsure (1)..(413): unsure at all n locations
tgacgataatacttgttgtgagagctaaaagtaacagtgacaaatacttgtaacttttgtgaaattagtgaaacttgattgctaaccaaaaactgaacttagtctgaatggtagagacaaaccaatataaatatgtgtcttactttctttntagttatcttttgtcttaaactgacatagtgtttgaatatgatcttgtttgaaaaacatattctattttttaaaatatgtttccatcgtttaaacttgtttttgcgcaaaattgttatctctttttattaagttatacttcaaatgataactctagttntcacgaaaaaagacttaagaaattctaaaattacatttaacccctatgatattctatttgagtactcttttaagacttactttgacactaatcacatgaatta

SEQ ID NO: 22744 - DNA, 398 bp, Glycine max
agcttccgttttcaattacgagcgtctcgatatcctacgggacacaatcggacatccgagtcaaaagttattgtcgtttgaatttgctcacagcttcagttttcaattaccagagtcttgatatattacgggactcaatcagacatctgaattgaaaggtattgtcatttgacttttcatagagctaccgatttcaatttcgagcgtctcgatatattaaagggctcaatcggacatccgagttaaaagttattgtcgtttgattattctaagagacttaggtttcaattacgagcgtctcgatattatacgcgacacaatcggacatccgagtcaaaagtattgtcgtttgatatgcgcagagctttaattttaaatacgagcgtctcgatatatta

SEQ ID NO: 22745 - DNA, 401 bp, Glycine max
  unsure (1)..(401): unsure at all n locations
cagcttgagcaaattcaaacaacaataacttttgaatcggatgtccgattctgtcccgtaggatatcgagacactcgtaattntaaacggaagctctgagaaaaatcaaacgacaataacttttaactcggatgtccgactgagccctgtaatatagcgagacgctcgaaattgaaaacggaagctctatgaaaagtcaaacgacaataacttttgactcgaatgtccgattgtgtcccgtaggatatcgagacactggtaatttaaaacggaagctctgagaaaaattaaacgacaataacatttacctcggatgtccgattgagccctgtaatatatggagacgctcgaaattgagaacgggagatcttgaaaagtcaaacgacaataacttttaactc

SEQ ID NO: 22746 - DNA, 421 bp, Glycine max
  unsure (1)..(421): unsure at all n locations
agcttcttagtttcagatgatgcagctgagtttgtagctacctcatgcactcctctaatgactataacatcatttctggcgctaaactgctgggagttggaagccatcttctcaattaaatttctggcttcagcaggagtcatgtctccaagggctccaccactggcagcatctatcatacttctctccatattactgagtccttcataaaaatattggagaagcaactgctctgaaatctgatggtgagggaaactgacacatagttttttaaatctctcccagtattcatacaggatctctccactgagttgtctaatacctgagatatccttcctgatggctatggtcttggaagcaggngaaatnttttctaagaatactctcttcaagtcatcccagctcgtgatggaccttggag

SEQ ID NO: 22747 - DNA, 331 bp, Glycine max
gcttaacatcagaccactttcgggtgctggaactacttcacatggacttgatggggcctatgcaagttgaaagccttggaggaaagaggtatgcctatgttgttgtggatgatttctccagatttacctgtgtcaactttatcagagagaaatcagacacctttgaagtattcaaagagttgagtctaagacttcaaagagaaaaagactgtgtcatcaagagaatcaggagtgatcatggcagagagtttgaaaacagcaagtttactgatttctgcacatctgaaggcatcactcatgagttctctgcagccattacaccccaacaaaa

SEQ ID NO: 22748 - DNA, 427 bp, Glycine max
  unsure (1)..(427): unsure at all n locations
agctntataaacctgatatatatatatatatatatatatatatatattattttttggatacaattaatttttttttgaaactactagactttgattacacattagtgctccataacttctattcctataatcaaggactttaattacagtatgagtcatgtgcctttttatattcctcattattttgattgactttcatttttctttaactttcctattatgttcatactccataaaatattaaaatttattgtgaagaagacttttaaaaaggctatcagactaggccagtcttttaaaaaggtcaggccgaaccaaaataaaagtctttgaaagactataggtcaggctcaggcctcaaagattcatcgtatgctagacttaggcctttcaaagcctggcctggcctgacctattcccaccccca

SEQ ID NO: 22749 - DNA, 356 bp, Glycine max
gatggtgtcgagaagaaatcacatgtttgtcatcatcataaaagggggagaatgtgaatgtatgtatacatgattttgatgatgtcaaagaagaatctaacaaggctgcttcaaatgataagcatttgcttcaagaataattcaagattgcttcaacaaacaaagccttgtttcaagattcactaaagaccaagtcttgccttaaaacaatgtgctttcaagacatgcaaggctctggtaatcgattaccaggaagtgttatcgattaccagaagacagggttgagaaatatctgttgaaaaagggtttgaatttgaattttcaacatgtaatcgattaccatatgtctgtaatcg

SEQ ID NO: 22750 - DNA, 362 bp, Glycine max
agcttagaaagtgtgctaactaatgttagaataaggatgtagggattaagtgggtctaacttatgtcttatatgtcatcaagaaaggaaactcttttccatcttttttgtgattgtatggatactaagttgatgtggcaattttttattcgagtataaggttcaatacaacatcaattctttcataaccaattgtcgcaacctacccttttgcgggtgtcgcaacatgcccttttgcgggcgagcgaaggcgaggctcacgggtgcgctttccaaaggaggaaagatgcgcggagtcgccaccaacgtttatttgtgggaaacgtccgaataaccgaaggaaaccggtcgaaatgaaaattc

SEQ ID NO: 22751 - DNA, 315 bp, Glycine max
  unsure (1)..(315): unsure at all n locations
tcttcttccgcgcccttgaaattggttcccttctcctccacaggtattggcatcctccattgactagctntgttcgtttcttctgccatctaggttagtgttctaacctcgtgtcttcatttggaagtgttaatggccgtaggatagacgacatgagtgatgtgtggtggctgaggttgaagacgaaggttcttccgcgagaagaaccttcttccgcgcatgtgggaggggcagttggatattgaagcggaagaaggagttcttctgcgggaatctgcggaagaaaggggagaaggttcttccgcgcgttctggc

SEQ ID NO: 22752 - DNA, 308 bp, Glycine max
agcttgctctaaatttacattgatgtttgtatttatgggaggaggttatatgccatttttgctttaagagtagtgtcccactggtaaaattaactttccaaatgtttgccttcgcaggaatggccccgaggaagcttgcctcaaagaggtccaggaaggacaaggcggccgaaggaactagttccgctccggagtacgacagtcaccgctttaggagcgctgtacaccagcagcgcttcgaagccatcaagggatggtcgtttctccgggagcgacgcgtccagctcagggacgacgagtatactgat

SEQ ID NO: 22753 - DNA, 450 bp, Glycine max
tagaattcaccccaattccagtatcctatgctgacttgctgccatatctacttgataattcaatggtagccataaccctagtcaaggttcatcaacctccatttctccgagaatacgactcgaacgcaacgtgtgtttgtcacggagaagccccggggcgttccattgagcattgtagggctctgaagcataaggtgcaaggtctaattgatttgggctggctgaaatttgaggagaatcgcgtgtaaatcctgacattaacaagagatgccacacatggggcaattttgaaagtttttgttagatgtctctaatgactcatcaggattttcaagtttgtacaattattgtaaaccacaattacaatgttaaatgaaatggataaagttgatatctttgtccctcgtcctctcacaaacgcatcttagcttattcaactttcaccggaat

SEQ ID NO: 22754 - DNA, 404 bp, Glycine max
  unsure (1)..(404): unsure at all n locations
agcttgtacgaatataagaaacatcttcttcgaccttggtgattcttgactccatctcattgaagcacatgtccacttgtaactccaaagtatcaaacctttcaccaacaaaggtttgaagaccatcgaacctgtccaaaatcttttgaagaagagaggaatcttctccaccatgtccttcgtcatcaatgggttgagcacccattttcgcccaagagccatcatgctctttacggtatccaaaggatgcaatcacagcagcacctattagaaaggatctcttgattggaacataaggttcagaatcaagagggatgttgaagtgttgaatgaagagggtgactangtatggatatagcaatgaagcatttaatcgcaatgccttatgcatgccatatcggact

SEQ ID NO: 22755 - DNA, 353 bp, Glycine max
  unsure (1)..(353): unsure at all n locations
agaaagggattggtgtaacaatctataatctagatcggagtatctttggaagacaatttggttacgctatttccaaaggtggttgacaatgattccaaagaaggaactccaggtatccactggggcttccatgttgttattccccaagttaaaatctagccaaccatgaagaccaaggctgaagaatttggcctagtgattttgatcaattaatttggagcaaaactccctaacctctttgcaatctctgagggaatgcatggtgtcttctacgtagatttcatatctgggacagatatcaaaatttgacatcttcctgttgcttctcatggcattangaagaagcctgtcat

SEQ ID NO: 22756 - DNA, 312 bp, Glycine max
agcttgagatgaggaagtgttgaagggtgaaacttcctgtttttattcgttgatcacagagtggtacctggagatatgtcgcgggggtcatgagaccttgtggacgtcaggtggggtgctattgcccaaaaccaagcttgaccaatcccgacccaacccgagcatagtcagtcagtgagaacctgtgatgtacctaagcaggcgagctcttggcagtcaacagataaaaggaacaaagaccacaaagtaaggagtcttgtggtggctggccagctgtgaactttgattgatatgtgggttatggcctctgtt

SEQ ID NO: 22757 - DNA, 293 bp, Glycine max
  unsure (1)..(293): unsure at all n locations
gggctttctggctcagtgctactctaacttctctttaataaataagccaacttcagggaagcatttgaagatttgagtccaagtaaatcacgaatgactcaattcatttgcatatttagtgcaaattatgctcatacatgattttgaatttgagattgaatatgtattacaccgaacaaaaataaataacaaaatgcagtacatatataaattcaaattaggaagaatctgatctgaataaactggaatccaatttatntttctgttcaatattgctgtttctcgtctgtata

SEQ ID NO: 22758 - DNA, 441 bp, Glycine max
gtgaaaggattgaagctgtgactgatatacagactactcttgattcatcctgcttctgatgatatatgatagcctcatggcaatctggatgagtaatattaacgatatgactgaaccccatgttgtagatctgtttactcactacatcggacacaattgtctcacgctgctttagcatatatataatactttagctccgtattctacctcttgttcgttcacccactcatccctgtacgacaatatacaccttattttatcctccaatcgccacctcctaaatcaacccacaaaccactgtttgctgcttatctcataccaaacacccctcttaacaactactatatccctactagggatagaattttatataaaaaaatcttataaaattactcacagttcagagctcttgccatctgcttccatattctcctctcatcg

SEQ ID NO: 22759 - DNA, 431 bp, Glycine max
  unsure (1)..(431): unsure at all n locations
tcttaagaaactcatcactagagtcctaaaaattagaaaagagactaacaaggttaccagggggtgttggaggatgaggaggtttccacctagtggctttcttgtagaagtagtcatcaatcaaagatcatttgtgagcctctttcttagcatgagagcgatccttcaagacttgagtaagtgcctctctagttctgatgagttccacttcaagcagacaaacatatgcacgagaaggtgaaggataatacacttgaacaattaaggaggcagaagcaacttcaacatcaaattcaacttctttaatgataggatccactaggtgtgtgaagaagaatctagagaaaggaatagacaccatataagagaaggtgtgatcaaacttagtttagaaaatcttggatccatgtganaatcatgtngaaatgagt

SEQ ID NO: 22760 - DNA, 320 bp, Glycine max
agcttgtcactggtaatcgattatcaaatccttgtaatcgattacacaaagcttttatgaaaggatgtgactcttcacacttgattttgaatttcaacggtcagatacactggtaatcgattaccaatatcttgtaatcgattactcccttttgaaatcacatggaaccgtgcaaattcaagtaacagctcttgaaaatcaaactttggcactgttaaccgattaccagagagtaaaaactctggtaactaagaaaaatttgagaacaactctattgaaaaacaaaatcgtgctatgtttgttttttgagaaagcttttc

SEQ ID NO: 22761 - DNA, 450 bp, Glycine max
  unsure (1)..(450): unsure at all n locations
agagaggaagcttcaatggaggaggagaatgagagggatggaggtcttttctnatctnttcttcttctctcttattcatctctcgtttctcctctcacccccctccttgtggctctcctattttatactcatatcagcgtttcaccctctataattcttcttatgaagaaaacacagctataacccactctctacatttaaatacatcttttcacggattctcccgaagacaatagagtacccttaccgtatcattgttcctccggcctcacatcactgatctcacatgccctaaccatatgttaacaatacacggataagcttccgaaaaagaaattttctctcacggcaatactttacgcttcatggtgtccccccaccacctatttttaatacctgtcgaaaactacatacacatagttgtaaatttccttaccaatcatttacacg

SEQ ID NO: 22762 - DNA, 474 bp, Glycine max
gtgacccttgtgacacattgttgacaccttagaccacactgatctgaaactgtaagctatgaatctctgtatatagactttattattaactccgctctactatgacccacggtcactatcatctatagtatcacaactaccattggtgcccatataattaccattggaaccaccacaatatgaacaagtgccacttcaacacttataacacacattaatataaacatttactgggaacaaacatattgaatctacagatgcgtacaagaagtttatttgctaaaacctgagtgctggcaaagtgaaataaataacgtttcataacattaaaaagtttaatatattcttatcccataaaaatgtaaagttatttcgcttctcgggcccaaaattacacaagttcattattcagcgtacgaaacacatatttccttttctgcatattacactacctatcgacaaacaaatttggtt

SEQ ID NO: 22763 - DNA, 503 bp, Glycine max
  unsure (1)..(503): unsure at all n locations
tggattcgtgaaccctgnttgacgcacttgataccctgcaattctagatatatgatgtatctgatatcagaattacatggttgcttgccaaattgctatctcttgtcgggcgctgataggtccccatcgatgtacgcgagtgggaactgatgacccactttcacccacatgtctaacaattaacaatggatccacatcctctcttgtcacttacaaagttcccacatagcaacacggatagcatactattatatcatatcattctatgtgtcatcgattatctgcttctcttctcccgacacagtactatcacttttccttctatgagtcgatatgactttatactcacaacagtcctgtttagcaaaaataagatgtttcacgactcacgtgggttatgctctattacttacacatacgctcgtctatagatactgacttcgggtattctaactcaattcacaccacagaacagaatctcatttgaattgacactattgtcg

SEQ ID NO: 22764 - DNA, 362 bp, Glycine max
  unsure (1)..(362): unsure at all n locations
agctntcaaggtttagaaaaccacacaacttcatatagcttttggtacaaagaagaagaagaagttcaaagagattcaaggcttgtacaggattgtatgaaataagtgttcaagattgaatgaatgaattaatgaaaagcaaatcaaagccttgcttttatagactcttcatgtctggccaagaggaccatttagaagagttacaacttttagaaaaacttaaaaccaatttgaaaaagtcaaaacctttttgaagagttacatcttttgatttattcagaaacagtcactgataatcgattaccaaatcagtataatcgattacacaaggcttttatgtgaaaggatgtgactcttcacat

SEQ ID NO: 22765 - DNA, 332 bp, Glycine max
  unsure (1)..(332): unsure at all n locations
tctcccctattntgctataaataggggaagaagtgaagaataaatgggttgagccccttaggcacttctctctctttcaaatttgctgaggaaaattatttccgtgaagaaaatccaagccgaggcgcttccgtaacgtttccgtgagtaattacgtgaagattctcgactgttcttcaagatccatcgttcattcttcgttttcttcagtcttcaacgggtaagtacctcaaaccaagcttttcaattcattatatgtacccgtggtggttcacattatgtttcatgtanttttattcttggcttcatttaccttttatacccccttttga

SEQ ID NO: 22766 - DNA, 414 bp, Glycine max
  unsure (1)..(414): unsure at all n locations
agcttattntgtactaactcgtatttattctcaaaattatgtactaactttaatcattcactaattaacataatgctttaactttaggtttgaattatatataaatttagagttttaaaaagtacaaataagttttgaattccttttttccccttcaagtcacatagacatacagaactacatgtgtatctaactggtgcattaataccgagcctgacctgtaataaaaatgaaaagaaaaatcttgaaacttttgccattaaatgtgttctagaattatgcattcaattgagcaaggtgaagacaaaactagatacaaccattttaaaaatattattatnntaccacttattttacccttttatagcacatattttctagactcgttctatgtactaccatagatactagtta

SEQ ID NO: 22767 - DNA, 442 bp, Glycine max
  unsure (1)..(442): unsure at all n locations
ctgcttcatcctcttagtcttggaccttgtcataggacctccaatcccatgtaaaggatcattagacgggctggttgcaccactatcaccacactataaggctaaactacttaaactctaagccggttttcactatgcataaatttttaaagaggaaacaaaagcgataacgcatcttcacatctagatacacatatccatggagtctccgaagacaaagggttacctcctagctatctgttccccacgtacatcagatacatgatcatcacaggcacaaaccagatgtataacaatacaaggataagcttacgaaaaagaaaacatactaaaagggataaatcttaacagttaaaggatgttccaccaatcacatatataatataacatgtngaaatcatacataaaacataagttttagaaatctcataacagacatctc

SEQ ID NO: 22768 - DNA, 427 bp, Glycine max
agcttaagagagtccatcctttgtgatacacaaagtacttatgagagattagaacttaattgtaaattcactcattaagtgttataattaatatataattctatatcaaacttttgtttgtgaaaaccaatagtgactgatgcaatcctaccccgtagagaaggccttagggttctcatgagtcttagggtagatttcggtcccatgggctaagtttgagtccgcttatctttgtacatattagattaaggtttcattatttttgggccttgtatttagggctccataaaataggtaaggtaccctagaaatgtaggatttttcagctcttctattttagggcacatagactagtttttgtattaagggtagttttgtaatttcacatgcattaagtgaatattcgatgtgtgtgggtggaaataaa

SEQ ID NO: 22769 - DNA, 311 bp, Glycine max
gtgatgaggtgcaagcgctaaaggcaaagcttgaaagagcccaggtagtcaaagagaagttcaagtccatagccatcaaagtctgaagagagtatgatgaactaagggacgttaatatggccaccgatgaagccttggaatgagaaaccaagaaggcccgaaaggaagaacacgaccaaaacaagttttgaggggctttatatggcagcaatagtgagctcaaactctgaagaggtgaaaggaatcatcatgggtcaaaggcatgatctggaaggacgagctaaaggcttgccttatgtcgaaaagaaatt

SEQ ID NO: 22770 - DNA, 433 bp, Glycine max
agcttgtactgatgcaaggcaccaattcatgaccataaattgatggcaacaaacacccacaaataaagggatttagttaacgcccacctttcacacataatcactcgggaaaacaccaccctttcttaataagaatcctacaattaaccttaacgagaaaaaagttaaaaaggtatacattatctaattctacacactatttatttttataaaacactgacttgagcgtcaacatctttatgaataccctgccagagttcgactcatagtagatcatcataaatattgaatttcgcttcaaatactttttaaccttaggctataatgctaaacaagtattaccttcaaattcaaatcataatttattttaaggcataatattttctactatctttaaattaaattaaactacattaagtattattgttatgag

SEQ ID NO: 22771 - DNA, 427 bp, Glycine max
  unsure (1)..(427): unsure at all n locations
cctccataagaaaattctttgtcttctccgcatcataaaagtntgattctctagttacacgctctacctcctataattgtccagttttagcagcggcctcaatgtacttgaagtgaatatcaggatcctcactttacaagacagaacaaaaaaaattacagtaattgaaaaaaaaaaagtcaagcagaccaactagtgaactgaggtcatgttcactctccaataaaaaagaaatacctggagctcaagtatgcacccaagaaaaagtatagtccttcataggatttgaattgctcaaagagtttaatgcatgcatcaacacccaactgctcagaatattccttagcagtctgcaaaccatgtactagtaagaatttcttatagatgaattgcggaattcaaaaaataaaatagaacatgactctta

SEQ ID NO: 22772 - DNA, 425 bp, Glycine max
ggatccttaagcaccgcggctgcagcttataagcgcggctctgggagacgaatgtcaagtggtcgcgatatacgatgatgatgttccgagtacattggatttggtacgaccatgccctcctgatttccagctgggaaattggcgagtggaggaacgccccaacatttacgcagcgagcataatgtaaacctttacggttttaaaagctctatagttgggcctaggctttagagtttttcttttggttaaggctttgtgtattttgttttttttttaaatttataatacaaggatctttctttatctgttgctacgtctctacccattctcatccatttgcatgtatacttcttttctgaaacggcataaccgatgacgagtcccccgaatgtactaatacctgcgacccgcctatctacttctag

SEQ ID NO: 22773 - DNA, 433 bp, Glycine max
  unsure (1)..(433): unsure at all n locations
cttctnaatactagaatttctgctagctntgcacgtattgcgtgtcttttcagcagccgaggataaatttatttgtgattgaatgactcaagggtgatattcgagtaaacacgatgaatttgaattacaatccgcaaaagcatgctacatgatctaatttaaaacccttcaaacgctacaacagcttatccatgtttgtcacctcattcaaaagtttaaacttgcatcaacacattatcgatactttacaataaaaggaaactttgatgaatgccttaaaaaggaagatattttgatacgtatccccaaatacagatatacaccacattcagatgataaatagttgtacattttaataactaattttgtcaggtcgnttctattgtatntgtatcctattcttttccatgaataaantacaagctcctggagc

SEQ ID NO: 22774 - DNA, 449 bp, Glycine max
  unsure (1)..(449): unsure at all n locations
taaacttatcgacccttacgtatgcactataagtagactagacgatagttatagtgtcgcgagactgtcatgattatgatgacacagaccacagtaactgaacagtactgtggtgtattaagattgttcggagtctaaagtgcctcatgaatcactccatatgcgggagagctcgagctgaatcaatactagacctgtactaatcaatcaatctactctaagaaggctttcactatgatgttacgtgaccgtagaatggacaatatcaacctaaccaaaagtaaatgcggcaatttaagagctccgcggaaatttatataggccgtacgacagagactagacccacagagttttaaactggatcggcaacaacccttgcatatattacatcccacccgattagagccttgaaaatttgttcaccctagaacaatgctgtacagttgacn

SEQ ID NO: 22775 - DNA, 292 bp, Glycine max
cttactatgcgcatgctatgtcgggggaatacctacagctgtctcatcatgttatcaaacatagttagggataccgttatactgtacccgacgctctctaccggcgatatgcataagtgacaatgctggaaacatgacagagagcaactgatagggagaaaagcatgtaagaggacgaagaaactccctgagaaatatgtaacatgcgtggataactgctacagcccggaatgtttatacatgaaggctatcttttcatagagaacaaacagtgtgtgcctaagagctatac

SEQ ID NO: 22776 - DNA, 381 bp, Glycine max
  unsure (1)..(381): unsure at all n locations
agcttggctctcttttcagccttagttagcttgaccatacctttgtccttattgacatcctctccagttccctcttcacttggatcattttccaatactgtctttgtagctgcagagtgtgagaacagcatccgttaccaaagcacttggtaaaagaaataaaagagtaatcagatgacaacaatgcaaaaattatatactgaacactagatacctgtcccgtaatggatntttccatccaatgtcttgattggaagagcatctacacgatcaacctgcaaaccagtttcttctttttctttcttgagagcattctattgcatgtgttttgcatatagtttctccaatgcatcatctttggcaacagcaaccagtgaaaca

SEQ ID NO: 22777 - DNA, 446 bp, Glycine max
  unsure (1)..(446): unsure at all n locations
ctcagcttattacaaaatgagtcaaaactaattaaaagttaaaattttccaattatactatagacctaatggctaccaaggctcattactaaacacccaaacataagctataaataataaaagtcacacaagcaagattgagacaattgtttcctgtacttcccatattgcttccagaatgactatttgagaagcgatacgaaaaaatgcaggaagcaagtctaaaagtgcagaaagaaacacccgaagactaccaatgatgtgcttaccactaataagcccaataaggttcaacaaacaaactaaccaaagaggcttaagcccagatacaaaatatgtttagtctattaattctttttaagctcttctaagtaaagctccttaagttggtttccatcaaggtggtgaatngagatgaaatngcaaacaaactataataatccttt

SEQ ID NO: 22778 - DNA, 356 bp, Glycine max
  unsure (1)..(356): unsure at all n locations
agcttatgaccatnttaatttctcgggagtntccattgttcaataaccaatgtctcgatatattatgcacctgaatcggaaatccaagtgaaaagttatgaccattttaatttctcgagggatttcgttgttcaattttcagtgtctccatatatggtgtgcctgaatcggacctccgtgtgataacttatgaccatttgaatttcttgagagatttcgttgttcaatttcaagcgtctcgataaatgatgcgcctgaatcggacatccaagtgaaaagttctgaccatttgaatttctcgtcggctacctgtgtcaaattcgagcatctcgcatgtgatggcctgaatcgacctc

SEQ ID NO: 22779 - DNA, 397 bp, Glycine max
  unsure (1)..(397): unsure at all n locations
tcttttggaccttgaacaagcgactaactcctctttcagaaccatgctatgcgctcgcgactggtccctctcttcccttcgcagcttgagttcactattgctaccccatagagctccacgaaatttattccgaccatactcttccttgcgagccctcttggtctcttgttcaagggctcttgcggtagttgcattctcttcccgtaacccggcacactccttccgaatgtgtgtagcggccaacttgaacttctccttggcaagtttcgcctttcctaactcgctcttgagagcttggactccttcgtcctcttccggtgctttcaaacttttctcgctgacgactntcaacttggtgagccaatctaaacctcgtatatgaacttttaaccattca

SEQ ID NO: 22780 - DNA, 362 bp, Glycine max
  unsure (1)..(362): unsure at all n locations
agctntcttgagaaaacatccttgagaagcttctttgagataacttccttgagaagctggagcttaattacacacacccatctaaaaactaagctcaccctgcttgtcaaaatacatgaaaatacaaaaaaaagtccctactacaaagactactcaaaatgccctgaaatacaaggctaaaaccctatactactagaatagccaaaatacaagccccaaaagaaggaaaaaactagtctaatatttacaaagaagagtggatccaaccttgacccatgggctcaaaaatctaccctaaggatcatgagaaccctagggccttctttagtaactctagcccaagcctctcggagtcttctatc

SEQ ID NO: 22781 - DNA, 284 bp, Glycine max
  unsure (1)..(284): unsure at all n locations
tctagaggctnggattatctaccccattttcgatagtacttgggtaagcccaatccaggtggtaccaaagaaagggggcatgacaatcattcagaatgaaaagaatgacctaatcccaacaaggactttcactgactggagaatatgcatcgattaccacaagctcaacgaagccacgaggaaagaccactttctttttcctttcatggaccaaatgttggataggcttgcgggacgggcttattactacttcttgtatggatactttggatataatcaaatta

SEQ ID NO: 22782 - DNA, 359 bp, Glycine max
  unsure (1)..(359): unsure at all n locations
cgcttgtagaatggctatacataatacatggcggngtttgagttggatcaaggataaaacggatgccccacattattttcatgcacaaatgcaaagatatgatatgaaatttaagcaaaactggtcatgcatgcacctatgcggacacttaactgtcaaattnttatggtcatattgatgctagggctcaggattcatctcctctattttaaatcaacccaatgtctccaaaatatgttcttttatcaatttgagcattcatcctagtccatgttgggtactcgggaaaaaatcacagcattcacccttcaagtgtcacacattttttcaaaaactagtgatgatcagtgaattttttc

SEQ ID NO: 22783 - DNA, 395 bp, Glycine max
  unsure (1)..(395): unsure at all n locations
ntatacgccttgtgcggttttcctctattcgattagacccagtgtttcttctaatgctcctttagaaatgaaatgcaagtgtcttaaatctcatttttggtcatgagaaattctatttgtatgctttcattcctccttcatcgcatttttttatataaaaaaatgtgtgattgatctgatcggtttgggggtttgtttctttaccaagcgtgttcgcattttagtattttagtgaaaacttttagagacttcaatgtcttcagtctttacattttcaagacttcaatgtctccagtctttacatttcaagacttcaatgtcttcagtctttacatttcaagacttcaatgccttctgtcttttacatttcaagacttcaatgtcttcagtcttta

SEQ ID NO: 22784 - DNA, 321 bp, Glycine max
agctttgtgtaatcgattacacttatttcggaatcgattaccagtgactgtttctgaataaatcaaaagatttaactcctcaaaacgtattagacttttgcagattggtgttaacggatcttaagagctataactcttctaaatggtcttcttgaccagaaatgaacagtatcttcacgcatcggtctgttttgcattttcaatgaattcatactttaaatcttgaatactcttccaatcaatctcttacaatccttacaagccttgaatttctttgaacttcttcttcttctttgtaccagaagcattctgaagatttct

SEQ ID NO: 22785 - DNA, 404 bp, Glycine max
  unsure (1)..(404): unsure at all n locations
taatagactntntcacaagtccaaccttagcctatttaactaaatatgctnttttaaaagtcaaagtctagtcttttaattaaatgagccagactagaccaggttttaaataggtcagaccatagattcctatcgggtggccaaacctattctcacccctaataaactataagttaggagttgaaaaattaaaaacttataagctagtcaattntattaaaagtatttggtaaaactagctgataaatgtcaaatgacataaaatgacatgtttaatatttatgtgtttaataacttaccatcttaaaaaataagacatatttttgcttttacaaattgaatcgataaaataaaatcaagccaggaaacaaattatgacatataatttaaaaaaaacaaaaaca

SEQ ID NO: 22786 - DNA, 291 bp, Glycine max
  unsure (1)..(291): unsure at all n locations
agcttgatttatgagttgattttagccttagtttcactttggttattagtcaattcgattaagagagaaaatcccaaagaaaaacgtccgcatgactgttttgattatcntatataaatattttgttgagtattatattattaatcttcctctccgggttatggcggtaaagatcggtcgtgatttattctaacagagattaanagatattacaactcaaatgatcggtggaaatttattttattttttattaggcgagaaaacgacttaaatgaattattaaagcacgtc

SEQ ID NO: 22787 - DNA, 438 bp, Glycine max
  unsure (1)..(438): unsure at all n locations
tcagaccaaggcaattcaaaatctaggtatctaaaacccctcaatttagtggattttcaaggtttgagaagtgaaaatgagaatggggtaattttggagtaaactctcatctcaaacaagtctataacattaatataaacttgctcaaactggttttacgatgaaaactccaccgattcaaaatttgacccctcaacacccaatttaccttagaaatggctcttgctttcacctttgtcactcatttttctcatttgctcagcccaagctttcccacaagtcctaaatgacactntaaactaggattaactcactttagacntccaattacactaaccccaaatttagcttctctaaccctcagaatctcacacttttctacctacaacattgtcattctcacatttaaccctaagttaactttccccttcatctcta

SEQ ID NO: 22788 - DNA, 361 bp, Glycine max
agctataagaaccgttcttaagccaatacttgaaatgttcaagatagtggtaaggtggagatttagttgaggctattctaagatgatcattatataaaaaccgtcttagagaagacacattctaagacggttgttatataagaatttccttaaaacacattctaagatagttcttatataataatcgttttaaaatgacttagaacaaacacattctaagacggttcttatatatgaactatcttagattatatctcttctaagacggttgttatataagaatcatcttagaatatgcatcttctaagatgatttttatatataaaaattgtcttagaatatgtctgttctaagtcattct

SEQ ID NO: 22789 - DNA, 400 bp, Glycine max
  unsure (1)..(400): unsure at all n locations
nggaacatattatataaggaatgtaaaaatactaagatgttagattagcaaaaaagatatggtgtgcttaagcatgggttgctgataaccgtgctttgtcttttgttttgtgaatgcatgacataggatctagatgctatcctcaacatttgccctttgattttacctagaaacttccctagttttagaaaggacaaaagttgtcgacttcaaagtggaccttataattcatgcatagccgaaatgtttgttgttcatactttgcatgcagcacaagctataattntaaaattntaatagtatgtaaatataattgatgccaatctctttaaaagcttgaccaaattggacatatnaatggatcatgtatcagctaatatagttatgtttcgggcaaaca

SEQ ID NO: 22790 - DNA, 418 bp, Glycine max
agcttgtttgttagaaagacccaacgctttttacctatttgatgcaatcctaccccgcaagggcattgggtagaagactccaagtcgattgggctagagatccaagggaaggtcctagggttctcatgagccttagggtagatttcgagcccatgggctaagtatgagcccgcttatctttgtaaatattagaataggtttttccttcctctgggccttgtattttggccattctagtagtataatgttttagccttgtattttggggcattttgagtagtctttgtagtaaggactttttttttgtattttcatgttttttgtcatggaggtgagcttagctattatagggggtgtgtagctaagctctatcttctcatctcaaggaggtgagcttatctattagagaggtatgtgt

SEQ ID NO: 22791 - DNA, 434 bp, Glycine max
  unsure (1)..(434): unsure at all n locations
ntctcatattacttctccaaaagcctaattttaacctatgcataaactagttttagtttatgaactagttntagtttatggagaagcttatttcatttttttcttttattttcttctcttataagtatttatggagagatttatccaaacaaaaataccatgaagaacataaaattagtcagcttaacctcaaaagtacaaagaaggttaagtcaattcataaactatcattatgttgtaacacttacaatttggaattcatctgatttgcctcctgaacaagattggaaaatgaaagtagcacaaacagtaacgaataggtcttgctactatagtggagagaggaaattctgatggtcccacaaatgcctaataaaattaaacatgaataggtcgattgtgacaccctctaccccacacatatatgtactaat

SEQ ID NO: 22792 - DNA, 561 bp, Glycine max
  unsure (1)..(561): unsure at all n locations
acactcatcgtccaccgtgtatatatatattcancgtcactgatttacttgcacttcacacccaagcctcccggcatttgacacctgatgacngcgatctgtacacttatcatcacgcatgcaagctttgatcatgcttatcaactcttagagtatatgttatctatgtcatcacatgtccaagcaggcacttagaggtttcgagcttgaacagaatgctcatcttgttcctgatctacatggagatgtcattagaagtgattcgtgtttcaacaggtactcatgctatttaaaagtgcattgtatccattcagaccacaaagattagcattatactatatgcatttagtggacaagttgctaatctatcaatgtctttctatggatgccgaattattcaagccaacttatcgcatacgcttgttttcaaagcaatgttactttcttggacgtcgctgtgctaccaatttgatagttagtaatagagagcttacatcttgatttgaatctgagttatgctacattatcgtaatggaatgtataagtatcgctagcgcttcc

SEQ ID NO: 22793 - DNA, 407 bp, Glycine max
agcttgggaggattgatggggacccggtgttgagagaaacgaggatatgggctacgtgggagtacgtgagctcagatggaggtgggcaacaggggatggtgggcttatgcgcgcattgtggatgtggaaaactagttgtgcaccatcgcccgaccgccacctagtaccacatgtgatgggtaccccataatcctacaagcttgagatgaggaagtgttgaagggtgaaacttcctgcttttattgttgaccacagagtggtacctgtagatatgtcgcgggggtcaagagaccttggggacgtcaggtggggtgctattgcccaaaaccaatcttgaccaatcccgacccaacccgggcatatacggtcagtgagaacctgtgatgtatctaaaccggcgagctcct

SEQ ID NO: 22794 - DNA, 217 bp, Glycine max
ctaagcttaagatatttagtatgccactatctaaattatatactaatgccattacctaggaataataaaaactaatggccgaatgtaacttgaaattgtggcaacaaaaagtcttctcaacagccacaagtctctcccattaggtcttccatatggctgatgcctaagttgccaattgggttcttttactacttgaacttaacctaactaaagccct

SEQ ID NO: 22795 - DNA, 371 bp, Glycine max
agcttaaggaacacacaggtgacaatggttccaggttacataatagggaagttgcataatctagaaacactggatcttaagaagacttgtgtcagagaattgccggtagatatactaaagcttcaaaagcttcgccatctcctcgtgtatcagtttaaagtcaaaggctattcacagttctactccaagcatggttttaaggcccccactgaaataggaaatttgaagtcactacaaaaactttgttttgtggaggcaaaccaagattgtggaatcataacaaggcagctaggggagctaagtcactaagaaggctagaatcttgaacttacagaggaaatggaaggctttctgtttgtccattgaaaatt

SEQ ID NO: 22796 - DNA, 380 bp, Glycine max
  unsure (1)..(380): unsure at all n locations
caaactggganaagaagtagccacaaacaaaaacatagctgaagaagagagtgattgtccaatcacaacatcaagtagacgtcgtctttatcctcccggaaggatcatgcatattattcctattgcacattcgtctgaaaatcctaattcaaaccacaatggttgtgatgagaaacatgtttccctatatgaaacgcctagagagctctatggaaagctcagactntcaagaaggatgatacttgatcataagtcaaacaagtatctgaaggtgttacaacaattaatcaatcaactagagaaagagagcttcatatatcatggaggatgagccaaggaatagcggatgaaanaataatnggtactaatttgatcatgga

SEQ ID NO: 22797 - DNA, 539 bp, Glycine max
  unsure (1)..(539): unsure at all n locations
ccttaaccactactctgtctctctcttccctctggcaattgttatacttactgcganaacgaacnntatcgcgttgatccatgatgacncgtgacctctcagacgacctgcngcatgcaactcgtagcacgcagggttatatggagagatagatatagacatcataaacggggctttatgactagtagaacccacgcgtcgtaacccgaagagacttgaaatgatctgtgtcgagcgtccataagatgaagtatatgaatggcacggatctgcacctggtttgaaagagagccatgattagattgtaaggacgaccttttcttaggagctaaaagagagaaggtaggtagactgagtcttaatgcgggcttcatctgagatgggagaatggcgtaggtcaattgcgaatggcatcacctctataacgaccctttctccgggtgagtacgttatgcgctccctaccccttaattatttctgtgtaagtcacgagcgatatccctacaatctcattcttcgtaacttatcatcctgtctcc

SEQ ID NO: 22798 - DNA, 597 bp, Glycine max
  unsure (1)..(597): unsure at all n locations
tcacttgtcactacctcaccatcccagtatctctgattattgtctaatcanttttactanttataatatnanatagatnnacgtgtnnaattgatacctcgctttgacgcgacactatanacaactcaagcttgctggtcagattgttnagatgagccagcaaaaggttgcttcaaatgttattgataaatgttggcttttgtatcctcgagaacgtcagatcttggcgaatgatatgctggcacttctgatgagaatgagccactacagggatgggtcctttcatctcttgttcaaagacttcacctttccaatgctggagaagatctgtgactcaaactattttcatgtcatttaacatagcaattatcctgaaggagggggtaatgtgcgaactcttttaatacgtgccgcagtattgtgtccaaatactgagcccctgtgtgtccatctcccttactaatgtttggttcgccatgctaaaacagaatttatgaagaggacactattccacgatatcattttttttttatagaaatttagattcaagttgcttttatattcgtcaaatcagagctcttatgaatgatgactacg

SEQ ID NO: 22799 - DNA, 255 bp, Glycine max
  unsure (1)..(255): unsure at all n locations
agcttgtgctattccaagttgattaatcatacctttaagccagattgcttccttcactccttcagctatggccatgtattctgcttcagttgttgtaagagcaacaactgattgttgatttgctttccaactgattgttgtaccaaacanagtaaacacatatcctattaaggacttccttgtgtctacatttcctgcaaaatctgcatctacatagcctgtgactgctggctcgtgtgctgtcttcttgtacct

SEQ ID NO: 22800 - DNA, 275 bp, Glycine max
tgtaccaatcccacatgattggagcattctcccaaaacaacgtgaccctaactagtctccctatgattttacctagtgagtgacctaacttaccagtgtgtggtttgttttgtcatgtactccttggcacccgacgaggtttttcactaacatggtaccacattgcatataggattgagtcttagtatatatgttgcataatgtttgtgtattgattgatattgattggttgagtgatattgtgtttgatccttgagtacgtgaatgatgtgaaa

SEQ ID NO: 22801 - DNA, 422 bp, Glycine max
  unsure (1)..(422): unsure at all n locations
agcttggctntcgtgtttgtacattaactttgtgctttttgcaaatttttaattagtttctatatctttcagaattgaccttgttctatcttaaagtgttgggatttattgatgcagcaaaaaagaagaaattacatcattcattggaaatgaattgggggagatttattaaaagggtgcaaatatttttcaatgttttcatttggagtcgattccaaattcttatcgaaattgggataagtcatatcaggtgttacaacttcagaattaagagtcaaaaacatttgtataactgtttgttttactttttctaattgaagtcggaacatttttcactctagtctaatatctttctacaactttaaaggngtatatagttcttttttatttcacgactttgagattattatttcttatatata

SEQ ID NO: 22802 - DNA, 239 bp, Glycine max
ggtatgtgttctgcttctggcattccttggcatttccatgatcacaactcaaggtagttaatatgtcccttttaagaaaatactataacttattattattcactaacatgttgcatgtacgtaccatttttctatgctatatgctctaactatgaatgttgctctaaattaaatttttactatatggtttcaggttatggcaacagaatctgcctatcacttggatggagtgagaatct

SEQ ID NO: 22803 - DNA, 370 bp, Glycine max
agcttgatcaaaacaattatctaatcattcgaatccattcaaatcatacaattgctcattcaaatcattctcaaacactcatttcatacaaaacaatccactgcatatcattttcaatcaattcactgttcaaacacgcgttttttagaagcaaacaactcaaagtgctaaaatttaaataactgaaacataaaaaccaaaattaaaatgactgaacataaatcataaaataactgaaaataaactaaaatgttcaaaatgcacaaatttaaatgtcctactcctgtggttgctccagtgcatgctcattaagatccaacacctgagcagttggtcaatcctgagagataggctgctctaactcagatgc

SEQ ID NO: 22804 - DNA, 172 bp, Glycine max
  unsure (1)..(172): unsure at all n locations
atggagaacccaagccatgctccatnggatagcttgtagttgtagcaaacccaaagtcagtccctcatgaatctacattacaaaatcctcccaaccgagactcctttttattccttaaacacatgccaaagccaatattctgttgtaaattaaggaacacaacatttacatt

SEQ ID NO: 22805 - DNA, 235 bp, Glycine max
agcttgtatggaggctagatcttcgggcttcaataaggtccttcaatgctgatttttcagccatggagttgcagcggaagataaaggagaagaggtgaggggaggcgccatccactagagaataagctatggaaggagaagcttcaccactaagagagtgccttggataataagcttagagaggaagcttcaatggaggaggagaatgagatggagggagggggggggcttcttt

SEQ ID NO: 22806 - DNA, 373 bp, Glycine max
  unsure (1)..(373): unsure at all n locations
tctaactgaggcagccaacanaataaatgcaagataaagttctttcctgaagagacgaattttcttcgtcttcccagttttttttgacaattctagtttgcttagttcctcaatgcctgaatctgaggatgatctatgaagactattagatcgcattagaggctcagcttctttctcaaaggcaaccaaatcagtctcagacgatcttcccaacttttttgtaaccacccactcgtaagaacttccaaagcgaagtaatccagatatcatggcattaaatttagttaccgacatagtgttctcaaatagaaggtaaggaactataaacggaaatgaccgtggagctggtagaacacttatgagggacatgatt

SEQ ID NO: 22807 - DNA, 398 bp, Glycine max
  unsure (1)..(398): unsure at all n locations
agcttgtccataaaaataggtttttgaagttcatcatttcaatttctcattaagtaaaatggatcattttcaaggtccaacgccttaaaatgatcacctcttaagtaaaaaaaagagtcgcttgataagcaagaactacgtaggtctgatttcctcatcgcaattgaggatacgtangagcaaaagccccgcttttgtcgaccaccccaagagatcgttaatggtccaatgccttaacgtttctctcctttcaaaaacaagagatcgttaatggcccaacgccttaacgtttctcccctttcaaaatcaaaagaccgtgtaatgngtcaacaccttaaatgaccctttgttcaataaaaacatattttgcgaaaaagataaaacacctaaccaacact

SEQ ID NO: 22808 - DNA, 227 bp, Glycine max
  unsure (1)..(227): unsure at all n locations
ggcctcanagagatccaggaaggataaagcgaccgaaggaaccagttccgctcccgagtatgacacccacctctttaggagcgctgaacaccagcagcgcgtcgaggccatcaagggatggtcatttctccgggagcgacgcgtccagctcagggacgatgagtataccgatttccaggaggagatagttcgccggcggtgggcatcactggttacccccatggcca

SEQ ID NO: 22809 - DNA, 260 bp, Glycine max
agcttgcacaataagtaactaattctgttttgtacaaaatgaagtaactaactaactaacactaatatagagtaactactcgaaggaatgaataggactttgatacgccccgtcttatctaccctattaaacaataaaaagtccaactcgcacttaatttgaccctcgaaatggcagaattggccaaagcttatctataacaaaaataaagatatttttcttaaatttttagggactactcacacgttccatattggatc

SEQ ID NO: 22810 - DNA, 285 bp, Glycine max
tggtgctcaacaatggagaaagagatgattatggaatgaagatgaacaacgtgggagatgatgatgaagcttcttgttgttcaacaatggtaaaatctcctctcccttctctctagtctctacagccagcaatcaaagaaaagggaagctgaagtttcttttgtgttttagtgagagagagagagagagagagagatatacagagagacaactattctgagttaatgagttgtgaggtttgggattgtgtgatggcgttttggtgcttgattacctagtggggtt

SEQ ID NO: 22811 - DNA, 302 bp, Glycine max
  unsure (1)..(302): unsure at all n locations
agctttttggttntaaataaaaagggttttccccttttttttccattattttattcaagctctgccacatgtccctatttgattggagcaaaaagggcccactttctctttttgactgtgacccatactcagtcacaaaagtgagaaaaatctgacctttgaaacgctacaatcctgcctcggtttgcgtgccgtttctctgattccagtttctcgcgtttctctgcgtccgtcggggccagttttcgaaagcaagcaatatatatatcaaaacgctcagaataaaaccccgagcgtggttc

SEQ ID NO: 22812 - DNA, 282 bp, Glycine max
  unsure (1)..(282): unsure at all n locations
ntaaaaatttactcccaagtattgttcatacttcatacccgggaatgtagtaataccttggtatacttcatttttatcctcatagtaaggggtcagaatgttatatttccatagcaatatgagagtttattttctaactcaattgccacttccattttcactcttactttttattctaaatattttgagttttaaaaatattcctaagaatattaaatctaaccgaacatattttaaattactcaagatagcattctaggaaagtattctatgaatgcattc

SEQ ID NO: 22813 - DNA, 424 bp, Glycine max
agctttattaatgtgtgaaaaccagaatattaattgaaggaaaacgtagttcttggttagtggtatatcaggtaacaaagtcaaatgaatatcgggtaacaaagtcaaatcaatgcaaatgcataaagaccaatcgcaaaaataacttggacccataaataagaaactaatggtgggtgttggaagtttgaaccaagaagcttcaatctttggtcggaggcttatcaaagatcgattaccgactaagtaaataaaatcaaatcgcaacactaataacaatgattgtgcgattattattattaaaaaattgaaggatgacatgtctaaggtgtacttaagagggaaaatattgagtctatggatattatgacattcgttacgaagattggacttataacttcaaacttacgaagagaatattaat

SEQ ID NO: 22814 - DNA, 434 bp, Glycine max
  unsure (1)..(434): unsure at all n locations
tgggaattaaggtaaaatggacatggccaatttcaatagtctccacatatgtttggtcctctaagtagaagcttcagggtgggccataagtttgtcaaaccctggttcatcaggtcttctggtttaggcagtaagcacgctgcaggcttcatagatctcagctgtttgggtggtaagggaaaaggaacaaagggaaaacaagagcatcagaattctaaacgggcactggtcaggttaagatatcaatctcttacatactaatgacactgttctaaatctaaattataggaagttgccagataaaagataaatgcatttatgaacattgcattctacctgcatggaccattaagtctagtaagcatggtttctcctnctagaagcaccactctgacttgacaancctgaaacaggtactaaatatcagaattgat

SEQ ID NO: 22815 - DNA, 70 bp, Glycine max
agcttgagctgcagagtgacactgctatgtgtgacatccgcgcacttagccgacgtggcagatgcgcatc

SEQ ID NO: 22816 - DNA, 152 bp, Glycine max
  unsure (1)..(152): unsure at all n locations
tgagcacctatcctgactcacatatgcccggacttcttgtgtgtatgncaaccctcaccctctggagctaataaaataggaaagaatgcaaatttccatccatagaacaaaggatatgaaacgaaattccctatcatagagtgggagaatgc

SEQ ID NO: 22817 - DNA, 391 bp, Glycine max
agctttgaattctagtcaaaaaactcctcagacatgttctaatactcaggcatcttttacattcaaaaccggaaacttagattcctaggcatgagtcagacttttggcactttagtctagcttctacaaactacccacacactcacaatgcgcataatttgtttcgcaaactaagttccacaaaatcatgcgcaaatgccattgaggcatttcaccgaacacttggttggcgcatgttcaagcatgaaaatcaagggaatgggggcaatgtggcatgccccattatctcagaatgcaccctaggcctaaggccatttgctacaacccctcaattcaacaaaaacaagcaataattcaaggataaatccctcacgttttgagaaaatacatg

SEQ ID NO: 22818 - DNA, 374 bp, Glycine max
agcttgtctacacctttctcagaacaaataatttccttcaaaatttgcggttcaagctcttatctctcaacaatctaagctgaaaaatttactccatatgactcccagtacatcttcatacaatgattcaccttgcaactccagtggtgctgctcaaaagggaaagaaaaacaaaaccagtgaacaagttgtgttgtattctagcaattttgatatttctacagacaatgagaaactcgaagcacatttacaaggaatgcagtggagggtcatggaattagagaaattctgtaggaaaatgcaaatccaaatggcaaagatcacaaaatcaaaagcatcatgccatagttatgcaaaatctttgcccaagctat

SEQ ID NO: 22819 - DNA, 322 bp, Glycine max
aactcagcttcttcaaatttcaagaccgaatgtccgagtggtttctgatgttatgaggatgcttcttctttaaagttgatcttataccttgttttgataggaaaatcatgtgaatctttaattattttctttgtttgagaattgaatagaaggtaaatagttctttttccccaacattcttcagtggttaattaggtctactatatcattgaacaagaaatacccctacaggacacagcatgcagtatgtctctaagattacatttgttgttgtgtgatctatgtcgatgacctcactcagtgggataagcctttgttgttg

SEQ ID NO: 22820 - DNA, 367 bp, Glycine max
agcttatcggaggtggccatggaaattgaagggaataggcaatgagagcaccaaaattgttaggcagaaagctaggttcgaggccagtacctccagaaaggtaaaagagtgaaagaaagaatgagggaagaagcttttgattgattttctatatttctaaattacaagcattgccttatttatgctaatttccttctaacggcctttgtccttttgtgccaaggacaattcatttgcaatcattggatcaacaaaagttgattaccctatcccccaatacccaaccattacaacgaattggcaaaaaggaaaaaaggcaaaacaaatgcaatatggccactcaggttagctcctccctcttggtact

SEQ ID NO: 22821 - DNA, 296 bp, Glycine max
gaatactaagctgccgcacctgtgaagttgttttagtatgttattttgtgcttggtatcggtttacaaaggttggagaatgatcgtaatgtgttgtctatgtgccaaattgggcttgctgatccaaaaaaagaagtgcatgtatacttagaaaatgttgatccagaggggggtcctgttaatgaaattgggtgagtgataaaagtacatgcaatgcctataagttgcagtgcagaaaatgtggttgaagatgttgctgaagagtgttctcagaatggtattgaagatatggatgtt

SEQ ID NO: 22822 - DNA, 383 bp, Glycine max
agcttgccatcaaggggtcaaattggtggtgcaggttctgatgattctgtccatgagttactacctgggactaaacatcatagccaggttcacaaaattatgcctgattctgctggcattgcttctgatgaaaagaaagaaagaagttttcttataccgaaaggtgatacaaataatgttgtgataaaacaagtagagaggaaacgtagagctgtttgcctttttgatgatgacgacgacgacaaacctaaaactcctgttcatggaggagctgcaaaaaatatgaaatcgtcttctgtttcagaggtcaagaagagaaacattgtacactcagagaagtctgatgttgttcagctggctcaaagaaattccagtgaacttga

SEQ ID NO: 22823 - DNA, 352 bp, Glycine max
ttaaacaagtcaaagcaacgaatgacaaaaaggcatttggaattgactcaaaagcgccaaccagttttgtagaatcaccacttttgacttctggtggagacatctaatattggtgtcaatttatgagaaagaaacaatttacttttctatacaatacgaggattcaagaatctaaacatacaatgtgaagtttatcattatcttaagttcaagcaaggggagggctgagactgggaggtgatgtacaatgatgaggaaggaggatcaaatgtggcataagattgtttgccatgaagagtattcctttttttttatcccttgaatttaatagttttatgttgcgttcctgctc

SEQ ID NO: 22824 - DNA, 374 bp, Glycine max
agcttgtgtcacactctcaactgccgaagctaaatatattgccgcatgaagatgttgtgctcaaagtctctagatgaagcaacaactacaagactttagagtaaaccttgatcacattcctctaaaatgggacaacacacgtgttatcaatctaaccaaaaaccctgtcatgcattttatgactaagcacatagaaattaggcatattaaatgcatcaagcatagaataacattctgtttgtacaagtatgtgattcacattgctattcatatcattttttttgtttagtttgtgtcttacttattgatttatgtgcatactcattagtttgtttgaatatcacatgtttttcttagtaatttcgtgatttctc

SEQ ID NO: 22825 - DNA, 285 bp, Glycine max
ggagaggatgctcaatggaggaaaagttagagggttataaagagagaggggggagcacgaaattgaaggaataaaagagggagaggagtggaactttgaagtgtatctcataagactttcattcatcaaagttacaacaagtgttacacatgcttctatttattgactatgtagcttccttgagaagctttcttgagaaaacttccttgagaaacttctttgagaaaacttccttgagaagctagagcttagctacacacacccctctaataactaagctcacct

SEQ ID NO: 22826 - DNA, 383 bp, Glycine max
agcttgaaggaaaacttgatgccttggtcattctattaacccagcttgccatgaataaaaaatctacacctgttgcaagagtttgtggtctatattattctacagatcaccattcagatctttgtccttttttgcagcaatttggagtcaatgagcaacttgaagcttatgctgcaaacatttataatagacctcaatagtagtgaaaccaacaacagcaaaataattatgaccttttaagcaatagatacaatccaggctggaggaatcatccaaatctaagatggacaagtcctccacaacaacaatagcctatctctccttttcagaatgctgctggtctaagcaagccatatgttcctcctccaatacaacaacagtag

SEQ ID NO: 22827 - DNA, 369 bp, Glycine max
agcttataatgttttgcttgagagaatttcaaggaaagcaatagaagaaataaaaaagctaaataaacagaggagaaattgtataaatacgttatctattttccttcataaatattacaacttcaagaaaagaaaaagcgagagagaaaagaaagagagataaaatatttaattttaatattttctaggtataacagggttgtgagttgagtgagtgtttataaacacttgtttataagtttctctttacaataaaatatctatagcagcccagagatgtagacataattggtcgaactctgttatcaattgcatgtgcaaatattccgcatatatttcgtttcttacaaatttgattatagaaaattt

SEQ ID NO: 22828 - DNA, 325 bp, Glycine max
tcatgcttaacatgtatggcaaaactttattattgttgttcaagacatacaagtgagcttgttacaaatcttctacacttggagtgatcacctgcagtcctcttgaacccttaccacccactctgtcatcatgccgacactcaagaagcccaataggtttagccttctctaagtattctgaaaaaaattcaatggcttcttctgcaatgtacctctcaacaatagatgcttctggacgatatagattctttgtatacccttttaagatcttcatgtatcgctcaaccgggtacattcaccgttgataaacacgaacacaacattt

SEQ ID NO: 22829 - DNA, 364 bp, Glycine max
  unsure (1)..(364): unsure at all n locations
agcttttgcagatttagtttttgccagtgatttgattgaagtgggtctgagaagagacaaatttgattatcctgctttgatgaataggaagcctagggcaaatggagagaataaaaaggaatgaggaacccatgttgtgactgtcgttcctacatggccaaatttcccaccagctcaacaatataaatacttagccaatatcatcccttttcgttacccaccaccctatcagccaagaacacctaatcatccacaaaggccacccctaaatcagccacaaagcctgtttgctgcatatccaataccaaacaccacccttaacacaaaccaaaacaccaactagggaaggaattntccagaaaag

SEQ ID NO: 22830 - DNA, 231 bp, Glycine max
  unsure (1)..(231): unsure at all n locations
tcttaaganaccatcactagagtccttataattatttattagactaacaaggttaccagggggtgttggatgatgaggaggtttccacctaatggctttcttgtataagtaatcatcaatcaaagatcatttgtgagcctctttcttaacatgagagccatccttcaagacttgagtaagtgcctctctagttctgatgagttccacttcaatcacacaaacattggcacc

SEQ ID NO: 22831 - DNA, 351 bp, Glycine max
agctttctttgcatattgttttggaactatgattatgcttcatttgcaccccaagtcttttgtaaatcccacaattaaattgatcctgatattgtttgagttgttgttggttgcatattgtctacctcatatttttcttccaacaccttcactcataatggttctcattccttcacaatctccacatccattttgctaccaaaatttctgtatttctaattcttaaccttcctttgcctctcgatgaacaaacaatctccctcctaacccaagccatacttatctcgtactccttagctgcttacaaaaaggtttttttgtattctttttattttccctagaacaacttga

SEQ ID NO: 22832 - DNA, 287 bp, Glycine max
tgttctgttgtttatgcttatttcttatagatttgggtcccccaccttactcttcattggcataagctgtgccagtgtaattgacagcatctttgaaattgggaaggaaaccaaagcaaggatgtgtgaggagcctgtttccttttactacacctttctgattcctgaaaagcacaagaccttttctgccccttctcacgtgctgcgtatactctaatctttggtttgttttttttttcatatccgaattaaccactttatcaagagatttatatttggcacacatt

SEQ ID NO: 22833 - DNA, 382 bp, Glycine max
agcttatgttcataactatggtatggttttctaatcttgaaacttacaaaacagttatgaataagtatgcagccatgcaggtacataatgaaacagtatcgatagcaatcactgcaaagggaagttgattgtaattaccctttagaagttttatcatgagtccaccagtggccagtgttgaagacgagaatatctgcatctttatattgagatgaagatttaccaaccaaatcgagacgaagtgtttccttctttgtcccattcttatcagtcatttccccttcttgaaccaagaatggagacacaaaaagctccacggagaagtgataatcctattgagataccaaaccagctctgtgaggtaaagaataataaatcaaag

SEQ ID NO: 22834 - DNA, 305 bp, Glycine max
  unsure (1)..(305): unsure at all n locations
aatcaaaacaatgcgtaacggtcctgatntgcattttttgtcatttaaacatcttctttccacttatttgattgttatatataaatcttcgtgcatttgacccaaatgtgtattgtcattaatcaatcgtcaagtgtaatagttgactaatgatgtaacaacattgactacaaacttgagactcatgatgttgagtgataatatatatggcattgtcatacattgtttatcgtacaatcaaggataaaatgcataaattttttaaaataaggtgattaaacatgtgacaaataattaattgataa

SEQ ID NO: 22835 - DNA, 363 bp, Glycine max
agcttggagatgcttgcatggagttgtatgatttgagatatgaggagctctggtggaatttgttgagtttcaatgttgttgatgctttggaaagcagccattattgggttgaaaattgaaatgaattgaagtataaggttgagagatgaactttaactagagtagaacactagggttttgtatttgccttgtggaaaaagtagagaaggcataaactatttatagttgcatgggcatggatcgaaaggtcattattgttattgttggacattgtctaatgatgttggaattctgaaatccatgtactggtcaactacaaaggggtgtttcatgccttcaagattgtaatcacctggatacatg

SEQ ID NO: 22836 - DNA, 292 bp, Glycine max
tgaaatctgaatcatccctccaattttcttagcttttttaaaattaattaatggcctgtttgtttaagtttattcttagtaaaaaatgtacttttttaattaaaaaatatccatacaattgtcaaaaaagtaatctaatcataaaattgtttatgattagattaatttttgggaaaaaaatacgcttaaggtttcatagctcccgcaggtcccaagccaagggggaggatagtgttaggccctcatcatccaacgtaaaacttgttaaaataccgaatatggatcactcacc

SEQ ID NO: 22837 - DNA, 366 bp, Glycine max
  unsure (1)..(366): unsure at all n locations
agcttgctgtcagaaacaccgatctttgtttcgttggtattcccgncaagactgagcaagcacaaatggtttttgttgattctgaggtatattttgagttgtttatttggatgttggattgttgttcatatcgctgattgattatatactttgcatatttcacggtgatcaaattcatgatgtttgtaaagcggaccagctcaagtcttggaaagctaatttgaaggagaattccacttatgttatgcataatttcaaagttgtcaagaatgatggtcaatttatagtgtgtgaacatgagtacaagttagtttttattggagtgaccgttgttagagaagctgatatgcatgaactgccttttaa

SEQ ID NO: 22838 - DNA, 465 bp, Glycine max
  unsure (1)..(465): unsure at all n locations
acggccnacagactgccgcgtaggataccacatgatgaaccgtgaacncncgaanacncaagcctntgactcctgannnngnggacgggcggcagtcgtgattcttttttatcancaaaataatcgtggaagccattgcttccacacattgccatcatcacacctggcttaacaagaaactttcttatcttactctaagagatcgtaccaatcttctcagttcttcgtatgatgccagagcgccccacttatctatgagtccacaatagaaaacttctaagcttgtctagtgacaactacatgtcaacactgaacactgagatccttaagtgattatctcttagccgtgataatgctggccacttcttcggatacatcagaaactctacgcgggtgatacacttttgttcaatgttgcttggaagtagtgtactttccgaatcttccactcgtctaccatacgcg

SEQ ID NO: 22839 - DNA, 409 bp, Glycine max
gtgagtcacctgcggcatgcaagcttaataaagtccttagtgatccatgttgtgtgtgtgtgaaattgcattggatgagatgatgtgcaaagttgggatgtgtaacttcaattgaatgggaatgaaaaccatccagctgaaacactttgattcttgattgaaacactagcagaagtgaaaatttttctacttattcattgttgagtgtcatgcttgttaatctcttaaacttataagtgtattctctttatgatttcatcatgtaaaccatagcaagtgcgagctcaatgtaacatcacatttttcataaataaattaaaaagttttttatttaaaaataaatagttctagaaaaatgatgaggtttttgtaattaaataaataaggagaaataactctattaattaaa

SEQ ID NO: 22840 - DNA, 389 bp, Glycine max
  unsure (1)..(389): unsure at all n locations
ctcaagcttcttagtatcacagtccatcactccactgaaatggtgataagattcttataaaggaaaatagaggtgatgttgaatggttattctgcagaactttcctttaacatgcatttaaagttctatatgttgaaatttgtagtgtttagaccttcaaataaaaattttcattttttagtccttcaaattaaaaaaaaaaatgttctttttagtccctccaccagaatttgagatactaaaaaatgcaaagttttatttgagctgagggacttaaaatgaacaactntcgaatctgagggactaaaaacataattaagcccatacttaaaatatcttagcaccactcttctattggttaaaacagtcccttttagcacgacaatata

SEQ ID NO: 22841 - DNA, 374 bp, Glycine max
agctttcccgccggcaacaatggcggcatgcacgtccataacagatcccgtctgttataagtttgaaaagaaaccctctttggtaaaatgtttctaaaacaagccctctgaggtaaatttgcctcctcacttcattcttcatctccccaaccattctccccaaaccgtcaccgcgcgtgtcaacaaacgacttcggaacctatgctcataacagaaaatccgaggttatagcattcgacgagtcgaaaaccagcgtcaaaggtgtcctcgattcgcgggggtcacaaaaatccctcccatgttccacgtcaacgtggacctcaccgacacctcacccaacaacgacttcaccatcccaatcgtggaccttcgag

SEQ ID NO: 22842 - DNA, 359 bp, Glycine max
  unsure (1)..(359): unsure at all n locations
tgttacagaactcagganaatcaagaacaagcttgttcgcacatctgtcacgtgtatgatatccactcgacaaggtttgaagtagaggagaccttcaatcctataatgcaacgtggcggacaaaagtgggcagttaacttgaatggtcattattgtcaatgcagaaggtattctgcgcttcactatccatgttcacacattattgcagcttgtggttacgtgagcatgaactactaccaatatatatatgttgtttacaccaatgagcacatcttaaaagcatactccgcatagtggtggcctcttgggaatgaagcggcaatttctccttctgatgaggcatggacactaattcctga

SEQ ID NO: 22843 - DNA, 368 bp, Glycine max
agcttagctgatccctggaagtaaaacaatcaactttattaaaccgtaagctgctaaacagatttttaattggaatacataccttttatgataatagttctgaaacatctgcgaacacttttttttcttggaagccaaacactttcgtccctaatttcttgatcactctggtcaatttgcaccactataatccaatttctcttttttcttctgctattctcatgctaagacttttcccgatcactttgcttgattttcctggtctctggttcgtgactcaggttctgctgcataaaatcttggttctagtttgtgtattcaggtttgttgatgttctagttgttgaagtgaacgagtttctaagagaa

SEQ ID NO: 22844 - DNA, 402 bp, Glycine max
tcttatccaaagctcatcttgtggtgaagctccttcttccatggcttattccctagtggatggcgcctcctctcccctcttctcctttgtcttccgctgcatctccatggtggaaaaccaccattaaaggacctcattgaagctcaaagatccagcctccatagaagctccacaagcaagcttccatcatataccatgcaagaaaaacaaaatgacataattaaaactgagttgcctcccagaaagcgcttctttaatgtcattagcttgacgcttttacctcaatgggtgatatccattttgtcctttaacttcaggacctccttaccaccctccatcacttgcaagcagacattttgatatgacatatgcttgtcttcttcaaatagatcaaaattgatc

SEQ ID NO: 22845 - DNA, 376 bp, Glycine max
agcttatccttatggcttgcctctggacttcactctccgtgccaccccagaagatttaagccaagcccctactttcgaggggcagctccaaccttatgacgactatcccgggcaagacgatgaggaaggagatacccatctcggtcctctgctccacctcaaagatccgtccccccatgaactaccccaaccgaacatagtccgccatatcccagcttcacctacacccgtaaaagaatctgttcccgtcacggaagataggggaaagattgaggcgcttgaagagaggttaagagcagtcgagggccttgacaattacccattctcggatttggcggatatatgtctcgtgcccaacatcgtcatccctcccaag

SEQ ID NO: 22846 - DNA, 313 bp, Glycine max
  unsure (1)..(313): unsure at all n locations
ntgcactgtcatggatattctctggcaatatcgtttcagcaagactgaaaagacaaaccaatatccatcactacaaaggcacgcattcgtaaaatggtgggcataatttcactcatccaaagcggatccagaacaagtaaaactctggttccaatcccatccagaattcctcaaagcagctgatccagaaacttctgtgtttttgaaccaaaagtctcatctggcagcatttttagcaggatcgacatcaaaggaggtcttagctaaaaatctgaaggaatttctacaaatgttacagcaggaagaagaagct

SEQ ID NO: 22847 - DNA, 384 bp, Glycine max
agcttgtgaatcttggcaatttctttattactagtcacttaaaatgttatgacttctgaaaaaatcttcagaaacaagtcacttaaagaattgtgacttttggaaatgtattttttgaaatcagtcactggtaatcgattaccattaaggtgtaatcgattacacatcaacaaatgtgactcttcattttgaattttgaaaattaaaacgtttagagactctggtaatcgattacaagtattgtgtaattgattacacaagtttaaaatgatttaaaactgtaaaacacaagttgtaactcttgaaatttgaaatcttaacgttttacaaccctggtaatcgattactaccttctggtaatcgattaccagagagtaaaactct

SEQ ID NO: 22848 - DNA, 400 bp, Glycine max
  unsure (1)..(400): unsure at all n locations
ntgttttgcgcatagcaccccacatggtgtccccttagtctcctaacccccgcgacaaatcctcaggtattactctgctcccgtcagggcccgttttcaaaagtaggcaatatatatatatatatcaaaacgctcagaatgagaccctaagcgtggttcagaggttggttttgtttaattataggttgcacgcaaaatgataatttttagactaattaattgagaattaatctataacagtccaattatgggttactcttcgttaattagtctaacctgcgtatttctccgccaatgtacatacttctaccaagaatatatatatatatatatatatatatatatatatatatatatatatatatatatacactgagtaatatatatctatattaatatn

SEQ ID NO: 22849 - DNA, 371 bp, Glycine max
agcttcatgagagagtcaaagatcaaatttataggaaaagtaaaagctatgctaaacaagccaacaaagggagaaagaaagttgtcttctaacccggagattgggtttgggtgcacatgagaaaagaaaggtttccggaacagaggaaatcaaagcttcaaccaaggggagatggaccatttcaagtgcttgacagaatcaatgacaatgcttacaaagttgagctgcccggtgagtataatgttagttccaccttcaatgtctctgatttacctctttttgatgcagatggagaatccgatttgaggacaaatccttctcaagagggagagaatgatgaggacatgaccaatagcaagggcaaggatcca

SEQ ID NO: 22850 - DNA, 362 bp, Glycine max
cttgagcaattcaatggtcataactatacactcagtttttcgattcaggcgcataatatctcgagacgctcgaaattggacaatggaagctcttgagcaattcaaatggtcataactttcaactgggaggtgcgaatcatgcgcattatatattgacatgctcgaaattgaacaacggaagctcttgagaaattcaaatggtcataactttacactcggatgtccgattcaggcgcataatatttcgagacgctcgaatatgaacaatggaagctcttgagcaagtcaaatggtcataacttttaacttggatgtgcgattcatgcgcttaatatatcgagacgctcgaaattgtacaatgg

SEQ ID NO: 22851 - DNA, 298 bp, Glycine max
agcttgagatgaggaagtgtttatcggttaaacttcctgcttttattgctgaccacagagtggtacctgtagatatgtcgcggtggtcaagagaccttgtggacgttaggtggggtgctattgtccaaaaccaatcttgaccaatcctgacccaacccgggcatagttggtcagtgagaacctgtgatgtacctaagcatgctgagctcctggcagtcgacagataaaaggaacaaagaccacacatccaggaggctcgtggtggctggccagctgtgacattagtgtgacatgtggt

SEQ ID NO: 22852 - DNA, 394 bp, Glycine max
tcgaattcattacagagactgccactttattaattttatcgcgatatactatacaactggattggaattcaatattctcttacttggcttacaacggagtgcgggagaggaataattttaaaaaggaaacttcaattattcaacttcaaacaactattctccttgaaaagattagtttcaaaaaaatcattgaaaaaattcttttaagaagatattttcctccaaactgaaatccaccgagaaattaagtggtttgaaattatatatgttaaaatattggttctgaattattatccatctattattaatacattattctttagtatcatcaatcaatcacgataaaaaatatgaatttggtcatcctttgatgaatttggtccatcattttata

SEQ ID NO: 22853 - DNA, 355 bp, Glycine max
agcttctcggtatattatgcacctgaatattacctccgggtgacaagttatgaccatttgaatttctcgagagcttccgttgttcaatttcgagcgtctcgatatcttatgcgcttgaatcggacctccgagtgaaaagttaagaccatttgaattgctcaatagcttccactattcaatttctagcgtctcgatatattatacgcctgaatcggacctccgagtgaaaagttgtgaccatttgaatttctcgagagcttccgttgttcaacttagagcgtctcgatattttatgcgcgttaatcagacctccgagttaaaagttatgaccatttgaatatctcgagagctttcg

SEQ ID NO: 22854 - DNA, 393 bp, Glycine max
  unsure (1)..(393): unsure at all n locations
nggaaggatgctcaatggaggaaaagaatgtaggatttaaagagagaggggggagcacgaaattgaaggaataaaagatggggagaagtagaactttgaagtgtgtctcataagactttcattcatcaaagttacaacaagtgttacacatgcttctatttatagactacgtagcttccttgagaagctttcttgagaaaacttccttgagaagcttctttgagaagacttccttgagaagctagagcttagctacacacacccctctcattactaagctcaccttcttgagaagcttccttaagaaaattccttaagaatcctgagcttatctacacacacatcttttatatctaaactcaccttcctgagattagaagcttgagctttgct

SEQ ID NO: 22855 - DNA, 381 bp, Glycine max
agcttggagttgcaatagtgtttatgtttctccttcacgtcgtggataattaacttggggtcctatcttttttatctttaagtttaatgtgctaagctttttcaattttggtctttggcaaatgtgtacaaagatattcatgaactattgattaataggaacaattcaacacttgtagtatatgaagaggcttttggtgtattgctaaattgccgatttttggatctgatgcagggctaactcgatgatgcttactccaatatcaatgatatagagtcctcagaaatggagggtttttgcttataaaaaaataaatattgaaagttctattttaatatcttggtttagtgaagattctaataaacaagaagaaaagagaca

SEQ ID NO: 22856 - DNA, 321 bp, Glycine max
tgtacacacaagaaatgaagcacttcttctggttttggatctaaaataccgccaaaggtggtgacttttatgtggagattgatcctaaataagttgccattgcgagataaacttcttcagcgcaacatcatcactaatgcaactgatgctttctgtccgcagtgtaatacgacgcaagagacaaggacacatgtgatcctctcctgctcaaaaatatctcaactctggatggattggtacagacaagaaaatgtccaacaactttgccaaactcgatggagactcacctttggtagcacatgttcccaaccagttcaatct

SEQ ID NO: 22857 - DNA, 377 bp, Glycine max
agcttggaggctgtaagatattggtttttaacttataatctcatttatgcactctgttatgttatgtgtggtgattgtgaatatttccttttgtagttttgttctgtatggaaatctggttttctacctttttataggttcttaaattactaagagcatctccaatggtgatgtaagcaacctactttgggctcttaagtgagtccaaaatgggtgttcccactattatgtcactatgtcactatgtcactatgtcactatgtcacgtcacttttaggcaacccacatttttatccttttttatatttttatttaattcttttcaccattaaaatactaattttttttattcacaatcaactttcttatacaagttg

SEQ ID NO: 22858 - DNA, 394 bp, Glycine max
  unsure (1)..(394): unsure at all n locations
tcttcttcaataaaccgtttaaaaaggcactcttatcatccttttgaaaaagcttaatgtttttgtgagcaacaaaggctaaaatgattcttataacttcaagtctagcaacatgaacaaaggtttcagagaaatctataactttntgttgattatatcctcaagctactaacctagctttgttgcatactacttttccttgttcatccaacttgtttctgaagattcatcttgttccaatggtgctcttngtttctggcattggaacaaatgtccagacatcatttttgttaaactgattcagtttttcttccattgtgattatttagtcatnttctatcaaagctttgtctatagttttaggtttgatttcaaacacatggtctttgaatga

SEQ ID NO: 22859 - DNA, 358 bp, Glycine max
agcttcgattggaccatttagccatgtctttactattaagaaattcaatatacaattgattgtcatttctttatttaatgaaaaacatttggctgaacaagggagaagaaaaaccttgtgtttggcaggcaaaaagtgatattattgcttcaatgtgtcaacagtagaatacttaaatgatgcacggttgaggcgagcgaagttgcaaatctctgactgagtaaggtggagaaaaaggcaagtgccgtagctctccaggatgtcgctgaggcccaaagcggcagcgaggtcgtaggaactaattggtgaacgaatgatggtcgtcaatgttggattgggaagatgggtgaaggggtat

SEQ ID NO: 22860 - DNA, 340 bp, Glycine max
  unsure (1)..(340): unsure at all n locations
tgtnatcgataaactgatatgagacatttctctgttttcttcaaacacttgtgtaattggttacaatcagtctgtaatcgattaaaacagaagagttttaactatagaggaaattttctaactttagaacttttcttctaactccaacatgatgatgcatgatacacatatgaaatgatagagacaaagatgcaacacacaatacaataatcaatacaaatgtcattcaagagagttgggcatgtaaaagacaatttcttcaagctcttctttaagctttaaggctaagtcttcatgttgctttccctatcttaacatgcatagtttcaactagtccgct

SEQ ID NO: 22861 - DNA, 426 bp, Glycine max
  unsure (1)..(426): unsure at all n locations
ttgccactttgagcactttgggacctncagagatcacctgcaggcctgcaggcgtgcgccaacgcgtatgtataaaagatgattttttttataagacgtgagaccgcttgtaataagagcgtcgatcactggttgaactatttcttattatgtaaagagctcgaaagaaaagtccctaacgtttaatcggctcacctatgtgcgagagggtctacgtatgtgatgaacgaattccatatgtgcgtgttagatgagagcttacatgattgtgcaacgcttgcatgccttggacgctcaacttgtatggcgctatctcacgttactactcggcaaaccagcggaccatgcgtatacttgattccagagaggaaaacgtgccccgcgggggtatcctggctatttgcatgaccaatatatccgatgagg

SEQ ID NO: 22862 - DNA, 276 bp, Glycine max
tgagagcagcaataggaaccagaaccctgcgtacactgatagcttatcacgaggcccgaacccttcgatttcatgtcaacgattaacgccagaaaaactctcgtctcgccgggaaaaaagattatgcttacattgcaaagagaagtactcacaatgtcacaaatgcgcaccttcattcttctcactagttgctgaagacgatcaattaacacctgaagttgtctcacggtcaccctcaccatcagatgagttacttatggaacccccgcctgccca

SEQ ID NO: 22863 - DNA, 385 bp, Glycine max
agctttgtgtaatcgattaccagtgactgtttctgtttaatcaaaagatgtaactcttcaaaaaggttttgactttttcaaatgggttttaagtttttctaaaagttataacttttctgaatggtcttcttgaccagacatggagagtctataaaagcaaggctttgttttacattccaatcatcttgaacactttttcaatcaatcctttacaagccttgaatctctttgaacttcttcttcttctttgtaccaaaagctttctgaagttttctggttttcaaaaccatgaaaacttgtgctattcatcttttcattctcttctccctttgctaaaaagaattcgccaaggactaaccgcctgaattctttttgtgtctctctt

SEQ ID NO: 22864 - DNA, 258 bp, Glycine max
ctcaagccttagtgtcaaagttcatgcttaccagctgaaggaggtgccaattcttaccaaatttggttgtggtttaaagtgtgctgtccttggggaggagtggagaacaatagcaacctttgctctaataacaaaaccgtaagtacgtaagcctcttgagactctgaacttttttacatgcttgactaaaatgaatatccttagaagtgatttcgttcacaaagttttgacggtgagtacgctagttattattttttt

SEQ ID NO: 22865 - DNA, 370 bp, Glycine max
agcttgagatgaggaagtgttgaagggtgaaacttcctgcttttattgttgaccacagagtggtacctggagatatgtcgcgggggtcaggagaccttggggacgtcaggtggggtgctattgcccaaaaccaagcttgaccaatcccgacccaacccgggcatagtcggtcagtgagaacctgtgatgtacctaagcaagcgagctcctggcagtcaatagataaaaggaacaaagaccacaaagcaaggaggcttgtggtggctggccagctgtgaaacttgattgatatgtgagatatggtctctggtaatcgattaccaagggtgggtaatcgattacaaggcttaaaaatgaagacaggaggcta

SEQ ID NO: 22866 - DNA, 379 bp, Glycine max
tagaacaataaacttggcctctcttaattgtctttggtcttggcgaccacgatcaacaaagtactttcggcacctactatatgttgacttgaccaacgctgttattggaatgctgcgacaatctttcaacaccttattcacacattctgataagttggttgtcatgtgaccatatcgtcgtccagatgtatcgtaagccatgctccatttttcctttgagattcgatcaatccatcttgctatggctggactcaattgatgaaatttttctaagttttgatcaaacacatgcttgcaaggagtgtacgctacatcaaatttgttatcatcaaaagttgtacgtagacatgatactcaaattaaattaatgtataaaata

SEQ ID NO: 22867 - DNA, 372 bp, Glycine max
agcttctcaaggaagttttcttaagaaagcttctcaaggaagctacctagtctataaatagaagcatgtgtaacacttgttgtaactttgatgaatgagagtcttgtgagacatacttcaaagttccacttctctaccacttttattccttcaatttcgtgctcccccctctctccttctctccctctttcttttcctccattgaagcatcctctccaaacttcttatccaaggctcatcttggtggtgaagctccttcttccatggcttatttcctagtggatggcgcctcctctcacctcttctcctttgtcttccgctgcatctccatggtggaaaatcaccattaaaggacctcattgaagctcaaag

SEQ ID NO: 22868 - DNA, 400 bp, Glycine max
tccatattgatgttgtagctgtatccacccgatttttcaccttctgttagtgtctatcaatcctgacatggaatagtgctggatgaaattatccataggcctccaatggagcactctaggttcctttacccatgagctgaattcccaccatagaggcataactttatgacacaggaagaataagtgggaggcagattcagctttgctctgacaaaaagggcacaaatcattttcaatggtaacatgcctcctaattaaattatccttagtgggcaatctgtcccatagaagtctccaagcaaagactaaggctctaggagggattttgatgttccataggtgatggaaaccaagacattgatcttcatgaaggtgatcagccttaatataaagataggca

SEQ ID NO: 22869 - DNA, 383 bp, Glycine max
agcttgtaagaaatggccaaggtacaaatcatgtatgttcaataatattcatcatggagtgcttttgaggcattaacatgcttaattaaatttattggcctacatattctacatgttatgcatcttaggagagtacgtaggagcatctattttctttcctatttgaaaaccacaacagcaatagccttatcttgttagggaggttggctacatggattacaacaatagcctcagtgaatcacttgaccaaacaccacccccatcaccacccctttttgttactactgaaccttagttttcttcttcttatcattctctttctctcctaagaccatcctctccttctctctttatatatcactttggaacttggaagctttttt

SEQ ID NO: 22870 - DNA, 379 bp, Glycine max
  unsure (1)..(379): unsure at all n locations
gctttatagctnggttagttnctatggaggtgtgtaatgatttatctcctaggttgcacctcttaatgaaattgttaagaaaaatgtgggctttaaatgggggcgggcggggagagggacaataacatgcatttgctccactcaaagaaaaattgactcgtgcacctattcttgcattgcctaattatgcaaaatcttttgaaatcgaatgtgatgcatctaatgtggggatataggttggtttgattcaagatggacattccattgcttattttaaggaaatgataaatgggggttgtcttagttattcacatatgataatgagttgatgccttggttatagccttacaacttggcaacatttcttttcccaagagtt

SEQ ID NO: 22871 - DNA, 330 bp, Glycine max
  unsure (1)..(330): unsure at all n locations
agcttgctctaaatntacattgatgtttgtatttatgggaggaggttgtatgccatttttgttttaagagtagtgtcccactggtaagactaactttccaaatgtttgccttcgcaggaaatggccccgaggaagcttgcctcaaagaggtccaggaaggacaaggcagccaaaggaactagttccgctccggagtatgacagtcaccgctttaggagtgctgtacaccagcagcgcttcgaggccatcaagggatggtcgtttctccgggagcgacgcgtctagctcagggacgacgagtatactgatttccaggaggaaatagggcac

SEQ ID NO: 22872 - DNA, 339 bp, Glycine max
  unsure (1)..(339): unsure at all n locations
tctatagaaggtcgttcctaatttctctacaattgcatcacctctcaatgagctggtgaagaagaatgtggcatttacctgnggtgaaaaacaagagcaagcctttgctttgctcaaagaaaagcttactaaggcacctgttctagctcttcctgacttttctaaaacttttgagctagaatgtgatacctctggagtgggagttggagctgtattgttacaaggtgggcaccctattgcttattttagtgaaaaacttcatagtgccaccctcaactaccccacctatgataaagagctttatgccttaataagagccctccaaacttgggaacatta

SEQ ID NO: 22873 - DNA, 377 bp, Glycine max
  unsure (1)..(377): unsure at all n locations
agctnttactgcattggttattattatgttcttacacattgcagactntaaatttgaaaccaaatggattgtaaaactatggcttgacttcataaattttttattttttttcaaataaggttaagtttgtttagtgtttgttgaataaattaattaagactgccggcctctttctttggctctgtaacagtttgggctacaatacttctgataaaacttcaaatgagtaactattaggattaggtatgataaattgtagctcaggtatagtttactcttagatacagatgtggttacccggttctaagcattgtaacatttaaatttcttaaattcttaaattattagcagcggttaaggttaaacaatgtggagtg

SEQ ID NO: 22874 - DNA, 347 bp, Glycine max
  unsure (1)..(347): unsure at all n locations
tcaaccattccaatacagctaaatttgaaccacttacaccccacgtgataaggaaagccaaaaaacatataaagtatcctaaaggaaatcccatcttaagcggtcataagctntttcaaggtcaattttcaaagcaagcactccagaactagagttgcattgatgaatgtgatggaccacttcttaagctagaattgttaaagtaaaagtatgaggttaaatcttcttagaagtgaaaaaattgaacactaagaaaaagattcattaacttaaatattaagattttggattaaaatatggtgtcaaatttccttatgtatgtgattactcatgacttattggtataa

SEQ ID NO: 22875 - DNA, 366 bp, Glycine max
  unsure (1)..(366): unsure at all n locations
agcttctctcctctcaattccaacatggtggagtcttaagtgtgtgtttctccctggtcttatttgtccccctcgctccatctttttcctcccctcactccatcttcttcctagtgggctttgatttctccatgtctgcaagtgacagttcttctacattttctggttgaaccattcgccaatgccaccatgaaagatgtgcagttattcgaactgcaagaacaaggaggaacccaggaaggttattctatacttgtgcattgccccaaacagacccagataactgacaattttttcaatgggttgaaaaaaaaaaccaagtttctaatcctttttctatcacaagaganatcatgatagtagatg

SEQ ID NO: 22876 - DNA, 286 bp, Glycine max
  unsure (1)..(286): unsure at all n locations
ttgtcaaagctattgaacagcgcatttatattttctagtggnngaaacttgattttggaattcaatgcttgtgattggtctgaattgatcaactgtatgatgcgagtgaattgaaatgcgtagatcatattgcctgaatgagcatgccgtcattataagagaaagaacatggaatttaaattataactgacaatgttagttggtttgtcatgtgattgcgaatgaacgcattatccgcaacctggtgagagtgtgatctttaattgtgagagaacgcatctacctt

SEQ ID NO: 22877 - DNA, 369 bp, Glycine max
agctttgagcaaattctaaggacaataactttttactcggatgctcgattgagtcccgtaatatatcgagaggctcaaagttgaaagccgaagctcctagccaattcaaatgacaataactttcaactcggatgtccaattgagtcccgtaatatatcgagacacgcgaaattgtaaatagaagctctagtcaaattttaacgacaataactttttactcgaatgcccgatagagtcccgtaatatatcgagaggctcaaaattgaaaacagagtctcctagcaaattcaaaccacaataagttttgactcgtatgtccgattgagtgccgtaatatatcgagacgctcaaaatataaaattaaagctt

SEQ ID NO: 22878 - DNA, 313 bp, Glycine max
tacttggatgacctccaatttgtggactcttccatttattgtccatatggttttcttgaggatgatcttgtcaaggtgaataaatttatttttctggccaactttgtagtgatggacatggaaaaggactccaaagtgccacttaatttggaagacccttctagaacaccactaagattttggttaatgtgcatgatggtcaaacaaagcttagtgtcatttgatgaagagatcacattcaatgtgtttgagactatgaatcacctattagatgagaaatcttatcttctgatggatgttcttgatgatgctt

SEQ ID NO: 22879 - DNA, 299 bp, Glycine max
agctatgagacgcgtgtgaatctttggtatcatcaaaacatttatctggatcctttgtctacgactcctccatagctgattctgtaattcttttgatttgggcacgaaaacctcacatttagatatatatatatatatgtgtgtgtgtgtgagtgtgtgcgagtgcgtgggcgtgcgagtatctgttgccatccctcatcgccaatcatatggccgcggtaactcccggaagggtccttgaaccccctttccccaagtggtatgaccttatcgcaacttgcaagcaccatgggggtgtt

SEQ ID NO: 22880 - DNA, 364 bp, Glycine max
tgaccaccaagagatgtcgggatgtttgtcctatatggaagcttcaatggaggtagagaatgagggttagagagagagagagagatgcgtggaaagttgaaggaagaaagggagagaattttaactttgatgtgtgtctcacaagactctcatttatcaaagatttgacaagtgttatacatgtttctatttatatcctatggcactaactaaatgaaagcttacttgagaaactttcttgagaaactttcttgataagctctcttgagaagctatagcttttctctacacacccctctaatagcgtctctctctcccatgctaaaattcatttaaattcataaaaggctcttcttcaaagatt

SEQ ID NO: 22881 - DNA, 378 bp, Glycine max
  unsure (1)..(378): unsure at all n locations
agcttccttaagaagattcttaaagtttttagagcttagctaaacacacctctctaatagctaagctcacctccttgagatgagaagctagagcttatctacacaccccctataatagctaactcatccccatgacaaaatacatgaaaataaaaaaaattctctactacaaagactactcaaaatgtctcgaaatacaaggctaaaaccttatactactagaatgaccaaaatacaaggcccaaacgaagcaaaaacctattctaatatttacaaagataagcgggctcatacttagcccatgggctcgaaatctatcataaggctcatgagaaccctanggccttcccttggatctctggtccaatctacttggat

SEQ ID NO: 22882 - DNA, 258 bp, Glycine max
gctcccgcatatcctataaataggggtagaggtgtttggaaagaacgttcaggcctcctggctattcgagaatcacttgtgattagatgaaaaacattgtgtccgagatgaaaatccgagccgaggcgctatcgttacatgtcctttacgtgtgcgtgagtgatttcatgagagattctctaccgcttctcaacgttgtccgttcgtgacttcatctttctttggacttctaccggtgtgtacccaaaatctaacttt

SEQ ID NO: 22883 - DNA, 342 bp, Glycine max
agcttttaaaccttgagttttatgaatattattttattggaagtattcctcctgagctaggaaatttatttctgttggagactctgagggtctatcacaataatttgaattccaccattccatcttccattttccactagaaatcgctaacacatttaggactctcagagaatatattggaaggaacaatattctctgagattggatctctgaattccttacaggctctaaccctgcattcaaatgctttaactgggaagatcccttcatcaataacaaacttgacaaacttgacctatctgttaatgagccagaatattcttttaggtgaacttgctccaa

SEQ ID NO: 22884 - DNA, 407 bp, Glycine max
ggatccttgagtcacctgcggcatgcaagcttgaaaaacataagtagtttcagccttagttttaataggaaatatccaagtatatctggaaaaggcatcaataaaggatacataatacttgaaaacagaatagtaagttaaatgagatggtccccacagatctgtaaaaaaaagttctaggggagagtaaacagaagtagaagaatgagatggtagcctgtgagacattcccaagcaacaagaagcacaaaagtctgaaaaaaatttattatatgaagaaatattacactggttgaagactagcttcattacatgactattgggatggcctaacctagcatgccaaagactaacagtgctaggaggagaaataacagaactggaagctacactagaatttttattaa

SEQ ID NO: 22885 - DNA, 396 bp, Glycine max
  unsure (1)..(396): unsure at all n locations
tctcacaattctncccaatcttctgggaataaccctacttaactgattaaaagacagattcacccctctaagcctccctacaaaaccgggaacagaaccattcaattcattaccagccaaatcaaaacctccaatctctcaagagacccaattgaactaggtatctctccaacaatcctattaaaccccagattcaaaaccctcaaattcttcaagccatcgactctcaagggaagatagccactaatcaaattcccttcttaatcgagaacctcgaggttctccatgccccaaatcgctttcgggatttcactctccaacgcgttgaaggggagagacaaaaccctaagctccgtgagctcggcgatcaaactcagagaagaaacattttcgaag

SEQ ID NO: 22886 - DNA, 370 bp, Glycine max
agcttgcggactgtacctccgatcgaacaccgtctggtttctaacccggcctaagtttatcgtgggctgaagcactggttctgcttccctaactgcattggaggcggttgccgtggcattatcctctagagttttctggagttttagcatggcctccgtgatagaagccatttgatcttttaaggccgatagatcggccttcatctactcttgcacgccctcttcattatccatttttctggatcgagtgttataggggtgcctttgtgcttttttagttatggcgaactccctaaagaaacatacaacggtgagtatgccaccaaaacatgaatatgcaaatgaatgatcggagcacttggatccaccc

SEQ ID NO: 22887 - DNA, 395 bp, Glycine max
  unsure (1)..(395): unsure at all n locations
ntgtgtaatcgattacactaattggtaatcgattaccagtgattgtttctgataaatcaaaagatgtaactcttcaaaaaggggtttgacttttcaaattggttttaagctttttctaaaagttataactcttctaaatggtcttctcgactagacatgaagagtctataaaagcaaggctatgttttgcatcttaaattcaattcattccttcacactttacttgtccaatcaatcctttacaagccttgaatctctttgaacttcttcttcttcttgtaccaaaagctttctgaagttttctggttttccaaaccttgaaaacatgtgctattcatgttttcattctcttctccctttgcccaaaagaattctccaaggactaactgcctgaa

SEQ ID NO: 22888 - DNA, 369 bp, Glycine max
agcttgtaatcgattacacacatactgtaatcgattaccagaggagattttcagaaaatattctcaacagtcacatcttttcatttggttcttgaatggtcatcaaaggcctatatatatgtgacttgagacacgaatttgctaagagtttttctgaacaacaagtgtttattctctcaaaaagcaaaatcgttttatcctcttaagaattccttggccaattcaattgcaattcattaaggaatcatttgagtgctcagattgtaaaatctatctcttcaagagagattcattcttcttctctttctaattcactaagggattaagagaccgagggtctcttgttgtaaaagaattctaaacacaaag

SEQ ID NO: 22889 - DNA, 386 bp, Glycine max
acactctgaaactcagcttttatccaggctcatcttgtggtgaagctccttcttccatggcttattccctagtggatggcgcctcctctcacctcttctcctttgtcttccgctgcatttccatggtggaaaatcatcattaaaggacctcattgaagctcaaagatccagcctccatagaagccccacaagcaagcttccatcaagtggtatcagagcacaagagcttcaagtaggtgctccttaaacctccattatttttttttctttaccttctcttccattgttgtttcttcatttttctccatgtatctcctcacatgtattgttctaaatgttgttacatgattctttagagtttccaccgattaaacttgctatagaag

SEQ ID NO: 22890 - DNA, 361 bp, Glycine max
agcttatacagatgaattattaaagctgtattattaatgatgaaatggttggactaatactggagcattattgcttttgaaaaatgaattgtctgtcattagaccagctgtcgccggatattcacaatgatcgggcaggtgttttcatgccattatttttgcgacatcgaatggagtcatctggttattatttttgggtcactatgtattgatcgatgaacaactttatgactaacaaactctattaagtgtcgaactttacgatggatatcatgtggaacgtgacagttacagcgaggggctctcattttatagaagaacataggtcacgaatgatttggtgagcgaaatcatgcctttt

SEQ ID NO: 22891 - DNA, 452 bp, Glycine max
  unsure (1)..(452): unsure at all n locations
aggcnnaagtgnncnttcaatcgctgaatcctgtgacacacagaatactaagcttgatcagcactccaccattgccaaggcagcattttctgttttttcctatcctcctacaacgaacggcacaagccttattttgtactagcctgaaatgttagttgactgacagtggtgacacttcaagccctcaaactacagtcagttacttatgtcggactgatgtgcaatcattccatgaaacaaaagtgcgtccgctggaatattgaatgttctactcctaacacatggtttacaatgaaaacacatgatttatgggttgttgctaaagtttgtatgatgacagtaataatttgtaaaaattcatttgcaatactgcacaatgatgaatattgttcctctctttgccctcaacttcttagcgaggattattctctaaacttccattatttttatcg

SEQ ID NO: 22892 - DNA, 271 bp, Glycine max
agctgcatacttacatgtgcagcgccaagttgaataatcatacctttaagccacattgcttccttcactccttcagctatggacatgtattctgcttcatagttgaaagagcaacaactgaatgtatgatggctctccaactgacagctgtagcaaacaaagattgcacattgaatttgctgacagttctacattcaaatttgagccggtcgaaggattaccggacttaaataaaccttccaggtaaaaggtattggtggttggaattgct

SEQ ID NO: 22893 - DNA, 362 bp, Glycine max
ctttcagcaaattcaaacgacaatacttttttcctcatatgtctgattgagacccgtaatatatcgagacgatcgaaattgaattctgaagctctgagctaattcaaacgacaataatgatttgctcggatgtctgattgagtcccgtaatacatcgagacgctcgaaattgaatgttgaagctctcagcaaattcaaacgacaataactttttactcggatgtctgattgagtcccgtaaaacatcgagacgctcgaaattgaatgttgaagctctcagcaaattcaaacgacaataacatttttcctcagatgtctgattgagacccgtaatatatcgagacgatcgaaattgaattttg

SEQ ID NO: 22894 - DNA, 296 bp, Glycine max
agcttggaacgatgcttcaatggaggaaaagaaagagggagagaaagagagaggggggagcatgaaattgaaggaagaaaaagagagagaagttgaactttgagttgtgtctcacaagactctcattcatcaaagttacaacaagtgttacacatgcttctatttatagactaggtagcttccttgagaagctttcttgagaaaacttccttgagaagcttctgtgagaaaacttccttgagaagctagagcttagctacacacacccctctcataactaagctcacctccttgag

SEQ ID NO: 22895 - DNA, 398 bp, Glycine max
tgaaattttcgaatgaagagagagattatttggtctgttttaaaaaaatgattttctttttttctttttttttttcatttctaaaagcacttgccacatgtccaattttaagtggagcaaaaggggcccacctttttcccttgattcgacttcatactcagtcacaaaggagaaaaatttgaccttttggatgctgaaatcctgcctcggtttgtgtgccacctctctggttccagttcctcgcgtttctctgcacccgtcggggtctgttttcgaaagtagggcatatatatatatatatatatatatatatatatatatatatatatatatatatctatatatatatatatatatatatatacccaacacgcgcacatagtacaccctggcgggcg

SEQ ID NO: 22896 - DNA, 373 bp, Glycine max
  unsure (1)..(373): unsure at all n locations
agctttcaacaagagtcttcacaaataactcatcatgaaacagaaaactaacaaaactacccgtcatatctcccaaaaccccatacccacgaaaatcaaaggagaaagaagtccacccaaacctgaaatttcgaagtcccactcgtagccacgcacttcacgactccaaaaacgctctcctttcgcgatttggggcaaaaatgatggccaaaggttgaagctttgcttggagcttcaatggagaatgagggagaaagaaaggcaacgtgagggagagggagagagaaagcttctgcaatttttctgctgagtgaagagagagagagttgctntttggtttttaaaggctttttcctcttttcttattatttta

SEQ ID NO: 22897 - DNA, 396 bp, Glycine max
tcaacattcaactctagcgtctcgttatattatatgactcaattagacatccgattaataatatattgtcgttggaatttgctcagagcttcaacattcaatttcgagcgtgttgatatattacgggactcaatcagacatccgagtaaaaagttattgtcgcttgaatttgctcaaagcttcaacattcaacttcgagcgtctcgttatattataggactcaattagacatccgagtaaatagttattgtcggttgaatttgctcagagcttcaacattcaatttcgagcgtctccatatattacaggactcaatcagacatccgagtaaaacgttattggtggttgaatttgctcagagcttcaaaaatcacttttcgagcgtcttgatatatt

SEQ ID NO: 22898 - DNA, 367 bp, Glycine max
agcttatatgcaagcaatagagttggatcagtcgttatgtccattatcatttttttagtacttccctctttcctattttaatttagttaagacttaaatgacttcatttttttaaaccttattttttgtctcacatcttcgcacactccctcccctgtgataatacatacactccttctgaggcgatgaacactccccctctctttcattagaattgctcctctctttcacttcctttatgacctccgattcaatatcaatagcatgcttcgattttccttacttgtttggtctctttgtctaacattagtgttattcatcaagggctcaaacacaatatgtttgtgctcttattttgtgatttatg

SEQ ID NO: 22899 - DNA, 383 bp, Glycine max
  unsure (1)..(383): unsure at all n locations
ctttagaatntatacaagagaactatgattattgatttatctatncatgnngnnntttatgagactaaccctataaggccaagagaggaaacacttgatgatattacaaattctttagaagatatgcacattcataatgaagggcacaaaggcaaaagaaatggaaataatgaagactctcaaattgatgaaactaaaacaagttcaaataaagatcttccaaaagagtggagaacttcaagatatcatcctcttgataatatcatcggtgacatatcaaaagggtaacaactagacactctctcaaagatgcatgcaataatatggcttttgttctttaattgaaccacaaacttaatgaagcctaattgatgaacattgga

SEQ ID NO: 22900 - DNA, 368 bp, Glycine max
agctttagtgactatgtgcaaccacaaattttacattgtgtcttcattgatatgttctatagttgattttgcatgaatttctaattatcataacatattgttcatggatatgattttggcattctttctttctttgcattttaagccactggccaaaaatctatccagatgtatattgttttatcatttgcaagccctttgagccaaacacttcatattttgttggaacactaaactaggataaaagtttcctaccttaccttaagttaggggagcaaaggtgttttgttggggatttctatcattttggtgactaatgtgatgtaaatactttgcttttacatgtgggtattaaggtcgattaaata

SEQ ID NO: 22901 - DNA, 132 bp, Glycine max
tctacatgtctcagagttttagagagtgaaaggttttatttctagagagtctgagagattttgttgcgtgaagatctgcatagaccacagttggaagaggaagccgtcctgagagctttatatgagtttatt

SEQ ID NO: 22902 - DNA, 357 bp, Glycine max
agcttttgaaagcagatttttatctccattttttagtaaagaatgtaaataataggaaataatttcttatctcagaatttaagaattcgattcaaagcaacattaaactaatatatactgcacaagactataacaaatatagaactctacttatgcattttcctttcagatcatagatcacttcaaacctaacctatgcaaactatttacctaagatgttacatatatttcctattttgtatagaagcgtaatcatgggtagatattctaccttcaataatgcacaatgctgaacctctccttgagaattttcgtaaagcactttataatttgggaaccactttaccttagctctta

SEQ ID NO: 22903 - DNA, 284 bp, Glycine max
ttcattttctctttcatcatctctctcttggttggtgttgtatttagggtttctgttaaagtttcatggtataaatatatgtaaaggagtagtaacagataaatttgtaattttaatgggttttgtttcgttgttactttatgagtttatggtctctataatgttcgttgttgctctctgagtttaagatttccatttcatcgattacaacatcaacaccgaagagtcaagtattgtcctcacatatggtattcttctgctaccgatatctttttttctttatc

SEQ ID NO: 22904 - DNA, 183 bp, Glycine max
agctagacatacgcgactttgaatttgttatgctctcgaagcaatccaccatggggcactgacttacaatatatctgcgtgcccgaaaaaaaaaagagtaggcgtttctctcccaaaacttaaaattgcactgccccatcctatacaagcactttcgcaaacccgaagtgctttactttatat

SEQ ID NO: 22905 - DNA, 364 bp, Glycine max
  unsure (1)..(364): unsure at all n locations
agcttcttatctttaaacaaagcaggggtcttcctattcaacatttaaatacagtaaggaaccaatcatacctttgtactccctttntggagaatcattacctttctcatcctcatcatctttctggattattagaagccctaggaagaactttagctcacccatcgtactcatttcaaattcatctttcattaggttaaaaatcttcttacacatcctttctaaggttgcaccaattattatgtcatttgcatagatctgaacaattagaaggtttcctttctatgcctttctaaatagtgtagtgttcactattcctttatgtcatctacatagatttgaacaatcaaaaggttttctttct

SEQ ID NO: 22906 - DNA, 364 bp, Glycine max
  unsure (1)..(364): unsure at all n locations
tcttgcactatagcatataatgaagtcttttttctctatcttcgntctccttaaacaccttattagaggagttcttccatctaaacctatttttattttccacatcttattgatccttctcaagatgaaatccaactcatcatccacattagattattcttcaaaatcctcatcagaagagttgtttttgcttagtgctctggatgatctgaataaggattccttggacgcacttttgaacaatgacttcgatgaggattacttggacaatggtgctttcaaagcactgagagaaaaatattttcccttcttaattcctttaccctgctgaagttcttatctatggacctttaagttccaacaa

SEQ ID NO: 22907 - DNA, 349 bp, Glycine max
agctttgagctaattcaaacgacaataatgttttgttctgatgtctgattgagacccgtaatacatcgagacgctcgaaattgaatgttgaagctctcagcaaattcaaacgacaataactttttactcggatgtctgattgagtcccataatacatcgagacgctcgaaattgaatgttgaagctctcagcaaattcaaacgacaataacttttttactcatatgtctgattgagtcccgtaatatatcgagacgatcgaaattgaattctgaagctctaagctaattcaaacgacaataactttttgctcggatgtctgatggagtcccgtaatctattgagacgct

SEQ ID NO: 22908 - DNA, 147 bp, Glycine max
  unsure (1)..(147): unsure at all n locations
ctaagcttaacaatcatttnagcgctcgagttgacgggtttaatttttatccgataaaaaggatcgtgtgcgaatttgctcaatgcttcacattcaattcttagcgtcccgatttattactggacttatcagacaccctagtcataa

SEQ ID NO: 22909 - DNA, 380 bp, Glycine max
  unsure (1)..(380): unsure at all n locations
agcttcaaccaaggggagatggaccatttcaagtgtttgaaagaatcaatgacaatgcttacaaagttgagctgcccaatgagtataatgttagttccaccttcaatgtctctaatttatctctttttgatgcagatggagaatccgatttgaggacaaatccttctcaagaaggagagaatgatgaggacatgaccaanagcaagggcaaggatccacttgaaggacttggagggcctgtgacaagggctagagcaaggaaagccaaggaagctcttcgacaagtgttgtccatactatntgaatacaagcccaagtttcaaggagaaaagtccaaggttgtgagttgtatcatggcccaaaaggtggaggactaactg

SEQ ID NO: 22910 - DNA, 397 bp, Glycine max
  unsure (1)..(397): unsure at all n locations
aaactcaagcatgcttctacaatctcccncttgtgatgatgacaacttctgaaatttagaaacacacacacacactttttcctagtcgatcactcacataaatttccattctcccccttttttttttgaatttatgcttctcttaaaattaagtttattactcatgtgagttctcgatttaatccctatttctctccccctttggcatcaacaaaaagccaaagtgtgttacaagtttgaagcattctaatacaactaagcatccacacaacattcatggaaaaatataaaccatatcttgaagcaagaaccatgaatagatcaaatatattaagaccacatagtcgaattatataattaatattttttcaaacataccatgcaattaaagaaatag

SEQ ID NO: 22911 - DNA, 379 bp, Glycine max
agctttctcataagtcctaaatgacatttcaagctatgtattaactcactttaagctccatttaccacagaattcagacttaaccttccaactctcaaagcctcactctttttccactcataacatcacattctcactttctaaccctaggttagttctacccttcatctctaacagatttccatcagcaatttcagcatataaacatcacaaacatcatcacaaaaaccctaaaacagaatgggtatgtttaactcatccaaacatggcaatttcaacaagctttcaacaagagtcttcacaaataaccatcatgaagcagaaaactaacaaaactacccatcatatctcccaaaaccccatacccacgaaatttaag

SEQ ID NO: 22912 - DNA, 183 bp, Glycine max
cctttggttattaagagggcattttccaccggagtcctgctgcctacccacatggatggccaggagctacctttacccctgtactctgacgttgtcaaacgatactatgcatactatgtgcggcaatttgtgctgacgaggcatgacctgctattattgtgagtgcacttactggtcttcccc

SEQ ID NO: 22913 - DNA, 377 bp, Glycine max
agcttttgaatgaaacaatgtaactcttcacatttaaatttgaatttcaacgttcaagggcactggtaatcgattaccaaaacattgtaatcgattacagccttttgaaaatatttggaatgttgtaaattcagtttgaaaacattttcaaactcattttgctactggtaatcgattacaacaatatggtaaacgattaccagagagtaaaaactctttggtaaaggttttgtcaaaaactcatgtgctattcaaagttttgaaaaactttttaatacttatcttgattgagtcttttcttcattcttgaatcttgatcttgattcttgagatcttgaatcttgattcttgtttgtaggctttcttcttgagtcttg

SEQ ID NO: 22914 - DNA, 344 bp, Glycine max
  unsure (1)..(344): unsure at all n locations
ntngagaaattcaaatggtcaaactcttctcacggatgtccgattcatgcttataatatatcgatacgctcgaaattaaacatcggaaactctcgcgaaattcaaatggtcataacttttcacacggatatcggattcgggtacataatatgtctagaagctcgaaattgaacaacggaagtgcttgaaaattcaaatggtcataacttttcaccggatgtgctattcgggcgcatattatgtcgagaggctcacaatttaacaacgggagctcttgagaaatataaatgggcataactcttcacacggatgtgcgattcccgcgaataacatattgagacact

SEQ ID NO: 22915 - DNA, 373 bp, Glycine max
agcttgtaatcgattaaaccaatatgagacataactttgcaaacttaaaacaacttgtgtaatcaattactgtaaggttatgattgattaaaacagaaagttttgccttctgaataaattttctaactttagaaattttctccttactcacacatgatgatgcatgatgcacaaatgatatgatatagactaagatacaacatacaatataacaatcaatacaaatgccactcaagagagttgggcatgtaaaagatagcacttcttcaagctcttcttcaagattcaaggctaagtcttcatgctgctcattttgctccccctgtctctaacaagtgattttgtcaaaccattataactgtgcactccgacc

SEQ ID NO: 22916 - DNA, 350 bp, Glycine max
gacacctgaaactaagctttcatatgatggtggtagagagctaacagaatcatgtcaacatcttcatcctctatcttaacatctatatctcttaattccatcaaaatagaattcaattcatcaagatgatctttaagagatgtaccttctttcatgtgtaaaccaaatagactccttttcaagaagagtttgttgcagattgacttagtcatatacaacttttccaacttgagccataattcacttgcagtttcttcatttgcaacttcatataaaacttcatcagacaaggaaagcaggattagtgagtgagccttttcttcttgttctgcaagttcttcaatctttta

SEQ ID NO: 22917 - DNA, 342 bp, Glycine max
agcttatgaccattttaatttctcgggtttttccattgttcaataaccaatgtctcgatatattatgcacctgaatcggaaatccaagtgaaaagttatgaccatttgaatttctcgagggattttgttgttcaattttcagtgtctccatatatggtgtgcctgaatcggacctccgtgtgataacttatgaccatttgaatttcttgagagatttcgttgttcaatttcaagcgtctcgataaatgatgcgcctgaatcggacatccaagtgaaaagttatgaccatttgaatttctcgtcagcttccgttgttcaatttcgagcatctcgacatgtgat

SEQ ID NO: 22918 - DNA, 395 bp, Glycine max
tcttttggacctgaacaagcgactaactcctcttttataaccatgctatgcgctcgcgactggtccctctcttcccttcgcagcttgagttcactattgctaccccatagagctccacgaaatttattccgaccatactcttccttgcgagccctcttggtctcttgttcaagggctcttgcggtagttgcattctcttcccgtaacccggcacactccttccgaatgtgtgtagcggccaacttgaacttctccttggcaagtttcgcctttcctaactcgctcttgagagcttggactccttcgtcctcttccggtgcttcaaaactttcttcgctgacgacttttaacttggtgagccaatctaaacctcgtatatgaacttttaaccattc

SEQ ID NO: 22919 - DNA, 369 bp, Glycine max
  unsure (1)..(369): unsure at all n locations
agcttgaactngacttgttntataacttatttatttntctaactatgaatttagtgtttaataaaggaatttaatactagataataatcttcaaatagaaaaatatgtgttaagcatgtggtataatattatggaatccatataattttaatttttctataatacatatagtttgggctattagagttattcatgaactatatggatgtcgagcttgtaaaatttgatcttaatctacttaaataatcaagctcaatcttaaatttgagtttgtttatctacttaaacaaataaacttggtcaaacatttagtgaatcaaactcaaatgttcacaaataatttgatccatttacatctctaattgtccc

SEQ ID NO: 22920 - DNA, 408 bp, Glycine max
  unsure (1)..(408): unsure at all n locations
agaatactcccgctttctctnttngctgaggataacaaattctattgtatttatttagcagtgccttcatgtaagaaatttacttatggatgtgtttgactttagaagaagagtggaagaaaagaaagtttaaagaagaaaatgagatgattttaaattgtctggtaagaaaaaattgatgaagatataaaattttggcacgggttaacaaccaaagaaaatatacttaaaataatataaataccttcaaaaaggagaggaatatgattaaaagaataatgttaatttcgtttttatataattaaaagcctgcttctccactactttccttctattttgtggcggaacccaaaattattatgagacctaaatgagtttatttcctcttatattgaagaagaaaacaac

SEQ ID NO: 22921 - DNA, 366 bp, Glycine max
  unsure (1)..(366): unsure at all n locations
agcttggcctgctcggngtcctcgtccttaccactgccttcaccgtcctttggcttggtcttgggccttgaggccacagtcgcgtccctgttggaggccggactatggccaccatcatccagcacgacccaaatctcctcgcatagttttcgacattgtcttcctacacatcctgcttcatgtattctatcatttgctccttgaaattgctatacatctttttcttcctccaccgatggcatgtacgagaatcaaaattttgaactagggaaagggagaaaccttcgaggtgcatcacgatcgtgtgtgttggggaaagagggaggagaaggtgtggtcaatttcaaaatcctagttgttattgga

SEQ ID NO: 22922 - DNA, 365 bp, Glycine max
tccatcaagtggaatcagagcacacgatttttcaagtttgtgctccttaaacctccattaattttttgctttaccttctcttctattggtgtttcttcatttttctccatgtatcttctcacatgtcttgtgctacatgttgttaacatgattctttagagtttccaccgattaaacttgctatagaagctagatttgattttctatggctcaaatttcttgttcttgttcttgaaccatgaattgtgtttagtttacgttcctttgagttttgtcttgctattttttgtggctgaaacctaaaccataaaattcttaaaaaatatttaagttcatgaaaaactccaaacatctagagtgacttg

SEQ ID NO: 22923 - DNA, 373 bp, Glycine max
agcttcgttgcaagccagtggttggaggataatgctggatggtgaagttgatttatggagtgcataatcatgaattggccaagtcattagttggacatccatatgtggggcaattgactaaagctgaaaaaacacttatttctgatatgacgaagtccatggtgaagccaagaaacattatgctaactctgaaggaacacaatgccaatagttgtacgaccattaaacagatatacaatgcaagaagtgcattccgttcttccataagagaaagcgatcttgaaatgcaacatctgatgaaacttcttgaacgtgatcagtatattcattggcacagaataaaggatgaagacgtggttcgtgatatcttttg

SEQ ID NO: 22924 - DNA, 359 bp, Glycine max
tcatgatgaatcagattgattcaaagatgttttgatgataacacaagggatgaaaaaaagctcagaggtcaattcatgataatcaaagaatgagttcaagatgttcaaagatgtttaagatgatcaagatgatcaagattgaattaaaaacacctcaagaatcaagaatcaagattcaagggtcaagcttccaagaatcaatatcaagattcaagactcaatattcaagaatcaagagaagacttaaatgagataagtatgaaaaggttttttcacaaacttagtagcacatggatgttttctcaaaaaatgtttacccaagagtttttactctctggtaatcgattactagaatattg

SEQ ID NO: 22925 - DNA, 378 bp, Glycine max
agcttcaaggatgaggaccattcttggttctcaaacatggaaaactttaaggccacaagacaaccactggaaggtatgaaattccactacagaaaaaggttcttccgagaaaccaccaagtatgtttgggatgaccctactctttttcgtattggtattgaaaatttgttaaggcaatgtgtaacaaaaggagaacaagcaagcatactttggcattgccacaactcattatatggagaccacttcaacgcacaaagaacaactgcaaagatccttcaagccaaattctattggcctacactctgccaggtgctcataaccatgcactatcatgcgatagttgtgaattagccaacaacatatctagacatgaaatgc

SEQ ID NO: 22926 - DNA, 317 bp, Glycine max
catcttgtcgttgtgttggaagcgtccatcatactctcttgtccatcgtgcacaacatccctttctttttcaaatattctatgatatgggtctcttctagaattttaattggatgatcaaagatcgatcgacgctcatattgtggccaatctaggtctcctctacttgattccatagggaaatttgacaaaatatcattgtcttcttgtaccctcaagtgtcctctaactctcatcaaggaattccaagaattgcgggtaatggaagctccaacctatgctcaattgtggtgcgatggtgaaatatcgagctatgag

SEQ ID NO: 22927 - DNA, 358 bp, Glycine max
gcttagaaagtattttaaagtttttatagaaaaaaaaaagttttttataagttaaaataatctttttattaattaatctgtagatcttgtttatttttttaaaaaaattatataagaaaacttttataaattatttaacggttaactagtgaaaaaattattttaatttgtaaaaaaaattatctcattttttttattttcttctcctaaaaatattacccaaacatatcatttatttgcttagcattctttattgtggtgtgtgtgtgtgaagattaagaaagctccacctcttactctaacttaacatgcaaatgtattattttttatagctttttcaacatagattcaatgagta

SEQ ID NO: 22928 - DNA, 387 bp, Glycine max
  unsure (1)..(387): unsure at all n locations
tcaaaagctcgaaagatgatcaacctgagcttgtttatctcangcagaaagcagnttcaaaggttattgatgcctaaaataataagaattatatttatttcttgctgatattcctttttatatggttgaccatttaataggttaaaaaataatcatcatgactttccatctgcaagtgtttgactttattgttcataaactttatgcactgagaaagcccaaaacaaatatccaaatacttcaacaaagtgttcttttaaaatacaagtgagttattcctattgattcttagatcataatagtatgctatggtggtgttttcttgagacctgaaaattgagaaaactgaaaatataatttttcattcttaaacctgtattattagat

SEQ ID NO: 22929 - DNA, 368 bp, Glycine max
agcttcatcaggtttcctatgccacttattgaaattagtcactttctcaaatccattggttttgaggggagcaaaaaaaattgtattgaggctggtacagcagaaagacaacttattgaccttgagaatgatgaggttgattctgacaatgaatataatccctcttttgtttgtgacaaggatatggccaccaacttagaactctatgaaacaccttgtttaaaggatgtcaaatggatcgacaagcaagtccatggtatccattctactttgactcacatagtccttgccttctttatccctcaatgtccactcatcaggataataatattggtgggtggcagatagaatggcctactgatgatgat

SEQ ID NO: 22930 - DNA, 385 bp, Glycine max
tcatccatggtccctcatgtaagactatgcttattacttacaacattattgtaacaacataattaaaaccaaaacttaacccgcaaatccctcatgtaaggctaagtttcaatcctgcttcaatcaagttctaaggcaacaatacattttccaatgccaaagtcacctaactgtgcacacaaatgggtgattagaccaaaagaatacaaacattaaacattgaaggaagcattgaacacaaaaaacataatcaattagatattaagtatctacatcagctgttcattagaaatccccaactagataaccacaattagtaatagagcatatgaaaacatcattagcttacacaacattcattaatcaatacacacatccaacaatt

SEQ ID NO: 22931 - DNA, 341 bp, Glycine max
agcttttatgtgaaaggatgtgactcttcacattttaatttgaatttcaacgttcaaaggcactggtaatcgattaccaaaacattgtaatcgattacagatttctgaaattaattggaacgttgtaaattcaatttgaaaactttttcaaaacaattttgctactgataatcgattacaacaatctggtaatcgattaccagagagtaaaaactctttggtaaacatgttttgagaaaaatcatgtgctactcaatttttgagaaaaactttttatacttatcttgaataagccttctcttgattcttgagatcttgaaccttgaatcttgattcttgac

SEQ ID NO: 22932 - DNA, 422 bp, Glycine max
gtgacacccaaaactaagctttagaagtccttctagagtgtccaaacaggctcatatgatactttaagttacagcagttactgcattttttcaaacaaaaggtaacattggatcactagataaattcagacaatataatttccaatgaatttgcatagttcatagtaaaagatatgctcagtgtctatattaacagcaatcataaattcatgattaacttgagaagggaaaagggtaaatattctgccccctcaaatggcatttcaaatgaagaggacataaagaaacaaacaaattattaaacaaaaccttagttcactaagtggggctggccacaccgcaagaatcaaatgatgctattgtgctatgtcaacgactgttagaatggtttaacatatattaattagaagttgctcattatt

SEQ ID NO: 22933 - DNA, 51 bp, Glycine max
  unsure (1)..(51): unsure at all n locations
agcttgcacttgaggagagtaaaaaacttttttcnttttttatccacaaca

SEQ ID NO: 22934 - DNA, 211 bp, Glycine max
tcaagatttagtcttcatgttctcccctatctctattagagtgtattatatatgatttagagtgcaaatttatgatgtggccaatgaagaagcaaacgatggagaggggaggaagacttaatggtgtggggtgtgttctggttttttattcagtgctctctatattctcaaattcctttttttgacttgtttttaatctacatcttttttt

SEQ ID NO: 22935 - DNA, 380 bp, Glycine max
agctttgattatctatgttaactctcatttacctacttttacccagatgtgtatgagtgtatctatcgcaattaagtataagttcaatagttattttataagttaacaaatccataaataaaatacatgaatatgtaaagcatgtgaattcataaataaaaatatatcagtgcttgtgttcgggtaataaactatacaaattatattttttactttaatattttaaattatagtttgtttatatttatctatttgtttatatacagtacaaacaaatcaataaatataaaaaattaaaaaaatctgttaatatttaatatttttgttgtttattattttttatgtatattttcctttcaacataattattatatgatcta

SEQ ID NO: 22936 - DNA, 396 bp, Glycine max
gatctaacagactcgcctaatgttaatgataatgactattgtagacagtattaagacaactctccctaaaatcgaaagtgctaaaaggtttatgggattagtgggagagtgttctcaaacagctgataagtctgttgctgggacattaatgagtacattgaccaccatgaagtttgatggttcacgtactatgtttgaacatgtcattgagatgacaaacattgcagcaagacttaagaccttgggaatataatggttgtgaatgagaactttcttgttcagtttgttctaaactcattaccgtctgaatatggcccgttctaaatgaattataataccatgatagataaatggaatgtgcatgaattacatagtttgttagttcaagatgaaatg

SEQ ID NO: 22937 - DNA, 376 bp, Glycine max
agcttgatacctaaggagttctaggctattttgagttataacgagagcttaggttgagatgtttgttcacaagaaactgaataggccactatggaagaaacagaggttgataagaaaatcgccatcacttttgatcatcctacactcgaaatgatcaaacacttgaagcctatatatgttagagcccagataaatggtaaaaccttgttgagagtgtttgtggatgaaggagccattttgaatatcatgcctttgaccatactaaagaaggtaggcagaaggaactaatacctacaaatatgaagatgaccaattttactagaggagccactccaacattaggagttttggtagccaaaatcacagttggacccaa

SEQ ID NO: 22938 - DNA, 300 bp, Glycine max
tttccagccatcatacaatgggagatctttattgctttcccggttgatcacaacaataaaatcggttcaattttttcctaaaagaaaagaatgacaaagaaatttactaagcccgtggatgtcatggacaacaaaccccttcctttatcatccaccgacctctccatggaagactcatcatacatcttctgttccgaaaatatcctagacgaagaaaatgtttctatcacaatatcaaccaagaattgaagacatgaagcgtcctgccataacacagtcatcaaggcgggaatctttact

SEQ ID NO: 22939 - DNA, 389 bp, Glycine max
agcttattcataatcatgaaaatcaaatttatgattgaagaaaaagatcaacattcacacaaaattgaaatactaaaccaaaactcaaatttagccttgcttagagtggatccttggattgattgagtgtttatccttccatgatcatcaccaatggaggagccacgaaattggtgcaagaaaaaggaagaacagaagtgaaaagaggaacaagaatgaagaacaattgagagaaaaagaaagaaaaaagttttgatcctcaagcttgcacaatacgtaactatttttggtacaaaatgaactaactaacttccactaatatatacaatgaatacttataagaaaaggatgggccttgattaggtccatctaatctacctaattaaaca

SEQ ID NO: 22940 - DNA, 396 bp, Glycine max
  unsure (1)..(396): unsure at all n locations
aaactcaagcttataccaaagtccaaaacattaatatatttcccctttttcaatttatgaaactacttattaaattattataattattttttggttttttatcgtaagaattaaagataatattaagatatttataacacttatgcaccatgttgaaccaactaaattatacctcatttctaattatttttgtttgatatcaattttttaatcttaaactatattttaattcttaaattgattattaaatatatcatatttataaaacaaatctccatacattgagtcaaattcttaaataataaaattttatctttcaatatattagtttctcaacctcaactaagataacatggtcacctantttttcttatataatataaaaaataattaata

SEQ ID NO: 22941 - DNA, 297 bp, Glycine max
agcttcaaaccacaacaacacataatcttggtatccaaaacccctcaatttaatggattttcaaggtttgagaagtgaaattgagaatggggtaaatttggagtaaaacctcacctcacacaagtctataacatcaatttaaacttgctcaactggatttacacctaaaatttcaccgaatcaaaatttgactcctcaacacccaattttaccctagaaatggctctttgttcactttggccatttgtttttctctcttgcacagcccaaactttctcataagtcctaaatgacatt

SEQ ID NO: 22942 - DNA, 395 bp, Glycine max
  unsure (1)..(395): unsure at all n locations
ntgtcctcatatcctcttattggactatgcttaatttagacagccctcctaggtttagactaacttaaactaagcttcatcctcagatccctcttgttggactagacttagcttaaatagcttatgaaagtttagactaatttagcctaagctttatcctcagatccctcttgttggactagacttagaccaaacaacattattgtgacatcatatttaaaaccaaaacttaatccgcagatccctcatttaagacaaagtttcaattctgcttcattcaagttctaagggaataatacatttcccaatgctaaagtcacctaaccaggcacacaaatgggtgatcagaccaagagcatatagaatttaagcattgaaagaagcattgaacataa

SEQ ID NO: 22943 - DNA, 226 bp, Glycine max
agcttgggaggaagattgggagtggatcgtttggagagctttacttaggtaagcactttatgagtattgcttttataacattagcatttggtctttgcacctcttttgatcctctggtgcttttgtttgtttcaggtgttaatgtgcaaagtggggaggaagcggctgaaaatctgttcacatcaatcactgacatagtattgtgtgtctgatgatgataaataat

SEQ ID NO: 22944 - DNA, 390 bp, Glycine max
  unsure (1)..(390): unsure at all n locations
nttctctntccttgtgactgcaaaactgaagaagccaagctcgcctactccccatcctcacgcatgtccttactgagcgccagtttcaccgcctcgacgccaattgccttggcctcctcgtcgtctctgtcatcaaggccaaccgcacgctctatactgggcgatggtcctgccgagaccctttgtgaaagctgctaaaaattttagaattcttttgtttttgaaagaatttaaaattctaaatttatagttaaaaatatattccatgttaaaatgttaaaattttaaatttcttctatgagcatctaaaaagattattcaggcggaaaaaattctaaatcctctaaataattacttttcccattntaattccctcattcaaacataaaa

SEQ ID NO: 22945 - DNA, 367 bp, Glycine max
agcttgcttgagaagcctctatggaggttggatctttgaacttcaataaggtcctacaatgttgatttttagccatggagttgcagcagaagataaaggaaaggaggtgagaggaggcgccatccactagagaataagccatggaaggagaagtttcaccaccaagagagtgccttggataagaagcttagagaggaagcttcaatggaggaagataatgagagagggagggcgtgggagttgaaggagattatggagagaagttgaactttgaagtgtgtctcaagtttctcattcatcaaagttatgacaagtgttacacatgcttctatttatagcctagcacatgggaaacttccttgagaag

SEQ ID NO: 22946 - DNA, 344 bp, Glycine max
  unsure (1)..(344): unsure at all n locations
taagcatttngtccatgagtattgcatatacaggtttcgcttcatataacattaaacacaaatattttaattactgtcattctgtcaatctatcaagtgtgacttgtgcagccaaaggaaattactacatagaatccccaccccgttaccccccaaaatgtgaacatgataatggttacctggcagaaagtggtgaaaaaaaccctggagtcctttcatttgaagcaataaacaaagttctttcaggtgggacccactttgctatcctacaaagcataaactctggccgagtgtctctatcaaagtgagggtgcaagctcctcactacaccaaatctatctttc

SEQ ID NO: 22947 - DNA, 367 bp, Glycine max
  unsure (1)..(367): unsure at all n locations
agcttgcttgtggagcttctatgaatgttgtatctttgagcttcaatgaggtccttcaatggtgatttttcaccatggagatgcagcggaaggcaaaggagaagaggagaggggaggcaccatccactaaggaataagccaaggaagaaggagcttcaccaccaagaattgccttggataaaaagcttgaagaggatgctttaatggaggaaaagaaagagagaaggggggagcacgaaattgaaagaataaaagagggaaagaagtggaactttaaagtgtatctcataagactttcattcatcanagttacaacaagtgttacacatgcttctatatatagactangtagcttccttgagaagct

SEQ ID NO: 22948 - DNA, 362 bp, Glycine max
tctcccctatttgctataaatagggggagaagtgaataataaaagggttcagccgtcttggcacttttctctctctcgaaattgctgaggaaaattatttccgtgaagaaaatccaagccgaggcgcttccgtaacatttccgtaacgtttccgtgaataattacgcgaagattctcgactgttcttcaagattcatcgttcgttcttcgttttctttagtcttcaacgggtaagtacttcaaaccgagcttttcaattcattctatgtacccgtggtggtccacactttggttcatgtaattatattctcgctttcattcgctttttattccccgctttgacgtgcttcagcatttattta

SEQ ID NO: 22949 - DNA, 382 bp, Glycine max
agcttccaacacatactgacttagtttatactattttcatgtcatatgaagtatgaaacatgggctccatcaatacactgaccatggataattaaagatcctaagccatccccctccaaagatgcttaaaactctttaaccactttatttctcccaccacggatgtctaacaaggtcactacaccccccatgttcatacacatcatacaacgtataaaacatgggctccatcaatgcactgaccgtggataattaaagattctaagccatcccgctccagagatgcttaaaactctttaaccactctatttctccatccagggacatccaacatggtcaatgcacccacatgtatatgcacaacatgcatcatcacaatgta

SEQ ID NO: 22950 - DNA, 393 bp, Glycine max
tcaacaatggctgcattactcatccacctatggaacttcttcaggaccttgagtactgcatagactcgaatcctccatggggtaccttattcctgtttctctctcatttgggtttgtttatttgttttgttttccactttccataatctacactcatgcacaacacaaacaaaggcttaggagtctcactcttctttcaaacttacttttttcactcctcattttacattttcttattcttatttttagtttctaatgtgcttttccatactctcctctaatatagaaaaaagagcgtgcccatgttaactattttaagttttctattctggaacacatgaccatttaattggcttttattctttctaatggcaaagtacttccctttagtat

SEQ ID NO: 22951 - DNA, 271 bp, Glycine max
agcttctgtccctgagaatctggttcctataagacaacagggagtgaagattgctgaaaaccctaaccttgcaacaagttctagggaagtatacacggagatggacaagacaattcgcggtattgtgagtagcattttgaaagaagcttctgtgcctgatgctgagaaagatgttccaacatcttccaccccgaatgtttctgtgcctgatgttgagaaagatgttccaacatcttccggcccaaatgctgaagcactccctttacccatg

SEQ ID NO: 22952 - DNA, 465 bp, Glycine max
  unsure (1)..(465): unsure at all n locations
agcgccacgagcncagcntttgannccccatagatantctgggcacncccgngacnnctatgaatactcaacgctggactcatcgagggcacgcgaggtgttgtggtttgttccccttattgacactgatgctcatgcttataggacaggtgagatcaaaaaccacttcacaaacaagagtttcaatgtcaatggacaccgacttaagccaaatctcacacaccattctttattggacgtactggtggaagagacttccctatctcccctacttttccttcaccatgactttgtaagaatattaaatccgtaatccttctcgcaacctattacactctgcccaatcttcaagatggtttaatggctctcttatgcttcatatgggctaccttgaggggaaagtattgcttaatactgggcggtgtgttactccttttacttccttattcaatatgatatctaccg

SEQ ID NO: 22953 - DNA, 372 bp, Glycine max
agcttagcagaacaggttcaattaattcttaaggaagaaacttacagtcacaaaaagatgctccaaggaagggcataatttcaacaaggagaacaaggcatctgtgttgtattcatcctcatgatagttgtcaatccaccataactctcttaatttatagaatatgaagctcccagatagaggagaaatcgatggccatattaattcctacaaaaagagaacctttttggagttaaattgttcatagttcacagcataaaagaaaatgagacatcttagaacattctttttcaggatgtacctaattatgttctagtcaaaaatcagaaaactaatctttcaaaattctaatattcattttagaggttgata

SEQ ID NO: 22954 - DNA, 60 bp, Glycine max
ttagcagcattcggaaggaaagggagtgtgattttttctcgcccgggcccaccccttcca

SEQ ID NO: 22955 - DNA, 297 bp, Glycine max
agcttttgagtgaaacaatgtgactctttacttttttatttgaatttcaacgttcaaggacactggtaatcgattaccaaaaaattgtaatcgattacagccttttgaaaatatttggaacgttgtaaattcagtttgaaaacattttcaaactcattttgctactggtaatcgattacaacaatatggtaatcgattaccagagagtaaaaactttttggtaaaggttttgtcaaaaactcatgtgctattcaaagttttgaaaaaactttttaatacttatcttgattgagtctt

SEQ ID NO: 22956 - DNA, 360 bp, Glycine max
tccatcaagtggtaatcaaacacaagagcttcatgtttgtgctccttatacctccattatttttgctttaccttctcttccattgttgtttcttcaattttctccatgtatctcctcacatgtcttgtgctaaatgttgttaacatgattctttagaatttccaccgattaatcttgctatagaagctagatttgttgttctatggttcaaatctcttgttcatgttcttgaaccatgaattgtgttgagtttatgttcctttgagttttgtctctctattttttgtggctgaaacctaaaccataaaattcttacaaaaccttaaattagaataaaacagcaaaaatctagagtgactt

SEQ ID NO: 22957 - DNA, 294 bp, Glycine max
agcttgaatttccttttagtatggaatctatcctttctaagctggagccaaaccctgtcaccctcattaagaactagctcttttctttctctattgcctttagttgaatacacctttgtttggttctttatttagttcttaaccctctcatgcaacttctttacaaactctgacctagattccccttctttatgtataaaagaagtgcctagtgggattaaacccatagacaaccttaaaaggggactgcttggtggttctatgaacccccttgttgtaggaaaattctacatg

SEQ ID NO: 22958 - DNA, 297 bp, Glycine max
  unsure (1)..(297): unsure at all n locations
ntgatcgcatgatgttaggtaatagttagttagaataatgttaggggttttgatctgcataaaatgtatgtcattttgacatgttttggttaggatttgatggtcttatagaggcctaaattgaagggctggaaaagccctaatttttctggaaactgcgatgaaaatgctaagcgtgccttgctgcgctaagcgagttcatcatcttttgataaatatttgggattccagatgaacccgaccctgttctgctaagtgagttcatctttcctgatgaatgattgaatgtttatgaac

SEQ ID NO: 22959 - DNA, 369 bp, Glycine max
agcttgtggactataccttcgaccgaacacagccatgtttctgtctaggcccggattcgaggtgggctgcagcaccggcttcgcttccctaactgtactggaggcggttgcggtggctttatcctctatggttttctggagttttaacatgacctccgagatggaagccatttgatcttttaaggccgatagatcggccttcatctgttcctgcacgccctcttcattatccatttttctggatcgagtgttataggggtgccttggtgttttcttagttatgatgagactcctaaagaaataaacaacggtgagtatgccaccaaaacatgagtatgcaaatggatgatcggagcacttggatccacc

SEQ ID NO: 22960 - DNA, 378 bp, Glycine max
tcaccttccatggcttattcctagtggatggtgcctcctctcacctcttctcctttatcttccactgcatctccatggtggaaaattaccactaaaggacctcagtgaagctcaaagatccagcctccatagaagcttctcaagcaagcttccatcatgatgagaaaaaagatgacagagaaagctaagagaatacttaataaaaccattaaaatgagaagttggttgaaacacttggtttatactgattcactcaaatagagctacgtctagttctcttttatagaagagtaaagggttccattaatctaaaaatttgattaccaaaccagtattctatcctttcactcccggctatacaagtattcttctagccac

SEQ ID NO: 22961 - DNA, 379 bp, Glycine max
agcttgttgctcgtgtgctgagtgtgtgatgagattttgtagaggggtttgatggaacttatatttatattagttgagtgtggctgctagtccttgtttgtaggggatattgtagtctttgcagttaattctcggcttgtagatattaatcaatagcttacatataatgttagagataaacatttgcttatagataaaaaggtagaagataatcaaaccttgtagataatgtgtgggcttataaataattattttaactgccaatagataagatattcaaatacatttgaatattagtaggttagagataacctgtttgttggggagtccggctgttaaggttcaggcatccgtgttcctgtagcagggctaaaatgga

SEQ ID NO: 22962 - DNA, 381 bp, Glycine max
  unsure (1)..(381): unsure at all n locations
cttattcattcgcatacaatcccagaaggataatgggtaaaagatctgttacgtnttaccatttttaggatgcagtttaattgatggcaattgctttctgtacttccgaaattgcttcaattacttccattccggaagcaatatgagaagtgcagaaaaaaacaccctggattgatttgtagttttgggtcatacacaggaatctattttactttcaggaaccagtgcattttagtaatcaagtaatctccagcacaaagcctttctgcaattactgatctattggatctgcaacaagttatcattattacactatcacattaacataactattatgtgcactacaccgtctaatcaacttgttgagctttaacattgagc

SEQ ID NO: 22963 - DNA, 399 bp, Glycine max
gagtcacctgcggcatgcaagcttctcggctcatactgggaatacctctagttcaacacccgtgcaacctaaggcacccacccagagggaagctccccaagttccaactccgaacacgactcgaccggccggtaattccaacacgacaaggaacttccctccgaggccatttccagaattcaccccactcccaatgacatacgaagatcttctgccatccctcatcgccaatcatttggccgtggtaactcccggaagggtccttgaaccccctttcccgaagtggtatgaccctaacgcaacttgcaagtaccatgggggtgtcccggggcattccgtcgaaaaatgcttggcccttaaatacaaggtccaacatttaatggatgctggatggctgac

SEQ ID NO: 22964 - DNA, 336 bp, Glycine max
  unsure (1)..(336): unsure at all n locations
ntaatacacgggagcaaaagataaggtctcattcatagtcagctatttggtcaaaagagcttgagtatatacaattcatggccttcatcatgttctgagttatacaaatcattctaaaatgtcagagatttatgcaaagatcattattcacagttagtagttcactcacaaagtaaggccacactctcaccggctttttggttcaagcttgtctctcacaatcagactttctagtgactaaccattctattataaaatcacactattgttctttctttgttcaacatgcacatctgctcacaatcatgaatagaaacacacatctcatcttatgca

SEQ ID NO: 22965 - DNA, 266 bp, Glycine max
agctttctaaattatatcagctcatcatataaataatatggtaatgaagcttgagaaaaatagtggcttgaaagtggggggaggagtttaaaaattttagaggaactcaagtatatttcggttcttccctgccagccaacaaaaaattaggaacacaagagtccatacagcccctttctcatcaaaacatattgcaggctgtagctaatgatttcaaaagcatatgcaattaagtatggaagatgttggtacattttttgagtatg

SEQ ID NO: 22966 - DNA, 324 bp, Glycine max
tcaacaaccacctcatgactacacatatttgtaagtagttaagcagtcatacgtttacacatcaagagagacacactcatccaatgcatatatatgattcaaaaggttttcacaacactaatccacacatcaagagagagataatcttattaacaacgtatagttagaagataagggctcattaaagcattatcaatcatcccttagcagttccctaagagtccttaagtttttcctttggttgctctactagggtttccaagtgctataaagaaggatatgagattgaagcctcaattttacagtctctgtgcaaggtgcatt

SEQ ID NO: 22967 - DNA, 206 bp, Glycine max
ttgactaaggagagtgttattttttttttgaaaccaacccgggtggacctacggaagaacataaatttaatgttctctatcgactgtacaagactacaccgttgccagggtatttaatgagtaaataggcctttcatgcaacctatttacaaactctgacctataatccacgtgtttatggatacaagaagtgcctactgggatta

SEQ ID NO: 22968 - DNA, 270 bp, Glycine max
  unsure (1)..(270): unsure at all n locations
gttacccnngcaggagcccttagaactttccggctattattgncatagacaaagcatagttgatgttcaaaggacactttatattcctttttaatcaactgacctacacttagcatgatgtggtcaatgtttcgtacataaataacatctgatcttaacttggtacctgaacacgtggaaattgcaacctacccttatccttttactggaatatatggatcactctcaaattctgacctttgagacatatagttggcttcacatgcttga

SEQ ID NO: 22969 - DNA, 373 bp, Glycine max
  unsure (1)..(373): unsure at all n locations
agctnttagaaaatgtcgatgctgagttatactatttttcttccatgtttcaattgtacatagcttatgtcttcttcacacatagtgcatgcaagatgaaccttaacactgtatccactcaaatttccgtatgctggaaagtcattgatgatacaaaacaactttgcacgcaacttgaatgtctcatttcgatacctgatgtagctccatgtggagcttgtangccttggatcttcttcatcaatggagtattttgcttcttgaagatcaatggcatctgaatggagaaggaggaaaggtgattcgagatgccacttcaaaaagaagatgagtcaagaacaagctcaccaccataggaagccatggataagag

SEQ ID NO: 22970 - DNA, 515 bp, Glycine max
  unsure (1)..(515): unsure at all n locations
agccncncccgcgcncnntttgaaactcggtatactttgcannacgcgacactntaagaatactaagcttgttccgtagccgtgtgtggtggtgagattaatcccatttaattaatccactcttattactacgctattgtcgaagttgttagattcctgaatgttcgaacctctcagatagctgactcgattccacctcttctcttttctgtcacaagagaaagatcaacattgctgngagaagcattggatgagagtctctaagaacaattcaatattactagaaatacatcggattgaaaatcacaaatttaagaagcacacacctcgctatcttttcagagtcacttcggataaatattgtcttgtattctctattgtggagggaggattgtgtgattcatgttatactttaagcctccctaaaaaaaaatgttcacttattcctctcttcattgattcaataaggtatgttatatgtatacaagattcatggtgtcaccaacctgctcatt

SEQ ID NO: 22971 - DNA, 376 bp, Glycine max
agcttttggaggccgggagtggacagattctgcactgctattttatgaaaagtttggtgacttctaaaaaaaaataaaatgtttggtgcctatttttctgatggcaatgatgcggaaatctaagttatgttttcttgtcttactactcttcttgttctatagatgacatacttttgttgaaggaagaaaaattgttcttaataatagtcaactctacttttatctgagtaaatataacaagaaattatggaattatagttgtctagttggtttgtcaaagaatagtgatgtacttctataacttttttttagggtgatcgatgccctgtcattcaatggatcaactttgtctgattggaatataagtatataaatg

SEQ ID NO: 22972 - DNA, 255 bp, Glycine max
  unsure (1)..(255): unsure at all n locations
ntagaaaacctccggcgagccaacgggactagcacttagaaatataaatcgtgtgatttgatgttatcaacaactcagaataattntttttggcagtcctcgtcttttcgaactagccaatggaatgtcattataggtacatgacccacattttattccgatgtatgttctttcaatttgaaattgggttgagatctatagaaaaccaacgacttaacttacccatgttatgcactccatttatataatgagttt

SEQ ID NO: 22973 - DNA, 375 bp, Glycine max
agctttgcatatcctttgataaaccttctatagtaaccagtgaggcctaagaaacctcttagctgcttgatattgagtggtgtaggccactctagaactgcctgcaccttagtagcatccatagcaactccttcacctggaactatatgtcccaagtactctatctccaatacaccaaaagagcatttagacaacttagcaaacaaaacattttctttcaatactttgaatacaacctctagatgggataagtgttcatgccatgtggaactatataccaatatatcatcaaaaaacactaacacatatttccttaaagcatgttggaaaatatggttcatcaaacactgaaaagaagtcggagcattggttaaa

SEQ ID NO: 22974 - DNA, 206 bp, Glycine max
tccacgcgttggaaaaattgtctttagacacacgccaaaggccttctaacgctcccctccttatcaggcatgcaatcagcaacattcatcttaccggcatacttaaatagcaacacttacactaactgacttcaccaatcgacagcaaattcacacacaatagttttctaacaaacatctttcttcttactgtataattagagttt

SEQ ID NO: 22975 - DNA, 276 bp, Glycine max
agctttgcagatatggaggccagagacataaatgaagctatggagttggaagagaggaaaacttatagatgaatattctttcctacaacattagagggctgggcaatggccgtcacaacatacatatacagaagggcagtagatacaaatacaaaaacattcaacactgacaattaacaagttctgagagccaaaatcacagtcaatacttcaaagatatcagtccaataaaaaaaaggtcatgtagagaggcatcaagatatcagttcccatgaa

SEQ ID NO: 22976 - DNA, 304 bp, Glycine max
  unsure (1)..(304): unsure at all n locations
ngatgatgactattcgagatggaatattangatattatcttggtatcgtggcctacttttacttatcatgataaatttatttgtgttttcattgtgaattttatggcgagacaccatttactaattacaacaaaaagctagaaagtgtagcttacgagttaaatgttgttgtcttttggatattgttcactatgataaagagataatatgacctatgggcctaatgcccatagtatacatgatgaaatattatttgttgcaacaaaaaagtaatatgatttatgtgcacatagtatatatgata

SEQ ID NO: 22977 - DNA, 361 bp, Glycine max
agcttgaatttggtttatacatgattgttacatgatttgggacttgtaggaattgatttgggcaagattggatgagaggaagtgtgattttcgaaatctgcacttatgcagaatttttgctgtgaaattgtgcagcagaattttgcacaagtgcagaaaaatgcttgtgtgtggttggctgtggaaagtctagtgcagaatgagttctggatgtttgctagtagatcccaacggtcataatgtaggcttatgtactagagacttccagtaaaaatttggagtcgatccaacggttaacgaattggatcgaaggaattgttactggggtctttaagtgagaaaagctgtgattttggttgat

SEQ ID NO: 22978 - DNA, 100 bp, Glycine max
  unsure (1)..(100): unsure at all n locations
tngtgccaaaacccgactcaccatgttacctgactttttgtgagaatgtcaattcttaccctcggtagcaaaaaaaaaggggagatggaagatttcctat

SEQ ID NO: 22979 - DNA, 261 bp, Glycine max
agcttgtagaatggctagacacgatacatgtcaggttttgatttggttcaaggataaaagggatgccccacattatttacatgacacaaatgcaaaaatgatgatgtggaaattttatgcaaaactggtcatgcatgcacctatgcggacgctcaagtgtcaaatttttatggtcatgtgatgctagggctcaggattcatttcctctattttaaatcaacccaatgtttccaaaacatgttcttttatcaataagtgcat

SEQ ID NO: 22980 - DNA, 237 bp, Glycine max
tgaccaatccacccaccggcatgtctgtatttaaactttgattgcctaacagcagcttctgtcctcacaaataaatgacgatacccaaacaatgagctgtgggtcgccgccgatgtaacttgatgtatatgggattggacttagtctcgattccagggtgggtgtgctttagcagcttaaattaagatctaatattcatgcgtttctctatttaccgatgtaatagcttaattaaca

SEQ ID NO: 22981 - DNA, 273 bp, Glycine max
agcttgacacagaccatacgaagattttgtgagtttatcaaaccatgttgtcattcttgacaagataaccaagaggcatgtccatgtatactccctcaatcaaatcactattgagaaacacattatttaaatcaagctgaaacatgttccaatttctgtgaggtgcaatggaaagaaacactctcattgccgtatgcttggcaacaagtgagaaagcgtccaaaaaatcgatctctgcttgttgtttgttgcgtgtacccttttgcaacaaga

SEQ ID NO: 22982 - DNA, 326 bp, Glycine max
  unsure (1)..(326): unsure at all n locations
agcttcgagctttgggttagagggagtgtgatatatatatagaanaaatggggttgtatgaaaagtagaaaacgcagcacgaaaaccgaggtgagtgaataaatattatatcatgcgttgagaagaggagggaaatgaatggcactagttgtaacatggtttgagagagaagagggaaatgtttggtttggtttggtcgttgttattgaggttgagattgttgttgttggtttgacgttgtttttgatggcggccatgaactgtgtgtgtggtgaatggtgaatggtgaatggtgaatggtgatgagtgacagtgaggaacatttt

SEQ ID NO: 22983 - DNA, 383 bp, Glycine max
agcttagaggaaaaccattcgcattgttgtattttattttcccgtagaaacccaaaactatctcggtaaaactatgatcccagtttcgttaaccgttggattttcacgaagtttggatatgtttttcgaaattcaattgcgcacacttccaccgttgggatttgtgagataatattagtggagggagaaaaaggaatcgcatgaagacagtacaagtggaggtttcaatctcttctccgtctctctgacgtttgggaattctatcggagcagtcggaggaataactgaaggaatctcaaggaaccactagagatgttactatcactagctgaagacacgtgagtccgctcagagataagggatgagtttatcgcaattggggg

SEQ ID NO: 22984 - DNA, 260 bp, Glycine max
tttgagtctgggtgtaaacaattgagatctgtcactgaaggattcaagctcaggttgctttaggtcaaactagctgtaaattttgtttgaaatcaaaccaattaaattggttgtgcaatatatttctattcctttgtctctttagatttttgtaaaaagatctttgtgtaatattgttaattgaacttaataattcaattggtcttttaaacttaacctaaggaataaaacaattaatcaaccaacccacattacctaat

SEQ ID NO: 22985 - DNA, 342 bp, Glycine max
agcttgtgctattccaaattgaataatcatacctttaagccacattgcttccttcactccttcagctatggacatgtattctgcttcagtagttgaaagagcaacaactgattgttgaattgctttacaactgattgctgtaccaaacaaacgacacacatatcctattaaggacttccttgtgtctacatttcctgcaaaatctgcatctacatagcctgtgactgctgcctcgtgtgctgtctttttgtaccttatactagctttcaaagatccatttagataccttagtgtccacttcacagcttcccaatgtgcgctgccaggatatgccatgaatct

SEQ ID NO: 22986 - DNA, 379 bp, Glycine max
ggacactataaatctcaagcttgaccaatcacatgattggagctttctcccaatacaacgtgaccctaactagtctccctatgattttacctagtgagtgacctaacttaccagtgtgtggtttgttttgtcatgtactccttggcacccgacgaggtttttcactaacatggtaccacattgcatataggattgagtcttagtatatttgctgcataatgtttgtgtattgattgatattgatcggttgagtgatattgtgtttgatccttgagtacgtgaatgatgtgaaaattaatgagacatgttgtgttgacatgggatgtttcacaacaagtgtgtgtatggcatgacttgagcttaaattggttttcattta

SEQ ID NO: 22987 - DNA, 263 bp, Glycine max
agcttcaggctgctcaattgctccaggttgctgcatggaagggcaaaggtctgtatggtggtcagcagaggagcacaaaccacaaacccttgcgacaggtacatatttctgattcaaggccagctgggttaccaagttaaccaatgcatccagttttccttcaagcttcttagtttcagatgatgcagatgggtttgtagctacctcatgcactcctctaatgactatggcatcatttctggcgctaaactgctgggagttgg

SEQ ID NO: 22988 - DNA, 286 bp, Glycine max
cttgtggagttctatggaggctggatctttgatcttcaatgaggtccttcaatggtgatttttcaccatggagatgcatcggaaggcaaaggagaagaggagaagggaggcgccatccactatggaataagccatggaagaaggagcttcaccaccaagatgagccttggataagaagcttggaaggatgcttcaatggaggaaaagaaagagggagagaaagagagaggggggagcacgaaattgaacgaataaaagagggggagaagtagaactttgaagtgtg

SEQ ID NO: 22989 - DNA, 246 bp, Glycine max
agcttcagaaaaacgctctccgacaattgctttacttacagcagatcgtggcgtagtgtgtaataaaaacggcaaaagggaaaaggcattgcttaatcgggtttgggtcggacaattctggtcaaagagaatttgattttttgggggggtgtgaaaatggaaaaacagtgggtgtggatgggggttgttgccgcaaaattacgcgccggagtgtgcagagacggaggatgaaaactgtacgtttgg

SEQ ID NO: 22990 - DNA, 348 bp, Glycine max
acacgatacacatactacgctatagcaagttgatcatgattaatataatgacagctacacatgtcgagagacgaagctcctatggaatatgcgactctactaatacacacgcatctgactacacgtgatccttccaccctatctaaatgttaataatgaaagaatctactgcaactctcaatattattctatctaacattggccttatatcttataaacttcttggaataaccaacacctgcatgcagaggcctattgttatatataactgctttgaatatgcgaaacacgatattccctagagttgagattcacaatctgtctaatgagacatctcagaaaaactta

SEQ ID NO: 22991 - DNA, 358 bp, Glycine max
  unsure (1)..(358): unsure at all n locations
agcttatagagttaagtcttgtattggtttaatcgattacgatagtactttaatcgattacactattgtgtgagacaatcactgagtgttttcaagagtctctattttatttgattaccagatgaattagtcggctacttctctcttgttgaagttgttcagaggtgaacaagaatactntgatcgattacttacgtcatgcaatcaattacgttgttcttgagtgattttctagatgttgtatgaacattataatcgattacttggataatctaattgtttacttcattgaaatatttgattatcttaaagatttaattgattacagacgattataatctatttctctataaataac

SEQ ID NO: 22992 - DNA, 351 bp, Glycine max
  unsure (1)..(351): unsure at all n locations
ntatacacnggagccgagatgcaagtattattcaatgtacgctattcggtcagagagcttgtgtatgtaaaatcatggccctcatcatgtcctcatatatacattgcattctaaaattcagagattcatgcaaagatcattactcacagtttgtcgttcactcacagattaagttcacactctcaccggttctggttcaagcttttctttcacaatcaatctgtctactgactaacaattataactgcaagttcacattcctgttctttcattggctaacatacacacttgcttcaactcatgtaaggcaacacaaattccatcataatcatgcctctattcaaaatgaaa

SEQ ID NO: 22993 - DNA, 293 bp, Glycine max
agcttctcccccaagtttctataaatagggggagaagtgaagtgagaaagggttcggcccctgagacacttctctctctttcgaatttgcttggaaaaattgtttccgtgaagaaaatctaagccgaggcgcttctaaaacgtttccgtaacgttttcgtaaggaattttgtgaaggtttcgaccattcttcgacgttcttcattctttcttcatcgctcttcgatcttcaacgggtaagtacctcgaaccaagctttttgattcattctatgtacccgtggtggtccacatt

SEQ ID NO: 22994 - DNA, 268 bp, Glycine max
  unsure (1)..(268): unsure at all n locations
gacctatagaatctcagccttgggctgaanaactattgacagctccaaggttctatgtttaggagccccccccccctctctccctcgcgggagactctctctctctctcctctctctctgctattttgcgattttaggtttagtctctcttctctttctctttgattttcgctcttttttcaatcccaggtcagacttttagtttatcagtcaaatttcattctctatttgattatgggaggctaagtccgccacgctcgtttccctt

SEQ ID NO: 22995 - DNA, 117 bp, Glycine max
tacgacccctatttggactaatgaaagataattgcctacacttttagacgtgtttctataatacacttattccgtgtttttaaatacgaatatgaactctgaactgtttttgtatat

SEQ ID NO: 22996 - DNA, 51 bp, Glycine max
cgcgtgcatgcctacagaggacactacatgctcccttgtttctctaggacc

SEQ ID NO: 22997 - DNA, 325 bp, Glycine max
agcttgtagcatattgaaaccgcaatatatcgagaagctcgaaattgaaagaagaaactttgagcaaattcaaatgacaataaattttaactcggatgtctgattgagtcccttaatatttcgagacgctcgaaattgaaaaaaaaagctcaaagcaaattcaaacgataataactttttacttcgatgtccgattgagacccataatatatcgagacactcgaaattgaaaccaaaagctctaagcaaattcaactgacaataacttttcattcagatgtctgattgagtcccgtaatatatcgagacacacgaaattgaaaac

SEQ ID NO: 22998 - DNA, 307 bp, Glycine max
  unsure (1)..(307): unsure at all n locations
tctcccgcataatctatgaatagggggagaagtgatgtgaanagaggctcagccccttatgcacttcgatatctttcgaatatgcttggaaaaatcgcttccgtggagaaaatccgaacactaggcgcttaccaaacgttggcgttacgttttcgagaggaatttctctaagggatcgaccgttcttccacgtactgcattcgaggatcattgctcttctatcatcaacgggtgagtacctcgaaccaagctttacgattcattctatgtaccgatggtggtccacattgagttacgtgcatttgta

SEQ ID NO: 22999 - DNA, 376 bp, Glycine max
agcttcaagaaaaagatggcctcagcatactccttatttccagaagggaattctatcaataggcctccaatctttaatggagagggttaccattactggaaaacccgaatgcaaatttttattgaggcaataaacctaaatatttgggaagccatagaaatagggccttatatacccaccacagtagaaagaattacaatagatggcagttcatcaagtgaaagtataactatagaaaaacctagagatagatggtctgaagaggatagaaaacgagtaatatacaatttaaaagccaaaaacataataacatctgccctgcgaatggatgaatatttcagggtttcaaattgtaagagtgctaacgaaatgtggg

SEQ ID NO: 23000 - DNA, 381 bp, Glycine max
  unsure (1)..(381): unsure at all n locations
ntgatgcaacaatggagaggttaatgaaacaactttatgatgcgctccatgagaggttggatcaaatggagaatagagatcataataaagaagaaaggaggagaagagggaatgatggtgttcctagacaaaaccgaattgatggtattaaactcaacattcccccctttaaaggaaagaatgatccggaggcctacttggagtgggagatgaaaatagagcatgttttctcatgcaacaaatatgagagggaccaaaagatgaagcttgccgccatggagttttccgactatgctcttgtgtggtggaacaagcttcaaaaggagagagctagaaatgaagagcctttggttgatacatggacagagatgaaaaagatca

SEQ ID NO: 23001 - DNA, 601 bp, Glycine max
agctttagaaacttgttttaaagatgtactctcttctggttgcttcctcttctaagagggaattggatccttgtatgactgactctttgtccttgccatctacaaattacaacataagaaagatatgcaatttctatctcgttagcaaagaaggagcattgaaaaaaaaatctagaggagtggaagaatgacatattctgcatcaaatgggtaggtctcaccatggcaaaattgagccctgaaactcattgaagcttctggaagtgcatttgccatggagagatggacccatgtagttgagatagcctctggaggtcatttcactttggcaaatgataacctcattgtagctgaatagatcttgcaacaaaagaatatctttggaagtcctttcgccttggcaagatgaatttttgccatgatgaatagttacccgaagagaattcttggtctctatgattcaattcgctagagtgaaagcatgggtttccatagcaaccccaaacttattgcgaaatagatagtgtatcaatggaaaagaataagggatgaagtttattttatcctctttcttcaaaacaaacactgtaaaaactaccct

SEQ ID NO: 23002 - DNA, 434 bp, Glycine max
ctgtccgatgcagtcgtaatgatggcccgagtaatgttggtgaacggttacaaacccgggatgggtttaggcaaagacaacggcggcataactagcttgataaacgccaaaggaaatcgtgggaagtatgggttaggctataagcccactcaggcagatataaagagaagcatctcgggaaggaagagcggtagtcaaaactcgcggttgagacaagaaggtggaggaagcccacccttccacataagtaggagctttataaacgcgggtctgggggacgaaggtcaagtggtcccatatactaaaatggagttccgagtacattggatttggtaccaaacatgccctcctgatattcaacatggaaattgactagtggaagactcccccgcatttatgccaccagcatagagaaaactttacggtttaaaagc

SEQ ID NO: 23003 - DNA, 571 bp, Glycine max
  unsure (1)..(571): unsure at all n locations
agcttcatgggagagtcaaagatcaaattgttaggaaaaataaaagctatgctaaacaagccaacaaaggaagaaagaaggttgtcttcgaacccggagattgggtttgggtgcacatgagaaaagaaaggtttccggaacagaggaaatcaaagcttcaacaatggggagatggaccatttcaagtgcttgaaagaatcaatgacaatgcttacaaagttgagctgcccggtgagtataatgttagttccaccttcaatgtctttgatttacctctttttgatgcagatgtagaatccgatttgaggacaaatccttctcaagagggagagaatgatgaggacatgaccaagagcaagggcaaggatccacttgaaggacttggaggacctatgacaagggctagagcaaggaaagccaaggaagctcttcaacaagtgctgtccatactatttgaatacaagcccaagtttcaaggagaaaagtccaaggttgtgagttgtatcatggcccanatggaggaggactaaatgacaccactttgtctcaatttttagagtgtttagtttgc

SEQ ID NO: 23004 - DNA, 422 bp, Glycine max
tcgaatttctcaagagtttccgttgttcaatttttattgtgtagatgagttatgtccccgaatcggacatctgtgtgaaaacttatgaccattcgattttctcgagagcttccgttgttcaatttcgagcgtctcgatgtattatgtccccgaatcggacatctgtgtgaaaacttatgaccattcgaatttctcgagagcttccgttgttcaatttcgagcgtctcgatgtattatgtccccgaatcggacattcgagtgaaaagttatgaccattcgaatttttcgagagcttccggtgttcaatttcgagcgtctcgatatattatgtccccgaatcggacatacgtgtgaaaacgtttgaccattccaatttttcgagagctttcgttgttcaatttcgagcgtgtcgatatgttatg

SEQ ID NO: 23005 - DNA, 533 bp, Glycine max
agctttatagagatgacatccttgttcattgtttttattcatgatacaaaagaatattttatattgtttgcttgttaggccgtagtgttaaagatatttttgttttgcatcagtacgttagacacatttttgtttaatgtcagagaatataatgcttcaaatcctaatcctaatcctaggtcataaccctaatcctagaccacaaaccctaatcctactataataattgaaccatggcccttaaaccctaaccataggttagggaatccaatgttttacgtcaatacgtcagagacacttttgtattatgttcgtgtgttagagacactagacactttcactttacgttagtgtatcagagacacttttgctttacactagtacatcaaagacacttttgttttacgctagggaattcaatacttcaaaccctaaccctatgtcgtaaaccctaacccctatatatagaagtcgtattcaccttcatttaacacatttgcataacactttctttctttatttactttctttaa

SEQ ID NO: 23006 - DNA, 474 bp, Glycine max
  unsure (1)..(474): unsure at all n locations
gcttgtatctgaaagaggttccctaagaagaggacgcttatcngttgttgctgctctgcgacatccttattttcttctgggtggtgatcaagcagctgcactcctttcaaaattaaacttgaacataaagtgagctgcttcgcaatgtgagtatatcgctccatttactggtttattttttatttttaatccctggttatctgcaaaatttatatagtcaagcttgagcagataattttttatgtttcctcttgcttctgcccattttggcatctgaaaatgtgtatagactatagagatatctactgactccttgagaaaaaactaagaagaatgatttacaatgaatgtggaactgtgctttctatatgactatattagactggacgaaagaaaatcactagtgtgaacctcttgcgatctgtgcactctgttttgcatcataaggtgatgtaaaaatgtctagttaaccca

SEQ ID NO: 23007 - DNA, 515 bp, Glycine max
  unsure (1)..(515): unsure at all n locations
agcttaactgaaacagagaacaacacttttcttcaaggcaatgcatgcaactattcatatttctaatgaacatatcagtgaaacataaataacaacaatgaaaggctccaaatgataaaagccccaaattttccctaatttgtaaccctaaaatcctatctgaaacataaatagaatcaaaccaactaataaagttccaatatcaatgcaatacgaaactaacaacaatgaagtgctaaaagattaacttgcatctatatttgaaatgggtatttctgtaaaccttagaactatgaaactgtagaagaaaaatcagaatggaagaaaaaacaatcaacaatgaagctcaacgatgaaaatggagaagaaaaaacgatgaagattatggaaattttcagaaacagagaaggcgcaacataccttaaacctcgttntcgaacgatcaacaatggaagccgaggacgaacgatgaagaacgaacgatgacgagaagtgatcaacgacgatggatgatg

SEQ ID NO: 23008 - DNA, 556 bp, Glycine max
tgttcatcgattcaaaggcatccccaacaacaacacggactattttcacattcttccaatccaaaatacttccttgccaccctcaaaacctccctatcactatccacacccatgacctcaaaacccaattgatttctcaaaaaggtcatcaaagccccacctccaaccccaaggcacaaagccttcggcctaaaccccatccgaatccgcccctccacatattcactattcaacacaagaccagccaccataggccccaagtaagggtgcaccaaaaccttaagatcaggcacaaaccccacatcaccaccaatgcacacaccatcacaatctctctcaagaataatacaaatttcagtttgaatcaaattaggcattctcttaaacctcaacctcctcctaaactccctcccatgatcactctcattttcaattcaacatcctcaaacaacatttcaccaacatgacacccaacacattcatgaaccaccacactagaaaccaaactatcctcataactcacaaggggtatctcacgaatgccccttttgaaaaa

SEQ ID NO: 23009 - DNA, 562 bp, Glycine max
  unsure (1)..(562): unsure at all n locations
agcttcgccatcgaagacgttgttgatgtcagcaacgacgttgaaatgtatgctttttaggtcaggctgtaacggcaacgacgtagtaatatataatttcaacgacggtgcttacgtaagcaccatctttgaagttatatattactacgtcgttgcatccgcaaccaccgccgttgaattcatgttcaactacgtcgttatcgtaagcattgacgtagacaattttttttttactattaaaaatgttgattattatattacaaattaaaaataaacataattaatataagctcaaaatttataaattattattgtcaactaattaatatgataagtaaatataatttttgtgctataaattatggttttacttaatttaatattatataaataagcaacataatgataaatcattatcaaccagtatttcaaatgtaaccttatgagataaataaataacantaattaaacataatatantaccaataataaataaggtaaatctactaacactactacaaaagtgggattcacatcggtgtgttaacatgggtgtaaaaaa

SEQ ID NO: 23010 - DNA, 561 bp, Glycine max
  unsure (1)..(561): unsure at all n locations
tccaagattntcatatacaaagaaagacacaattccttatataataacaattgggggtacaaagtacaattcatgctttgttttttctagtacataagctgaagtaagataaggcttggaaattgaaacattaaaagaaatgtgtaggggaaaggacaatgccaagtgtagcgaaggagtacccaaaattggtaaacatcaatactcaaggcagtatggtaattgtaatgtttgttattgtttaatgtctttcttagcatttgactttgtactttgtcaaaacaggtcacgaaagaaacgctattggaggcatcccacatttagttcttccaaaataattattcccacatggcagcattggattacttcggagttagacagagatatttttcttcccacatacgatggaaaaatggcctaagtgggtgagggccaccgtangtatagttctacacgtaattacattaatttgtaaacttttaactacttttgcacctccttcttggataatcagatataatttttgttgtatgagtaacccacataaaactgggtttttta

SEQ ID NO: 23011 - DNA, 524 bp, Glycine max
gcatgcaagctttttacaatcgatatgggtgttattctttgagaaatatttgatgcctagtgtagactatcttctttccatgcttaagttgcacaaagcttgtttgattttcacaaattgagcatgcacaatgccctttaacactttatccactcaaattcccaaatgctgaaaagtcattaatggtacaaaataccattgcatgcaacttgaaggtctgttaacggtacccatcaaacacgtcaaccctgtcctcccacaactttcttaagtcttcaatcaaaggacttagataaacatcgatatcatttcctagttgttttggacccaaaatcatcatagacaacttaatgtattttcgcttcatgcacaaccaaggtggcaggttgtaaatcattagcaaaataggccatgaattgtagttagtgcttaagttactaaaggattcattccattggaagaaagtccaagcctaaggtttcttgcctactttccaaattgggaaacacaccattaattgtctt

SEQ ID NO: 23012 - DNA, 447 bp, Glycine max
  unsure (1)..(447): unsure at all n locations
acacggtgagtgatcctctcttaggcaggttaatatgtaatgctccaaggaaggagcatcaaaacactttcacatgacaagaacaatttatacttgctaactttatacttccttaatttttgtttatcattatccatactgtcttgatcaccagcctcggtttactcgggtgacttctagtcttttctaggaacttatgaatcctcacctgaagtacaataacataatcagaacaaatatgtaatttataaaagaataagaaatagtagaaagggtgcacttcttatctggtatccctatatatcaattctagattacaacaacaacaaccaagaagagtgatataagaacatataaggaaatttcaataaaacagcttcccgatattatctttccttccccaacggtaaaaatnggatgttacaattcattgacaaagagctccct

SEQ ID NO: 23013 - DNA, 485 bp, Glycine max
  unsure (1)..(485): unsure at all n locations
atgcaagcttnacttagattacttttgttgttgtggtacacacataacaaatatagagagaggctagtagataagaccactctagaataatcaatattagagagcaattgcctaagattattcactatatgcttgctcctcacttttgcacgtccttaaacataatatattgatatatcaaaaatactattataataaataacaagaatatcttaatataggtaaaaaaaatactgtcatgaaatcacatatataaatatttgaaaaaatacaaggtgttttcattttgtgaaatcatcatttatataaacatatacattacatataaaacttgtattatattcttactgtatacaacaagtttgaaataacgtgatgaaaatacatatgatcataaaatgtatactatataaaatagaataaagcttgtatagcacacatatttcactatatgcgaaataaaagcgaagcttaatatgtacttc

SEQ ID NO: 23014 - DNA, 437 bp, Glycine max
acaaaacactaagctacttcagtgatagttttttgtttattatagtcgcaatctcgcaacgttccgctttgaattggccaaaagacattttctccggtacacttcattgacaaaatattagcaagtttctttatgcactaacagtacaccacgtcatatggcctgctaagtttatgttgacacatatagtttcatctattcgactcataaacttaactagtaaattcgtaagagttcattttctgtaaacactgtaacgcggtatctctctctcactgtgctgagatatttcaactatataattaagtcgaatagtaaatcatagatttcatcataatgtacttaccaaggctaggaatgtatcactactagataataactttgagatgttacagcagtgatatatcaatcttatcgagaatttgatgttattagag

SEQ ID NO: 23015 - DNA, 455 bp, Glycine max
agcttctccaaaaaaaatagtatcttctgcatattggagaatattaataggcactttattcttccccaccagaaagctttggaagcaattttttctgattgcttccctcatcaaacctgtcaaaccttcagcaaccaggtcaaaaaggagtggggacaaagggtccccttgtctcaagcctctttgaggcttaagctctgaggttgggcttccattaacaaggactgacacataagctgaagtaatgcaccccttgatccagctaatccatctctcattaaagcccattcttctcaacatatagaagaggaactgccatgacacagagtcataggccttttcaaagtcaactttaaagaccatacaagacctgttggtcctccttgcctcctccactacctcattaacaaccaaagccccatacaacagctttctatcctttacaaaggctgact

SEQ ID NO: 23016 - DNA, 452 bp, Glycine max
gactataacgcctatctgacagcagcacggtgggtgatttttttaatacaacgcaaaatacgtgctgtacacatatacatgtatatataacaactcgcaacaatgagctttacctggacttgatataatgaaacgtcttccacaaccacaccaatggacaaaccaagttcaactacaacctactaattcagctacacctggagttgatataatgagtaatggcattaaaagaactcaacgccagaccaagttcaagttccacaaactaattcagctttttctcaaccaaagtatgtcagactacttgttggctattaaaagtgttagatatacaagtgaaaggcaaagagagctgtaaaaacgacattcttgtatctattcatgattaagattcaccacgcacatatagcgttctttctccactgattgctatcagaccaacaaacaaaatt

SEQ ID NO: 23017 - DNA, 355 bp, Glycine max
agctttctaaatttttctggttttctaaaccttgaaaacaaaagtgtgctattcatctttttcattctcttcaacctttgctaaaaagaattcgccaaggactaactgcctgaattctttttgtgtctctcttctctcttttccaaaagaacgaaggactaaccacctgaattcttttgtgtctcccttctcccttgtcaaagaattcaaaatgacacagtctgagaattcttttgattcttccctttccaacatacaaaagatttcaaaggactaaccgcctgagaattcttttgtatccccattcacaaagtttcaaaggtttaaccgcctaaaaactttgtcttaacacatt

SEQ ID NO: 23018 - DNA, 549 bp, Glycine max
ttcacggacacttaaatctcagcttcacaagcaagcttccatcaagtggtaatcagagcactttatcttcaagtaggtgctcctgaaacctccattaattttcagctttaccttctcctccattgttgcttcttcatttttgtccatgtatctcctctcatgtcttgtgctaaatgttgttaattctttagaatttccaccaattaaacttgctatagaagctagatttgattttctatggttcaaatttcttgctcttgttcttgaaccatgaattgtgttgagtttacgttcctttgagtattctcttgctactttttgtggctgaaacctaaaccataaaattcttactaaaacattaaagtcgaaaaaaacctcgaaaatctatagtgacttgttcacctattgtacttttgtcatagaattcatgtctagtcatgaaacttgccacataacatttcttatgttgtgctcgaatttaattttcttggttctttgtctaactcacttgttcatgagtgtatgacattattttaccctattagttga

SEQ ID NO: 23019 - DNA, 511 bp, Glycine max
catgcatgctagctttcttgagaagacattcttgttattcttctttgagaagacttccttgagaagctcgagctgagctacacacacccctctaataactaagcacacctgcttgagaagattcctaaagaagctagagcttagctacacacagctctctaatagctaagctcacctccttgagatgagaatctagagcttagctacaccccccctataatagccaagctcacccccattccaaaagtacatgaaaatacaaaaaaagtccctactacaaagactactcaaaatgccctgaaatacaaggctaaaaccctatactactagaatggccaaaatacaaggcccaaaagaagaaaaaaactattctaatatttaaaaagaagagtgaatccgaccttgacccttgggctaaaaaatttaccctaaggttcatgagaaccctagggccttctttagtagctctagcccaatcctcttggattcttctatccaataccctgggggg

SEQ ID NO: 23020 - DNA, 486 bp, Glycine max
tagctactaattaactttctgctttcaactagctttttttcttatttttgtcaaagatgcattgttaccttgttaaagaatacaaattctatcaaatgaaataaactttgatgccaaatattactcgtgaataaaaactaacagtgtgtttggatgaggaaatttaaaattctaaagaattttaaattctgagaatttcaaatgcttcaatttaaattccttcatttctaaaattttgtgtttggataaaaaattagatttcttcatttttaaaattttgtgtttggataaagaaattaaatttcttcattttcaaaattttgtgtttgaataaggaaattgaatatcttcatttttaaaatatcttattttgataaaataatcaaatgcattctcttttaaaattttatatttatttaggtgaactgttcttaaataacaaaaagagaacctgagtcaaatcctttccttcttcattcatttctt

SEQ ID NO: 23021 - DNA, 503 bp, Glycine max
  unsure (1)..(503): unsure at all n locations
agcttgacaagagttaggccttgtttttactttcaatttagtgataggagagacaaaaatgtgttgaccttgaattctattatttttctgttgcttttgttcaattgctttctaacattaatactagttgttggaaatttctagtttggtatacaaatttctactcttactagttatggttactttggattgtgtggttgactataaatttttcgattaaagtccttgtttgttaaaattatgaaatagtcaggaaaatgttcatggtgttgagaaatttgtctaactctagaataaatgctaaacttatactttctcacactattttatcaacaaatcttttactattagatggacctcacatactgtaagtcctactaaacaataaatganaacaaataagaaatgaaaatttagtggacttcccttcatttttctctaatanagtatattaatgcgatgttagaatttgttacttcataatntatattttatttaataaa

SEQ ID NO: 23022 - DNA, 611 bp, Glycine max
  unsure (1)..(611): unsure at all n locations
tcagcctaatcgctaagcgacagcttatttgttgttaatttggatccattgtcgccaagcgcaattccttacgaccttaattgaggtccatgacgctaagcgctagtcatggcagctaagcgagattcattgcggcaatatgagcgctaagagagtccctctcagctaagcgcatgctcctctgtacttaagatgcatcattttagctaagctggccagagccaggcttagcgagagttgcagcttttctaatctgcagacctcgctaagcggacttactctcgcgctaagctgagtttcagttaaaaaaaattattttcgaatttgaaacgtcggctaagcgcacgtgttcgctaagcgagcttggttgagaaaccaaacatctctcttgctcacttagcgcaacggtccgctaagcgaaggtataaaaaaactgcttaagtgagtgtaacagaagttacactcatattttccatattacncganacctcgcatctgcattctctctcttcaaaaatttgcacattatgcatctgtactttctttgtgcattttcgactttgaagcatcaatcatacaccatccaagaaggtccttggatcttttctctt

SEQ ID NO: 23023 - DNA, 513 bp, Glycine max
  unsure (1)..(513): unsure at all n locations
agctttatgttgtgcaatgtccaatgtatgcaattactactctaaaaagaattattgttttcgttgaagttgccactattggtggtgatgtgcttgctagtgtctaggtttatggttttgatcatggttattgttacctatattgtttatttggtcagtgatgtgatgacaatggcaaggattggtgatttttcaataacataaattacaggttatatttgtaggaaacaaacaattttaaaaatatataatatatagcatcaatagtaaggctttgggggcaatgaataatcatagccttgaaaggtatagatatttgaatgcgaatttttgaatgaggtttggttttgttatctggggacaatgaagagttgaacattgtgtagtttattttgaaaccatanaggatcttttggtcccataatgggataaagtaatttctaaatgtgcatgcatttgttngataaaagaattatgctacaaaggtgttaatctggtttggttcatattttc

SEQ ID NO: 23024 - DNA, 408 bp, Glycine max
tgtatcatcagttggactgcagtatattaaagtttcttgtcttggaaggatgggtgtggggaaaatatcaaattgtggtctgacaattggctatgggaacaatacaccctacagcataagtaccaccagcttttccttataagtagacaacaaaaggctctcatgtcacaaatgggccatttgaacaataatatctagtgctgggacttgaggtggaggaggaacctatttgatcatgaaagtcagatggctgttcagttgttggaggagatcagcaatgtgcctattcaaagccaggtcaaggataatatgatatggctgcctgaacctaatggacagtacaccactaggacagcttatagggtatgtatgaataccacgtcagtagattctgaagacacgatcttt

SEQ ID NO: 23025 - DNA, 583 bp, Glycine max
  unsure (1)..(583): unsure at all n locations
taagtcacctgccgcatgcaagcttggtgtgtacttgtctgagagcacaatcaatgctagaaattgagctattacttaaaaaaaaaatgggaattttatggtgtttctttgacaaccaatttcaatggttatattgtataactacccacctactcatgttaatttgttatatatggagaaagaacatgagagtatttatttcagatgtgagttctctaaattttgttcttgaatgaagatgaatattgtgacatgaaagacgagagagtatgtggattgctagcaattgtcgagaacttggttttagtatcaagtgcgatgttctctccaaatacaaaatttgcatgacatgagatgcttgagacataccaagaattatgggattaaacatagtaaattttcctttgcattagaaaatatagngatgctaatcggatcttaattagtctaaaatgagacaaaatccactagtggttgacttactgtacattgtagtacctagattcattagagtatttattgtcactcggaattcaatcaagcggacctatataattctatctactatagagactgagttttg

SEQ ID NO: 23026 - DNA, 558 bp, Glycine max
tttcttctgagttcgagttaatcctctaggttatgtattttaattgttacgtattgccttttgatttaaataccaattctctatttatgcttttccaaatgacttgattgacctggatggacccctctcctcattgtctataatgatttgcaatgttttcatcccattctctacattgaattcaaccacccttcttttgctttgtcggattgggctatcatcaatttctaatacttaacccacttctgcttccctatggatttgttgccttagtttctcaaacttcaaggcttcctcatttcttctcttagcttgccgcatatcgactagcttacgaccagtaataggatagataggcccattggaaataccctctacctagggtgtcatcctctcaaacacactctggaaaatctggtgaggtacccacataccccttgtaggtggtgacaattataatctttccaactctgaagttcttcttatggacccccttatttcttgttttccttctattaatggctaccatacttgtttcatctttcttttggttgttgg

SEQ ID NO: 23027 - DNA, 596 bp, Glycine max
ctttatgccacgagcacgcaaatcagttttcttattgtcaaaaaatccttcaggcagaatcccttttactagctggatctctgtatcggtagtcttgactgatgtctgcttactatccgttgcggcttggctaacatttgactttgcaacattattgtcatgaaattgacctttatccttctccaagtttgacacctgacttttagcagaaaccccagcttttctacctaaatcagagtccactaaatgttctggaagcaaaaatgtcaatgaaacaaaagataagttgatattaggttttgcaaacaatcaatattatcatcaaactggatatacccagtacatataatgaaagacgaggataatgttaccacttcctagacctaaacaaccttgtttatccactgctataataaattctgaaagttccatggattttactatttatcaaaataattttttttgcagaatacattagaaaacacccaaagtttgttaatccatttccaagaaggattcaatcaactctagcctataaccattttgtaacacacctaatatcatctcaaagtccaaggacatgcatgtcatgtctt

SEQ ID NO: 23028 - DNA, 506 bp, Glycine max
cgttcagttgtagatccaaaacttgaagtgatgatgagttttattgtattgtggaatggttcctgtcaacttgttgtgagacaagttcagaatctgaattgcacttgcattgcaaattgaggaagagaagtcaccggtgattgagttaaaactaagatcaaggtaaaggagttgttggttccacgagaattggtccaatgattgtgtcaatcggttatgagataggtccaatccatgtaaccacgggctcgtttctttcaaccaatttggcactctacctttaagtgtgttattggacaaatggagtgattccaaaaatgggacttttcccgataattttggaaattcagttaaacccatagaagataagtccaaactcaataaatgggataaactataattgacattggattctaaattcagtgataactgatcattccgtggaaggtgaaggtctcccaaatattgaagcttggagaaacgatgaaatttgacagatccactta

SEQ ID NO: 23029 - DNA, 468 bp, Glycine max
agctttacatggtttttattttgagaagcctattttcagattttgatcatctacgtgatcaagtccttgttggtgatcaagtttcgtcaatggactctctagttactagacttcttcgtgtgcccatgtgttgaaagatgaaaacttagttgaagtcatggaaacatcagccatggttgcacctcgtggaagaggaggaagtcgtaacaacagaggaggccacggtggaaggagttgacgtcctcaatgcacctagtgcaagaggatgggtcatactcaagaaaattgttactccttacatggctttcctgacaaggtagcacatgtatctaaatcagaaaaatgagagactaagttttcagatgaggagtaccaagaatatttgaagcttgaatctgaaaattccagcaaccaagctcaatcctcctcggtaccatgtgtttcaacaacatgtatctctcaatctat

SEQ ID NO: 23030 - DNA, 537 bp, Glycine max
ttgtgtaatcgattacactgatttggtaatcgattaccagtgtctgtttctgaataaatcaaaagatgtaactcttcaaaaggtttttgactttttcaaattggtttaagttttttctaaaagttataactcttctaaatggtcctcttggccagacatgaagagtctataaaagcaaggctttgatttgcttttcaatatacttttacacttattcaatcaatcttttacaagccttgaatctctttgaacttcttcttcttctttgtaccaaaagctttctgaagttttctggttttctaaaccttgaaaacttgtgctattcatcttttcattctcttctacctttgccaaaaagaattcgccaaggactaaccgcctgaattctttttgtgtctctcttctcccttttccaaaagaacgaaggactaaccgccagaattcttttgtgtctcccttctcctttgtcaaagaattcaaaacaacacagtctaagaattcttttgattcttcacattccctaatacaaaaagtatc

SEQ ID NO: 23031 - DNA, 511 bp, Glycine max
  unsure (1)..(511): unsure at all n locations
agcttgctgcaggcgcttagcgcacgatttgaatgngctaagcgtgcgatgtcacgctaagcacgcctttgaaggcccaaagcccatttctacacctataaatagagatccaagccaagggagaacgtacacctcacctcagagcacttctcttagcattccaagcctgagctctcccttttctctctatattctttgcttttattatcctttctttctttcaccccgtttgtaaagctcctcaatggccatgagcggctaatcccctagctagggcctggcaggcctaaaaagccgacgatgtatggtgtacttcaagagttatcaatacaaagaggattcattccaggttttatgttctaattcttttctttttatcttgcatttatgtcttaaattgcttttgggttttattcactcgggagagggtattgcctactaagggtttaagaattaatgcatcaccagttttaggggttatacgcttgggaaaggataacacctaatagaa

SEQ ID NO: 23032 - DNA, 469 bp, Glycine max
gatttgctgaaacaaatgaaaaaaatatggtcattaatattataaacatgaaagaaaaaataaatatgagaaaaaggcgaaacaaataacgatgtacctaaaagtaatatcttaagaagttctaacactagtactcccaatacttgtagactattgacatgatatttatgtcataagcattgctaaataatggacattttacgtcgattattaaccgtcgcataggcaacgtcgtagaatgtttgcatctaagacgacggttcccaaaaaatcgtctcaaaaaaactacaaatctaagacaatttttagggaaataatcgtcttaaaatgaaaactatcttagaatgtatttttttttaaaaaaataaatcgaggattcccagacgaatttttcggttttttccaaaaccgtcttagagtatagacattataagatggattttcaaagaaccgtcttagaattttttat

SEQ ID NO: 23033 - DNA, 469 bp, Glycine max
  unsure (1)..(469): unsure at all n locations
agcttctaaaattggtgtgtccaaacctttanagtaattctaacactcttcattagattcaacagttttcaaacatcgaattccagtacccttcatgttgatttgaaaaatactttttttgccaaatgagcctttagaatcaacctatgagaagaatcaaatatttccattgagtcatgtttcataatcaatgaaaagcctttcttaattagttttccaatactcaataaattgcatttctttcttggtacatatagtacattttctataagtgttgattttccattcttccctttaagcacaatattgcctataccttttgcactcaatgttctatcatctggaaattgaactttgcttgttcttgtggtatcaagatcactcaaccattctttgtggtttgtcatatggtttgagcattcaatttcaaggaaccaatacttagactgtgcaagattctcacaggtgg

SEQ ID NO: 23034 - DNA, 589 bp, Glycine max
tataatctctgggagtggagaatgctgaaccaccagcttttgttgtataatcccactgttgctcagaatagatcccatagtgagcaagttgccaaaagagcaaaggatcttaccatcttgctctcaattgtggatggtgatatttttataagtatttcaaatttggatacaacaaaggaaatttgggagaagattcaagaagagtttttttaaggaatcaaaggaccaagcaaatgcaagttctcaatatgaagagggagtatgaagccttgaagatgaatgaggctgaaagcataaaagatttcatgaccaaaatgatgaaggttgtgaatcaaatcagatcagattgcaaaatagttgataaactcttggttgtcttacttgaaaggtttgatccaagatttcttcacttgaagagtcaaaggatctctccaagataagtttgatagagcttgtaaatgatttttaagctcaagaatagaagaggattcttagacaagaggactcaacagaaattgctctacaagtcaagtataggggaaggctgtatcagcaaaacgagagaggaaatatgttagagagcactctg

SEQ ID NO: 23035 - DNA, 633 bp, Glycine max
  unsure (1)..(633): unsure at all n locations
agctttaagctttagtcttcatgtttttcttgctgctccctctatctctaacatttgattcctctaagaggaagcactcgtcacttccctaactaattcccgcgatatctgggctttggagcacgttggattttcagacttagtcgggtgaagatctgattttgaggggtccaatgagaagaaaaggagcactgagaagtggaccacgacagaggaggaggagtagtagtaggaggaggagagcttacattttgtggcattctatggccaccaatatctttatctcattaccaatgtcaacttaagatggatgggaatgaatatttttaatcaatttaaaaacatgaaaagaccaaaataaactttttaaaagataaaaaatcaaactgtaaaataaaataaaggatcgaaatgagcattaagcctatattataacaataattaagtaccgaagggatctagctcagatggtcgaacaaagtgtgagtgttataaactccctagtactatcttcaattcctatggataaaaaataacaatagttaagtagatagtaaatggtaaattaaaatatcaatgatacgggtaccacanaaaaacaaaaaaaaagttactattacgatacaacctatg

SEQ ID NO: 23036 - DNA, 590 bp, Glycine max
tttactaaaaaattattgcatttgaaaacgcacatgcatactcatacacatgcatacttgttatcttgtgacagggacaggatcgttttaagcaatagtcaaatatcgagccaaatccaagacagagacaaatcaaggtaagcggtaacgcggccacgatttgctacgcactatcatttcctgctttcaggtacttggggacgggcacgagtagaggctaggcccatgatcaacagatcgccgtcccacgtgcatctccggacaagcaagaagtgctactgggaggcagcctagtatcctttaaattcctacttattattgtcgttgtttctttaacgtgatggtcggatgcctaatttaccctagggacttcgagtaagtaaacgccaacccctagagagtgcgtaccttcattgttaaaaaaaaaagaaaaaaatgcagggttagctcgcctgggcgagctgagctcgcctgggcgagtaccccctgcactaaatggtttaaaaagagaggggagtgcagttttcacccaaggagctttctcccctcacttaagaacgcagcactcactggatttgtgctttttttga

SEQ ID NO: 23037 - DNA, 684 bp, Glycine max
  unsure (1)..(684): unsure at all n locations
atcttcttatttatcccaacggtcagatcgtggacaagtgtcttgtgaagccgcagaccaaatttcgagaagatccaacggttaacgaaggctgggagatgttgttatcgaggcagcttcatgtagcttcctcaagaagcttcattaagaggcttcctcaagaagcttccccgtggcttctttgaaaggctttctcaagaggcttctttgagaagctagatccttatctacccacacccttctattaactaaattaacctccttgaaaataattacggataaaaaataacataacaaataatcaaacatcaaacataattactaatatatatatatatatatatatatatatatatatatatatatatatatatatatcatggcgttacattgggagcacgagtgattctagaaagagggttgcccactcaaacatacatcataccacctattttagggatttgtgcctaataatacctattttgggcaccccaaagcacaatgatttatgctgtgtgaacanaccctaattcacaaactctttacttgaggataaactcaagcccagaggtgtgggatgcttacaagtgttttttacaaaggaaaaatatggaggttgctaagaagggcaattcttaaatattggccttttttcaaaaggttttccttttagctaacttctan

SEQ ID NO: 23038 - DNA, 556 bp, Glycine max
ccttctgtaaacgacatctttttattgataccatggatcttcttatatcttaatatttagatttacataaagaacaaagtaaagcaactttcaaataaaggctaaagagaacattcaattcaagcttccataaatgaaatcttttcatggataccatggttcttccaatctcttaatatttacttcttacatgtatgataaaaatcttgtcaaattaaacaagaatcatgtcagatgcataatccgcattcctaataaagcatgccaaaatgtaaagatgaccatgaatatggagtaatcatctataggtcaagtgtatcaatccaaagaagccgtcctatataacctataaggtatagagaagagttcaaggacaaaccgaatagatggcaaagcagtgctcaaatgaataatagcttatggacataattgaaggatgaaaaaaggcatgctctgccagagatcttgattgtcttgatgatactgacaagagattaatcatattttagcagtagaaatcaggcagtaatcatcaccaaagttggtaacaagcttt

SEQ ID NO: 23039 - DNA, 406 bp, Glycine max
agcttctgttttcaatttcgagcgtttcgttattttacggggctctatccgacatccgagttaaaagttattgtcgtttgattattctaagagcttcccttttcaattacgagaatctcgatatattacgggacacaatcggacacccgagtgaaaagttattgtcgcttgaattttctcagagcttctattttcaattacgagcgtctcgatatattacgggactcaatcggacattcgagtaaaaagttattgtcgtttgaattttctcagagcttctgttttcaattacgagcgtcctgatatattacgggactcaatcggacatccgaggcaaaagttattgtcggttgaatatgctctgagcttctgttttcaattacgagcgtctcgatatattacggga

SEQ ID NO: 23040 - DNA, 252 bp, Glycine max
ttgaggaaattcaaacgacaataacttttgactcggtggtttgtttgtgtcctgaaatatatcgagacgctcgtaattggaaacagaagctctgagcaaattcgaacgacaataaatttttactcggatgtccgaatggatcccgtggtataacgtgacgctgttaattgaaaatagaagctctgagcttattcaaacggctataacttttaactcgggtgtccgaacgagtctcgtagtatattgagacgc

SEQ ID NO: 23041 - DNA, 451 bp, Glycine max
  unsure (1)..(451): unsure at all n locations
agctttaacatagaaaaaaagggattanattgttttcaatctcagagacaccatctttaagttttgtcaagtgagaaaattgttcattttgttttgaaataatcaattaaacaacagttatttatataaataattcacttaagtaacacaatatcaagatattagttctcatagaaaaatttgtaaaacaatgttacttaattttaagcactcatttaagtattcgcattggagatactctatggcttttgactaccttgagaaaagtgcaagttagcatccctcccaaacaataggaaatacatgatgggattgaactcatagttaaagaatattagaatttagaataatgcaattttcatcccttcattttctaagagaatttttgtttttgattccaaggtttatgcactgcaccgtcgactttttgatcggtacaaataacataagt

SEQ ID NO: 23042 - DNA, 399 bp, Glycine max
tatagactactcacgcgtgacattccagtacgctggtttatttgcaagcaatgtgattttatattccagaaccacaaacgaaacaccgttgagattctcaacgtgttcactcctgatcaagcagcagatataataaattattagttggcgcagctcttttctttcccagttctcgctgactctctacgactcacttccgacggaatcaatgctatccccagggcctttgccttttctttggaaacctgacatgtgcgtccataaggcttgtcgtgctgctgacctccctgaatgagaaaatgctgttcgtcttagcaacataactagaacgtttttggcggaaagaatcgtcatctttagctatctatattgacatgcaataaaaaaatgaaccttttt

SEQ ID NO: 23043 - DNA, 414 bp, Glycine max
  unsure (1)..(414): unsure at all n locations
agcttataatatatcgatacgctctaaatatttatcgacaacncncgggaaaggcagagagtcataacaatncacacggacgcccgacncgggcgcanaananggcgagaggagcgaaagcgaacaacggaagcccnggagaaacccaacggggagaacccaacacacggagggccgaaccaggcgggagacagaacgagacacacaaaagggaacagcggaagcccccgagaaacacaaaggggcataacacncaacccgaaagaccaagnnaggcgcatcacatatagtgacactcgaaattgaacaacggaagctctcgtgaaattcaaatggtcataacttttcacactgaggtccgattcaagtgtataatgcatcgatacactcggaagtaaacatcggaagcactcg

SEQ ID NO: 23044 - DNA, 741 bp, Glycine max
  unsure (1)..(741): unsure at all n locations
ccggtgccactgatgagcttgcagaaggcgacaccnataaatactaaccccgcgcatgcgcatgcgccgaaatcgaagatccctgggaaaagttatgataataacaaggggagaagaacgggggcactataagagcaaccgtaccaacaacaaatgaacctctgaggacaacgaggtgggaagaggggaccacgcaaacaacctgggagcatgcgacggacaatcgtacaccccgcagaagaggctacaccagaataggcaggcccacaaaagggcgacgacaatggggataccgctacagccatggaggcgaaactccacgccctgcccgaagatgtgcgcccaaagcagcactgcaccgagagaagaaggacgcggggcaaaacccaacagaaaacggagacgagaaggaccctgggcagaaaactggacccggatggggcgggaaaagaaaacggaagaccaaaggagcccacgagagaacccaggaaaaaaggccccggaaaaagggaaaaacccgaaaaaaatttagcccaaaaccaagcaccatggatcccacaaaggtacaggggaagggtgaaccccccccagagagaagaacacgaatggagcaccgcggaacagaacaggcaccgaaaggaatcagacgggggggaccaaaaagggggcccaaaaagggaaaccccacccatcgccccaccaagaggtgaaacccggaaaaggaggagacaggcgcgagcg

SEQ ID NO: 23045 - DNA, 489 bp, Glycine max
  unsure (1)..(489): unsure at all n locations
agcttgctagcaatgtcattttttttgcttttataaagggaggtgttttgtttcttttttccactttgtattcgggaggtgagcaccaattgtgcactctaaactaatcaaaattcaataataataaaaaattacaagtttaataataaaactctatactttttaaaaaaattagtgcccttagtactgagatttacaaggatttaccaaaacctagtactgtgatgagagcataaatacaaggattttcccttccaagtgaatggtaaaagaatttgtacaacgtagattgtattcataatctcatatttgtgcacctacaatgtggatatatattcaatacaaaatgtgaaatagacaactaaattgggaaatataactcatcctatttagagatgggttgatgaattgtaaaatgatgncgtccaagcatatatatttgtgaaantcatcacctcagtatcagcctttgtcgtagtctcttgatca

SEQ ID NO: 23046 - DNA, 530 bp, Glycine max
  unsure (1)..(530): unsure at all n locations
tccaacaccattaatggctacccaaccttccaaactcnnattttacacaaataatcattcctaatgcttcataacactaaacttcaacatgaaaactctatatcaaagcaaactagctcaaaatcatcatccttcctaatgcccatgaatagtgtacaaaaatggaaaaaggaaggatcaagaaaaccatcagtggaaaaactatcaatgggtctcattttaccattaaatataaagactatcccatcaaaggtctatgtattatatattactaaagtccgtaaatcagggatgttacggtgtgagtccttcccccttagctccatcggttccttgtttgcacttgttgtcctttctttacccttttgaatcccaatttaggagatttagtgattctgattattatgcttgattgatgagtggtttgaaaattttaatcgattagaaatgtcatagaagtgtttaggacttgatatccgagcttaaggacacctatgaaaccattgttgaccttttttttttgcatatat

SEQ ID NO: 23047 - DNA, 419 bp, Glycine max
agcttgcctcttaggaaaagttttgtcttttttatactttagacaagataattttttggaggtaatgtgcttccttagcattttttcccttttgactactcatgttagatgatgataattgatttagtttagtgtcattggaatatcaagttaagaagtaaaacttcgtttctgttgatcctcaagtgtaatggaaaaacttttgaagtgaaatctctgccttatttcgatgtatactatatcatggatactgttacctgttctcttgactcgaattaattatagtttcagaatattgcatttttctatgctaatcgtttgatcttgtttgttatgaagttcttatgcaattttataattacattgtatatggggattatgcaggtcgcatacatctctcatttccttactctatccca

SEQ ID NO: 23048 - DNA, 349 bp, Glycine max
aatccaggaaatctacgaaatgggtcatttctttcatgtgcaggaaacttttttcataacttatcctaaagacaagagacagagagagaggccacagccagcatcaaatcattaaaagtttggtccaaccttcaatatcaccacctctttatcctttaccttggaaccaaaaatcatgggaggcatttcatgaccaaatgggatcacagctatctgccacagcactgcaattgtcactgggtccagaaaaaaaaaaaaaaaaacccccgtgaaagtgagctactccaaacctatcatctgcagaatccctgtacagtgcttgcaaaagagaataaattttggacaataa

SEQ ID NO: 23049 - DNA, 584 bp, Glycine max
ttaagcaccgcggctgcagcttaaaggagggcaaaatggtcattttatttattttatgaccctaaattcgcccaggctagcatctggctcgcttgggctaaagagaaaacttcagccataagcaagccacttgcctgggcgagctgattccttcaggcctatgttacaagctcacttgggcgagttccagctcgcctgggtgagttccccctacactagatggatttttctataaaaatccatgcaggggaatgacaatatcattgaccaaccacctgaattccttacaaaaacgtacaacaaaaatgagaagaggaaaagtggagccgatgcgctgcatagttgtgaccaggggtcacttccttcctcatttctcttgttagacttgtgctctgcacaataatcaattagttcttcttaaagattggatgtaattattatacccttatgtatccctttcgataatatatatgtattaatattttctactcattattggtaaattcattctactcttaatgcttgattctatctgatcataaatgtcatgacattggatatttaagcgagaatggaaagtaatc

SEQ ID NO: 23050 - DNA, 303 bp, Glycine max
  unsure (1)..(303): unsure at all n locations
gcatcagtgcgggtctgggatacaaaagtcgagaggtcgttanatttttacatgatgatcccagtacctgggatttggtactactatgcgctcctgatgaccacctgggaaattggcgagtggaggaactccccggcctttactccacgatcataatgtaaaccattgcgggtattaaagcattataatatggcttatgctttaccgttacacttttgattgggctacacgtgatctagtcatgatatttataagccgaggatatttattggtggtgactactatatacagaacgattgcttt

SEQ ID NO: 23051 - DNA, 512 bp, Glycine max
  unsure (1)..(512): unsure at all n locations
agcttgcaagaaggtctgcaagatgcatccttagntgttaacacaaatggtttcaaggttaacgtaaatagtgctcttcaaacttcatcatcccaaaggaaactacttagcgatgaaagcaatcatgtagggaaatacagaatgttcatctattgccaatatctttaaactgcagaaactctcaccccatgctaatttagctactccatctgctaaacttaggaagaagaccgaggaaaagttgagaaaaccttttaattgtgtttttgccaagattgattggccatctctctggagaagctgcagataatggattaagaatcctttgaacatggccattcttcaaaggataatttgtgttgctgtttcaagagcaattctttttcttgtcatgacaggaatcttaagcaaaatacttaataagcagtcacaaagggactaatggtttgaggtcaacaatcaatttctcaatgctctatttactctcatgtgtctataccacacatccaagc

SEQ ID NO: 23052 - DNA, 522 bp, Glycine max
ttccaagaaaaaagtcaaaaattctaagatttagaatttttatatcatatttttgcgatttgaagatttttaatgattatgttcaaggtacgcaaaaaggttacctgccaattagaaaattttgaatttatggcagagaatcaaaataactggagcttaatttatatgctaacaaaggttaaacaaagagcaacggtaaagatatagtagttggtcttctacacaatataaatttaaataacaaaaatatgttgaatgttccactgccaagaacagtaaccaaaacataatgctcccacagatcgttctactcccctcttctccaattgtatcttagcagtgaaaagattctcaacaggcttggcaagtagttcaagaaaatgtgtgtcacacaataaatcgatgcttatattttctgtattagctgagttttttttgttccctccctttgcattttcatttgagatgatcaagtaccatagctcatggataaataccttgtaaagaggaactttcatgaca

SEQ ID NO: 23053 - DNA, 514 bp, Glycine max
agcttgtacgtcagtgttgtaataacagatccttatttcacaatagctaataaatattttccaggcaacatggtaataactagtattgatgatattattaaaataatagttgtcataactaataatagtattatatacctttaatataagaaatcagaaggataggaattttcaattccgaaggattgccctttagtttgagcaaaaggaaattatataacaacaaactaagaaaagaatatatatatatatattgcttttttatatcatcaaatggctaacaaccattcgacattcataaacgctgcatatagtaatatacttcttatagcctgctacatgcattgatgtagtgaccgacctaacccaaattcaccttattaaacctaaggtttgaactttaaattttaagcatgatgaattaatttttttttccttttatcccaataccatcatggtttgatctggccttaacccacaaaagttagtgaaaacctattttttttttttaaaa

SEQ ID NO: 23054 - DNA, 436 bp, Glycine max
  unsure (1)..(436): unsure at all n locations
ttcctgaataggttactgattcagagttatccctgcntggtttttttttaccgcagncggtcctgctttgctgttacaatgctttatacccttaacattttatgtttcattcgattctgtgttggtatctatgttatagttggatagatccattatatctcttgtcttgatttaccgaattggatttgaattctgctttttattgtctctttcctggaagctctaccatataattattgatgcgtatgattgtgtgatgaaaaaacagcgatacagaggatgagtttgaaggtgtgaacctacccaaggccaatgcaatgacagttcctcgtacaaaggtatatgaattaactattgtgttcccgagtttctgtggctttattatggaactcaaaccccgtgactgtacggatattgaattggttattcagcagga

SEQ ID NO: 23055 - DNA, 506 bp, Glycine max
  unsure (1)..(506): unsure at all n locations
agcttgatttgtgagttgattttagccttantttactttggttattagctaattcaattaagaaaaatcccaaagaaaagcgtccgattgatttttttggattattttattcaaagatattttgattattttattattattttgcctcttttggttttaagcgtggttagggagtgaaagatcggttggattttattttaacagagattaaacgatattacaactcaaatgatcggtgcaaattcattttattattgattaggcgagaaaacggcttaaataaatagttaaagcacgtcaaaagggggtacggaaaacaaacgaaataagaataaaagcacatgagacaagtggggaccactaagggtgcatagaatgaattgaaagattcgatttctggaacttaccagttgaagaccgaagaacgacgaagaacgatgaaaaacggcgaagaacggtgaagaatcttcacgaaatcgctcatggaaacgtctccgaagtgttat

SEQ ID NO: 23056 - DNA, 499 bp, Glycine max
gcttcggttgctcattgacttcaaattgctgcagagaaggacatacatctgtatggtgatctgcagaagaacatagaccacagagtcttgcaacaggtgcagatttctgattcatggcaagctgagttactaggttgaccaaggcatcaagttttccctcaagatttttattttcagtagatgaagatgaatccattgccacctcatggactcctctaaggacaatagggatgcaatcctaccccgcaaaggcattggatagaagactccaagtagattgggccagagatccaagggaaggccctagggttctcatgagccttaggatagatttttgagcccatgggtcaaggtatgatccactcttctttgtaaaaattagaataggtttttccttcttttgggccttgtattttgacaattctagtagtatagggttttagccttgtatttcagggcattttgagtagtctttgtagtaaagacttcttttgtattt

SEQ ID NO: 23057 - DNA, 431 bp, Glycine max
agcttgtgcgaatcaaatcactcctgcatttcttctctaccatgcattctttctttctttacccactcctcacgtttggttttttagggaaaaacaccataactaaacgcgccacaaggcatccctatcgcaccagatccaaatctataacgatgggtgatcaagaggagacacaggaacagatgaaagccgacatgtcggctctgaaagaacaaatggcttccatgatggaagccatgttaggaatgaggcagctcatggagaaaaatgtggccaccgctgccactgtcagttcagctgccgaagcaggcccaactctcttggcaactgcgcaccatcctccctcaaacatagtaggacggggaagggacacacttgggcacgatggcaaccctcacctgggatacaaccgagcggctacccttatgtat

SEQ ID NO: 23058 - DNA, 568 bp, Glycine max
tcttaacctataatatcattgggtaaatcttcaagagagttttttttacaaagcgcaaaagaaatgaacgctgtctgccctcctccttgccaacactaataatgttataatgaactccaattcatggtgaactatgttgctacaaatctatttattttagacaattcaatattataaatcatatggacatgttgcaagttttaccatatgcatatgctgccaaatataggtctcaacatgaagtcataaaccagagtcctttataacaaattaacaaaattccaattataacttttctgtgcataagccgatagcataggctattaagtttgagaagttttgagaaacagttattagctatagccaacaatgagatggataagcttaaaacagaaacttgtgtttgaaacaaaaaaaaacaaaatgaaaataaagtggcaaatttgtaattaaaagtgaaaacaagaaacacaaacacaacattttctcaaagtaaacaggcccatacagtctatagtactcctttaatcttaaagacggaaacaagatggcttaccaatgatgcttc

SEQ ID NO: 23059 - DNA, 582 bp, Glycine max
  unsure (1)..(582): unsure at all n locations
agcttccattgttgagtttttgctttccttttcacgctttaattcactccccacaagtaagtgcaatttcccttggttatttggctctccattgatgtgttttggtgctttagttgctcattttttgcaaaattcgtgaagcaattcgcatctgaatccatgcttgttttgttgagttaagggtttgtgtgagaaggccttangcctatgttgtattctgaagcaatggggcatgccacattgttcccattctcttgcaatttgtgtccaaacgtgcgccccccaagtgctcggtgaaatgccccaatgatatatgaatatgattttgcgaaattgggatggtgggactgttttatatatgtagagacagcataggagattcaaaataggtgcccgaatgcaatttcaagcttaggaatccaaactttttagcttcaatgcaagaagacatactcatggctaggaatccaaattatgggtttagaattagaaaagcattgaaattaggacttgcttgtgagaagttttgctcgaatttggctgccccatgtttgatactttgcacctaagtaatatgaaaaa

SEQ ID NO: 23060 - DNA, 520 bp, Glycine max
  unsure (1)..(520): unsure at all n locations
tctgtactgctacattctactaatatatggagatggnctangctttacctgaggatgacaattcctagaccctaacaatgctagaggcggtaaaggacaacaatcttataaaaaaacctgttgtacatgcacaaacaatattacatcaatagaacacaaatgattgcataaatttaaaaatatgattatctatctttaatgtacctgaacaaaatgattgtcatagacgtgaccgatacatattatgtgatgcacagaagaatctattggtggttgacttctaagagaaaagaacgtcatgctttgttgtcgggacaatgatacaaggattacattataccttgatgcaatgacatatcccatctcggttatatccatccacttatccacagtaacctaaatcaaacaaatatacatatcaaagttatttaaagttaattcttaaaaagcaaaacaaaaattacataccatggataacttatcaacaagtaaggacctccttaattcctcaaatcttttt

SEQ ID NO: 23061 - DNA, 711 bp, Glycine max
  unsure (1)..(711): unsure at all n locations
ccattatttnttataaaccttcaggttgtttcatataaacctcctcctctaaatcaccattaagaaaagctgttttcatatccatttgttgcaactcaaggtcaaaataaacaactaatgccaagattatacgaagagaatctttcttagatactggagaaaaagtctctttgtaatctattccttccttttgagtaaatcccttagcaacaagtcttgccttgtatctctcaatgttgccaaatgaatcccttttggtcttaaagacccatttacatccaatggcctttgccccattaggcaactctacaaggttccaaacttttgtactctacatggaattcatctcattcttcatggcatcatatcataaaattgactctttacaactcatggctttgatcaaaagtttcaaaatcatttcagcttcataatatagtcagaatcctggcaatattccatattatcactaggaatagtngactttcttactctaatagaccttctcttatggtgcattaacattttcgttgggaacattgtngtcaaactggttggtcaatcattttcatgaanttgaatattcaacctggaactactggattattcaacaacaggttgggggaatggtaaatcatgggtgtggtcaatcaatccctttggaacctgagggggattgagataccaaacaaatttttcatttggagtggg

SEQ ID NO: 23062 - DNA, 598 bp, Glycine max
  unsure (1)..(598): unsure at all n locations
tgcctcttttctaggatgctggacagcaatgctaggactttgtaatcatgtccttttcctcaatatttttcatttgtggatgatttatgtatcattagacctatcatttctttttatggacatcttggcctaggtatttcaaacatggcatgtgaactttgccatgccttcagtgtggctgccacattaatggctttgtcaatctcatttacattaatttaataataataatgaagactttgcacttatcacaaattggtactttgatattctgtcatttgttcatttaatgatttatgtcctttggggttactgaagttaagaaaaaaaaaactaaatagggatgaactccttacactatcattgcccaaatttgggcactgctacaccaaatagggattaacttgtgactttcacattattagtacaacgctctaaccaactaagctaataggtcaattatgttataaaataaataatgttactatatataacagtaaaatttctaatgtatatntaatactaatcgtatgagttatatcaaattaattcacatacgggatacactcatatggatcagatgatctgtataactcat

SEQ ID NO: 23063 - DNA, 522 bp, Glycine max
agcttttcgattcattctatgtacttgattggtccacattgtgttttgtgtatttctattcttgtttcatttacttttttataccccctgttgacgtgcttaagccattttacttaagtcatttctcgcttaacttaaaaataaaatcaatttccaccgaacatttgaattgtattatccgttaacttcggttaaaatgaattccgaccgttcggtcgtgccgtaaccacgttggaaatcaaaaagaggtaaaaaaaataaatataataatcaaaaaatattttttagtaacgtaaagcgaaaaatcaatcggacgttttctctttgggatttctcattcttaatcgaattgactaataactaaagtgaaattaaggctaaaatcaacttccctagtcgagctcgtccacaaaaataggcttttgaagtttgtcatttcaatttctcactaagtaaaatggatcatttttaaggtccaacgccttaaaatgatcaccacttaagccaaaaaaagaatcactt

SEQ ID NO: 23064 - DNA, 373 bp, Glycine max
  unsure (1)..(373): unsure at all n locations
tgccacccagctcgcccaagcgagctaggatgctgctnatgatagcaccgccttctggaggaacttcttggaaggcccaagtgggcctgggtgctatttgcaccccccctatttactaaatcaccccctgcctttttgtgctaattctttttctcgtaacgttactaaactttacgaaatccggaatgatacttgatttccttgtataatgtttcggaaccttacggattacataatcatccctttgttggctatcggaaaattacggaacttcacggattgtgtaacaaggcttgcttttgattttcggcatgctacgagacttaacggatcgcgcaacaatgctgtattatgacttctggcacgttatgga

SEQ ID NO: 23065 - DNA, 431 bp, Glycine max
agcttgtaatcgattacacagtaaggaatttttcaaaataactcccaagagtcacaactgttcaggaagtttttgaatggccatcaaaggcctttaaagacttgggatacgaaattccttagaggttttctgaataacattttcttatcctctcaaaaccaaattgtcttatcattctcaaaatattccttggtcaaaacacttgcaaattcaataaggaatcttgatcgatcttcaattgtaatatccttctcttaaagagagaaaattcttcttcttcttattcaaacagatctgtataagagaccgagagtctcttcagttgtaaggatatttgaacacaaggaaagggtgtccctgtgtggttcaaagtttgtaaaaagctttctacaagatagtggaaatctcaagcgggttgcttatggactgga

SEQ ID NO: 23066 - DNA, 575 bp, Glycine max
  unsure (1)..(575): unsure at all n locations
tcacgctctctccaacctcaacaacttggtcgagactntttgtcctcctctggtggattcactcaactatgctgtaagtgcaggtaaatttgagtccttttgctttgaatttcatcgattcatttgttttggggggattggatgctgcaaagggtagttttggggattatgattttgggacatgttcatattgattatgttttcaaaatcagagatctttttgggttttaattttgatgtaattaatctcgtggggggttcctattgtaattttaaggtttggtcttatttttattttcccttcccaggattttctagttttaatttaagtcctaatgttagatgcatgtggttcttgagatttaaggtgatagatttgatagctagcactgcaaagttgggttctcttttgttaatgtgaacgacccatttgttgctttttattttgggtgagataaaggttggttatttggttctggcgttttatttttttactatccttttggtggtcccctttgtaaatcttgaaactttgtgcatgggtatgtatggactctacgaaattttactgtgtg

SEQ ID NO: 23067 - DNA, 500 bp, Glycine max
  unsure (1)..(500): unsure at all n locations
agcttgatgattgcctatgggcatttggtttcttccttcaaaacacccattggcatctccttgtttcaaatggtgtatggaaaagcttgtcacctaccagtggagttagaaataaaagctcattagaccatgaagttcctcaactttgactttacaacatccaaagagaagaggaaggtacaactacaggaacttgaagagattctcctcaatgcatatgaatcatccaagctctacaaagaaagaaccaagagataccatgacaaaaagatcctccatagagtattcaggcccgaacaacaagtattgctctacaactcaggattaaagttatttcatggaaaattaaaatatagatggagtggtccctatactgtcaaagacgttaagccttatggagctatagagatagaggatgtgacaccttctacccctcacatatatatntataaaggaataaaaatttcaatattaattaaaaggttttttaaaacattttt

SEQ ID NO: 23068 - DNA, 652 bp, Glycine max
tgttggaggacaatcctactcctctctcctcgatcttaattttatttcactcaaattagggttccgattctccgttaacattgattttgcacttaaatcaaaatctgtccacgtttcagatttggtgtttgttcgtttagctgaaatatgtttttactcctaaaatttggataactccttttatcggaatgaccagaaagtaacagaatcggtgtttttgagtagtttaaagtggattttaaagcaaccgcgcattcgatttttctttatcttaatatattcggttgaaattgatcaagcaggatgttatctgtatgttcaattcttttgtagctaatatgattcggtggaatggttgaagcttttgtaggtttcagttgttgtcaggtaatattctgttgcatgaaagtattggctattggctatattgtatatgttagatggttagcatatttgttttatacaaatacaaattgtgaacaaatgatgaggtatggattttatttatttttggttccgcaacatgtttcagaaaagatctgatctaaggcaaaaacatgccgcattggattctttttggtggtttactggatttatcatgctcttagagcttgttgcgaaaataaggccgaaactggtttattaataatat

SEQ ID NO: 23069 - DNA, 253 bp, Glycine max
  unsure (1)..(253): unsure at all n locations
agctngnagcaaagacaaacgttattaactanttacgcggagggccgcacgagtgcagcaatatatcgagataccagaaatcgaaaacggaaactcacagaaagtgcagaccgcaatcaccaaaaacaaggacgaccgatcgagacccagcacagacaaagacggtcagagaggacaacagacgctccaagacaagccaaacgatggcggccatcccctcgaaggaacgatacgccaccgccatagaaccaga

SEQ ID NO: 23070 - DNA, 298 bp, Glycine max
  unsure (1)..(298): unsure at all n locations
tccattttcagttgcgaccatctcgagatattanttgatttatccggacatccatgtataaagttattgtcaatgtgaatatactcagggcttcagatcttaattttgagcgtctcgatatattacaggactcattcagacatccgagtgaaaagttattgactgttgaatttgatgctagctccctgctgcaattgggagcatctatcgcataattatgacactttgtcgggcaatccgagacaaagctatagtcggtagaatgatataagagcattcgtctacaatatggagcgtc

SEQ ID NO: 23071 - DNA, 392 bp, Glycine max
agcttttcgcaaagcttacggtatattctgtgacctagccatggtagaagtctccacagaggccattgcctccctcgcccagtattatgatcaaccgttgaggtgcttcacctttggggacttccagctatcacccatggtggaagaatttgaagagatcctatgatgtcctctaaggggaaggagaccatacctcttctcagggttctatccctcattagctagaatttctaagatagtccaaatctcggcacaggagttagaccacagaaagaaagtcaaaaatggggtggttggaataccgagaaaatgtttggaggcaaaagcaagaatcttggcaggtagaggtgaatgggccccgttcatagacattcttacactattgatcttcg

SEQ ID NO: 23072 - DNA, 506 bp, Glycine max
tgctgttaggatcaccgatctttggttcgttggtacttctaacaagtttgagcaagcggaaatggtttttgttgattctgaggtatattttgtgctctctatttgattgttggatcgttgtggatgtcatttattgattatatagtttgcatatttcagggtgagcaaattcatgctatttgtaaatcggaccacctcaagtcttggaaagcttatttgaaagagaattgcacttatgttatgcataatttcaaagttgttaagaatgatggtcaatttatagtgtgcgaacatgagtacaagttattttttattggagtgacggttgttagagaagctgatttgcatgaactgccttttaaggaatttagatttgttgaatttgcaaatgttgatgctggcaattttgtgtctggcctgttggttagagagtataatcacaatttgtgctatcattttgatcataacttctttgggtttttttccgatgacctattttcatttct

SEQ ID NO: 23073 - DNA, 513 bp, Glycine max
  unsure (1)..(513): unsure at all n locations
agcttgaagtgagaaagcgtggaacagtctgtctttctacttttgtttgttgaccacagagtggtacctggagatatgtcgcgggggtcaggagaccttggggacgtcaggtggggtgctatagcccaaaaccaagattgaccaatcccgacccaacccgggcatagtcagtcagtgagaacctgtgacgtacctaaacaggcaagctcctggcggtcaaccaataaaagaacaaagaccacaaagcaaggagacttgtgtggtggctggccagctatggatcttgagtggtatctggaatttggcctctggtaatcgattaccaagggtgtgtaatcgattacaaggcttaaaaatgaagacaggaagttaagatggcctctggtaattgattaccaagggtttgtaatcgattacaaggcttaaaaatggagacaggaagttgagatggcctctggtaatccattaccaaggggtgtcatcgattacaggcttanaaatggaaacaagatg

SEQ ID NO: 23074 - DNA, 420 bp, Glycine max
acactatgaaactcagcttgaaggtgcttaatggaggaaaagaagagggagagttatatatagggggagcacgaaattgaaggaataatagagggagataaatggaactttgaagtatgtctcacaagactctcattcatcaaagttacaacaagtgttacacatgcttctattgatagactaggtagcttccttgagaagctgtgttgagaaaacttccttgagaagcttttttgataaaacttgcttgataagctagagcttatctacacacacccctgtcataactaagctcacctccttgagaagcttccttaataagattctttgataagctagagcttagctacacatacctctatagtagctaagctcacctccttgagaatagaaactagagctttgctacacaccccctat

SEQ ID NO: 23075 - DNA, 441 bp, Glycine max
agcttgttttaaattcattgtcatttatatatttatcttaattaaaatatttatattcagaaataaaatacttcatagaaattcaattattgaaagtaatcgagttatatttgaggggaaaaaatattgtgaatttctgtactaattgattttcttaaaagtatggtgtaaattaaagtttcggggccaaggtttaatttattcttttggttttatggcctaccaacccaatcgtgccaagtccaagttcgtttggcactaaagttgggtttaatttatgcgtaaacttcatctcccaaatttcaaagggtaaccttcagttgaagttgaaacagatatatagagagaaagctactttgttcctttttccttaacattaccattatatgctgtgtgtaatcctgctatgtatatgtcatgactaacttgaaaaacaaaagc

SEQ ID NO: 23076 - DNA, 493 bp, Glycine max
taaggtagccattataatgaagattggcttattcgagctttatttaggaatagcctaagatacccctataaggaatatgttcatgatttataagctcgcttaggtgagcccctttgggacaagcttaagcgagctaggcctgatgaggtatttgaatttttttaactagcttaagtgattcctaattatgcaagtttaagctatctcatcaaataggcccatgattgaaaagcctaattgatataaaaggcaacttttaaccacgttaaagggatactattattgcattttgagggcaccaaggccaataaaagagcttgtggcagcatccatgcttagggttccctcttaatcattagttcttgttttccccatggctatgagtatctaagttaatcatttgttgaggtttaatttaattgaatctattttatgtaaatatgctttttataattcaacaaacgattgatattacttatcttctatgcttaat

SEQ ID NO: 23077 - DNA, 477 bp, Glycine max
agcttggcgctggagctgacccatcaatttctttatctcttttagactggtggtccctaggctcttgaccttgacttgatagaacctctttttaagcgaaggcgtttgacttgatcccatgttttactgaagcgaaacaaaatctatcgcgaatcaaaactccgacatctatcatgggtggaatggatgaatgcatgaagaaatgcatatgacactgatgcaatctatgaatacgggagcccgagaaattgtctccttcttggatacaatgtcttggggtagcaaagtgccccacgtatgtatttaaaaaggtggcacggaccctccgttggtttgacaaagagaggggatcacaacagaatccgtgcgtgatgcatatgcgaaaggcgcaacacgggaatggcagtatgacaatattcacaacatatatgcggaagggtacatgacacttatgcatggcaatgtaaaaaatggcac

SEQ ID NO: 23078 - DNA, 343 bp, Glycine max
tctagccaaatggacttaccttgaattaattcctttgatttcttttttgagccttgtttccctttccttgttttgaagctcactacaagccttaagtgaaaaaccatgatattaccatatccttaaggaattttggagctttggaatcgctttgggaataagtgtggggggtttatgaatcattggacaacttgggttgatggctatgcttaatgagcgtttttgggccatacttgatgtacattgggtattggttaaatggtggacatgctgaatgaaatggtggctctcaacggcctctgagcatagcatacagtagagtgaaattccaccaatcttcacc

SEQ ID NO: 23079 - DNA, 441 bp, Glycine max
agcttgagatgttgtgaaatgatgagggttcctttattgaccatgaccttttgataactgtgaaatatgagctaatttgatagtcaattttggctaaataataatgggtgtgatttctttactttattattttttttaaggaaataatgaagaaattaacattcttgcaattttttattagcggaattcaaaagaagatttcaagtgctttagaggaaaaattgatgcaaaaactgaaagaaaaggcctgaagaaaaattgaagaagtggatagctcgcctagtgcaccacccaagcttagcgcatggaaaagcccacaacgaagcccaaagacacgcttatcgcgaagtcagcgtgaaaaataagctaccttgtgcctatataaggaggaggaagcagaaagaaaaaatacacagagtctcagagctatcacaagccctg

SEQ ID NO: 23080 - DNA, 448 bp, Glycine max
ttttactctcaatatattatatatcacttattactattctcttttataggtgttaaaatggaattgaattcaacttgaaattataatttacactctaattctttacacaattatattaaatttactattacaactacaattttaaattgaaattcctactcccattttaaatatttctaaaaaccagttttggtgaaatagtaaagtgactatttgcaacatagtcacatagtgctttatttaattctatctttgatctcatcaagaccctagaggcctagtgttggcacttaaaaaattattatgaatagctgatgcaaatgcgaagaagctaaaagttaatatattcaaatttatttttgaattatataattgtatcattatttaaagattatgatctaaagaaaacaggggtcatctgaagacagtgaacgattctcttataatg

SEQ ID NO: 23081 - DNA, 534 bp, Glycine max
agcttgcttctacaatctcccccattttgttgatgactacttctaaaatcaagaaacacacacacacacacacacacacacactttttctagtcgatgactcacataaatttccattctccccctttgttttttgaatttatgcttgtcttaaaattaagttgattactcatgtgagtccttgatttaatccctatttctctccccctttggcatcaacaaaaagccaaaatgcgtaacaagtttgaagcatacaaatacaactaagcatgcatacaacattcatggaagaatataaaccaaatcatgaagcaagaaccataaatagatcaaatatataaaaaccacattgtcaaataacataattaatatttgttcaaacataccatgcaaataaagaaatagtaaattgttcaaatatcataataatatagccaaatacacggttggaaatcaaattactaataatattaaaataatagaaaactaagatgatggtggcggcggtggtggtagatcaaagcttgaatgaata

SEQ ID NO: 23082 - DNA, 427 bp, Glycine max
gtctagtaactaaaatgacctcctcgacaagcatgcttgagaagaatcctaatgaggctcgagcggagaaacccacacgcggactaatacttatcctcacggacatgccgatgtagacgtgtacatgaacaagggccatgatccacatacaagacttgggggacctatgacaagggctagagcctggaaagccaaggaggctctccaacaagggctgtccgtaacgatttgaatacacgcccaagttccaaggagaaaagtcccaggctgtgagctggatcatggcccacaaggaggaggactaagtgacaccactgtgtctcaattttagagtgactagactgccttaataatggcccattccttgcaccgttggctaaccaaaaatttgttgtgggttaatcaactaaaagggctttacctaggt

SEQ ID NO: 23083 - DNA, 599 bp, Glycine max
agcttcatcctcagatccctcttgttggtttatacttaatttagacagccctcttaagttaagactaacttaaactaatcttcgtccgcagatccctcattggagacttggctcagcttaaatagcttacgaaagtttagactaatttaacctaagcttcatcagtagatccctcatttaagactagacttagatcaaacaacatatttgaaaccaaaacttaatccgcagatcccttatgtaagactaagtttcaatcctgtttcaatcaagctctaaagcaacagtacatttccgaatgctaaagtcacataactatgcactcaaatgggtgatcataccaagagcatatagaatttaagtattgaaagaagcattgaacacatgacacacaatcaattagatattaaagtagttacatcagttgttccctagaaattcccaacagggtgttttgccagccattgcagaaaaacccttaacatattggagtttagagtagagaataatttgctcttacataagaggggggatccctcctccctctctcagcatctcgcaatcaatctacaactcactaatctctctttaattacaaa

SEQ ID NO: 23084 - DNA, 392 bp, Glycine max
  unsure (1)..(392): unsure at all n locations
ctgggcgtaccccaagggaccatcaggaaattacttgtgtgngtagccatgagggtgggctcatgggccacgtttgggatagacaagacccttgtcttactcgaagaaaagttctattggccccatatgaagaaagaggtccataagcattgcactatgtgtgtggcttgtttacaagccaagtctagggtgatgcctcatgggctatacacacccttacccattctatctgcaccttgggtagacattagtatggactttgtccttgggctgcctagaacccaaggaggtggagactctatctttgtagaggaggatatgtggagcaagatggcacactgtataccatgccacaaggaggatgatgcttcccatatctcaaaacatttttt

SEQ ID NO: 23085 - DNA, 467 bp, Glycine max
agcttgccacccagctcgcccaggttagttatgttgcttcctccacaaggcaccgccttctggaggaacttcctggaaggcccaagtgggcctggttgctattcgcacccccatgtttactaaatacacccccttgccttttttgctgattttttttccgtaacgttatggaactttacgaatttcgtaacgatacttgttttccttccgtaatgttacggaaccttactgattacgtaatcatcccttttttggctttcggaatgttacagaacctcacggattgtgtaacaatgcttccttttgatttctggcatgttacggaacttcacggatcgtgcaacaatgctttcttttgacttctggcatgttatggaacttcacgtattgtgcaacaatgggtgccaagtacctcaaagcggtcaaacaaaggttgcatgccatcaaacaatggtccccggatgaaa

SEQ ID NO: 23086 - DNA, 459 bp, Glycine max
tgagatcagatttttttgagggagtttggcattttttttgaagaagcctttgcatgcatgagagtctggccttggcttgaagattttgcatgtttaggaagttctagagagagaagggtccaagttccagagagttttgagagattttgctgtgtgaagatctacaaagacgagagctcgaagtggaagccattatgagaacttgagatgagtttgtgagatcctataggtgaaggagacatcctcaccacttgtacttttgcaatctttcatcttgttcttctctgtgttggaaaggaggattccagaccatggaaagctaaatcttctgttggatcttccctgtaggtacctgatgtgaatatatttctctctatgtaatgatgttttgcgagttctctgtgatatctgcttttcattccagtatgtctttaccttgatcacatagatgcatgcttt

SEQ ID NO: 23087 - DNA, 426 bp, Glycine max
agctttagcgaaacaccattgtgattgattatggaaggcaacaaaattttggatttggaacacgcaattgtgaccaccaacgaggcattttaaaataccagggatgcctgtttcgcatatactgctggcgaaaccagcatggctcatttcgccactactgctggcggcaccctgttgctcctgccccctctgcgtgcctagactgcagcctctacgcccctacactggcctactgcaatgtattgctagtttgactggcgaaataactgaggttactttgcaagtgccagtggcgatttcgctgccacgtggcgcgtcgcatgcatgtttcgccaacatgcatggcaagttacgttaaaaacggacccccgcgtaatttcttaacaaatagacccttttgggaaattagtttgtaaaactaacccc

SEQ ID NO: 23088 - DNA, 483 bp, Glycine max
  unsure (1)..(483): unsure at all n locations
tttgagtaagcaagacatcaaagatttagctaaggtattctgattccaccatcaccaaacctcatctttccatgcaatctcatgtataatttaatttaaaaattagaaaaacaagtattatcagcaaattaacatgatttgccacacaccaagcattctgcacataattcaagatgaatatgaagaatacaatggtgcaagggattggagaaaatgcataccgcgatattcttgtctgctactcttggtcatcttcacttggttccccaatgatgtcactagggagcagtagactctctctatacatagcagacagtagattgaaacagcaccaatctccacctccagcatatgtgagaaactcnaggagttctcctttgtgattacgtttctctaatcttcttccggtatttgatcccaaaatgtgaccatctntagtgatgcatatgggggaaaaagtgataattacgaattatataaata

SEQ ID NO: 23089 - DNA, 447 bp, Glycine max
agcttcaagaaaaatccgtcgctacttgattttaactactactctgttttgccgcaagcaaaagtggttgctaagtctgtcgcaaaatactattcatggcaaaacacccaaaactgaaacaagggaagcgcttaataggaaaactaaaacataacatacactaaacaaaataacaagacactaaacaacactaacacaagcactaacacaacattaacaattaaacataaaacacaaaataattaaacactaacacaacactagctattatgaacctttggacattgctccccggcaacggcgccaaatttgatcgaggttgtacccgaatcaaataaacatgaaaatgcagtaactaggaagtgatcctaggtcgtttcccaacgagcaaagataaaccaaatattcataatatacttgcagtaacagtaacgattgggggggtgt

SEQ ID NO: 23090 - DNA, 491 bp, Glycine max
tcttcagcggctgaatcattccaatcaaacacattactgttgttgtatacaaacatctttgaatcaacaattttctgccacggtaccaatccaactatagtgcagtatttcttctcccataagggtattccgtcctgccaatactcttacgagattgaaaaacaagacattcagtatattgactatataagttaaattggcaaggggcactgtaatgaataataaaatcatcatatcatcatagtaattactttctagaaatggctaaagcctcttgtgttgatagatcaatactcaacaaccacaaaagctatgcagattacttatatgaaaaaatacaaaaacttctgaaatcttttataaatttctatcgaccagtaacctacagaaccaaaccaatgacaaaaagtagccaccaaaggacttctaagagactaaaacaaccaatatatatgaattatattgaatatataaaatagtttttacagtag

SEQ ID NO: 23091 - DNA, 447 bp, Glycine max
ccctaagttggcggaatgagctcaaatatgcggggcacatctgggatcgctacttgctcgatcgggtcgaacagggggttaggatgatatggccctaggcctataatgcattttgaagccttgggatgtgccacattgaccctgttctcttgctaataatgcctaaacgcgcccccaccaagtattcagtgaaacgcctcaatggcattacggagtggttttacgcatggaaacaacccatggggcaatgggggtggcacatatcttctattttaatgagacatgccccctttttcagaagggctacagtaaatgccccacatatatcctactcctaagaacgataggttttatgcaaaaaaacacccgaatgggtgcctattgggtgaagctaccctttctggcccataatcaaagatgagccacgctacaattatttccctatgc

SEQ ID NO: 23092 - DNA, 397 bp, Glycine max
agagaatgagcatgtggagggattttttattttttacgatggtcagcttgccagactgattgtgaaggaatgcattaatacgtatgccgtggaaagtgtgaaccttaaattctgaaataaatggctgtcaatgaacaccgatttttgcgagaatctttgatgtatggattgaatgcatgaagttgtcgatgatgaacgccatgtttgattgtgatacccacttatccaaaaagctgcccatgttctgtgatgaattatcccttgtacccaagatgagttgcatgaattattgattgagagaaccctgagcctatacaggggtatatgctgctaccttgacttatgttgtaggagagcatgatccatctgaaccgctcgattgtatcacatttgtgcg

SEQ ID NO: 23093 - DNA, 401 bp, Glycine max
agcttgtccgcataggttcgtttattatccaggcctgtttatatgcactttttaggcataatcttataattaatgatctaatttctctctttaggatttgttacgtataactcccaaattttgaattcagtttattccgctttttttttttataatgcggattttaaacatctagttttatctgacataaataagagatttttacactgtttatgtaataatataatttgtactaaacagagtctatatatcaatggaacaaatttaaaggctcatatttttggtagtatgttacttttttggtagaaaaacgaaaatcacctgagatcaacactaattatactgatattttacgaagcaaaaataaaatagaattatgctgatattttccttatttaaaa

SEQ ID NO: 23094 - DNA, 570 bp, Glycine max
tgcttacatctcaactctaggaactcactcgcactttcaaatatagccttcctttcaagcttagagtaatcttctccgaagttttcagttccataaatctgattctccaacagatcaaagacatttggcattatgagtgtactagtttgacccgtgacaaattcttctgccgtaaactctgcattgcaaagaatatcatgtacatattcaagtactgtgttccttgatcttttaaaatcaaccgaatttgatgttctacttatttgtttgatggccatatttccaccccccaatggtgaagagctttgctctgaccctttcacctcactttcaagtgatacagattcacttatcagggtaaaactagatacttcttcatcttgtgtggaagaataaactgtgctgcctgaaaagaggaagggaaaaaacttatgtgcattacaactttatagataagtgcatttatgctgaggggaatgcaacaattgtttctatgacccaacattgatgaatgacaaatatataaataattgtaatacacattcacaacataaaggatgtttgacattt

SEQ ID NO: 23095 - DNA, 540 bp, Glycine max
  unsure (1)..(540): unsure at all n locations
agcttggacacttcaagtcaaagtgtttataacttgagaaatcaaaggactattacaagcattaaaagtccaaggaagagataagtctcataagcacttgggaggatttggacgacaccacctctgatgaagaaggagaagaggaagccagcctatatctgatggctaatacaaattttgaagaatcagaataaaaaaaaagaggtggatctcaatgaacttgaatctttaaaattagcctttcatgaattactttcaaactcatccattctttcacaagcttacaaaaacttgcgaaaagagttcaataaattttccaaacatcatattgaactaaaagaaatccatcaatctaaagatattagttctttgaaaaaaactactcaaaacaatgatgcttatatgaccttgaaaaaggatctttgtttggaaaatgaaaagttttccaaagaacaagatactttaatgaagggctntcacattttggtacgtaaaatttgaagttctacaagaaagaataaaagaactcactgaacttca

SEQ ID NO: 23096 - DNA, 505 bp, Glycine max
  unsure (1)..(505): unsure at all n locations
tcttatccaagacacatttttggtggtgaagcttcttcttccatggcttattccctagtggatggtgtatcccctctcctcttctcctttgccttccgctgcatctccatggtggaaaatcaccattgaaggacttcattgaagctcaaagattcagcctccatagaagctccacaagcaagcttccatcaatcatgaaagtagttgcttgtaacaacaattacaaaaagattgatcatatcgggttctttattctttatttgtctatttagtaggatttctttgtaattaataaattatcccttttaatttatttgtctaccaacattgaaatccttcattcatggttacactntgtttagagattaagaaagagtttagatttagaaatcttttgtgcaaaaagttaaactattttaataaagtgttcattcttcatttgtttgacctcttaattatttttatcactgcttaatattagttgggtagcaatgaccatgttgga

SEQ ID NO: 23097 - DNA, 689 bp, Glycine max
  unsure (1)..(689): unsure at all n locations
agaggtagatgttcttagaacaataacccaggagatagtgctgtctaatgagagtccaaaaggtctggacatgaattaacagaccttattgactgagaagcttaatttgggaggcatcataggggaagatactggtttagcttaagctaaaatggtctagttcaagaggtcccaaatgtatttaccttgagaaagcaaaagagagtcattgccattttgacttcaatgtcgaggaagtaatcaagatcacccaactcttagagagaaaccagagttcagtcgttgaatgtgagagctgtgacttccagtgacgatatcatccacgtagacaagtacataaataacaatagagtctttggaataaacaaagagagaaggatcacactttcttgtacaaaagccaaattgaagtaacatgaccttaagcctatcaaaccaggctccgggagtttggttcagcttccagatagcntttgtaagccttcaaacaagagacctatcatgtgctttgaatccctggggttgttgcatgtaaacctctttcttgagttttgggagagaattattcacttcagctgtttcaagaccagcttatgtggaaggaaaacttgtttccgtgggctattatttttggaaaaagttaacacaccgatattttatatatccccttgtgttaatttttattgaaa

SEQ ID NO: 23098 - DNA, 455 bp, Glycine max
ttatgccaaacgaggcacgggggcatttaatttacgccttgcaccattatatttggtgcaatactacggtataggaattatcaagaacaaatatttacaaattatcaattaaaaaacaaaaatcaacactatttaatcatttcccaataaacaagaataaccaaattggtcccaagtagaaataaaaatcaaattttgtataaacaaatgtgcaacatatgtgtcggataattcaagagaaaaacccatctgtgattgcactttaaaaggtcgtatagggcctactacaactttattgtcgttgtctatgtagatacatctttcaacatcacttggtggataatttcaaagataaccctgggtaatatgagcacgtaaccaaagaatttactccctgaaatacttgaagaaactaaaggtagattaacccaaagggaaatacttaccctttcttt

SEQ ID NO: 23099 - DNA, 645 bp, Glycine max
agctttttatcatatgtataattgatgtttttttttcgattctaaagatggcgtgaaaactcttaccccacctgtaaagcctctcctccaaccaccaccaccatggttccacctcccacaaccttttgctctagttctcgttttttcattactccgatatcagaaaagagtaaaataagatctgagatctaagatctctcaaactctttccagatttaatgctctgtgatcactgtcgttcgccatattccaaatttgaggcatttctccgacgtgcccctgcaagaaggtatgtaagaagtgatggtgatttggttgtgatttgttggtaggtatggcggtagatttgttgggtgcgacgaccgtggcaatatattggaagtgacggtggtgatgaaaaagaaggaaacaaaagggaaaaaaaaagtaaaataagaaatgtttgatcttattttatgcatgacaacggacgagatgcacggtgagatttcttttcagattttaatgggtttttcccgcttggcttcgaacttaatttggtttttttttattcataaaattggaaaaaatatgaaaaatatttcttttgaattagactgaatatattctaatatgttaaatcaaaattcaaataaaattttttaa

SEQ ID NO: 23100 - DNA, 581 bp, Glycine max
  unsure (1)..(581): unsure at all n locations
cgcatcaacgttacacttcatgaacccttgaggcggatgttctatgtttctctatcactggcagtctccaaagcattgttgtgccactgcacctctttagcacgaaaccaatcttggtaaaaaattgtctgcaattttaatcactgctcaatcttagacgtccttgttactccataatttgtcattacgccgatgccaaagactctacagcatcatggcaacacgcttcctttgacacaaattgattttttcgatcagtttgaatataaaaccggggcatgaattcacctcaaccaagagttcttcaatagtatgccttaactgaatctcctcccagcaacccatgttttcaatttgtgaagcacagagtcggcatagtaacgagcactctacaccacgggttctcaaattggactttgttggcaaacatcctctacataacctctatagaaacagctngaccctatgtgagatttccagcttccatatcaacgaccaatctccttccatactcaagccattatagtcaataaactcatgcattatgagttgatatgcactcctgacagtgtattccccat

SEQ ID NO: 23101 - DNA, 442 bp, Glycine max
  unsure (1)..(442): unsure at all n locations
agctttccacattgaattcagcacctaatgttatantatatgggaattgggtatcttaacataagagatttccgatggactttaatcctaatcccacagccgacctttttacgagatctctacttaaccctttggttaaatgatcggccaaattatgctgagttctcacaaactccactgatatcacaccatgcatgattaactcccgaaccatgttgtgtctaacacccaagtgtctagacttcccattatacacttgactatatgccttagccaaagttgcctgactatcacacctgatagacatgggaggtataggtttgggccacaatggaatctcatagattagatttcttagccactcagcttctttaccagctgctgctaaagctacaaattcagattccattgctgaatatggatgcaggtctggttcttggat

SEQ ID NO: 23102 - DNA, 432 bp, Glycine max
tttcaaatgggtaaaaggctcacgttcactttcttctactttatattcaaacttgtccaaataaataataggggcatctcgactcaaagaaagtcatataagtctcatataattaatatagaacctatatcctaatgtgacatcctatcagagcgtggagttcccgtgttctctagcatgagggtcttcatagacatccacctattcatctgctcccccgaacacaagttcaagatcatgacaggatccaaacacaacaacacacagggagtgagttatcacattcctaactaatagagaaacaagacatttaaatatacatgttatataaatgagataccacttgcttaagcatacctcacgtaactacaccacttcgtcattcagaattcacttttcaattgtgcatcacattacacaggaataccacac

SEQ ID NO: 23103 - DNA, 397 bp, Glycine max
  unsure (1)..(397): unsure at all n locations
agcttccacatcaagcaagttcatctcattgcttgtatgcaaacaatagaattcaaaagttagagaatttgcttggaaaccttgtagttgtgcttaaagtacgatttgcagaagatccacaaattaatcaagtcttagaagttatagatcaagaggtatgaattcataattctacttattcaacgatttaactatgatatgatactttacaaagaaaaaacatacttttaatttaggtacctacaaatggttctaccagtaaagatcatcaaactacaaacaatcttaactagaggtgagttgaaatttagatgataatgaagatgtgagctggcgacaaaatgttatttcaggaacatgatttanatggtaatgaagatgtgagccggcgacaaaa

SEQ ID NO: 23104 - DNA, 478 bp, Glycine max
tctaaactttatacaagaatgaagctctgataccacttgttgtacagtggcctcagatatcttaagaaggggggggttgaattaagatattacaaattattttcccaattaaaaattctatttaactttctattcaagttatatattcccttaataatgattttcttaaataatgattcaaaagaacaatttgaatatgaatataaaacaataataaataaaggagtttaagggaagagaaaatgcaaactcagatttatactggttcagcaacacccttgtgcctacgtccagtccccaagcaacccgcttgagagttccactatcttgtcaattccttttacaagttctaaacacacaaggacaatccttcctttgtgtttagaatcctttcacaacaagagaccatcggcctcttaatcccttttcagaataaagaagaagagaagaagaaatctctcttgaaagagatagattg

SEQ ID NO: 23105 - DNA, 608 bp, Glycine max
  unsure (1)..(608): unsure at all n locations
agcttctcggctcatactgggaataccnctatgttcaacacccgtgcaacctaaggcacccacccagagggaagctccccaagttccaactccgaacacgactcgaccggccggtaattccaacacgacaaggaacttccctccgaggccatttccagaattcaccccactcccaatgacatacgaagatcttctgccatccctcatcgccaatcatttggccgtggtaactcccggaagggtccttgaaccccctttcccgaagtggtatgaccctaacgcaacttgcaagtaccatgggggtgtcccggggcattccgtcgaaaaatgcttggcccttaaatacaaggtccaacatttaatggatgctggatggctgactttccaagaggatcggcccaatgtgagaaccaacccgctcgccaatcatggagggggagcagttaatacagttgaatccgataggccgcacaggtctaaacctttaagggatgtggcaacccctaggaggtttatctttgacgccctacaaaaaggaggtgtgattccccatagtgggtgtaaggaggattcctgtctgctacattccggcgagatgcatgacatgg

SEQ ID NO: 23106 - DNA, 571 bp, Glycine max
  unsure (1)..(571): unsure at all n locations
tgaatgttcagcaacaatccctgtcaacctatgagaaggttttactagctgtggtgtttgctgtacaaaagtggagcattacttattactcaagacgtttgtaatcaaaactgatcacagaagtctcaagtatattcttgaccagagactttccacaactttccaacaaaaatggtaggtaaaacttatgcagtttgatttcattattgaatataagcagggaagtaaaaaccaagctgctgatgcactttcaagagttgaatgtgctactatttccactcaccaacccgattctgatctactagagagaatcaaatcaaaacatcttggcaaggtgatgatgccttacaaaaactgattgttgaagttacgaaagatccttcttcacataaggatttctcttggttaggtggagaactaaggaggaaaggtgatgcaatcctaccccgcaagggcattggatagaagactccaagtagatggtgctagagatccaagggaaggccctagggttctcatgagccttanggtagattgagcccatgggctaagtatgagcccgcttatcttt

SEQ ID NO: 23107 - DNA, 426 bp, Glycine max
  unsure (1)..(426): unsure at all n locations
agcttgtatcttataataaaataancatangtcgcattcaaataaagcaatataggacaacaaggatgtatctatacagtgcacaagtgaggaatacaaaaacctgatggcaatctctccttgttgggaaacaagagttgctagttgattaaagatgttgctgagctcatgaatggtggactcaacattctgaagagcttcagctctgctttgcatgtaactgtcttgcaagggaactacctcttgctgctgctgctgctgctgttgcaccaatggttgactctccccatctacctgcttcctgtggatttaaaaggccataaaataaatcatgtgaaagcgtaatttcagatataattcatcacaaccttaatattggagaataaccaaagttctaatcattttttagaaagggatcccatcatg

SEQ ID NO: 23108 - DNA, 567 bp, Glycine max
  unsure (1)..(567): unsure at all n locations
tatgaatgtttatttttgtttgcttagaggtatgggttattatttatgccataaggaggcagatttctcatttaatttacgccttgcaccattatatttgttgcaatactacgttataggaattatcaacaacaaatatttacaaattatcaattaaaaaacaaaaatcaacactatttaatcatttccaaataaacaagaataaccaaattggtcccaagtagaaataaaaatcaaattttgtataaacaaatgtgcaacatatgtctcgaataattcaagagaaaaaccaatctgtaattgcactttaaaagttcgtataggtcctactacaactttattgtcgttgtctatgtagatacatctttcaacatcacttggtggataattccagagataaccctgcataatatgagcagtaacaaatgaatttactcactaaatacttgaagaacataagttagattaaccaaagtgaaatacttacccttcctttcacgctagatgcacnattggagacgcttcttcaaatcaatataacaaccaacccgaagtcaatttcaatat

SEQ ID NO: 23109 - DNA, 617 bp, Glycine max
agcttccaacttccaagagcacatttattatctctcagatacatatctcacgtacaggcgtatcatcgatgtgaatctattcctaaattaactaactagtaaggtgatacgagtaatttttgttgccttttgtttctttctagttctaacacaacttctatcatgtcaaatttacgtagtattgattcacagtgtatttagaaacagtagaaaaagaagcactcatgtttaaaatgtaaaaattatagttgattattagcttcttaaaattatatttagatgtgaagccaaacatatactaaaaaaaatgtagatttgctttatattttagtgagacccacattcagatttttctaatttttttatccataaaaatcaatgatggatatcattagactaaaaagttgattaatattttcttaaaaaataaaaatttgaaacaatatttgagaaagaactagaactatagtccttaaagtaataaagtatattttttttttatcactacacctaagtacttattaaaatatttgggcaaaataccatattaatatagggtgtaagcgaaaatagtttaaatttaattttgttaaattaatttaatatatggataatta

SEQ ID NO: 23110 - DNA, 309 bp, Glycine max
acaactctagctctctctatgggcactacgactaaacgctaggcggggccatgatctgctgtagaaaattggggaatgataaacggccattatctcccacctttatggctgccggcatgaccaatccggaaactataacgatattacgaaacgcacccttctttggcttctgaagatgatcaatgaatagggcgaaaaaaaaaaatccgaaaaacgtgcccgaaacaacgaacaggtgcaaaaagtgcccatcttatttaacgcacaagaaatcatgcaaaaatttatgaggaacacataagaaactta

SEQ ID NO: 23111 - DNA, 516 bp, Glycine max
agctttcctttcacaatcaatctgtctactgactaacaattctaattgcaagttcacattcttgttctttctttgtctagcatgcatatttgttaagacttatgaaaggaaacacaaacttcatcacaatcatgcactcaattcaaaatgaaaacatacatcccttttcacaaaaaaaatgaaagtgtttcattgccatggtatcaaaaacaagtcaaactattcaaaatgcttcaggatgagccaactaattacccataaataaaactagcagtatatgtagacataaaggaaatactgtacaaaaaccaaaattataataataataaatcaaaaagaaaaaagtatcatcaggaatcaaaattcatgtgactgatcctgtgtgtcctgtgtctgaccatcctcctcatttgtcagctgaagaactagagtagtgggaggaaaagtgtccactgctaggattggtgtagatggatcctctagcatttgtagaagaagagtggaggggtgtgctat

SEQ ID NO: 23112 - DNA, 617 bp, Glycine max
tgcagcagtgcagaggcggtctactaacgcaacatacttatttacacataaagttgactaccaccgcgttaatataaatagttgtcttacagtggtgtcactggtgtgtcctaaaatggtgaagctcaccgtaaaattatcacattcatgaatgtccacatatgttattggttgagcccatcgagctaatctactaagtgcattagtgccaaaaaatccatgccctcgatcatcgtatgcagtttcttctttaaggccaacatcagcaggttgaatagtgtctgcccagtcatgaattaacaaagatcatgattccattatccaaagcaatgtaacatctgcatttcaaagttcacacaatgtgaaaacttaatctggattttgataggaaacgtccaatttgtaaaatgatgcagaaacagaattaataccttaacaatgtgcagagataaaacagtgctaaagttcattttgcagaacaaatcaaacctgacaacaattgaccactatcatatatctctatactcattgaataattgctcaagatcagtgacattcgaatccagcaacatgccaaaattccacaaattcactctttaaaacatccttttaggttt

SEQ ID NO: 23113 - DNA, 308 bp, Glycine max
agcttagggatggaatacttacttttcgtttatgaacacaagcgcaaaacggaatcaaaaaatgcgaaagaggacgaccctagggctgcaaatgcaccaatcccgtgagtatggcttttgaaaggggggaaaagaggtttttgaatgtgaagacgccccccctttcgttacttatataactaggtgcacgggtggctcgcctagacgaacacaactcgtccttgcaagctaacgcccaacaattggttctaccattaaagatcataggggaacattcaccctttcctataggtgattatggatttaca

SEQ ID NO: 23114 - DNA, 868 bp, Glycine max
  unsure (1)..(868): unsure at all n locations
cgcaccacggccccnttgattgcttagcatatccccgcccactatanaatactcacgcttgactttgcgtgctagagataccctgaaccaccttnttgntttattgcctcaccaaaccaaagaggggggggttgagtaacaaacaaaagaatactctgcccaataaaacgaccaaatattctgtgtatacaagatcaatattcccctcctaatgaggttcttaagtggtgatctgccacgacccaacgagaatgatgaatataataacactaatctacagagagactctggaagacaacgtgcggaactcaatatatactgcgtcatcgccacaccatgtgccaagcgaacattctcacaagcaacccctaaatggaggagggcccgaccatgctccctcggatggcgctgtttatcacagtgactagcgacaacccaaatggaccggatncaccctcgcgggtgatggttcttagatataaccttttcaactaacaagaagaacgcgggagcctttcttgaatcccattcttccaaaatacgacaaagacacaccggatatgcacgttccccccttatgaggcacagcaaataaagcccattttgaacgctccccccacctctttatcttaacacgagacgatattttcccccggaattttgttaagaagcattaaacagacctctcgggctttagaagatatagagccttcctccttcccctcaatacctcgaggaaataggaggctgttttccccaaatcaaacaaaacactcggcagcgcctttattatctcnacaaaaaacagcggatgcggttagaaattatcgagcaaaacactctctccgcccggcgagtggccttcgcg

SEQ ID NO: 23115 - DNA, 476 bp, Glycine max
agctttctcccaagtcctaaataattttttagctagtattaactcactttaacctccatttaccacagaattcaaacttagctttccaactctcaaagcctcactctttttccactcataacaccacattctcactttctaaccctaggttagttctaccctccatctgtaacagctttccatcagcaatttcagcatataaacatcacaaatatcatcacaaaaaccctaaaacagaatgggtatgtctaactcacccaaacatggcaatttcaacaagttttcagcaaatgccttcacaaataatcatcacacagcataaaccttgcaagactacccatcatatctcccaaaccccatacccacgaaaatcaagagggaaagaagtccacccaaacctgaaatttcgaagtcccactcgtagccacgcacttcacgaccccgaaaatgctctcctttcacgatttggggcaaaa

SEQ ID NO: 23116 - DNA, 563 bp, Glycine max
  unsure (1)..(563): unsure at all n locations
tgtctcagcgtttatgcgagacggagaccaacatgctttctattatcgccaagtaccaagaagagttgggtctagccacggcccacgagcatataatcacggatgagtatgcccaagtatatgcggaaaaagaggctagaggaagggtgatcgactctttacaccaagaggcaaccatgtggatggatcggtttgctcttaccttgaacgggagtcaagaacttccccgattgttagccaacgccaaggcaatggcagacacctacttcgcccccgaagagatacatgggcttctcggctattgtcagcatatgatagacttaatggcccacataattagaaatcgttaggaaacttgtatggactcttagaccttgactagatatgacttccttttttgaaataaaatgagttggtcccatgttcctactccaaaaaacttgtgcgaatcaaatcactcctgcatctcatctctagcatgcattttctttctttacccactcctcacgtttggggntttagggaaaaacaccataactgaacgcgccgcgagggatccctat

SEQ ID NO: 23117 - DNA, 488 bp, Glycine max
  unsure (1)..(488): unsure at all n locations
agctttgtccctttgtcgattagattcttttgagccttttccccctttttttgtgatgccctttttccctttttcatttcaatttgcagatcctagtacctgcactatttctgtcacttctccagcttcatttgagagctccaagggatcagtttcttcatgtacactgtaccatgataaaggacccgagccttggctgaggaaaacaagtactgatgcatggctttctactggtgttggtgaggctattgatggcactgatggtgctgctcangaccatggggatatttattgtgttgtttgttttgataatggtaaccttgaaatatttgatatccccaatttcaattgtgtcttttctgtggaaaaatttatgtctggaaagagccatcttgttgatgctctgatgaaagaggtactaaaagattctaaacaaggggatcgggatggagtggtcaaccaagggaggaaagataatataccgaata

SEQ ID NO: 23118 - DNA, 429 bp, Glycine max
tgattctagctaaatcgcaaaccatattttaagattgtattgaaatatatattatcctcgtctaaggcttttgatttgggtttgtagattgctaaaacttttccttctgtttccattttctaattttaaattttcttgcatgaagttaaaagctgtgggacctgttgctgttcttggagggctacttcaaattatcatttttatgttcatgtgtggcattctttccatggtatggtgctgacttgtctgatatggtcttgaatacagttaaggagttacaattgttttataatggacaccaaacattattgtccatttggtttgcagttatttggagccaaattgtctgagggtgtttttgtcggttcctttctatcaatgtcatcaacagcagtggtatgcttttacaccatttcccaaaacatactg

SEQ ID NO: 23119 - DNA, 549 bp, Glycine max
  unsure (1)..(549): unsure at all n locations
agcttaattaaatcaagttattatttatgaggtatccttaaaaatagtattaacaagacgcaagtctaaattacctctgtttttttatatttattcttacttgtttttttttataaagaaaatggacaagacaagattaaccaggttactagttatttaacaagtctcactaatggttttataacttttgataaattttaatcaataaaagaaattgttacaaagaatataatcaacatatattagtgtattactagctatagctagtgctctgggctcccaatcagttatatagcttaaataataagagcatgatatatcagcattccttagagtttcatatacgagtttcgttgtggctagaaacaaatagttcgtgtaggtggccatagtttggggcatgcatgcatgcatatatggtggttcaactggattatatacagatgcatggacttcgcctataccccgataattagggataacacgttatgcatttcataccaagacatccaccttctatnctatagctacttcacatgtattacccca

SEQ ID NO: 23120 - DNA, 544 bp, Glycine max
  unsure (1)..(544): unsure at all n locations
tgtgttcactaagtgtgtgggaaatatgctattttattctttggcaaaacttgtcttttattatcataataggtgttggatagaggatttgcctgtacatagtacaaggactagcttttttgcattctgatgtacatgtctgattttcttcttgaacaaaatattctcactttccactctaaaaaaaaaagaaaaagaaatagtactagcatctaaaaaatacttcatcttacctttctgatgaaactaagaaaatactcctagtagaacaattaatgagatggaatattctattaaaacaattaatgagatggagtacgtgtccacgtgggtgtttatcatgagaggtcatgattgactgatcacggaagtcttccttcattatttttaataaacaagctggctacctttatttataaactttntaaaagaataacacactatatgccgtacacaaatggtgaatgaattaagggagttgttatgtgcacccagcactaaacgtgaaaaggcagaaataattctgttattttttaaaacattt

SEQ ID NO: 23121 - DNA, 523 bp, Glycine max
agcttgataacccttcttgaagagtatattgatttctttgcgtggtcgcatcaagacatgcccggtctgtattctgacattatgcagcataagttgcctttgaatcctgggtcttctccggctaagcaaaagctacgaagaatgaaacccgatatgtctttaaaaattaaagaagaagtaaggaagcagtttgatgcaggattcttagctgtggcacggtacccggagtgggtggccaacattgtcccagtcccgaaaaaggacggcaaggttcgaatgtgtgtacactaccgggacttgaaccgagccagtcctaaagacaattttcccctgccacacattgatatattcgtagataatatatccaaagtcacccttttctcatttatggatggcttctcggggtataatcaaataaagatggcccccgaagatgtagagaagaccactctcgtcaccctatggcggacattgtgctatagagtgatggcccttgggctgaaaaatgttggggcacctaatc

SEQ ID NO: 23122 - DNA, 531 bp, Glycine max
  unsure (1)..(531): unsure at all n locations
tggttcgaggcacttacccgttgaagatcgaagaacgattttaacgaatgaagaacgtcgaagaacggttcaaacctttgcgagattcctcacggaaaacgttacggaaacgtttcggaagcgcctcggcttagattttcttcacggaaacaattttttcaagcaaattccaaagagagagaagtgcctaaggggctgggatcccttccttcttcatttcctcccctatttatagcaaaataggggaggtggttgccgcccagctcgcccaggcgagctcagctcgcccaggcgagcagggttgcttccttccaaaagcaaccgccttctggaggaatcttctggagggcccaaatgggcctgggtgctatttgcacccccatttttactaagtacacccccctctgctgttttttggtgattcttttttcgtaaagttacgganacttacgaaattcgtaacgatacttgttttcttccgtaatgttacggaaccttgcggattacataatcattccctttttgacttac

SEQ ID NO: 23123 - DNA, 464 bp, Glycine max
agcttaggtttattgcctcacctcttatttgaatgattgggaggagattgagacaaagcaacaaaatttaattcactgcgtaacatacttccaatcagaatcagcgcctacagacgccctaattccaaacgaataacagaggatgtctcttgtttcatgacgcaacacttttttaaccgattagtcaaaaacaataaaactagtttataaggccgcgtaatgcacgggtttttttttactgcgcgaacatgttattgttaagaatacccccatatagtcgtatagagtgtgtttgtttttagtcttacaaaattatttttgagaatgtgagtttgaaaatgtaagggttcatttggagaaaagcgcgagttgttgattttgaaataagatattggacacagacgtatttgataaaaataaagttgaatcgattttcaattaattttaaaccgatttctttatga

SEQ ID NO: 23124 - DNA, 541 bp, Glycine max
  unsure (1)..(541): unsure at all n locations
tgagacctacacgtggcatatacatataccatatattcattttttgaatggtggttgttttttttatacgtgaccactaacaagaatgggattccgttggttccagaacgtttcacatgagaaaagatttttatttcttgggattatagaaagagaaatttaatttttaatatttgatatgtattttaaaaaaataaatatttttttaaaaaattatttcttgaaaatgtttttttaatgaatttttcataaaaatattttcatgaaaggagatgaaattttttttttcttttgttatattaaaaatatcattatattgtttattaaattatataatataataaataattaaaataattgataaaaatatacgtaattttgattcctaagaaatttatttaatttttttaatgattaatcaaataaattttattcatttaaaaaaatatgatttggagattcatgattaatcataatttttaaacttgaaaaaacttctcgtgtgcctcctnaagagaatagtagtcatttgactcgtgat

SEQ ID NO: 23125 - DNA, 623 bp, Glycine max
  unsure (1)..(623): unsure at all n locations
tcacaaaatttanatgtatgtttaggtagcaagataccttggatatgcatgtatatagcaaaaatacctcacaaaatatatatgtatgtttaggtagcaagataccttggatatgcatgtatgtggcaaaaaatacctcacaatatgtgtgtgtgtgtgtgtgtgtgtgtgtgtgtgtgtgnnnnnnnnannnnnnannttnttncntttttttttttcccttttttttttttttttctaattctacctaattctctctccccataatattttatactcctaaaaatataacattattttcatcattccttaattttcttcactactttctttcatcttaaacaacttttatcttattcccttatattatcactccatcatcctttcatgtcacaccctctttttacaatcttgtacttccctaaccccatattagaatacatcttttaatttttaccatgaatccacttctatttattctattccattactacctggttttatcaacatctatgctcctcactttgtgatcttgtataatacaaacagctttcttttttaaccattgctttattaagacttatatcctttcttgtaaaaacaattcctcccctgaattttcc

SEQ ID NO: 23126 - DNA, 578 bp, Glycine max
tgccgctggagctgacccatcaactgccctagctctttttttctggtgattcctaggctcttgactttgacttgatagaacctctttttaagcgaaggcgtttgacttgatcccatgttttactaaagtgaaacaaaatctagtgcgaatcaaaactccgacatctatcatgggtggaatggatgaatgcatatagaaacgcatatgacatagatgcaatttatgaatacgggagcccgggaaattgtctccttcttagatacaatgtattggggtagcaaagtgcccgacgtatgtattcaagaaggtggcacggaccctccgttggtttgccaaaaagaggggatcaaaacagaatccgtgcgtgatgcatatgcgaaaggcgcaacacgggaatgtacaatatgacaatattcacaaaatataagcaaaagggtacgtgacacttatgcatgcgcatgtgaaaatcgcacgcagcgtgtccgcttcgtgccccttttaagggacctatatgggagagagctaaaaagggttttagtgataatctctaagtgggcatatctctcttaatggtctct

SEQ ID NO: 23127 - DNA, 383 bp, Glycine max
  unsure (1)..(383): unsure at all n locations
tgcaagcttgcacattactgctttatagaagattgcttgtaggtaagccgcggnaccatgacatgatgcggtacatagagtgtaacgagtatccacaaggggcttctggcaacgacaagaggatgttgcagaggttggaaactagtttctttctaagtgggggtatcatgatgtagctccattggagcttgttggccttggatcttcttcatcaatggagtcctttgcttcttgaattttaatggcagcaaaatggacaagaagaagagttgagaggagacaccacttcaaggagaagatgagtctagaataagctcaccatcatacgaaggcatggataagagcttcaaggtacgagatgatgaatggaggaacagggagag

SEQ ID NO: 23128 - DNA, 482 bp, Glycine max
acctctctaatagctagctcacctcctttttatgagaagctagagcttagctacacaccccctataatagctaagctcacccccatgacaaaaaacatgaaaataccaaaaaaaagtccttactacaaagactactcaaaatgcctcgaaatacaaggctaaaaccctatactactagaatagccaaaatacaaggcccaaacgaaggaaatacctattctaatatttacaaagataagcgggctcatacttagcccatgggctcgaaatctaccctaaggctcatgagaaccctagggccttcccttggatctctagccaatctacttggagtcttctacccaatgcccttgcggggtaggattgcatcacctcctctcatggggtagccaagttgtcttatggtgaggacatgattataattaatacaaacccttgttcacatcaagggaacatttggaaatccttcgcatgaggataga

SEQ ID NO: 23129 - DNA, 501 bp, Glycine max
actgaccatttttccctagtctgggacttttttttacttatgaatgttataatatactcatcaaggcctttcttcaacttgaaaaatttgatggaaattcggctctgcttctaaataatcaattaattgagccacattgattgaaacaaagatttccttgtgaaactcttgggctgcaagtaaaactgatcaaaatttggagtgcttttctcacttgggacataatttttgctggaatcacctcaaaagacattgggttctatccctattagcctcaaatatttgcaagacaattaggactctatcaattgcctccaattcctttatataaaaagaagacattaccttattattgtcgcaacctatccttcggtgggaggacgaggcgagataaaagcgtgtcttcctaaagagaaaaacgcgtgagagtcacaaccaatgtttgttcgagggaacaatttagaacaaccaaaaagacaaagttctgcggatttttgaatg

SEQ ID NO: 23130 - DNA, 699 bp, Glycine max
ttgcatctgacaaagatgatagcaaattccatttcaggattttgttttcactttaatggtggtgtagtaagttggaaaagttccaagcaagctacgataacatattcaactactgaagcataatatatagtgacaagtgaagccggtaaagaagctgtttggatgaaaaggttcatatttgaacttggtgtggttccttcaatagaagagtcggtcccattattgtgcgacaataatggggctattgctcaagcaaaggaaccaagatcacaccaaaagtccaaacatattttgcgaaagtatcacttgattagagagataaaagaacgtggtgacgttaagattgaaaaggtagatggaaaggagaatgtagcagatctcttcatcaaggcgcttggcataaaagagtttgacaagcacaaatgggagttatgattgaagttcatgaatgattggctctaggaaagtgggagatttgtgggaataaatttgtatgcctatgatccaagtcatcatgtgatcaattctaattttaataataaagtattattttattttcatggtcatatttcactatatgattaaatggtgcatttgataatgtccttggataaacatatagacttggtattataatagaaattatgataatgagaaacaagtttgttcttaatttaatctaaaccgttcttgatcata

SEQ ID NO: 23131 - DNA, 433 bp, Glycine max
agcttgtagaaatactagaaatattttattcatgggataagaatcaatcaggtcactattatcattaaattaccttaaagtgttggaggaatgaatcattttcatggtattttatttcattgcttcccatttaggccgtggatgaagatacaactgcctaatggtcattgagatagcttgtgacatagtcctacttggttcaaacctaaatacaaaagaaggttacctaaaattaaaagataatggaggacttataatatatattaaaaaaactaaattcttatttattcttacactgtaccattgggtataatcatcgggtaagggttcttccatttcctcatcttaatgatgttcattggcagacaagttctcaacaatgatggaacatcctattgtgatggtgggtcttgtaggcattgagtctgtgatt

SEQ ID NO: 23132 - DNA, 590 bp, Glycine max
tcttatccaaggctcatcttggtggtgaagctccttttttttggcttattccttaatggatggcgcctcctctcacctattttcctttgtattccgctgcatctccatggtggaaaatcaccattaaaggaccccattgaagctctaagatccagcctccatagaagctccacaagcaagcttccatcaagtggtaatcagagcacaagagcttcaagtaggtgctccttaaacctccattaattttttttctttgccttctcttccattgttgtttcttaatttttctccatgtatctcctcacatgtcttgttctaaatgttgttaacatgattctttagagtttccaccgattaaacttgctatagaagttagatttgattatctatggttcaaatttcttgttcttgttcttgaaccatgaattgtgttgagtttaagatcctttgagttttgtcttgttattttttgtggctgaaacctaaaccataaaattcttaccaaaatattaaagtagaagaaaacctcataaatctagagtgacttgttcacctattgtagttttgtcataaaagtcatgtctagtcat

SEQ ID NO: 23133 - DNA, 460 bp, Glycine max
agcttgagatgaggaagtgttgaattttgtattttcctgcttttattgttgaccacagagtggtacctggagatatgtcgcgggggtcaggagaccttggggacgtcaggtggggtgctattgcccaaaaccaagcttgaccaatcccgacccaacccgggcatagtcggtcagtgagaacctgtgatgtacctaagcaggcgagctcctggcagtcaacagataaaaggaaaacaagaccacaaagcaaggaggcttgtggtggctggccagctgtgaattttgtgtaatatgtggattgtggcctctggtaatcgattaccaagggtgagtaatcgattacaaggcttaaaattggggacaggaggctaagatgggctctggtattcattaccaaggggtgtaatcgattaccaggctcgaaaacgatagcaggaaacttagggagcctctggtattc

SEQ ID NO: 23134 - DNA, 415 bp, Glycine max
tcaacggtagtgctgggcacctttgacagagacgtgtgtgttatagggcataaagagactctgagagggtgcaagctattgagacgaagtgagatgcaaagaaagggcacgagtataagagccataacacttgaacttcaaagatgattttcaaaaatcgtctttgaattagcgatttcaattacagttctccaaagaattgtcttcaatatcaggctttgacttcatttttaaaaagcatagttgtaattttactgatatttacaaaaatgagacaggatttgtaacaacgaagattttggtaaaatcgttgtcgattcaccgtcgttgaagcttgtgtttttagtagtgatggactcaacaaccaagcagggttagggaagacaaaggaaaaaaacacttatctggatcaagg

SEQ ID NO: 23135 - DNA, 546 bp, Glycine max
  unsure (1)..(546): unsure at all n locations
agcttttgaatgaaacaatgngacattttttttttaaacccgaacttcaacggtcaagaacactggtaatcgattaccaaaacattgtaatcgattacagccttttgaaaatatttggaacgttgtaaattcagtttgaaaacatttttaaacttattttgctactggtaatcgattacaaccaatatggtaatcgattaccagagagtaaaaactctttggtaaaggttttgtcaaaaactcatgtgctattcaaagttttgaaaaaaaaaatttaatacttatcttgattgagtcttttcttcattcttgaatcttgagtcttgaatcttgatcttgattcttgaatcttgagtcttgaatgttgatcttgattcttgagatcttgaatcttgaatcttgaatcttgtttggaggcttttttccggattcttgaactcttgacttgttcttgattctcttgagatggatggtccttgatttacttgagatggatgttctttggatcacttgaccttttggtcatcacttttgtccatatctttt

SEQ ID NO: 23136 - DNA, 606 bp, Glycine max
  unsure (1)..(606): unsure at all n locations
gcatttaacacacttgtagtgtaatactttagtactttaacacacttctaatgtgttccaagcggttactaggatatcaacaaagtacacaattacaaatttttcaataaattaaattatctgaaaacacggttcatgagtctcatgaaagtgctaagcatattgattaagtcaaatcacattactaaccactcataatccaaatactgttttgtaaaacagtttgtttctatttctatacaagctaaacttcttaagcactttaacacatttctagtgtaatacttaaacacttcaacacacttctaatgtgtctcaggtgattatcaagatatcatcaaaatacacaacggtgagtttttcaataaattacctcaaaacatgattcatgagtctcatganagtgctaaatatattggttaaatcaaatcacattactaatcacgcgtaatccaaatactgtcttgtaaaacagtttttcactcatcactttctctaattcaaatttggtggtagtcacaaaagtgatgcatcaaatcgataaatacttatactcttacgggttgaaagttgaaagtttaatcaaatgttaactttttttttgga

SEQ ID NO: 23137 - DNA, 560 bp, Glycine max
  unsure (1)..(560): unsure at all n locations
agcttggntatcgccttcttcactttattagtatcaccgggctgagtcttctctgtggctgtcttactggattagctccatcctctaaatttattcgatgcatacatgtggatgggctaataccaggaatgtccgccagggtccagcctatagccttcttatgcttcttgagcactgacaacaacttctcctcttgctcatcagcaagggaggcagatataatcactggaaaactcttgctatcatccaagtaagcgtattttaaatttgatggcagaggcttcaattctggtgtggtcggctggacagtggtagaaggagatggtttctcagccttgacctcataaagaaagtcagaggtatgtgtacttcctgaaacatggttagtcctatctgactctataaatcaatctcaagaggtaaaacaccaccaccaggcatgcaatcaatatcactctcagattcactctcaacatcaaattcagacatatgatcaagttccattttcagactcaatgcattgaagagtgagaggcatgcagattataataaagatcagt

SEQ ID NO: 23138 - DNA, 414 bp, Glycine max
cctattttgctataatagggggagaagtgaattatatttgggttcagccccttaggcacttctctctctctcgaaatagctgaggaaaattagttccgtgaagaaaatccaagccgaggcgcttccgtaacgtttccgtaacgtttccgtgagtaattacgcgaagactctcgatcgttcttcaaaattcatcgttcgttcttcgttttcttcagtcttcaactggtaagtacctcaaaccaagcttttcaattcattctatgtacccgtggtcgtccacattttgtttcatgtatttttattctcgttttcatttgcttgttatacccccttttgacgtgcttaagccatttatttaagtcatttctcgcttaatctaaaaataaaataaattttcaccgatcgtttgaattg

SEQ ID NO: 23139 - DNA, 326 bp, Glycine max
  unsure (1)..(326): unsure at all n locations
agcttgtttgaatgagtgaggtcttttgnctcnattactgagtttatatattggttggacaaaaagctgtcttagttctatgtttagtgacctcgcagtcttgctcccaagcctagcacaacttgtactccctaatactgagtttatatattgtttggacaaaaagctgtcttagttctatgtttagtgacctcgcagtcttgctcccaagcctagcacaacttgtagtcttgcactcggcacagcagccaatactcgagcttgctcatccttggcccgagtgggtccaactcatgaagtgcttgctctacaagggatacttctgt

SEQ ID NO: 23140 - DNA, 599 bp, Glycine max
tctacccaatggaatttatgaaccgacatttgaaagttaattgttctgtaactaccaagagatggggtttctttctttatgcaatggcattttattgtggagaattcacacgtgctagtaatgaatgacaccatgtattttgagaaacagataaattctgacttacatattctcttatgttgctaaattgcaactgttttattgatttgtcgaactaaatttgagtcatatggtagaagtattgaaaaagttgcactacctcagttttatccttgataagaaatatccatgtcacatgagagcaatcatcaatgtaagaattaaaccataaataaaggcgggtccccacacactgcaatggacaagagggaaagtctcaacacctttattattactacttggaaaatttgtacctgataatggtccggagagagcaagaaaatgatgactaactgcctattatgcaatgttgaggggagggttgcatgaaagcttgtggaaggcgagattataatcctagggacccttacatttttgtttgtgcattttgtataaagattatatgcccatatattgtttgagatggggcttaatacttg

SEQ ID NO: 23141 - DNA, 429 bp, Glycine max
cccaccaacaccagagagaaacattttaaaaagcgagcgcacgacattcttgctaaataaactagggtaggccataccttaggtagaataagcattataccttaaatgaacaacctacaacttaattatatttgaagtcctagcttatacaaccatgatggtgtataaaggaaatgaatccaatgtaatgattcgtatgctatgtgagcgtacgtataaatagatggatagagaatggataatataatatgacaatgcttgcgaggagaaaaaaaaattgagattaaaagactcgcttgaaaatcacttaactaatggcggcgaagaatcattatcttcattaaggcactggtgccactactattaacattacaatacttttttaaaaaaataatcataattcctagctttaactatcatatgattacc

SEQ ID NO: 23142 - DNA, 382 bp, Glycine max
ttggcatatgttggttgtataaaatatatacgtttttgttttcatgacacgcaaatattctcatatggaagagttgatccctgttaggtcatgtgttgcaagttttggagtacttactacttatgaaggtcaatgaatccctcttggataatatataaattacctttgaattttgttgttttgattacattaggattgtggcactgcagctttataaacgtacacagcctaatcagcaactcctggcatatggttttagcatttgtgaaacttatattagcatcatacacaagttaagtaacagatatgcaagttcacagtgaaagcaagtttgagaccttaatctaattaggatccatgacctaacacaaggtggctaact

SEQ ID NO: 23143 - DNA, 1008 bp, Glycine max
  unsure (1)..(1008): unsure at all n locations
ccccaccgcaccaccgcgcacccgaccacaagcacgccctagccaccgcaatacccccatctanaaccaacaccnnccccccgcccccaccnnaagtnttgatgaaccgtagaacnacgcgccagncananaccgagccgcacgcaagcaagcaaggcnaacgccccaaccacgatttattagagtcacacgggccagagacaacagcaggggcacgcctgagcaggaccaagcgccaaccccccaaagtggacccgaacgcatacattgtggatgcggctaaacacgcaaggaatggnccgcccaagggtccaggcctataagccatcaggacgcttcttagagcaccagacaaacaactttccgcattcttcgctcgagcacgcagagaggaggcgagataaaacaacacctggaaaaagcgccccgactagcaccgcacagtagagccgcaaacaaaacaaccctgaccggcaagaggcctacacatccccgcgagcgcgacgcgcagagaacacgcggcaacaaaacgaaaatggcacacacacaccccacagcacccccacaaaccgaaacgggcagaaggaaccgccgtaacaaagccaggaaaccaaggacgcacaaccaacaccacgaggcgcacaaaaaccccacgccccacagcagagtaaaaaacacccacccaccccaggcagagctaaacccaacaaccaacatcgcacgacagcccacccacacgaacccaaacagccgaacggagcgaccaacgcaccaacccggacacacccagcgcacaaagacaacgcgcgggccggcgaaacataccacaagccccaccccatgaaccccaccaacagcaacggctcaatcaattccagcaccaacaaccgaacacgagccccacgaacgggcaccgcacaaccccgcccgcaacaaacagaaggaacaggccacccacccaaccctccgacaaaccgcgggcgcgcggaaccaacgcacagccccacg

SEQ ID NO: 23144 - DNA, 481 bp, Glycine max
tgatgtgagaaaacgtggaagagtcagtcttccttcttttgtttgttgaccacatagtggtacctggagatatgtcgcaggggtcaggagaccttggggatgtcaagtggggtgctattgcccaaaaccaagcttgaccaatcccgacccaactcgggcatagtcagtcagtgagaacctgtgacgtacctaaacaggcgagcttctatcagtcaaccaataaaagaacaaagaccacaaaacaaggaggcttgtgtggtggctggccagctatgaatcttgagtggtatctggaatttggcctctggtaatcgattaccaatgatgtgtaattgattacagggcttaaaaatggagacaggaagttaaaatggcctctggtaatcgattaccaagggtgtgtaatcgattacagggcttaaaaatggagataggatattaaggtggcctctggtaatcgattacccatggtgtgtaatcg

SEQ ID NO: 23145 - DNA, 429 bp, Glycine max
  unsure (1)..(429): unsure at all n locations
gaagctacctagtctataaatagaagcatgtgtaacacttgttggtaactttggatggaatgaaaagtcttgtgaaacacaactcaaagttcaacttctctccctttttctccttcaatttcgtgctcccccctctctctttctctccctctttcttttcctccattgaagcatcctctccaagcttcttatccaaggctcatcttggtggtgaagctccttcttccatggcttattccctagtggatggcgcctccactcacctcttctcctttgtcttccgctacatctccatggtggaaaatcaccattaaaggacctcattgaagctcaaagatccagcctccatagaagccgcacaagcaaccttncatcaagacttacaactcttctagtgaatttccttgcagctaacttcaacatgttact

SEQ ID NO: 23146 - DNA, 645 bp, Glycine max
  unsure (1)..(645): unsure at all n locations
tccacaacatccaaacatcatgaactatccaaaaccaagtatttatggcagaggcagaaaactctgcccaaaacacattccaataccacaactttccttactcaaataccccagtaacattctcttccttccgattcgttaaccgttggatcgactcgagaattttaatggaggtccctaatacataaatctacattttgaccgttgggatccgctagaaaatgtccagaacccaatatgtactacactttccacaaccagcaatacacaacattttctgcacaagcacaattttctgctgcacaaaatttgacagctttttgctgcacaaattgggcagatttcgaaatcactcttgccctcatccaattttgcccaaattggatcctacaagtcctaaatcatgtataaaccacatctaaaccaaagacaagcttcagaccaaagcaattcaaaatctaggtatctaaaacccctcaatttagtggattttcaaggtttgagaagtgaaaataagaatggggtaattttggagcacactctcatctcacacaagtctataacatggatataaacttgctcaaactggttttacgactaanaatccaccgaaatcaaaattgacccctcaacacccaatttacc

SEQ ID NO: 23147 - DNA, 356 bp, Glycine max
  unsure (1)..(356): unsure at all n locations
agctttgagccaattaagacgacaatatctttttactcggatgactganngagncccgncatatatcgagacgctcgaaattgactgttgatgctctgagcaaattcaaacgacaataatattttactcggatgtttgattgagtcccgtaatatatcgagacgctcgaaattgaatgttgatgctctgagcaaattcaaacgacaataactttttactcggatgtctgattcagacccgtcacatattgagacgctcgaaaatgaatgttgaagctctcggccacttcaaacgacaacaacattttactcggatgtctgattgagtcccgtaacatatagagacgctcgaaattg

SEQ ID NO: 23148 - DNA, 428 bp, Glycine max
  unsure (1)..(428): unsure at all n locations
ctacaacattcaacttcgagcatctcgatatattacgagtcnttantagacatccgagtaaaaagttattgtcgtttgaattggctcagagcttcaacattcaatttcgagcgtctcgatatattacgggactcaatcagacatccgactaaaaagttgttgtcgtttgaattcactcagaggttcaacattcaatttcgagcgtctcgatatatgacgggactcaatcagacatccgagtaaaaagttattgtcgtttgaatttgctcagagcatcaacattgaatttcgagcgtctcgatatgtgacgggactgaattagacatctgagtaaaaagttattgtcgtttgaatttgctcagagcatcaacattcaatttcgagcgtctcgatatatgacgggactcaatcatacatcccagtaaaaa

SEQ ID NO: 23149 - DNA, 506 bp, Glycine max
  unsure (1)..(506): unsure at all n locations
gaccgcggctgcagctatttgatgtcaccgaaaaagttggtatgtgncgggcgaaaaactncactaggtgtggtcagacaaaacagtcctagctaaaattatcaatagattatatgtttaaactattaaaaattgaacaatattgtttagttaatagtttaaaattagattgtgtttgttttctatgaagcctaatattgaagtttcatctatttaaaatataaaattgaaattttgcatatggagaaaattgaattgccttatccaaacaaagaatttaaaattgaagaaatttgaattgatttatccaaacaaagcatttgaaaaatgaaggaaattaaaatcaaagcaattcaaattctaagcatttgaaatttcctaaaactttaaaattcctgatccaaacacaaggtaaaagtattgccaaatgtcaaaatcttattgagtaggaggatttacgtgattatggaggatataacaactctcttccaaattttaattaagct

SEQ ID NO: 23150 - DNA, 385 bp, Glycine max
tgggcaatcctcattgtacaagctggttatgtggaatagtttttgattcctaagtctaaattcgaacaaagtagtgtctatactggacatagtaatatgagaacttggacaacattgggatgactcatattgtactgttagataacatcccaccgtgtaaaccaacctggtgagccagagtaatatatggggcatgctgtttatcctcggacaaaacctgtataacgcaccctatgacgacgatacactgctagcttgacttaacagcccactaaacttgggataggagaactacaggctatgcactatctacagtatatacatgtgagcgttttagcacctggtccttaaagctctgcttgagaacatgattaaagaacctttc

SEQ ID NO: 23151 - DNA, 304 bp, Glycine max
aacaacaggaacaaggaggtgtctcacttgaagacaataaaatgatgaatatatcgaggaaaaggacgaccattcatggacttatggctttaaacttaccctttgcctatagttactatatgacaaatatatacggtcgacttattataacattataaaagaaaacaatattgcaaccgggaaccaccatgctttcctccattgaccgcaatgacaactcgacattcgtatggtggattttaggcttcgctctatctactaataataatgccaacttctaatcacttggtcattcatgctctgc

SEQ ID NO: 23152 - DNA, 511 bp, Glycine max
  unsure (1)..(511): unsure at all n locations
gccgatacagtagagctgaccgcatgcaatctacaagttgcatagcgcctttgaatttcgtgatttgccaacaaanccttaactcgcctctgctataatccttcgaatttgaacccggagttaagtgctatctgatacccgttgttggggaaccgaagcgggataaacatcaaagagatttacaccaatgggccatgagcaatcatataagtaaacttgacaccacaccttaacccaaaaccttaaggctcaagtttatgagttttttcttcacttatatggtgttcaaccttctcattcctacacaatgtgagacttcacctcacacttgtactccaacataccgacatatgcattcttataccaataacttgcactttagttaagtgtgccctcctaactaaaataattaccaacttaaaataggcacaactctgtaataataaattcagcttaaatattatttaaaacatcataaccagcacaacgaacaacaaattgaaattacggt

SEQ ID NO: 23153 - DNA, 402 bp, Glycine max
gctcagacccactagcatgactacatgtgtagcaaagtgaaagatctaccaggacttgagcgtgggagggaactattgtacaaagccactgacttatgaaaaaaagggcaaacaggatcacctttgttgcttttaagagcctgagctacacttggatggatcaagtctgacacttaagcacaagatcttagttctcctctattgatatcattgacacttgctagttgctggtatgaccttgggtggtatggatcttatttttattcagtatgtctaatcttgattgaatgtggtatggatggatttagaatggtaggctttgagattttatttcaggtggggtgaatttatttcttctacaggagtcttctcattatataaatgactcttctgtgacatgac

SEQ ID NO: 23154 - DNA, 484 bp, Glycine max
  unsure (1)..(484): unsure at all n locations
agcttgtcgtcacggagatanccgactttgcttttgngnggnggaacaagccacgaaaggagagagcaagaaangaagagccaatggnngacacatggacagagatgaaaaagatcatgaggaagcggtatgtgccggctagttactcaagggacttgaaattcaagctccaaaaactaacccaaggcaacaagggggttgaggagtatttcaaggaaatggatgtgctcatgattcaagcaaatattgaagaagatgaggaggtaactatggctcgatttcttaatggtttgactaatgatatccgtgatattgttgagctgcaggagtttgttgaaatggatgatttgcttcccaaagcaatccaagtggagcaacaattaaaaaggaagggagtggctaagaagaagtttaccaactttggttcttctagttggaaagaaaaggtaagaaagatggggctgctacttctagaattccacac

SEQ ID NO: 23155 - DNA, 380 bp, Glycine max
gctgcttgaaattgaacaacggatgctatccagaaactcaaagggttattacttatcacacggaggtccgagtgaggcgcataatatatcgagatgctcgaaattaaactacgaatactctctagaaattcaaatggtcgtaacttgtcacacggaagttcgattcaggcgcattatatatcgagacgctcgaaattgaaaatcggaagctgtcgagaaattcaaatggtcgtaacttttcaaacggaagtccgatttaggcgcataatatatcgagaaggttgaaattgaacgacgactgctctcgagaaatttaaaatggtcataactgttcaaacggaagtccgattcaggcgcttaatatatcgacacgcttgaag

SEQ ID NO: 23156 - DNA, 459 bp, Glycine max
  unsure (1)..(459): unsure at all n locations
agcttgaaatataacaatggaagcttcgtgnattttcaaatggncctatcttctcaaacggatgtttgatttggacacataatatatcgagacgctagaaattgaacgattgaacctctcgagaaattcaattggtcataacgtttcacacggatgtccgattcgggcgcattatatatcgtgacgttcgaaattgaacaatggaacctcttgagatatttaaatggtcataactattcacacgaatgtccgattcagggacttaatatatcgagacgttcgaaattcaagaacggaacctctcgtgaaattcatatggtaataacttttcacatggatgtccgattcaggcggataatatattgtgacgctcgaaatataacaacggaacctttcgagaaattcaaatggtcctatcttctcgaatgtacaattctgggacataatatatcgagacgc

SEQ ID NO: 23157 - DNA, 509 bp, Glycine max
cgacactataaatctcagctcttatccaggctcatcttggtggtgaagctcctttttcttggcttattccctagtggatggcgcctcccttctcctcttctcctttgccttccgctgcatctccatggtgaaaaatcaccattgaaggacctcattgaagctcaaagatccagcctccatagaagctccacaagcaagcttccatcagttatgaccatttgaatttttcgagagcttccgttgttcaatttcgagcgtcacgatatattatgaccccgaatcggacatccgtgtgaaaagttatgaccatttgaatgtctcgagagcctccgttgttcaatatagagcgcctcgatatattatgcgcctaaatcgcacatccgactcaaaggttatgaccatttgaatatctcgagggcatccaaattttaatttcgaaggtctcgatatattatgtctcaaaataggacatctatttgaaaacatacgcccctttaaatgtatcgaga

SEQ ID NO: 23158 - DNA, 284 bp, Glycine max
agcttgtagggttaaagtctcacgaatttcacgtgctgatgcaacaattgttagccgtggctatacgagacatcttgccaaacaaagtcaggttagcgataactcgcctgtgctttttcttccatgctatatgtagcaaagtcattgattcagtcaagtttgatgagttggaaaatgaggccacaattatactgtgccagttggagatgtattttccccctgctttctttgacatcatgattcacttgattatgcatctggtcagagaaatcaaatgttgtggt

SEQ ID NO: 23159 - DNA, 657 bp, Glycine max
  unsure (1)..(657): unsure at all n locations
tctagcgccattgtttggaagaagaatgaagaagatgttatgatgtaataggaactacaggaacaaggatatgtctcacttgaagacaataaaatgatgattatatcgaggaaaaggaggaccattcatgtcctttcagctagaagcttagcctttccagatagttagtatatgacaattatatttggtagatttattttagcatttgaaaagaaaaatatattgcaaccagtaaccaccatgctttcctccattgaccgcaatgtcaactcgacatttgtatggtggattttaggcttgctactatctactaataataatgccaacttctaatcacttggtcattcatgctctgcttgttaacatgttaaaagaacctttcaagccaaaattttatgtcaggtgagctaatggaatataaacggttatctataacanaacaacattaaataagtaaaattaaatgaaaaaccttgctgtgctgtcaaatgaagtgattaataactggcttccatcacgggagaaagaaacacttgtgacaccttgagaatgaacacgttcaagacgctgtaagcactgaccagtcctaatacgccaaacctaaatgaaatgtgaatatacaatttaagtttacatattacagtggggtaaaaacat

SEQ ID NO: 23160 - DNA, 355 bp, Glycine max
  unsure (1)..(355): unsure at all n locations
agcttcacccatagaagacgagagatgattttatttncacacnncccccaaagcgggagggaattgtagactatagccagcccctaaatggaagtccaccaggtcagaagaatttcttgattccctcataaggcatgctcctaatggaatggtctataactaaaacctctacatcagtaggccatgaaagtccaacaatatttgcaagcatgatgaaaactttggagaagaaggttgaatctcaatgtgcttaaacattggatgaaacccttatgattagagatggtgtatatgtgcatgcatgacaataggatcgtcaaattctaaaaacttgcaaaggtcagatgtataataa

SEQ ID NO: 23161 - DNA, 410 bp, Glycine max
  unsure (1)..(410): unsure at all n locations
tgcgtatagctctcaagaggagaggatgaagcctcagttantttctgcataaaattcagattcatcaagcggcctcctacccaatatgatccttcacattagaatctaaacctatattgagatatagcaatcagacaaatgcatccttctcatcttcaatgattaacattacaacagcgaccatcgctactatgtgaggttggctacatggaacacacggcagcattatgcatggctaaaaaccaaagttatggaaatattattaagcctgagatctcccaatcttcaattattaagaccgcacgaacaattcccatttcacgaacctacacacgcgcgccagcatacaaacacatacgaatgttcatatcattagaaattaaatatttgatgagattaaaattaaaaaa

SEQ ID NO: 23162 - DNA, 517 bp, Glycine max
agcttcggaagaaagtgatgttgttcttttcctaaaggcagagcttggaagagcccgagtagtcgaagagaagttcaagtccatagccatcaaagtctgaaaagagtatgatgaactaagggacgtcaatatggccaccgctgaagccttggaacgagaaaccaagaaggcccgaaaggaagaacacgtgccagcaaagttttgaggggctttatagggcagcaatagtaagctcaagctccgaagaggtgaaaggaatcatcacgggtcaaaggcatgatcttgaaggacgagctaaaggcttacctcaggtcgaaaagaaatttgtcccaacagttaagcgagactgaagggaatatgtgggccgtcatcgatgagtgcaaagagaagttaaatctagcggcgactcacgagcaaaggctagaggatgagtacgccaagatatcagcagaaagcgaagcaagggagagggttatttgattcatggcaccaagaggcaacaatgtggacggactga

SEQ ID NO: 23163 - DNA, 512 bp, Glycine max
tcaccttttggtcctcctcatagttggtgcatgataaaatatgctctattttcatctcccagtccaagtaggcctccggatcattctttcctttaaaaggaggaatgttgagtttaataccatcaattcggttttgtctaggaacaccatcattccctcttctcctcctttcttcttcattatgatctctgttctccatttgatccaacctctcatggagcacatcatctcgttgtttcattaacctctccatatgttgcatcaaatcttgcatttggaattgcgaaagcccccctccatcattaggatttgttcctgccatctcaaacaaacaaatcaaacgtaacaagacaattatagttgttgtttgaatacctcacccactcaagtgtatcacacaattatgacttttctctaatgaaacactcttgccttttaccactctaattccccttgagttcttacgcaattaaagagattatggccataacaaagaacaattcaccaatatg

SEQ ID NO: 23164 - DNA, 256 bp, Glycine max
agctttactggaaaaaaatctttgattattttctaagaaagcacctccatgagacgaccgatattatctacacccacgcctacactacctacggattcttttttgaaaagatctctcaagaaggtccagctgaagtacccacacctggactatcgctaataccagctgcatgacaagagaactctaaaaccaggtgcccctacactactataatgatgcatacactcgttcctactaccatgacactacacaacct

SEQ ID NO: 23165 - DNA, 384 bp, Glycine max
tgacgcctaagatactgacggcctataactaggtttctcatttatcaaggcctatgagacgttgaatcctagttcattaaggcttgatcaatcattttgaagctgcattggagacaactaatcctcgagaatagggaactgcggtgggtttgtatgatgaagtttgaagtcttaaagaatcttatcctctgagagtataagaggctaccattaaatttcttcatgactcctataacgaaactttcttcccaatgaatggatagcatcattggacctctgcgttgcaacataatctagacatggcattaagaatctactgtactctcattgagcttatgttgtgagccatattcataagtatctcttgtgataccacaatctatt

SEQ ID NO: 23166 - DNA, 513 bp, Glycine max
  unsure (1)..(513): unsure at all n locations
agctttaggagaaaccattaaaactaaggtagcncctaaacaaaaatcaattgaggaagcttcgccgagtgtccccattgaaaaacctttattcaaacctttcaaagttagtgataaggctaaacgaaaaattagggaacttagaaaaactaaatccttaattgaaggcgtaggtgacaatcatagcgaattactaaacaagattagtagtttgcttaaggtcattccagatactccccaagcttcggaaaatacttccaaaatggtaacaagaagtacctccaaattaattaatgttattaatgaagatagtgaccaaaacttagataacacaactgagataggatcagtgtcagaaaagaatataaatccattaaactccaaacactggaaaacccccctcaaattatattatcaacgtccaacttgccctgaccttctattagaagaaagaggtgaaaacaatttaaaaagtttagtgcacataacatctatgaatggaacataaaatgc

SEQ ID NO: 23167 - DNA, 482 bp, Glycine max
ttagtcaaacagaataatccgaaaatgtcaaagttttatgtgttgaaaaagctgacgacattcatgctaatcgaaatgatcatgatgaaggagaattgattaacatcctctaatgtaattttctgcagagacagaggtcaccaaacctagtaagtgacaactacatttttctctgattgaggcatcggttttttgtttcataacaaaaaccgatgttaatatcataaccaacatcggttataatagaaaaccgatgttaacgtttgtatattaacatcggttttttgtgtataaccgatgtcagagtttgtattttaacatcggttatctgtggataaccgatgtcaactattgtacattaacatcggttaattataaataatcgatgtgaatatttgaatagtaacatcggttatttataattaaccgatgttatacccaaagaactacaccaaataagtgtaagcatcatcaacgttgac

SEQ ID NO: 23168 - DNA, 500 bp, Glycine max
agcttcttatcctttctttgcaccacattctattctttttggaccctttgaagcattcttgcattgggttcactgaaaccacgtgcgaggaaaggcgtgatactctctattgatggcgctcctctcatggggtagccaagttgtcttatggcaagtacaggattataattgatacaacccctcattcctatcaaggggatgtttgagaacccttcaaatgaggacaaaactccggctcctccttccttctatcaggggaagcaattaacggatgcctctactataccagccaaaagctgatcccaatttgctttccctttctcggcacatgcggtgaccttgtaggggacaaacgggtctactttcatgacgaaagatgtgagagaccagccatacataaagagtgggttagcaatagacaatccttgcgccgctcttctcgtatctccgatcaaatgtgtcataggaatcagccaaaatagcaaggatcgggcttttcc

SEQ ID NO: 23169 - DNA, 487 bp, Glycine max
taagctttaaagggctgagagagaccagccaagtgtcgaatgcatgatattggaaatcaagttgaaggcttaccaaaggtcaaagaggagtttgtccgaacaattgagcaagacggaagagaacatgtgggcaatcattgaccaatacaaagaaaagctaagtctagctgcaacctatgaacaaaggatataaggcgagtatgcgaaggtatcactcctacaagtggaaagggaagcaagagagagagtgatcgattcattacacagagaagcaatgatgtggatggataggttcgctttcgccttaaatgggagtcaagagcttccaagactgctatccaaggccaaagcgatggtggacgtgtactcagcccccgaggaagatcatgggctctttgattattgtaagcacatgatcgatttgatgacccacattattaggaatcgctaaggcatttgtaatttcactctaattttggtgaaatga

SEQ ID NO: 23170 - DNA, 275 bp, Glycine max
tcttaagtgacctgagctgcagctaaacgatacataaggacaaagtttttacctttttttctaagattcaaggctagatctaggctttatcaatggtggttttcaaaaaataacggtggatttgagaactaggagaaaaaaggaatttcaaacatgtagtttttttaaaaaaagaagaaactctggtttcgacacggcggtgccgccacccatgggcggccagccactgcgccggtaaacaacttccggcggtgtgtgctagagagagaagagag

SEQ ID NO: 23171 - DNA, 561 bp, Glycine max
tgggaggcctgccccagagattgaaggccttgtggtggccatttgactgagtcctttgatcgattgttctctagatacattagattggggactaacgtctgcttttgtggaacactagcataaggaaaccagcagtttccatttgcctatcggagaggtgactatcaccttggatgacgttgcggcattgttacttttccttgttgtcggagctttccacagcttcgagcagcttaatgtcgacgacgttgtggacttattgatggagttactcgaggtcagtgctggagatgccagagttgagaccattcggtgtaatgggtcttatgtgcgactttcgtggctgcgcgacatgtatgagttgaagattgaggcatgtgcgtggattatagcagcgtgaacatatttgttgcatctccttggatgcacactctttgctaacaagagtgtcacacacgtgcacatggtattcttggatgcattgcatgacctgacacagagtgcgagttatgcttggggcgctgttgcacttgtgcacatgtacgataattaaatgatgtg

SEQ ID NO: 23172 - DNA, 254 bp, Glycine max
ccttaattggagcgttattgccttgccatctcactcctgtagagatcatataaatcaggttggaatatctaagcctatgtttggattaccatttcacactctcaaaattacttttaactcgaaatttacagaggtcaatccttcctcctacgtactttaaatgtacgatcactcatggaacgggacaatgcgtgcccaaacacgctattaattgccggcgaaactcattattgataacactcaacttgcaattt

SEQ ID NO: 23173 - DNA, 367 bp, Glycine max
tggaaagtaatttccaagatgatgcattaacaaataaaattgtatgtttggaaataaaaatataaagagaagggagctagtgaaattagcaaatatgagaattgtaaatagaaagtgccgaataaaaatccgtttggatacactactccatgaattattttgctactccatatttcgggaagtggagattggccccttcataatagctattggcccctaccatatttgtgaaacaaccagagtactctttcctactattactagcacccactctataccaccaatattttttccttctttccactttccatttcgtactttcacgcctcacgaaggtctatactttgcgcgaaatattgtttttttg

SEQ ID NO: 23174 - DNA, 479 bp, Glycine max
agctttgacttgagtcatcaagagattattaatttgtgaccatggcatgaatttcataacagtctttttcaacatctctttcaataatcaagaatttatctttcaatcttctctctcaacatcattcaactttttctacataagtttctaattcttcttctcttcatctttctaaaagttgttgttcaaaactttttctttcgagaaaagatctttgataaaaaaacttgtgctattcatctttttttattctcttctgcctttgtcaaaagaacgaaggactaactgcctgaattcttttgtgtctctcttctccctttccaagagaattcaaaggaccccgcctgagaattctttgattcttccctttcccttaaacaaaagatcttaaaggactaaccgcctaagatatcttttgttcccctttacaaagattcaaaggactaacaacctgagaattctttgtccaacatattgga

SEQ ID NO: 23175 - DNA, 438 bp, Glycine max
  unsure (1)..(438): unsure at all n locations
ntgttctttnataaaaatgagaagttctgaactcatcattttatctaaaaaaccttggggtggatccaagttctctgatcattcatttgcatattcatgttttggtggcatgctcaccgttgtttatttctttaggaatttcatcataactaagaaagcacaaaggcacccctataacactcgatccagaaaaatggataatgaagagggcgtgcaggaacagatgaaggccgatctatcgaccttaaaagatcaaatggcttccatctcggaggtcatgctaaaactccagaaaactatagaggataaagccacggcaaccgcctccagtacagctagggaagcggagccggtgctacagcccgccttaaatctgggccgagacagaaacacggtagtgtttggtcggaggtatagtccgcaagcttacccctatgg

SEQ ID NO: 23176 - DNA, 344 bp, Glycine max
  unsure (1)..(344): unsure at all n locations
agcttccattttcaatttcattcgcttganatattacgggactcaatcggacatccgagtaaaaacttattgtcgtttgaatttggatagagcttctgttttgaatttctagcgcttcgatgtattacgtgactcaatggaacatacaagtaagatgatattggcgattgcatttgctacaagcatctgatttcaatttcgatcgtctcgatctattacgagactcaatcggacatccgagctacagtaacttacgttcgcttttgctacgagctttggctatcaactaccaacgtctcgatatattaccgcactcaatcgaacatttgagggaaaagcttttt

SEQ ID NO: 23177 - DNA, 585 bp, Glycine max
tcaaccaaggggagatggaccatttcaagtgcttgtattatttataacaatgcttacaaaggtgagctgcccggtgagtataatgttagttccaccttcaatgtctctgatttatctctttttgatgcagatggagaattcgatttgaggacaaatccttctcaagagggagagaatgatgaggacatgttcaagagcaagggcaaggatccacttgaaggacttgtaggacctatgacaagggctagagcaaggaaagccaaggaagctctccaacaagtgctgtgcatactatttgaatacaagcccaagtttcaaggagaaaagtccaaggttgtgagttgtatcatggcccaaatggaggaggactaaatgacaccactttgtctcacttttagagtgattagtttgtctaaataatggcccaatccttgtaaagatggctaaccaaaaatatgttttgggttaatcaactaaaagggctttaattatgtttagttcaaagtgtaataagggcccaattggcaacctatgcatcagcctttttggagaccaaatggtggctgacttgttggatgttggggg

SEQ ID NO: 23178 - DNA, 243 bp, Glycine max
agctttgataatattggcgaattgtttttttttcaagagcttagaacattttctccaattagagggttctaggagaagggatacgaagggcaaggcaacttggcagtgtacaatgtatgctgttaataggtgattatggttagagagatatgcgagcaatttcaaggacaattttttttttttatggtggattgttggttttactttagcaacttaacggcgttcagataatatttattttaa

SEQ ID NO: 23179 - DNA, 498 bp, Glycine max
ttagggagggaggattactatgaatgtgcttgctttttttttcaaaccacctaaaaccccatttgcgttaaaaaatgacctaaagttttggtcgcaaactgagttttgattccttacgcttagaagcaacattttgttattcaaacattcacaaatggcttatgtgtttattaacaaaagtacccctataatttagtatcactacaaaaaaagtgcttttggtgacatttttcattgaaagtgatgctattgtacttttgcgacattttactaaatgtaggataatgtgtaagttgataaagccttttagcaaaaaaattgcatattaattgcaacattttgaaaatgctaccaatctaacattttgtaacatttaaaacatgttggcaagttattgtaacatttagaataatgcttcttgtgacattataaaaaggttgccaagaaattttttttatggaggatgcgaagaagtgattgcaatatttataaaaatat

SEQ ID NO: 23180 - DNA, 446 bp, Glycine max
agcttcatgatgaatcaagattgattctatgagttttgatgataacaaagatgatggcaaaaagctcaaaagtcaagatcacttcatgataacaaagatgatgacattcaagaatgagttcaagattgagtcaagaacacttcaaggatcaagaggaaatttgatttcaagattcaagatttaagaataatcaagatcaagattcaagactcaaagattcaagaatcaagagaagacttaatcaatataagtattaaaaagttcttcaaaacattgagtagcacaagaagttttcacaaaatcattaccaaagagttttactctctggtaatcgattaccagattatagtaatcaattaccagtggttttaaaacgttaagattttctaaatttaaaatgaagagtcacgtctgttgatgtgtaatcgactacacctttatggtaa

SEQ ID NO: 23181 - DNA, 586 bp, Glycine max
tcctagaatcaagatcaagattcaagaatcaagagattatttaatcaagataagtatgaaaaagttttttcaaaaactgagtagcacatggatttttctcaaaatctgtttaccaaagagtttttactctctggtaatcgattaccagattattgtaatcgattaccagtagcaaaatggttttcaaaaagctttcgactgaatttacaacgttccaattgatttcaaaaagttgtaatcgattacaatgttttggtaatcgattaccagtatgcttgaacgttgaaattcaaattcaattgtgaagagtcacattctttcacaaaaaaagctttgtgtaatcgattacactgatttggtaatcgattaccagtgaaagtttctgaacaaatcaaaagatgtaacccttcaaatagttttttgactcttttaaattggttttaagtttgtctaaaagtcataactcttctaatggttctcttgaccagacatgaaaaatctataaaagcaaggctttgttttgcatttcacatctatcccatcaatcaatctatacattttatcttttccaaatcattctttacac

SEQ ID NO: 23182 - DNA, 539 bp, Glycine max
  unsure (1)..(539): unsure at all n locations
agcttccacaacatccaaacatcangtcnatccaaaaccaagaaaacagggcagaggcagaaaactctgcccaaaacacattccaataccacaactttccttactcaaataccccagtaacattctcttccttccgattcgttaaccgttggatcgactcgagaattttaatggaggtccctaatacataaatctacattttgaccgttgggatccgctagaaaatgtccagaacccaatatgtactacactttccacaaccagcaatacacaacattttctgcacaagcacaattttctgctgcacaaaatttgacagctttttgctgcacaaattgggcagatttcgaaatcactcttgccctcatccaattttgcccaaattggatcctacaagtcctaaatcatgtataaaccacatctaaaccaaagacaagcttcagaccaaagcaattcaaaatctaggtatctaaaacccctcaattagtggattttcaagggttgagaagtgaaaataagaatggggtgaatttttgagc

SEQ ID NO: 23183 - DNA, 566 bp, Glycine max
ctccgcttgaaactgttaagaaggttcgctttcaaacctatgttgttgttcaacataaacttcctcttagattaagccatttagaaatgtgttttttacatccatttgatatagcttcatattgctataagcttcaaatgaaagtaagatgtgtattgcctctaaatgagctacaggtgcataagtttctttgtagtctattccttcttgttgtgagtattctttagcaactaaccttgctttgtttttcacaacctttcaattttcattcagtttggtttgaaagactcatttctctccaatagctttctttctttttggaaattcgactgactttcaaacatcattcctctgaaactgatcaagctacttttgcattgctttaacccaattgtcatcctgcattacatcatcaatgtgtttgggtttcattttagaaatcaatgcaataggtccttatgttctgagtgatgatcttgtttgaacatgatcaactatatcaccaataatttgacttttttggaggatttcttctcatgatgcatccagtgggttctcttacctct

SEQ ID NO: 23184 - DNA, 435 bp, Glycine max
agctttacagcagattttagtaattatctttctaacctagaattaaaataacttaatgccattaacctagggaattaaaaaaaacttaatggctgagtgtaactgaaattgtggcaaccaaaagtcacccccaacagccaacaagtcagccaccatttggtctcccaaaaggctgatgcctaggttgccaattgggcccttattacaacttgaactaaacctaactaaagcccttttagttgattaacccaaaacatatttttggtcagccaactttacaaggattgggccattatttagacaaactaaacactctaaaattgagacaaagtggtgtcatttagtcctcctccatttgggccatgatacaactcacaaccttggacttttctccttgaaacttgggcttgtattcaatagtatggacagcacttg

SEQ ID NO: 23185 - DNA, 534 bp, Glycine max
tgccttgccccttgatatatttgagggactcatggtttttattaatgacaaattccttgggataaaggtagtgttgccatgttttcaaagcacgtactaaggcatacaactccttatcataagttgaatagttaagggtaggaccacttaacttttcactaaaataagcaattggatggccttcttgcatcaacacagccccaatcccaacatttgaagcatcacactcaatttcaaaagatttttgaaagtttggcaatgcaagtatgggggcattagttagcttttgcttaagaacattgaaagcttcttcttgtttctctccccatttgaaaccaacatttttcttgagcacttcattgagaggtgctgccaatgtgctaaaatccttcacaaatcgtctataaaaacttgctaagccatgaaaactcctcacctcggtcacagacttaggtgtaggccattcttgaataacactaaacctcttctcatccacttgcactccttttgaactcccaacaaaccctgaaacac

SEQ ID NO: 23186 - DNA, 371 bp, Glycine max
agcttaagctccttcaactgttaaggtgcttaatatttgaagagtatccttgcggaaccttcacccgacgaatacactgacaaaaacttatcttctcctttttggacaaagtatggcaagctaggggcaagtaaattttcttcccatcagacattggatgcaactgtgatcgtatccccatataagctagatcttgacgggtattcaagccatccttcgtcttgccttgaatgttaaggagcgtcccaatcacactgacacaaacatttttctacacatgcataacatcactaccatgtctaacgtctagatcaaaccagcacagaagaactacgaatatggacctcttcttccatatgcaagacttactt

SEQ ID NO: 23187 - DNA, 506 bp, Glycine max
aactcagcttccccaactccagtattaacatcaatcttttttttaacaaaccacgcaaaacagggcggaggcagaaaactctgcccaaaactcaaatgaaaatcacagctttttctcacttaaagaccccaataacatttgcttggttccaattcgttaaccgctggatcgactcgaaaattttactggaagtctctagtacataattctacatttttaccgttgggatctactagaaaacatccaagacgcattatgtactactctttccacaaccaacaaatacataccatttttctgcacttatgcaaaaatctgctgcacattttcacagcaaaattctgcacaaagtgcatatatcgaaaaccactcttgccttcatacagactttcccaaattgcatcctataagtcctaaatcatgtatcaatcatgtctaaaccaacgacaagcttcacaccacagcaacacaaaatctatgtattcaaaacccctcaatataatgga

SEQ ID NO: 23188 - DNA, 417 bp, Glycine max
agcttttcgattcattctatgtaccttttttggtccacattgtgtttcgtgcatttttattctcgttttgtttactttttatacccccctcttgacgtgcttaagccattttacttaagtcatttctcgcttaacttaaaaataaaataaatttccaccgaacgtttgaattgtattatccgttaacttcggataaaataaatttcgaccgttcggtcgtgccgtaaccacgttggaaataaaaaaaagaggtaaaaaaataatataataatcaaaaaacatcttttagcacaataaagcggaaaatcaatcggacgttttctctttgggattcctcattcttaatcgaattgatcaataactaaagtgaaactaaggctaaaatcaccttgcctagttcagctcgtccataaaaaa

SEQ ID NO: 23189 - DNA, 486 bp, Glycine max
tcaacctttggtgcccatttctgctccaatcttttttgtgggcattttcggagtcgtgaagcacgtctctacgtgtaggacttcgaaatttcaggtttgggtggacttctttctctcttgattttcgtgggtatgggcttttgggagatatgatgggtagttttgctagttttctgcttcatgatagttatttgtgaagaaacttgttgaaagcatgttgaacttgccatgtttggatgagttaaacatacccattctgttttagggtttttatgatgatgcttgtgatgtttatgtgctgaaattgcttatggaaaactgttagagacgaagggtagaattaatctagggttacaaagtgagaatgtggtgttatgagtggaaaaaaagtgaggctttgagagttggaaggttaaatcttgattctgtggtaaatggaggttaaaatgagttaatcctagcttgaaatgcaatttacaacatgtg

SEQ ID NO: 23190 - DNA, 202 bp, Glycine max
cagcctatgccgcaaacaacttctactttttttctcaaactcaatagaaaaaacggccgccacaaaacgcttatgacctctccaacaacaggtacaaccccgggtagaggaaacatcccaaccttaaatgggtgagttcttcccaatagccacaacgaccccaggcctatttttataatgctgatggcccaagcagaccata

SEQ ID NO: 23191 - DNA, 551 bp, Glycine max
tgtaggattatggggtatccatcacatgtggtattatgtgtcggtcgggcgatggtgcacaacaagtgttccacatccacaaatcgcgcataaatccaccatcccctgttgcccacctccaactgagttcacgtactcccacatactcgtttctctcaacatcgggtacccaaaaatcctcccaagcttacccaacatccaggtgattcaacatccaaatcatcacaaactaacaaaccaagcaaaacagggcaaaggctgaaaactctgtccaaaactcaaaccaaaattatagctttttctcacttaaagaccccagtaacatttccttcgttccaattcgctaaccgctggatcgactcgaaaattttactggaagtctctagtacataagcctacattgtgaccgttgggatctgctagcaaacatccaaaactcattctgcactactctgtccacaaccagcgaaacatagcacttttctgcacttatgcaaaattctgctgcacaatctcacagcaaaattctgcataaagtgcagatttcgaaa

SEQ ID NO: 23192 - DNA, 399 bp, Glycine max
agcttgcacaaacctccatcatatatgcagtgtccttccaaggtttccttggccacaacagctgtgtggatatctgtaatccaaagtaaatcaagatcgcaaacatataaaaaaaacttcgtactccattgcccaaaggctcttcgctatgcgaaggtatgggggagggatattgtacgcagccttacccttgcatatgcaaagaggttgtttccggattcgaacccatgaccaacaagtcaccaagatcgcaaacatataatattataaaataaaacatgcaaaattctgctaactatcaactaggccaaaatcatcgtgcaaactcataatcataaacatgtatatagctagtctcgaaggataaaaagtcaatcatgtgctggttgggaccatcta

SEQ ID NO: 23193 - DNA, 439 bp, Glycine max
tgaagaaggctaacaacggtgatggaggagcaacattataacatatgggaagaaggagaagaggcttgaaatttctggaggaaagagagagaaggttttgcttctaatatttcttttcttttttctttttcttttcctttttaattgcatttccacatgcaattttgtgattggagcaataagggcccacctttaatttgactttgaccacgtgctcatccataagagaagaaaaatatggaccttttttggatgctgaaatcttgcctcgatttgcatgtcgtctccccgattccatttcttcgcgtttctctacaaccgtctatgcccgatttcagaatgaggcccttagcatggttcacacgttggttttgtttattattatttgcacgcacaatgataattcttagactaattaattgtaaattaatccataacc

SEQ ID NO: 23194 - DNA, 402 bp, Glycine max
  unsure (1)..(402): unsure at all n locations
atggacttaccttgaattaattcctttgatagcctctttgagccttgtttccctttccttgttttgaagctcactacaagccttaagtgaaaaaccatgatattaccatatccttaaggaattttggagctttggaattgttttgggaataagtgtggggggtttttgtttcattggacaacttgttntgttgactatgcttcatgatgtattttgggccatacttgatgtacattgtatattggttaaatgttggacatgctgaatgaaatgttgtttctcaaaggtaaaaaaaaaaanaaagaaaaaaaaaagcaataaagttgagtgaataagatctttaatggcacaagaatgatgaaactcttggttctactcttcatgttaaattttaaatcttac

SEQ ID NO: 23195 - DNA, 452 bp, Glycine max
  unsure (1)..(452): unsure at all n locations
tcttgaacgcgatcagtatattcattggcataagctaaaggatgaagatgttgcacgtgatatattttggagtcatcccgatgcagtgaaattaaccaaagcttgtaatttggtatttgtcatagatagtacctacaaaacaaatagatatagattgtctttacttgacattgttggtgtgacaccaactggataacattttcaactgcatttgcctatttggagggagaacatataagcaatgttgtttgggctctggaacggtttcaaagtatttttctaagatgtgatgcaatccctcaagttactgttaccgatagagattcagcattgataaatgcaatgaaaactgttttccttgaggcaacaaacttgttgtgttggtttcacattgatacgaatatgaaggaaaaatgtaaaacccttgtgggtcanaaaaatgcatgagatta

SEQ ID NO: 23196 - DNA, 309 bp, Glycine max
tcaattaattctatgtacccgtgtgtggtccacattttgtttcatgtatttttgttctcgttttcatttactttttataccccttttgacgtgcttaagccatttatttaagtgatttctcgcctaatctaaaaataaaataaatttccaccgatcgtttgaattgtatcatccgttaattttggataaaatgaattccgaccgttcggtcgtgccgtaaccacgttggatatataaaagaggtggaaaaatatataatattcaaaaaatacctttagtaaaataaaacgaaaaatcattcggacgttt

SEQ ID NO: 23197 - DNA, 426 bp, Glycine max
  unsure (1)..(426): unsure at all n locations
tcttccanagctggaaactagtaatcagatttctttttcagctcaacaaagaactcgttaacttaattggactcaccaaacaacaacaaaaaaggcaaaaaaaaacactattatggaaaattcaatgcaatttttcttaaaactggcaagtaagtcaagactgttaaataagctaagaggtttccaattattttggtttagtttatctaacattggcaaccttctctgtcatgcacagaagcacggaaaagaacagcctatcttcgaggactatgaacctccataagaaagaaggataaggaagaaaacttgtattatttttctgctgtcctctattacatactaagcatcccttgtatagaagcactagccaagggtgccgctacgaaaacagaaggtgctagaatgggaaaaaaaataatataa

SEQ ID NO: 23198 - DNA, 357 bp, Glycine max
tgacccactaacctagaattaaaatttcttcatgcccttaacctaaggaattaaaaaaaacttaatggctgagtgtaactgaaattgtggcaaccaaaagtcaccctcaacagccaacaagtcagacaccatttggtctcccaaaaggctgatgcctaggttgccaattgggcccttattacaacttgaactaaacctaactaaagcccttttagttgattaacccaaaacatatttctggtcagccaactttacaaggattgggccattatatagacaaactaaacactctaaaattgagacaaagtggtggcatttagtcctcctccatttgggccatgatacaactcacaacct

SEQ ID NO: 23199 - DNA, 449 bp, Glycine max
  unsure (1)..(449): unsure at all n locations
ngccttgcccctcgatattattgagggactcatggttactattaatgacaaattccttgggataaaggtagtgttgccatgttttcaaagcacgtactaaggcatacaactccttatcataagttgaatagttaagggtaggaccacttaacttttcactaaaataagcaattggatggccttcttgcatcaacacagccccaatcccaacatttgaagcatcacactcaatttcaaaagatttttgaaagtttggcaatgcaagtatgggggcattagttagcttttgcttaagaacattgaaagcttcttcttgtttctctccccatttgaaaccaacatttttcttgagcacttcattgagaggtgctgccaatgtgctaaaatccttcacaaatcgtctataaaaacttgctaagccatgaaaactcctcacctcggtcacagac

SEQ ID NO: 23200 - DNA, 353 bp, Glycine max
  unsure (1)..(353): unsure at all n locations
agctngcttatggggcttctatggaggctggatctttgagcttcgatgaggtcctttaatggagattttccaccatgaagatgcagcggaagacaaaggagaagaggtgagaggaggcgccatccactaaggaataagccacggaagaaggagcttcaccaccaagatgagccttggataagaagcttgcagaggatgcttcaattgaggaaaagaaagagggagggaaagagggagggaaagagagaggggagagcatgaaattgaaggaagaaaaagggagagaagttgaactttgagttgtgtctcacaagactctcattcatcagagttacaacaagtggtacacatgc

SEQ ID NO: 23201 - DNA, 439 bp, Glycine max
  unsure (1)..(439): unsure at all n locations
ggccacccagctcgcctaggcgagcagggttgctttctccagaagcaacagccttctggaggaatcttctggagggcccaagtgggcctggttgctatttgcacccccatttttgctaagtacacctccccttgcctttttttggtgattctttttttgtaaagttacggaaacttacgaatttcgtaacgatacttgttttctttccgtaatgttacggaaccttgtggattacataatcattccctttntgacttacggaatgttacggaacctcactaattgtgcaacgatgcttccatttgatttccggtgtgtcacggaaccttacggattgtgcatcaatattttcttttgctttcggcatgtcccggaatttcacaaatgcctaatgatgggcgccaagcacctcacaaggaccaaacaaaaagtgcatgtc

SEQ ID NO: 23202 - DNA, 217 bp, Glycine max
aaacatcaatggaggtatataaagagagagggggggaggggtgggaattgaacgacattatggagagaagctgaactttgaagtgggtctcacaagtctcacattcatcaaagttatgacaagtgttacacatgctactattttttgcctaacacatgggaagctttcttgagaatcaaggaatgcagttttcttgggaagctaaatgaataaagct

SEQ ID NO: 23203 - DNA, 452 bp, Glycine max
accgactacaacattgagcaactagaatatcttcaagacatgcatataacataaacatcttttcgaagataaactatttagactttgagttagtcaacactagatatgatattaaaaaggaaacaaaaagacggaaaccatgtcttcatagtcaaacacgcatatccataagtttctaaaaggaaaggaccgcctagccatcagctgccacaaatataaagttggagatcatcacagacatgaatcacagtgcaacaacacaagggtaaacttacaaaaaacaagcatactagaataatataaaacttaacaattaaaacattatagaataccatcatatatagaacataacatgtgaaaatcatatataagcataaatcttaaaattcacataacaaatgtaaggtctcaccttgttgaagttaaaattaaatcattcaaaatttttctta

SEQ ID NO: 23204 - DNA, 369 bp, Glycine max
  unsure (1)..(369): unsure at all n locations
gcacggctggacatgatatatgtcanggtttggtttagttaaaggataaaaatggaatgtcccacattatttccatgacacaaatgcaacaatgatgatttggaaattttatgcaaaactagtcatgcatgcacctatgtcgacattcaagtgtcaaacttttatggtcatgtgatgtcagggctcaggattcatttcctctattttagtcaacccagtgtttccaaaatatgttcttttatcaatttgtgcattcatccaaatctattttgggtgttcaaaaaactttcacggcatttacccttcaggcgtacacattttttttcaaaaactgggtatgatcagtgaattctttcaaagaaaagttgg

SEQ ID NO: 23205 - DNA, 436 bp, Glycine max
tcacgctgctcaattgctccaggttgctgcatggaatggcaaaggtctgtatggcggtcagcagaggagcacaaaccacaaacccttgcgacaggtacagatttctgattcaaggccagctgggttaccaagttaaccaatgcatccagtttgccttcaagcttcttagtttcagatgatgcagatgggtttgtagctacctcatgcactcctctaatgactatggcatcatttctggcgctaaactgctgggagttggaggccatcttctcaattaaatttctggcttcagcaagagtcatgtctgcaagggctccaccactggcagcatctatcatacttctctccatattactgagtccttcataaaaatattggagaagaagctgttctgaaatctgatggtgggggcaactggcacatagtttcttaaatc

SEQ ID NO: 23206 - DNA, 295 bp, Glycine max
aaattattcaatcctaccccgcaagggcattggctagaagactccaagtagattgggctataaatccaaggaaaggccctaaggttctcatgagccttaaggtagatttcgagcccatgggctaagtatgagcccgcttatctttgtaaatattaaaataagttattccttcgtctaggccttgtattttggccattctagtagtataaggttttaaccttgtatttcggggcattttgaactgtgtttgaaataaagactctttttttgtattttcatgttttttgtcatgggg

SEQ ID NO: 23207 - DNA, 409 bp, Glycine max
  unsure (1)..(409): unsure at all n locations
tgcgaactataccttcgaccaaacacgactgtttttaaagtgggttgcagcaccggctccgcttccctaaccgtactggaggcggttgccgtggctttgtcctctatggttttctggagttttaacatgacctccgagatggaagccatttgatcttttaaggccgatagatcggccttcatctgttcttgcacaccctcttcattatccatttttctggatcgagtgttataggggtgccttggtgttttcttagttatgatgaaattcctaaagaaataaacaaaggtgagtatgccaccaaaacatgaatatgcaaatgaatgatcggagcacttggatccacccaaaggttnttaggtaacgtgatgagtccaaaacttctcattttataaaaagaacaaagctt

SEQ ID NO: 23208 - DNA, 352 bp, Glycine max
  unsure (1)..(352): unsure at all n locations
tgggctttcactatgtgttgaaatgagtgagccaaacttgaattgagttgaacacataaggcttgagtttgactaattatctctaataggcttaactttggcatacataacagtctagcttggcgagtctaattaaaagcttgcttaaagacgtctttgatcaattaattattttaaaatctagtgaaatactaactaaaaaaaagaaacttattaaatttaatatgagtaatgtacaaatccaaaaataattgataaacaaaatcatattgaattcaagtcgtttaaataccaagaatataataaaaatgaaanaaagagagcatattattaaaaaatacttacaaagaca

SEQ ID NO: 23209 - DNA, 324 bp, Glycine max
tgtggtccctcttcacttacggtttcggctatgttttttctgcgttttttggtgtagtccctactagcttaccttttaagtgccatttttccggtgtggtcccgttgctgtgttaaagtgtggttttttgaagttgtgttgttgtgtagttggaacgtgctgttttcatttcgactcgaccgaggtatgaagtgtttttcgtttagcttttagctttttatggaagaagcttttcctgagaaatttgaacatacggaagaagttcttccataggattcatatggaagaacttcatccgtaatgcaaaagttatacatgcggaag

SEQ ID NO: 23210 - DNA, 323 bp, Glycine max
gcttacccccactattatctacaacctttctccaaacttatcaatggtaagaaaatgacatcggcagaaatgcagttgagaagagaaaggggcctatgctttacttgtgatgacaagttttcccctagccatcggtgtcctaataagcaatattttgttccacagtgggaagaagaggatgaacctgcattacaaccagatccaccagacgaagttgagacagctggtgaccctagtttgcaagatcatcatttgtcttataatgctttaaaaggctcatcaagtcttggaacaatgaagtttcaaggatcaataaatggatt

SEQ ID NO: 23211 - DNA, 423 bp, Glycine max
  unsure (1)..(423): unsure at all n locations
ttacatgcatgtgcacaccatatttactaaacttattatcaactgatgcaatctatttgattgaaaagaaaatttatactactcttataatgtagtgtacacctaaaaaaataatataatagaaaatagtgcttaagccattcaagtcaagtcattttgaatctcatcattagtatgatacatctatgtgtcaaagagaaggagaaacatgcatggtaatgcataacacaacaaaacattataagaaaacatgctttctaaacccaaccaaggtaaaaatgttttcatatttcatgaaatagcatgacttcctatggcggaacaatgatattaatntggtgagtaagtcttgagaatgtttagttaattggttttctgaatntgaaaatattactcgaaatacacaaatggtctcatgaatgg

SEQ ID NO: 23212 - DNA, 448 bp, Glycine max
tgaacttgagcgatgacctgaaccttgggccggtcccgaagaccgcgttctctggggtgcttttggggttaaaaggaaaacagaaggtggaccaattgaggagaagatagggagaagtgactttgggggtgtatcaaagactctcattctcaaggtatgacatgtcctacacattcttctatttatggactagagaacgcctgcttgagaaagctttcttgataacaatttgccttgagacgcggttttgagaaaacttccttgagaagctatgagcatatgctacacacaccgcttctgataactaaactcacctccttgagaagctcccttaagacgatccctaaagaagctagagcttatctatacacacctctctaatatctaagggtctctccgtgagatgagaagctagagcttagcaactcaccgcctataatatctaagc

SEQ ID NO: 23213 - DNA, 441 bp, Glycine max
  unsure (1)..(441): unsure at all n locations
tcagaccaaagcaacacanaatctatgtatccaaaacccctcaatttaatggattttcaaggtttgagaagtgaaattgagaatggggtaaatttggagcaaactctcacctcacacaagtccataacatcaatttaaacttgctcaaactggatttacacctaaaattccaccgaatcaaaatttgactcctcaacacccaaattttaccctagaaatggctctttgttcactttggtcatttgtttttctctctagcacagcccaaactttctcataagtcctaaatgacatttcaagctaggattaactcactttaacctccaaataccactaaatccagatttggccttccaactctcaaaacctcactctttttccactcataacaccatattctcactntctaaccctaggttaattctacccttcatctctaac

SEQ ID NO: 23214 - DNA, 549 bp, Glycine max
  unsure (1)..(549): unsure at all n locations
tctcgcctcgccaacgactcantaantcgaaacactatantgtagatttgtanttactcacacgattacgagagattaataccgcgacgaagcaattttgagaccgttgtagctcctaccaggacccgngatactcttagtgatctgcagcatttagctcagagaaaggattttcctaattctctactacatcatcacctctacaagatcttgtgaagaataatgcggcattccctcgggtgaaaaacaaaagcaagcctttgctttggacaaagatatgcttactaaggcacctattctagctcttctaaactttctaaaactctcgagctacaatgcgatgcccctgaagtgggagttggagatgcattgccacaaggtgggcactctattgcttatctaaatgaaaaacttctagtgccaccctcaactaccccactatgataaaagtggttgcctcaaaaagtcctcaaactgggaacatacctgtctccagaatagacattatgtgatacccaaccttagtcactaaaggaacagcagtaaacc

SEQ ID NO: 23215 - DNA, 398 bp, Glycine max
  unsure (1)..(398): unsure at all n locations
ngttcacatttcgttntaccaattatacattatgaaatctcatttattgaccattataaatatagtaaaggcttatctaacaataacttcaaaagctccattaaacaattatatggacaacaaaacataaaaccaacaagctgtaacacaattaaataattggtatttgttaatgatgcttaaaccaaagaatagcaaggcaaactaaaatcactaacaatcacgggcaactaacacctaccttttggtaaacaataaataatcttgcatttttattcaaaaaaataaataaacacggaaaaaaatattgcttgtatgcaaataattaataaactcacctaaactcacctaggcaatgttatcatacttggatnggtcatcaactcgatcggagtact

SEQ ID NO: 23216 - DNA, 436 bp, Glycine max
  unsure (1)..(436): unsure at all n locations
agcttccgatatgaaataagcgcatatactataaaagagtaatagacaaatcggaagcagagtaaacaaaaataccatacttgagtgttctcaaaaagtgaatgaggcttttagatgaggaatcatttgttggattgatatataacccaacaaatttattggaaagatggagcatttatgataacagtatatgcacacgaaacgttgagaatccaaagtgcacaggaacacatgtagactccaagcattcatttcatttatgaactttggatatgtagaatcattgtcggatgataaggttactcggattgngtgcaactttaggtggaaaaaattacctcagacttaactcactttgatattgttttctaatattatatgaatatattatatcaaattgtagtaagattaatagttagtatgtgaattgcgtcgt

SEQ ID NO: 23217 - DNA, 445 bp, Glycine max
  unsure (1)..(445): unsure at all n locations
ngacccttatgagtaagcttggccaaaggtaaagctatcttacaaaaaccttctatgaacctacgatagtaacctgttaaaccaaggaaactcctaatctcaaacacttacttaggactcttccaacttatcacttcctctaccttaaaaggatctactgatatccctcccttggatataacgtggcctagaaagctcacctcttctagccaaaaactcacatttggacaacttagcatacaattcgttgtccttgacaatttgcaacacaacccttagatgctcctcatgttcctccctagtcttggaatacaccaagatatcatccatgaagaccaccacaaaactatctaggtagggatgaaagatcctattcatgtagttcatgaacacactgacgatgttggtcacaccaaaaggcataaccaagtactcataatggtcg

SEQ ID NO: 23218 - DNA, 440 bp, Glycine max
  unsure (1)..(440): unsure at all n locations
agcttacccccactattacccacaacctctcaccaaacttatcaatgtttagaaaatgacatcggcagaaatgcagttgagaagagaaaggggcctatgctttacttgtgatgacaagttttcccctagccatcgttgtcctaataagcaatattttgttccacagtgggaagaagaggatgaacctgcattacaaccagatccaccagacgaggttgagacagctggtgaccctagtttgcaagatcatcatttgtcttataatgctntaaaaggctcatcaagtcttggaacaatgaagtttcaaggatcaataaatggatcgggagtgcagattctactagataatggaagttcagataattttctccagcctagactatctcaatgcctgaagttacctgtagaaccaattcctaattgcaggttttggtggaaat

SEQ ID NO: 23219 - DNA, 453 bp, Glycine max
tttacatgcatgtgcacaccatatttactaaacttatatcaactgatgcaatctatttgattgaaaagaaaatttatactactcttataatgtagtgtacacctaaaaaaataatataatagaaaatagtgcttaagccattcaagtcaagtcattttgaatctcatcattagtatgatacatctatgtgtcaaagagaaggagaaacatgcatggtaatgcataacacaacaaaacattataagaaaacatgctttctaaacccaaccaaggtaaaaatgttttcatatttcatgaaatagcatgacttcctatggcggaacaatgatattaatttggtgagtaagtcttgagaatgtttagttaattggttttctgaatttgaaaatattactcgaaatacacaaatggtctcatgaatggaacgacttcctatgctaagaaataagagta

SEQ ID NO: 23220 - DNA, 532 bp, Glycine max
  unsure (1)..(532): unsure at all n locations
ctcacaattatcatcattctcgtcttctganatctaatctttccaagagcgtagaatgatccctgaagcccggttattcattgaaccccgcatcagctaccccccttggctcctacctcttatcaagcttatgcaagtcttctaatgacaacggcggtttcgcaggcgataagaaactgggcctatgctctactggtgatgacaagcatttccctagccatcgttgacctaataatacatcatctctgtcccgcaatgtgaagaaaatgatgaacctgcattacaaccagatccaccacacgaggctgaaacatgtgttcgaccctaatcgcaagaccatcattcgtcgtatcaggctgtagaagcctcactagtcttggaacaatgatattttccaggaaccattgattggattgtgaatgccaattctactagnaattggtgagancacatcatctttgtcttcttagactatctaatgcctgtagatcccgtataaccattaccatttgcagtttggaggaaagtaacg

SEQ ID NO: 23221 - DNA, 405 bp, Glycine max
  unsure (1)..(405): unsure at all n locations
nttacatgcatgtgcacaccatatntactaaacttagatcaactgatgcaatctatttgattgaaaagaaaatttatactactcttataatgtagtgtacacctaaaaaaataatataatagaaaatagtgcttaagccattcaagtcaagtcattttgaatctcatcattagtatgatacatctatgtgtcaaagagaaggagaaacatgcatggtaatgcataacacaacaaaacattataagaaaacatgctttctaaacccaaccaaggtaaaaatgttttcatatttcatgaaatagcatgacttcctatggcggaacaatgatattatattagtgagtaagtcttgagaatgtttagctaaatgtttttctgaatttgaaaatattactcgaaatacac

SEQ ID NO: 23222 - DNA, 307 bp, Glycine max
gcttctaactatcacgccttggggtgacaaacattatgtgaaatagacttaatggcatgcttgcttctctttcttttataaattatacactgtgttggatctggagatggagtaggaccacctaatttagtgctacttcaataacgtctaaaagctatacaacatcaaattatagtttataaatgcaaatttcagcaacaaatctcactaacaaattatatataattgaaatgggtaattgacagtagcaacaaatgactctctactacaatatcttcatgcaaacaacaattacaatatcaaaaga

SEQ ID NO: 23223 - DNA, 389 bp, Glycine max
ggcttctgcacaagggtcaatggtacttagacacatgatgctctacacacatgactggtcacaaagactggttcgtgtgtctagatgaaagaatgaaaagcaaagtgagatttgtaaatgacagcactatgcttgctgaaggaattggaaatgtcctgattcataggaaagatggtagagaaacttgcatagaggatgtactttatgttccaagcataagcagcaatcttctaagccttggtcagttacttcagaaaggctttaagataactatgaaggacatgatgatgctggtatatgacaaaaccagaaatctaatgataaaaacaccattgaccgaaaatagaactttcaaggttggaacgcaagcacttgagcatgaatgtctt

SEQ ID NO: 23224 - DNA, 128 bp, Glycine max
gctcttttttttacagaatgatttctgaaccacctttggacagtggccttaaatatcttaagaggggggggcggtagttgtgatgacaagttttcccctacccatcgttgttcctatataccatattt

SEQ ID NO: 23225 - DNA, 452 bp, Glycine max
tccttaagaagattcctaaagaagctagagtttagctacacatacctctctaatagctaaactcgcctccttgagatgagaagctagaacttagctacacaccccctataatagctaagctcacccccatgacaaaaaaacatgaaaatacaaagaaaagtccttactacaaagactactcaaaatgccccgaaatacaaggcttaaaccctatactactagaatggccaaaatacaaggcccaaacgaaggaaaaacctattctaatatttacaaagataagcgggctcatacttagtccatgggctcaaaatctaccctaaggcttatgagaaccctagggcctacccttggatatctagcccaatctacttggaatcttctgcccaatgcccttgcgggataggattgcatcacaatttctcctctccccatctgaagagaaaacaaag

SEQ ID NO: 23226 - DNA, 411 bp, Glycine max
acagaataatccgaaaatgtcaaagaatcggacgttgaaaaagcataacaaaactttctgtgattggtttaaagatacaatctctgcagatgagaatgcttcagaaacattaagaaaactagcagatgggcctaaaagaaatgttataacctggcaaggatacgacataaacaggtattcattttacacaaaagcacaagatgacaaaagtacaatgcagaacaacggggttaccctaagggctgaatctcaacactttgcaagtgtcaatgacgccaatccctgtgtagcttccatcctttactttgggttcattgatgaaatttgggagcttaattatgtgaaatttacagtatgtgttttcaaatgtaaatgggttgacagcaacaccggtgtgcgcaccgatgatat

SEQ ID NO: 23227 - DNA, 408 bp, Glycine max
  unsure (1)..(408): unsure at all n locations
nttattgntgttgctaccctttctaccacgtctcatattggtatgtatttgttaggagaattttttaactgtcaaatctaacattcctgttatactattacatattgttaatgactaaggatacctactttatcctttcactttagaggagccaaatcaatataggtttcaaatgaaccttctgcttaaacttccattacctcttccttcgtagggttgcacccaacactgaagctaatgtgggccttttgtcatggcttggcatctgtgaagctaattcaacttttcctcagaacttttccctcttgtgcttccattggtatttctattttacacttttggtcttagtcaccttttcttcctggtgtttgggattttacttttgtcacaactggtatgggatcaaaa

SEQ ID NO: 23228 - DNA, 253 bp, Glycine max
tgtcttgtatcactgcaacattgcttcattgctttcctttttcctctgcttgatcatatatgttcattctcatgaactggttatttatgatgaatatttatccctcagcttctgactttgattgcagaaaacttcatgactgtgtaccgcgtcgtaattgacccaacaaagctcgtattgggatggaagaaattgaatggcagcgtgaattttcttctcatggttactgtgctcctctatttattgctgtata

SEQ ID NO: 23229 - DNA, 389 bp, Glycine max
tttattcatctcggtgatgacagttattatctaatatttttatctttctttttccttgatatacgttaaaaagaaaaacatacattgaatgtacacaaatttatttccagtaatggatgatgaatatatacgttgttcagtttaacattaacacgagatgaatgtgttatgtcttcttggaagggtagttgataccaatctgtaatcgccaacgcacatacatgatggtgtttagcagcaatagtttgcaaaaggagactttaaagttcaactaaatagctgctttagcaaaaaaataatggcgtaagatagagtaaaacatgactcatacacctttctcatgtggaaagggacttgagtgttgttgtgtaacgcccttaactcactta

SEQ ID NO: 23230 - DNA, 500 bp, Glycine max
  unsure (1)..(500): unsure at all n locations
ttgagacccttgaganccngnttgatncctttgaagnacctgagatcctcagagaccacctgaggcatgccagcttgctttcatatgctgaccactactatatgagattctcttcaggcgattcatataaatattttcctctaaatcaccattaagaaaaggtggtttcacatccatttgttgctactcaaggtcaaaatgagccactaatgccacaatatactataaaaatcttttttatatacaggagaaaaagtctttgtgtattccaatccttctttttgagttaatcccttagcaacgagtatcgccttatatctatcaatgatgcctaatgaatcccttgtggatttaaaaagcccattacaaccaatggtcttgtgcccattacgcaacgtttcaaagttgcaaactctgtaactgtgcatgaaatgtatctcatccttcatggcataataccataaatcttgactctctacaactcaagcgttgatcacaag

SEQ ID NO: 23231 - DNA, 383 bp, Glycine max
  unsure (1)..(383): unsure at all n locations
cttagggtaattntgttatcaatgccttatactaactacttatcacagttcaacatgcaaagaacttagaagttagaacttacaacattggaccacatgccaactataaagagtagaaagcaactcatagagatgcattcattgtcaacagaattaatggcaaaagaaaattatatgcgacaatacatttgttggtatttgtaagtttattatcttaaagtaggataatatgttgtaaatgtatatatggcagtttagtttgtaattaaattgtacttatttaacgtttctccagcaggagaacacattgtgttgggctgattctctttgagttcaacatggtatcagactaccagtctagtgctttgaggttaacattgatg

SEQ ID NO: 23232 - DNA, 571 bp, Glycine max
  unsure (1)..(571): unsure at all n locations
tctactctcgaacactcaactctctctgtctgtgttccggatgaacgtatcaactnctcctgacgacgacacccganggncannnngtttgaaacctttgaggaccgtgctaggacccccgggacctctacagncgacctgcgagcctgcaagcctcttatcaaagctattctgggtttaagccccctcctccttggcgcattccctaaaggatggtgcctcccctctcctctactccctttacttcttctgcatctccatggggaaaaatcatcattgaaggacctcattagagctcaaagagccagcctccatagaaacttcacaagccagctctcatcaggtgatcccaccgaaacctgaggtcatgggctgatccccaaagaatttgtcaacaaacgccacccttggatcaaaaggaatcctcaggagtctgcatgagcgaccaaattagatgtaccctattatcacaatcgcgtctggctttttccatgagctcccgtcgaatgaagtttctctcaaaggacaagaacaaaccctgagattcctcaaaaaaaaaaaaaaacaaacn

SEQ ID NO: 23233 - DNA, 366 bp, Glycine max
  unsure (1)..(366): unsure at all n locations
actctcgctctacaaacccatgacgtaaaatcttgaacatttcttgtctcataacattcttgatgaacgggtgtttgacatactattaaatatataatgcattcttatattaatggcaacgaaattcaacatgaagagttagaaaacaacaaccaacaaaaacttgccggatagttcaatcttgcagaagaaaaaaaaaaggttntataagcaaatggttgcattgtcagcggtgatctgactgataagtgaggatggttaggctgaaaaactgtttcggcaaaacacaatggagactgctgatcatggaattgaacaacatatgaaagggtgcgtataattcgcacatgtgttatacaacatgct

SEQ ID NO: 23234 - DNA, 434 bp, Glycine max
  unsure (1)..(434): unsure at all n locations
agcctcaaagaggtccaggaaggacatggcagccgatggaactagttccgctccggagtatgacagtcaccgctttaagagcgctgtacaccatcagcgctttgaggccatcaaaggatggtcgtttctccgggagcgacgcgtacagctcaaggacgacgagtatactgatttccacgaggaaatatgacgccggcggtgggcatcactggttactcccatggccaagtttgatccagaaatagtccttgagttttatgccaatgcttggccaacagaggagggcgtgcgtgacatgagatcctgtgtaaggggtcagaggatcccgtttgatgccgacgctatcggccaactcctangatatccgttggtgttggaagagggccangaatgtgagtatggccagaggaggaaccggtctgatgggttcgatg

SEQ ID NO: 23235 - DNA, 389 bp, Glycine max
tcctccacatgagtttattgcccgaaggcttgaaattattcagatatcctcattttctgttttagaaggtgctgggagaaccctcaaaggtagggatcttatcaaagtgaggaatgttgtactcccaaaaattggtttcctcgaaacactataaaggggtctcttgagtagtgatgtatctttatggtaaaacataatcaattaatttttcatggtgaaggtaaaaacaaaaaatagttgcttctacttttttatggtatcacctaattttatgcgatagaattgattcttatgtgtcatccaaacatgatagtagctcttttacatttgggatgtataatagggtttgtagttagaggttatttaagaatggatgttgtgttcatatg

SEQ ID NO: 23236 - DNA, 401 bp, Glycine max
  unsure (1)..(401): unsure at all n locations
catgcaagcttcttgcgtagccgctctnggtgcttataatatcccaaaaacaaattcctcttattactagctattttgaattctttagttcctgaatgtacaaccttcaaattgttgctcgttcccctctttgttttctgcaaaaaagaaaatcaatatcaaagaaaacattgagagaattgtcatggttattattactcgaaccaaaaggaataacatttaaacaagtcattttatttttagaatgtgaaaactctacatatttatggagaacatggggtatggaggcacgtaagcatgtgaataccacaagtcattntctccaattcaagggcttgattaattgctctangaaaaaagcatacatctggtatattgtttgggttgcagctgttttgagc

SEQ ID NO: 23237 - DNA, 214 bp, Glycine max
acatgtggatctgtgaggcgtgctgccgattgcgtacacgcggaatgaacgtcctcaatgtgatcatggacccactatctcttgttggacacctacacatgagctcacgtgctcccatgtagcccatatgactttgtgtgtaccaccgagaggacatccatatacaaaactttcctgaatccaccaaaaaacagtaaacgactcatactccctc

SEQ ID NO: 23238 - DNA, 434 bp, Glycine max
  unsure (1)..(434): unsure at all n locations
catgcaagcttcttattcttttgtttgattaagtataaaatgagataaaagaaattgatatttgtgaaataacatgaatacccttaaaaaatcaaatgtaataaaaaaaataaagcataaaatatggtctcaataataaaaagaaatccttgtcaagttacaagataaatttaaagagttataataaattaaacatatattttaccacctaaagtaaaacagaacaaaacaaaatcagcaatattttacaactcgtggatatatatttttttaaacctcanatccacacacccctttttttcaagttagaaagaaaccaaatttgataaaagacgaatcaatttatttttcctttggtaattaatttcctttcgtaaaatttaagattggaccaagaagagggagagattaattagcaaactttgaccactctc

SEQ ID NO: 23239 - DNA, 449 bp, Glycine max
ccttttcttttattctttgaaagatgaatttcatggtgcattgatattgttctgttgttgcatgtgagtgtaacacatggggcgcactctgcaccgcagttttcaaatctcattaacaaagaaaaaacaaggtatgaaatgtgacaatcactattcaaggaacccgtgcaacgcacgggcattgttctaaatattttacaattcgtttccatttatttcattcgtcatggacacattttccatctcaacagctatgcattatctttgatattgtacaacggattggtatcacgcttttaagagacaatttcaaaaggtatatattaattatttcttttaggtgatataaattatcaattgttgaagtaaaataaatattaattgtttaaccgtttacatatcgacaaagtaagcatatttgtgttaatatttatataatataaaaagaa

SEQ ID NO: 23240 - DNA, 306 bp, Glycine max
cctcgaggctggagcttagtgctatgtaagagctctaaatatacatgtaatttgtaacgagtaaaaatacactacactcagtctataggtagagagtgactttcaagatgaatttcacatcttacctaattaaggaatctaataacaactaattaattatggtcttataataaaagacaaaataagcgacacagttgggattattttgctcagctagtattaatttataagagcatcttgcgttgctaggatgaattcttaagagaatggctaatgaccttcgaggtgattcttacggagatgatt

SEQ ID NO: 23241 - DNA, 380 bp, Glycine max
tgagctccctagtattggacccaccaaattattatctttaagatacatgttcctcaaattagcaaatgcaagtgatatgattcttgtcaaattttggtttgccaaattcactgtaataaccttcctctttgaacatacaatgaaactccgataatattgaccttgatcttgacaaggatcatccccttatcagtcaaacaccaagttaaggggatacccaaaatctgaggcaatatcaagtaaaatggtgacccgagaatcataaggttgacaaaagctattgtgatcaaaaggggccttcacacccttcccaacggagggaacaagaccatcaagcttattataatccaaagaaacattcttaaggctaggcaaggaca

SEQ ID NO: 23242 - DNA, 370 bp, Glycine max
  unsure (1)..(370): unsure at all n locations
ctagtacgcgtaaagtctcacgattgtcacttgctcatgcaacaatttttagccttggctatacgagacatctngccaaacaaagttaggttagcgataactcgcatgtgctttttctatcatgctatatgtagcaaagtcattgatcctatcaagtatgatgaagtggaaaatgaggccgcaattatactgtgccagttggagatgtattttccccctgctttatttgacatcatgattcacttgattgtgtatctggccagagaaatcacatgctgtggtcctatttatctacggtggatgtacccggttgagcgatacatgaagatcttaaagggtatacaagaatctattagccagaagcattatt

SEQ ID NO: 23243 - DNA, 436 bp, Glycine max
cttgttaaaacaaaataagttaggtctcatgatgcacatttatgttacactagaagaactattataattgaaaactagacttgtattgttgcaaatctaattatgtatgcatgtacctataatatcatagatgtagctttggaatggaaaaacattttggaggttgatatgatgttcattttcttggtgtaagttgcccctattataagaaaaagcagtacaaccactaaacagagaagcgtcacttccaaacaacatatggcagaaatcacaactcaaacaatgcaagttgcacagcttgaggtgaagtgacccaaccatgagtaagaaattcacttgggcttcagccatagaacgttgtgaatgaagaaaggttaaacttgtagccaaaaagaagtgcattactggacaatgacttttgtaaaatcatagttta

SEQ ID NO: 23244 - DNA, 405 bp, Glycine max
  unsure (1)..(405): unsure at all n locations
gccatttcccttatagtcctctcacggggtggaggttgtgccatgttctcagaatgtgcagaatcagaatgatcagaatcataatgctccaaatcaggatgttcaaaatcaccaataacagaatgcacagattcaccagtaatggaatgctcaggatgatcaaaaggtataaaatgatgcctaactaatctatgaaatgtcctatctatctcaggatcaaagggttgtaagtcagatggattgcctctagtcatacactacattcagcatgcacaactagttgtcttgtcatgtaaataaaggtgcacgtntgaactacagctaccctcaagtgatatccaaatgacttgaaatttgtgagcaccctataaatgatagaagatacaccaaaattcaaaaaaaatc

SEQ ID NO: 23245 - DNA, 389 bp, Glycine max
  unsure (1)..(389): unsure at all n locations
agcttattttgagacccatgaatngattgtctaacgcatgtcatgcgtccttcaccatcgagtctaaagccccatggattgattgtctaacgttgttcgtctatcctccaccctcanatcttattcggagacccatgaattgattgcctagcgcagttcatgcgtcctcaaccatcaagtctggagccccacgaattgattgcctagcgttgttcatctatcctccaccctcaaatcttatttggagacccatgaattcattgccctgctcggtttatgcgtcctacaccatcgagtctggagccccacgaattgattgcctagcgttgtaccctatactccacctcaaatctaatctgagaccatgaattgatacctagcgctgttat

SEQ ID NO: 23246 - DNA, 436 bp, Glycine max
  unsure (1)..(436): unsure at all n locations
tctttggaccttgaacaagccatcaatttctcttttataaccatgctatgtgctcgcgactggtccctttcttcccttcgcaacttgagttcactattgctaccccatagagctccgcgaaatttgttccggccatactcttccttgcgagccctcttggtctctcgttcaagggctcttgcggtaattgcattctcttcccgtaacccggcacactccttccgaacgtgtgtagcagccaacttgaacttctccttggcgagttgtgcctttcctaactcgcttttgagagctaggacttcctcgtcctcttncggtgcttcaaaattctcttcgctgacgacttttaacttggcgagccaatctaaacctcgtatgcgaactttcagccattcgtggtacccaccaatgatgccattacgaacgcctctaagct

SEQ ID NO: 23247 - DNA, 364 bp, Glycine max
atcaagttttccatcaagaagtgcctgaggaagtgcttcagcaagttggtttcgcgcgaagaccaccacgaagcgatgatcatgttgaaggacatgccgcctgagccaaactggtaccaagggaagtggaggagggcaaggcacaatgggaacaatgaggagctcaaaggagagaataataacaacaacaagggagttcaaagaaacagaaccattgccttatcaaggcctttggatgggaatggaagaataattcatgagaagatggtgaacaacaacaaggtgatgaaactctctggtcctctgatgggaaaatgaatggtggtaacaatgagagagtgaatgtgtatgcaaatgcaaatag

SEQ ID NO: 23248 - DNA, 439 bp, Glycine max
  unsure (1)..(439): unsure at all n locations
nntggtatttataggccttcttcaacaagtgttcattgtctttaaacaaatagctcatgtttgaagtttgtggtcgttagagcatttaatgtttgcattaaatgcacatacttcttcatgctggaaaatctctcttgttagctttcgtgtagaacacttcatcaagaaactatttcctttgcgttagagtaagtctgtcacagtagagcacgtcttttgatacttttgatctttaaagtgatgaaagttcctttgcgctttatgattcgacagatcctaggagaatgtaatctaagatagttcctacaaaatggatcaacacaaagtactaaattagattctcaaatgcacactttaatgatgtaccatagatacatgaggcatagtctgatatcgcataagacacaatttttaacctttgtatttatttgcatccaat

SEQ ID NO: 23249 - DNA, 348 bp, Glycine max
atgtggaagggacctttggagtgttgccatgagtctgcgcaaataaaacaaattcagttaagataaagaaattaaaacaacatataagtttgaaattgtaaatatcaacattaataaaatgtattacaattaatttaatatgatatacattactttggtataccgcagttacgtaggaatgttctcccataaaccttcataatgatcattacgatttgcatgtacgtcatcttcctcatgttcagcacttatggagggcatttgtagggagaaagcagacatcttattaacatcaagtgttgaagaatcaatttggtgaccgataccacttgttcttccttgtagaac

SEQ ID NO: 23250 - DNA, 343 bp, Glycine max
tgaagcattattactccattgctttccgctccttttaccacgattagtaaatgctcctcctcttttttgaggaaatttaccgtggttatttttcttatctccgccatttttagagaaattaattttagattggaatgtttgctctagtggctgcttaaatcttttcattctagattcatgagcttctaaagagtccattatttctactagagtgagtttagataaatcttttgattcttctatggcagccacaatatgatcatattttataggaatacttcttaatattgttagtattatttttctatcttcaatcgtgtccccgtaacttctaattttgatt

SEQ ID NO: 23251 - DNA, 479 bp, Glycine max
  unsure (1)..(479): unsure at all n locations
cagcancncnnttttgagccccttgaggccctggaagacccggagacccctgaggcacgcgcggcatgcatcatttaaggcccgttctgctctctttagtgaccagcgnnggcataccgagcttgcgctcattgcatcccccctgggctcatactctaagacactctctaagaagatgatctgctcaacttactaatcacaccaatttcctccactcagtgcaccggttttattcatctgcttcgcatgaaatgcacgcgctaccgcccagtccagccgtgcgcgcgtagcagttcataaagacgctaagcacactatcacgattaaggccacctcttgcctgaaatataacgtagagaaggagtgcggacacgatttggagctctcatgcttatgatatctataagagacaaggtcaaactacaagatttatgagagatcttgttgcgagctcatcccagaaaacagactttgagcct

SEQ ID NO: 23252 - DNA, 411 bp, Glycine max
ttaagcaagcatataggacttgatgtccctctcttttctcttctatttcaccaatattaggtgaaataggcttactcaaagttttaggaattttacggaagcattacaaaagcttcggaagctccggaaaccattttccaacaaaacgtggaggatcttgataagttcaccccctcccctttgctaaatgtactcctttttatttacacacccatgtttactaaatacatcccctctgccctttttttctgattctttttctgtaacgttacggaactttacgaattacgtaacgatacttgttttatttccgtaatgtcatgaaaccttacggattacgcaatcgtcccttctttggcttctggaatgttacacaactttacggattgcgcattaacacttccttttaac

SEQ ID NO: 23253 - DNA, 104 bp, Glycine max
  unsure (1)..(104): unsure at all n locations
tccatggcgatgcaaccagctcgtttaacgtcaacaataacaggcctaaaaaaaatactcctccgcctgcacctattccatactggtgaacaattaagtatccn

SEQ ID NO: 23254 - DNA, 331 bp, Glycine max
aacttagcatctctatctaacacaatggtcctaggcaaaccatgcggtctcacaacttccctaataaagagttttgagatgtgggaagcatcatccaccttgtggcatggtctaaagtgtgccatcttgataaacctatccaccaccacaaagatagagtctacacctctttgggatctaggaagcccaaggacaaagtccatactaatgtctacccaacgtgcataagggatgggtaagggtgtgtatagcccatgaggcatcaccctagacttggcttgtaaacaagccacacacctaatgcaatgcttatggacatctttctttatat

SEQ ID NO: 23255 - DNA, 436 bp, Glycine max
  unsure (1)..(436): unsure at all n locations
tgttttaatgcatataaaacaaaaactaaaccatgatcaaaacacaaaccaaacccaacaattacagctgcaagaaaaaacaaaactctgattcaattgtaagtaaggtaatatttctacaaacctttgtgtaccatcgttacgctgcacaaacagtcccatcaatggtatggcatcagcatcatgttcttgtgaagcctgcgcattggtaacagcattacttccctgtgtgctgacacgcgcacctagttgttgtatgtccggctgaatttggagtgcctcttgggatcctttatttgacaactcttttttaatagcctctttcaatgcattggtcattatttccaagctccttctattttcctcttctagctgagtcctcaattcttccttaattngagtcctcaattcttccctaatctggccagtcatgtct

SEQ ID NO: 23256 - DNA, 395 bp, Glycine max
  unsure (1)..(395): unsure at all n locations
ggaccttaaaactcagctgtaaggttgggtggaaatgatttgagactcttcttangtaccaaccttgtgctacaacaattgcagcaagacccactatcctcaataagagaacaatttttgtttaaaaccttgtatcttgtatgaaagatgtactctctttgggattgagttatgtcacaaggttgactcccaagaagccttctcaccattagaagattactttcttcataggggtaaacctcttcaatatgctcatcacccttggcttcaccctcactttctcttgaggaaggagaagaatgatggaagcttgcttgtggagcttctattgaggctggatctatgagcttcaatgaggtccttcaatgcttatttttcaccatggagatgcaccg

SEQ ID NO: 23257 - DNA, 378 bp, Glycine max
  unsure (1)..(378): unsure at all n locations
gaagcatgtgtaacacttgntgtatctttgatgaatgagagtcttgtgagacacaactcaaagatcaacttctctccctttttattccttcaatatcgtgctgccccctctctctttctctccctctttcttttcctccattgaagcatcctctccaagcttcttatccaaggctcatcttggtggtgaagctccttcttccatggcttattccctaatggatgacgcctcctctcacctcttctcctttgtcttccgctgcatctccatggcggaaaaccaccattagaggacctcattgaagctcatagatccagcctccatagaagctccacaagcaagctgtaatcaagtggtatcagagcacaagaacttcaa

SEQ ID NO: 23258 - DNA, 432 bp, Glycine max
  unsure (1)..(432): unsure at all n locations
tgaacgaatataagagacatcttcttcgaccttggtgattcttgactccatctcattgaagcgcatgtccacttgtaactccaaagtatcaaacctttcaccaacaaaggtttgaagaccatcgaacctgtccaaaatctttgaaagaagagatgaatcttctccatcatgtccttcttcaccaacatgtcgagcaccctttttcacccaagagccatcatgctctttttgataaccaatggatgcaatgactgaagcacctattataaaggatctcttgattggaacatagggttcagaatcaagagggatgttaaagtgttgaaggaagagggtgactangtgtggatatagaaatggagcattcaatcgcaatgccttatgcatgcgatatctaacaagatgtgcccaatcaatttgcaggcctttatg

SEQ ID NO: 23259 - DNA, 379 bp, Glycine max
gctgcagcttgaaccaacatggaagctgcttaaattcaaatggccttcttctcgacggagtttgatttggacacataatatatcgagacgctagaaattgaacgattgaacctctcgagaaattcaattggtcataacgtttcacacggatgtccgattcgggcgcattatatatcgtgacgttcgaaattgaacaatggaacctctcgagatatttaaatggtcataactattcacacgaatgtccgattcagggacttaatatatcgagacgttcgaaattcaagaacggaacctctcgtgaaattcatatggtaataacttttcacatggatgtccgattcacgcggataatatatcgtgacgctcgaaatataac

SEQ ID NO: 23260 - DNA, 357 bp, Glycine max
ttcttatccaaggctcatcttggtggcgaagctccttcttccatggcttattccctagtggatggcgcctcccttctcctcttctcctttgccttccgctgcatctccatggtgaaaaatcaccattgaaggacctcattgaagctcaaagatccagcctccatagaagctccacaagcaagcttccatcagttatgaccatttgaatttttcgagagcttccgttgttcaatttcgagcgtcacgatatattatgaccccgaatcggacatccgtgtgaaaagttatgaccatttgaatttctcgagagcctccgttgttcaatttagagcgcctcgatatattatgcgcctaaat

SEQ ID NO: 23261 - DNA, 497 bp, Glycine max
  unsure (1)..(497): unsure at all n locations
tgagggcaatgagaccttctagnncccggttgattcagttgaaccgtcgcaagacaccgganctgcctaacaagccagctgactttcttcttgcgccaagagactcttctttattttgctcaggtcaaagttgagtatgtgacaagattgtatgaccaagtgaaggtgcaaattgtaagtgaaaatgaaaggtatactaagcaatccaacaagaaaatgaaggcaatggtacttgaacctgctggaaatcttggacatttgatgacaaaagtgttcccacgaggagggaatgattttaatcttgaatctgctccaatacatgttctaggcccaagtggccgatgactgacaccttctttgtgatagaaaaaaccactcagtgggattggtgaccgcccaattgtgcaggttttaagcctataggctgagcactattactacattatatggtgctaaggtctctactttagaacgctctcagtaccagaccctaaaat

SEQ ID NO: 23262 - DNA, 317 bp, Glycine max
  unsure (1)..(317): unsure at all n locations
ntaactcggatgtccgattcaggcgcataatatatttatacacttgatattgaataacagaagctctcgagaaattcaaatggtcataacttttcacacggatgtccgattcgggcgcataatatgtcgagacgctctaaattgaacaactgaagctctctagaaattctaatggtcattacttttcactcagaggaccgattcaggcgcataatatattcagacgctcgatattgaacaacggaagctcccgataaatttatatgggcttacttttaactcagaggtccgattcatgcgcataatatatctatacg

SEQ ID NO: 23263 - DNA, 382 bp, Glycine max
  unsure (1)..(382): unsure at all n locations
gctagcttatacacaaaacacataanataatgtttgtataaaacctacatgttttttacgtggcataaacagacccaaagttgaaggggaaaaaaactggtagaaataaagacttatggctgcataccattaaagcctataactttgttttgagaggattaaagtctataacttaattactactatatcattaactcctactcgtcattttgcagttaaaaaatatactcatcatcaagtatgcacccgatataaaataaaatttatgaaaatgtttaaataaacattaattagctaggttaaattaatttccaatatgaatatatgatgaacgactccactattaaactatgattccaaatgtattacanaattaaactag

SEQ ID NO: 23264 - DNA, 441 bp, Glycine max
  unsure (1)..(441): unsure at all n locations
ntgtctntgttgttcacaatctagaagccatgtgtcttatggctctntgataattctttatggcatctgcggctgggccacatgagtgaaaaaggtttgcatattataaggtagcgaggttttcttggaaatcacaaggtggaagctcttcagctttgtgtggattgtgtctatgggaagtagcatcaaacgacgttcccaaaagttgtgcacacaacaaaagccatgttggattacgtccattctaactactgggggctttcaagagttccatcactatgaggagcaaggtatttcctttccatcatcgatgattactctaagatgaaatgagtattcatgatgaagcaaatatttgaagttttcaaacttttctaacattgaagattcttatgtagagtcagacaggttagacaataaagcatcttatgagtgacaatg

SEQ ID NO: 23265 - DNA, 566 bp, Glycine max
  unsure (1)..(566): unsure at all n locations
cactcgctcatcgtcctatnttantgagatcagtagacgattgtgtgttcgtctancttctgacaggagaggtaggcnngnagaacgtttgatgccctttcgncccgggacctaaacaccgcggctgcagcttcacacactctaggacgtgaatatctaccatggtccatatgttatttatagatgagagatctcgagttcaaatcttccattaataaaaaaattacaattaacaattaataactagcatttgttgataaatatatgtcgtaatctaccattccaccacctatatggaaacacattggggcattgtgtggatgttttaaggtgaagctatataaagttatatgatattacctcacttatattataagttacgaaatctatactcatttttaaatgagagataaattcttcttaagaatgagaactaaatttaattaatcgatagacatgttttttctataaatagtggatggtatcacctattttttgaaaccaatattctgaatgactaacaaccgtctacaataaatgtttttcatacctgaagcagcataaan

SEQ ID NO: 23266 - DNA, 431 bp, Glycine max
  unsure (1)..(431): unsure at all n locations
tgagggagaggaattagttacccttttccaatgagagcaggtgttgaaacttgaggtggaagcaatgtggccaatggcaaacttggagctgtacttgagttcatgctgggataagaggggaagactccacggtttggatctgcaccggtccctaccactagatctaaacttgtatatgtntgctgctgatcatttgtctgcaaagtaagtaagactgtaagaggattttataactgtcaaaacagaattttgaaaccacagcagtggatcagatattaactaataagcaaagtccttacagttcctacattcaatctcttgttatcccagtcataaaccaactcttcataagctaaccgctttgtccaagtgctttacaccaaaagtggaacagcatgaagttaacatcatcgctacaaatgataataatc

SEQ ID NO: 23267 - DNA, 221 bp, Glycine max
gaagtctttgtgactttgaatccctcagtgaatgggcattatttgaagacaatgatgtgccatatccattattgttccccagacaacataacatcagatggcctcagaaatttgttagtgataaatcacacaaaggccaccattcaactttataagagagattcattatacgctcttgaagatgaggagtggcaaatggtactatctaaaatagagcccgg

SEQ ID NO: 23268 - DNA, 439 bp, Glycine max
gcttgtggttgtgtaaacactaaggctcatgtgttgttttctcattcacatagaaccggtgtttcaaaaatttctcttttatcaagttacgcacacatccgagtccatttaggcatttcgggaaaatctttcattgtggtgacccttcaggtgcacatttcttttttcaaaaacctttttgtgtttcgagtccattgttggctttttagttatctttctttgttgcttgttgctttagatcttatagaaaagtctgtactctggcaaaattgttacccgagattacactttatcaaaggaaccacaaggcgtgtgaatgataagataacaatgcacaaggccctatatcttttgtttcagataaaccatcgtgatgcaaatacgacaatatgctagaagcggaaagttaatcacaatgagataacaaacaactgagagc

SEQ ID NO: 23269 - DNA, 328 bp, Glycine max
gcttctctcctttttccctataaatagttagaggagggaagaacaaaaacgttcaactctcctggtatctgtggatcacttgaaattagtgaaaaaaatcatttccgtgaagaaatatccagccgatgcgctttcgtaacgcgtctcgaaacgtttccgcggttgatttcgtgaagattctccgccatctttcgttcgttcttcggcgttcttcggtcttcaatcaataagtgtccgaaattaaacttttcaattcattttgtacccttggtggtccccacttgtatcgcgaacttttatttttatttcatatacttcctgtaccccc

SEQ ID NO: 23270 - DNA, 442 bp, Glycine max
  unsure (1)..(442): unsure at all n locations
tgtagaccacgtctnttccggttnttccgacgtttttctcaaataaacgttggtggtgactctgcgcgtattcctttcttggaacacacacccgcgagtcacgcgtcgcccaccctccgaagggtaggttgcgacaaggtccaacgccttaaatgacccccttccaagtaaaaagaatcacttgattcgccccttttcaaagaactacgtaggtctgatttccttatcacaattgaggaatacgtaggagcaagggaaacacccttgtccaccacaaaaagataaaaaatacaaaaagcgtaaaaagacataaaaagataagaaaagggaaaataaaacaaattgaagtcatatttgcacacttgattaaaggctgtcgtcccttgtgacagacgcgtggagtgctaataccttccccgtgcgtaaaaacaactcccgaacc

SEQ ID NO: 23271 - DNA, 425 bp, Glycine max
  unsure (1)..(425): unsure at all n locations
taatagcnnnttgaccctttagacccnttgatacctgaaggcccgggaacttaaaggaccgaaggctgccactatttaacaaatgcctcatttttcaatttaccttggaaaagaagcatcacagaatcaacccacgctattggcaagcatccatgggccaacacaccaatgatatgatgaggatggctcaaatctgacacaagtaacctatacttcaaattgactttcaaactatttgacttgtaaggagaataaggatttcaagcacaaatgtaagaattttttttcaaaaataccctttctgaactatctataataaagaaacatgcaagtgacatgccacaaatgacccaattttaactaaaactgcgaactacacattacaataaccactacaatacaaaacacaaactgcaaacaagacn

SEQ ID NO: 23272 - DNA, 404 bp, Glycine max
tatatttacaataactagtgagctatagcctataggtatgcaaacaattatatttatgtattggttaaatcttagcctctctcaggatgttgggtgcaactatgcaaaatcaagctttaaacaactttgattaggtatacttcacccttccattttattgtgtgatagacttgccttgtcattcaaatgcaaggactgtgtaaacttaaaagaaaaggaaaataactcaacaatttaagcagactcaaaatatatctttatgatgtaacaattccttcataacaaggaattgaagcaattgagtacattccccagaggaaagggacctatgcctgaaattgctagttggactaagtagtaaccaatgtgtatcttccattggctgtgaatggaaaacaaacaag

SEQ ID NO: 23273 - DNA, 393 bp, Glycine max
  unsure (1)..(393): unsure at all n locations
ngaacgaatataagagacatcttcttcgtccttggtgattcttgactccatctcattgaagcgcatgtccacttgtaactccaaagtatcaaacctttcaccaacaaaggtttgaagaccatcgaacctgtccaaaatctttgtaagaagagatgaatcttctccatcatgtccttcttcaccaacatgtcgagcaccctttttcacccaagagccatcatgctctttntgataaccaatggatgcaatgactgaagcacctattataaaggatctcttgattggaacatacggttcacaatcaagacggatgttaaagtgttgaaggaagagggtgactacgtgcggatataaaaatggagcattcaatcgcaatgccttatgcatgcgata

SEQ ID NO: 23274 - DNA, 472 bp, Glycine max
  unsure (1)..(472): unsure at all n locations
atggaccccttgaacccttgtagccttgggaanctcccagaccacccgcggcatgctaacgtctacctcctcgacttttacgnttttagaatttggagcccatccagactctgggtcctgactattcaccactgatgatatccgccgccgatcccatgactggctgcactcatctctctggacttatttctcgcctgactccatgcctagcgaacttcctggagtaccctcgcgttgtggacactgaaactccctgcgataaaaagcgtgaagcttctcgttggtggcactcctcttagggggtaaccaaactgggttatggcgaggacaggattttatataattcctccccctgttcccataagggatcattggactccctccttgagaatggaaactgaatctccttcctttacgagggagcaataaggaccccctcctgctgcgtagagtggcccataatactctcttn

SEQ ID NO: 23275 - DNA, 367 bp, Glycine max
  unsure (1)..(367): unsure at all n locations
ngactaggcgagttgattntagccttagtttcactttatttattagtcaattcaattaagaatgagaaatcccaaagagaaaaaatgtccgattgattttttcgcttttattttactaaaaggtattttttgattattatattattattttacctctttttttgatttccaacgtggttacggcacgaccgaacggtcggaattcattttaaccaaaattaacggatgatacaattcaaacgatcggtggaaatttattttatttttagattaagcgagaaattacttaaataaatggcttaagcacgtcaaaagggggtattaaaagcagatgataacgagaataataatacatgatacaaaatgt

SEQ ID NO: 23276 - DNA, 425 bp, Glycine max
tatggatggtatgagttgtgatcacccccttgcaattaacaaaaagattgctaattgactggcagtttaaaaatattaaaatattgctccattttgttcttgttattctttgagttccacacaagatggagattaaggttgactgatgattgtgcttttccatctggagcttattaattaatgtattctcatctgcgtgtttttgtaggagatgttgaagttttgaaggaccctgagaagccagataactccctagccagaagattaactgcaattgaaggatatgaaatggtttctattgattaaaaggatgaaccctttattctgagaaggatcaatgctgggtagtgactgaaaatgaaaaatagaaaaccaacgtaaaatctgcttacctttggtatccctacggggatcattatgcactt

SEQ ID NO: 23277 - DNA, 447 bp, Glycine max
  unsure (1)..(447): unsure at all n locations
ntannagcaacctttggagtataggtgtacaggatccatgcatcacccaccaagtttttggatctaatgcccatctatcctcaattgaatcaaatgaaccaaagtcacccgcacaagatgagaatttagagaattcttcataaacttttgtcctaacattaacatgtggaaaatatctcttaagacatttattcctttggctagaaagttcatcatctctatgaggaggaaccctatttggaacctcattaagccaattatcactatagtacctataaaaagtatatatgtatacattttagtcatactatggttgagaaagagctaagctaagccatacacattattgaaaatttgatataaaaatattaccttggatttagagaatgagctaagcaatgaagtggattacaactcttactcccacctagaataagtatttcatga

SEQ ID NO: 23278 - DNA, 362 bp, Glycine max
agcttcttgaacatgaagaatacatggtttctcttgggtttgtacacaccaagtaagaaacatcattctgcctcaacatcattctgaaatgtttggcttttgtatttaattaattaagcaaaggaggattcttgaaaagacaagcccagccaagacctggaggtaactagtgaataagaactgacaaatggttaacttgtttggcttgattagctgcttgctactagcaacataccatcttggctggactttttttcttctataaattttccttcagatatcctttaaaattaaggtctctgtcacctaccatgtgtcactgattgtttgaaaatatataagaaaatcaagaaccaaagatg

SEQ ID NO: 23279 - DNA, 441 bp, Glycine max
  unsure (1)..(441): unsure at all n locations
cttgcttctacanaaaggaggaataaataacagaaattatttgtctcctacaaaatattgtgcttgaacttgaccattgaatctaagtaactaaattttcttgaagtttttgtgattcacatattactttcatatccaagtgtggaagcaatgacttccaagattattttgatgatgccaaagaatcaagagttaagcaaattccaaagattcaagaatcaagatacaagattcaagaatcaagtttcaagaatcaagattcaagaataatcaagttcaagattcaagactcaagattcaagaatcaagagaagactcagtcaagataagtactaaaaaagtttttcaaaacattgagtagcacaagattttttcacaaaatcttttacccaagagttttactctcttgtaatcgattaccagaaggtagtaatcgattac

SEQ ID NO: 23280 - DNA, 399 bp, Glycine max
  unsure (1)..(399): unsure at all n locations
cacctgcggcatgcaagctngttatggattcaataatatgggcgtttcggcatacagaaaggtatattgctgaaactgggctgaacctgttgttggagatgttgaagaagtttcaggtgtggtctttgtatattattttgttcataactctcactgttgaccttcaaagtttctttcccatagtttttcttgttttggaggattctgatcctccctcaagttttccctcatttatctctattaattttttgctgatcaaaaaaaaaaaatctctattaatttttttcttgttggttgaatgtctatttgtaacattaaacaggcatcagagttctgtaatcagttntatcgaacatacttttcgacaattgagcaagagatatttgctgttctgacgga

SEQ ID NO: 23281 - DNA, 428 bp, Glycine max
gaccttgaaactcagcttgtacaatttgattccggctagttgtttctctagtttattatacattctcttcctaagaatgaataaaatgtttctcgaccaaagagagagattggatgaatagaaaaggagcaattgtgctaattcacgttcaacgaatatcacttcattcacaccacaaacccggagttagacaattcttctggtttatgaactttatacaggaccatacaaatacaatgcaatgaacatttcggtgatggattagaaatgacagtcacaacatttttttttttgtttacagttcttgtttatgtcaggcagattgctatctgtacaatgtaagcttgcagaatgcagggtttggcatttcattacggtgctcgttcggcaccaagtggtttgaaagtcttctgtttcccaattgcatt

SEQ ID NO: 23282 - DNA, 363 bp, Glycine max
accttgaaaataacctgagcctttgcaccctttgtgaatggaatgatctttttattattgaaccctgaacttaaatgactatctctagataccttgctttaattctaggagagcagatggtgcaaggcaatttacccctaactgggatgcaaagtgaaaggtaaagcacatcaccacacgcgactgatgagttacgtttaagaaaaaatcaaagaaagtgtgtgctattgtaataaggccaaatgcttatttaactgatcgggttgtgaggaagctcattgtattgcaaagactactcggatgagtctatgaattgtgctctcttagaatctaagcctttgaattctagaaaaaccaatgatt

SEQ ID NO: 23283 - DNA, 417 bp, Glycine max
  unsure (1)..(417): unsure at all n locations
gggagtggacctcattcattgacatattagcattgctggtgcttgggactatactatttcttaatatagatgggctagtggatctagcagcgatcgacgcctttcttgcttatcaccacagcaaggaaagcctcatcatcgctattttggcggatgcatatgatacattcaacttgaggtgcaagaagagaaatgagagaatcgtctattgtacgtttgttctttatatatggtaggtatcccacattttttatcatgaagttagatttgtttgccccctacaaagtcatcgcatgcgctcctaaaagggtaaagcaaactgggaagaactcttggcaggcatgacgggagcatccattatttgctttagatgcanatacatgagtcacatgaatgcttaaaattgtttggtttgaa

SEQ ID NO: 23284 - DNA, 387 bp, Glycine max
  unsure (1)..(387): unsure at all n locations
nntaaatcaagcataaattcaaaaggaaagcatagattcaaaatgaaagggggagaaagagatgagtgaacggtagaataaaacttgtatgtatccttctattcttcctttgccaaaaagctttctaagttttgtttttccaaaccttgttttctgcaagtgaaaattctgcaaaaaaaaaacaaaagtgtgctatcttttcttctcttctccctttgccaaaagaatagaaggactaaccgcctgaattcttttgtgtctcccttctctctttccaagagaattcaaaggactaaccgcctgagaattcttttgattcttcccttccncttaaacaaaatatttcaaaggactaaccgnctaagaatcctttgcttaacacattgg

SEQ ID NO: 23285 - DNA, 278 bp, Glycine max
  unsure (1)..(278): unsure at all n locations
gcttatcttacctcccattaacaggatcttcatagaaaagtattgcatgccaaggtatgcacagtagcagggtcaggcacaacagcagggggaggaccagcagcagccagccgcagatgcaccatcgccacccctactacagccaccatctctagagtccatctctactcacatgcggaggatagagctctagatgcacgcatatatgcagcatgtgaccgaatagcaggcagccaatcataggggtcaggtacagttgaatgagagctnttaccagt

SEQ ID NO: 23286 - DNA, 441 bp, Glycine max
taataaggccatctatggtcttaaacatgcccctatatcctggtttgataaactcaaggtgcacttctgaagtttgaatgtaagtccagcaagtgtgatccctctttatttgtctactccaaggggtcctcaacaacctatatgcttgtttatgtagatgatatcatcataacagggaataatccttccttaatcaagcaactcatctctaagctaaatacttttttctttcttaaagatcttggttctctagactatttcttgggaattgaggtaaaacatcaatctgatggatctattgttctcactcaaggaagatacattatagacttgctggcctaaactaatatgacagaagcaaaacctatttcttcacctatggttactggatgtaagctaactaatagtggatctgatccactcactgatccatatatgttc

SEQ ID NO: 23287 - DNA, 401 bp, Glycine max
  unsure (1)..(401): unsure at all n locations
agctttgttcctttgcaataaaatgcttttgagccttctcccgctttattcgtgatgccctttttccctttttcatttcaatttgcagatcctagtacctgcactatttctgtcacttctccagcttcatttgagagctccaagggatcagtttcttcatgtacactgtaccatgataaaggacccgagccttggctgaggaaaacaagtactgatgcatggctttctactggtgatggtgaggctattgatggcactgatggtgctgctcacgaccatggngatatttattgtgttggttgttttgataatggtacnctctgaatatttgatatccccaatttcaattgtgtcttttctgtggaaaattttatgtctggaaagagccatcttgtcgatgc

SEQ ID NO: 23288 - DNA, 410 bp, Glycine max
  unsure (1)..(410): unsure at all n locations
cgattctagctaaatcgcanaccatattntaagattgtattgaaatatatattatcctcgtctaaggcttttgatttgggtttgtagattgctaaaacttttccttctgtttccattttctaattttaaattttcttgcatgaagttaaaagctgtgggacctgttgctgttcttggagggctacttcaaattatcatttttatgttcatgtgtggcattctttccatggtatggtgctgacttgtctgatatggtcttgaatagagttaaggagttacaattgttttataatggacaccaaacattattgtccatttggtttgcagttatttggagccaaattgtctgagggtggttttgtcggttcctttctatcaatgtcatcaacagcagtggtattgctttacac

SEQ ID NO: 23289 - DNA, 356 bp, Glycine max
  unsure (1)..(356): unsure at all n locations
agcttatgctttggcggcgaaggagggtttgctgagcttgttgtgtacggaggaaccttggccattgcgggttncatggcagttgcttctttcgcgagcaacaaaaatgaggcaaaagacactcatgatgatcaccaaccacctaagcctaaacctaaaccccaacaatttgtattggaggaacactactgtaagagtgaagaagatcatgacacaacccaaagtctacctttcttattcaacacggggattccacatgggatgctacgtaaacctattatacaatctttatttgtcaagaatttttttcatttacctattttatcacataattatattttattttatataattaa

SEQ ID NO: 23290 - DNA, 432 bp, Glycine max
  unsure (1)..(432): unsure at all n locations
ttagcccaattatagtactatcgaatcttgttattgatgttaacccaatggaaattntgtgaaacgacgctatttggagctttgccacatttcgctntactttttgtaagtggactcctaccaattatgcgagcacggggaaatggccacataataaaacggtatataggtacatgccacatgatcacagtccctaactccctaccatagtagcacaacaatttaaaattttaaattgctgagtggtatagcatgcggtttcctttcaacccacaaagatagcttcttcgcccgtttgcttgctttacaatctttggtgatgatgcaactgttgtaaatctctcaatcccatagttacaagtctcaatttgttgtgatgaagcatgagtggcattgcctggtgtgctcgtctagccacattataatgtctgc

SEQ ID NO: 23291 - DNA, 209 bp, Glycine max
tgtgtctaccatcacgattatcggctccctttccattattggggggaccactcgggccagcagatacctacacctttcgggcgtgttctttgaaataatcagcccccttcttgcacattgtctgtatttgcaccctatccgaaaccatatcaaaattgtactgattctgcctaacacaggcggacattaagtccttccaagaatggtct

SEQ ID NO: 23292 - DNA, 377 bp, Glycine max
gcttggagttccaaggccattcgcttcttttatttcagtcttcttctggcttcaattcttcagtgggctttccttctgtgtccagcatcttgggatgttcccagcctttgatgacagcttttcaaggttcttgctatccaagtgatcttgaggaaggccaccaattcttgctttccagtattcataagtggttccatctaggaatggtggtctagtcactggtcctccttctttctccatgttcatcagacattatctccctagaactcactctgtgatttcgagtgttggctctgataccaatcgaaattctgataccaggggacagatgttctaccggatgttacgacattacccttcagatcatgcaaatatat

SEQ ID NO: 23293 - DNA, 303 bp, Glycine max
agctgtttctaaagcttttgttcaactcttttctccccctctggcaacatcaaaaagccaaagaactctgaaatcaacacagttataacaatggagtattccagatgtatgtataccagcattaaattccataagctcaactcataatcaaggaaataatcacaccagaattcaaattacatataatgtcaacacccacaaaatatctcagactgaaacacaagaataatatgcgaagtacttagcataataatgcaaattctaagaaactaaaagccaaaatcacggcttataaaagataaa

SEQ ID NO: 23294 - DNA, 447 bp, Glycine max
  unsure (1)..(447): unsure at all n locations
cgcatgatttacattctccccctttctcaagcaaattcttcttgacatcatcaaaaacttcatgatttacattctccccctttttgatgatgacaaccacctgtaggttaggagcaacaacaaaaatatctatttgcatatagtttactcccccttggttttgcaatgattgcttatatgagacaattaaagatttcatatttttcatatataaaaagttgtctcataaagaatagataattgttccttactattttatcttttatctttctctccccctntgtcaacataaaaaacaaatcatgaacagagaggagaaaaatgttaccactctttgcaatgtataagaaccaagtgataccaagaggcttaaaacattcttcaatattattcaagccaaaataagtcaatangacatcataaaaaacacattcatcaacacacatc

SEQ ID NO: 23295 - DNA, 284 bp, Glycine max
ctacattaagaatcaccgggttgagtcttctctgtggctgtcttactggcttaactccatcctctaaatttattcgatgcatacatgtggatgggctaataccaggaatgtccgccagggtccagcctatagcctttctatgcttcttgagaactgacaacaacttctcctcttgctcatcagcaagggaggccgatattatcactgaaaactcttgctatcattcaagtaagcatatcttaaatttgatggcagaagctttaattctggtgtggtccgctgga

SEQ ID NO: 23296 - DNA, 447 bp, Glycine max
  unsure (1)..(447): unsure at all n locations
tcatgatgaatcaagattgattcaaagatgttttgttgataacaaaggtgatgacaaaaagctcaaaggtcaattcataataatcaaagaatgagttcaagatgttcaagattgaatcaagatgttcaagatgttcatgattgaatcaagaacacttcaaggttcaagaagaaatttgatttcaagaatcaagaatcaagattcaaggttcaagcttacaagaatcaagatcaagattcaagactcaagattcaagaatcaagagaagacttaatcaagataagtatgaaaaggttttttcaaaaactgagtagcacatggttttttctcaaaaacatgtctaccaaagagtgtttactctctggtaatagattaccagattattgtaattgattaccagtaccaanaatggttttcanaaacctttcaattgaatttatatacgtc

SEQ ID NO: 23297 - DNA, 360 bp, Glycine max
  unsure (1)..(360): unsure at all n locations
catgcaagctttgagctgcnaaaaatctaataggttagatttgcttcgttggttcttcaatgacaacagttaatatatagggtctgattagggtaaatttttctagaagaactaagaaaaagaaataaaatgattttttttcgtgagttaatttgaacttatgcacaaactaagatctaattttttttttcatcttttagagaaattattatacaagagcttttacaataagtaaaaatatgaaaattttcttatgaaaaactcatttcatttttaattatgcctaaaaatccttctggaagaaacccatagtcaaactcaaaaggccttgacgcaagtacctccgtgtgtgggtaaaat

SEQ ID NO: 23298 - DNA, 449 bp, Glycine max
  unsure (1)..(449): unsure at all n locations
tatttccacttaaaaaggaactctagttccttgaatagttcactagttcaactttcactttccttgaaggcatttctttattatagtacaatttgaagccttttttcttagcagtatcccaaatggacaccatatctacaacaactttgatttcggtggcctttgagatgtatagtcctggttgatagacagatgctttatttcgaatgtacatttgtgcatgtggtccaccaagcatagagtagtctgccagggaaaggtcaagatctactagatgtttaggtagaagcttggtaaaaggagtctagagattgacctttttctaaaactcacttttaagtggttccacttcttgtgaaggatccctcctatatntctcanatagatctttanggatattggtttgagtgctcctcttatccttgacntttggagggttctccatgcta

SEQ ID NO: 23299 - DNA, 283 bp, Glycine max
  unsure (1)..(283): unsure at all n locations
agcttgccacccaactcgcccaggcgagctcggttgcttcctccagaagcaaccgccttctggaggaatattctggaaggcccaagtgggcctgatttctatttgaacccccatttttactaaatacaccccttgctcttttttggtgattctttttctgtaacgtttcgaaattttacgaatttcgtaacgatgtttgttttatttccgtaatgttacgaaaccttacggattacgtaatcatcccttntctgccttccggaacgtttatggattgcgcact

SEQ ID NO: 23300 - DNA, 451 bp, Glycine max
tctctgagaaaacttccttgagaagctagagcttagctacacacacccctctcataactaagctcacctccttgagaagcttccttaagaagattcctaaagaagctagagcttagctacacaccccctataatagctaagctcacccccatgacaaaatatatgaaaatacaaaaaaaatctctactacaaagactactcaaaatgcctcgaaatacaaggctaaaaccctatactactagaatggccaaaatacaaggcccaaatgaaggaaaaacctattctaatatttacaaagataagcgggctcatacttagcccatgggctcaaaatctaccctaaggctcatgagaaccctagggccttcccttggatctctagcctaatctacttggagtcttctacccaatgcccttgcggggtaggattgcatcaagccacaactcagca

SEQ ID NO: 23301 - DNA, 373 bp, Glycine max
  unsure (1)..(373): unsure at all n locations
tgcaagctntangagaaaccataaaaactaaattagttcctaaacaaaaaccaattgaggaagcttcgccaagtatccccattgaaaaacctttattcaaacctttcaaagttagtgaaaaggctaaacgaaaaattatggaacttagaaaaactaaacccttaattgaaggcgtaggtgacaaccatagtgaattactaaacaagattggtagtttacttaaggtcattccagatactccccaagcctcggaaaatacttccaaaatggtaacaagaagtacctctaaattaattaatgttattaatgaagatagtgaccaaaactcagataacacaactgagataggatcaatgtcagaaaaaaatataaa

SEQ ID NO: 23302 - DNA, 425 bp, Glycine max
  unsure (1)..(425): unsure at all n locations
actaagcctttgagtggaattcttggaaatttgaatcatgatattatcaagcagtccaatggacctttagctaaatgctcaatacttgggttgttcatggaaggaacatcacaggttcacccacaaatatgtatagaatatgcacttgattcgtaatttcaagtatggctattatcatgtttttacagttttgaaaatgttatcattttgatgtcaaagtgtaaaagtgtttttaaaaacattttcaagacttttacactttgcaccaacatcatctaacttgtatccattcaactttttgtcaaaatcgagaacaaataaaactaacaaaaagtcagaggaatggagtgtattnttcccatttcacatccaatgcagaaaatttgtatgtaaaatattttttgaaccaatagccttattttggt

SEQ ID NO: 23303 - DNA, 315 bp, Glycine max
cttgagaaacacctgatgcaaagcttattatattgatcacgacttatagcatgtggaagataaataccaacattgggtatggcctgtccttgagacttattgatggtaatcgcaaaactaagtttaatatgaaattgcttcctaagaagaacaaaggaaagtctctacattctttgttgtcctgagtttaattctaggtgagaaagttctccttctagcacggtagcatgttaggattttaacgtctaacatattcataataaaatcaatggcatagtagtcttgtcccattacacacgtgaaaattatggtcta

SEQ ID NO: 23304 - DNA, 418 bp, Glycine max
  unsure (1)..(418): unsure at all n locations
tcatatttaataaaaatatataaacacacataaaatcttctaattttnttaaaatgatggtgtaagattaatctaataatcatgaacatccattcaggggtaaatgtatatgtatttaataacaaagagtggatgtatatatgtattaaattattattttcatttattgaataacaactagtttttatcatgcattttaatagcaatgaaagagtgtgtccgaactctacaaatacgtgcaaaaatatccgcaaatggaacggataattactcgcaatattggagctgggtatgaggcaagtatatactcacaaatntacacagtatgtgtaacattntttatttttgaattctcagtggctcgcactctacagtatttcacacagtgacacttcactcaacatccttggcgatcaaa

SEQ ID NO: 23305 - DNA, 339 bp, Glycine max
  unsure (1)..(339): unsure at all n locations
tgattctcgactccatttcattgaatcgcatgtccacttgtaactccaaagtatcaaacctttcaccaacaaaggtttgaagaccatcgaacctatccaaaatcttttgaagaagagaggaatcttctccaccatgtaaatgtccttcttcatcaacgggtcgagcaccctttttcacccaagagccatcatgctctttttgataaccaaaggatgcaaccacaacagtgcctattataaaggatctcttgattggaacataaggttcagaatcaagaaagatgttgaagtgttgaacgaagagggtgattangtgtggatatggcaatgaagcattta

SEQ ID NO: 23306 - DNA, 402 bp, Glycine max
  unsure (1)..(402): unsure at all n locations
tcctccacatgagtntattgcccgaaggcttgaaaggagtcagatatcctcattttctgttttagaaggtgctgggagaaccctcaaaggtagggatcttagcaaagtgaggaatgttgtactcccaaaaattggtttcctcgaaacactataaaggggtctcttgagtagtgatgtatctttatggtaaaacataatcaattaatttttcatggtgaaggtaaaaacaaaaaatagttgcttctacttttttatggtatcacctaattntatgcgatagaattgattcttatgtgtcatccaaacatgatagtagctcttttacattngngatgtataatanggtttgtagttagaggttatttangaatggatgttgtgttcatatgcttggggtataaa

SEQ ID NO: 23307 - DNA, 285 bp, Glycine max
  unsure (1)..(285): unsure at all n locations
acattgttggtattacaccaattaggatgacaatttcagctgcattttcctatttggagggaaaacgtataaacaatgtttgttgggctctaaaatggttttgaggtatttttctgaaacgtgatgcaatccctcaagttattgttactgatagagattcaacattgatgaatgcaatgaaaactattttccccaagtcaaccaacttgttgtgttggnttcacattgataagaatgtgaaggcaaatataaaacctttgtgggtaaaaaaaatgcatgggatta

SEQ ID NO: 23308 - DNA, 430 bp, Glycine max
  unsure (1)..(430): unsure at all n locations
tccatcaattagtctattacaaaacacaacaactgaccctacaatgttggagttggatcaatcttgttactgaaattcaaaagaattatactttacatatgtgaggagatggaaaatgaaaaagaaaagataaaatgaaactttaataacaccaagaaaaggtataatttctaaactttctcagatttaaaatttgcttgtgtattattttaagttttaagcttttgatctagataatttaattttcgtggaacctaatgatgatgcacaatctaaggaagaccttgatgatgatgatggagatggagatggtgatgaaagtgatgatattcatggagatgatccaattagaggattggacatgcttctttgaaaacattngtgctttttttaattatttaaatgctttaattttgaacacttatgcatt

SEQ ID NO: 23309 - DNA, 181 bp, Glycine max
tactcgcgaccgttggtaatctccctaacatccgatagatcgtatgaaacaacattgctgaggcgtgttctagtggagccttacgatttaacactttcgatagcgactctagggtataaaacgagaggagcggacccttgaaaaatggggaaaagaggctgactggggatacttccggaag

SEQ ID NO: 23310 - DNA, 447 bp, Glycine max
  unsure (1)..(447): unsure at all n locations
ntatgatgatgaaccaagcaatattggtgatgccgttagccctagtgattgattcaagacttcaagatcaagcatcatgaatgcaatccaatccaagattcaagattcaagaaaagaaatcaagaagcaacaagtcaagacttcatataggataagtattaaaagaattttttaaaaaccaaatagcataattttgttttacaaaagaattttgtcaaattttctaaagtgaccagagtgattactctttgttaatcgattaccagttagcagtagtcgattactagtaaccagattggttttcaaaatgttttcaaatgatgtgtaacattcaaaaatgattttcaaatagtgtaatcgattacactatattagtaatcgattacaagtgaatcttaacgttggaattcaaatccaatggtgaagagtcacaacttttcataaaat

SEQ ID NO: 23311 - DNA, 403 bp, Glycine max
agcttattaatatatttacatgtatcaaatatatatataattaataataacaataataataaatgtatcattagataaatatttatttaaatatatatatatatatatatatatatatatatatatatatatatatatatataagcacatgaaataattaaatgtactaaaaacattaacatgaatatactaaaatataaatggtagtttaataatatatatatatatagaagtaattttacatgtatatatataatttgaatgattaaatgccttaaatataaaataataagaacatgctaaatatatccttagataaaaataaaatatatatgtataatatatgtacataacaaccaaaagtttatatacatatatacatatattctatatgcattccaac

SEQ ID NO: 23312 - DNA, 342 bp, Glycine max
tcttagtttcagatgatgcagatgggtttgtagctacctcatgcactcctctaatgactatggcatcatttctggcgctaaactgctgggagttggaggccatcttctcaattaaatttctggcttcagcaggagtcatgtctccaagggctccaccactggcagcatctatcatacttctctccatattactaagtccttcataaaaatattggagaagaagctgttctgaaatctgatggtgggggcaactggcacatagtttcttaaatctctcccagtactcatacaggctctctccactgagttatctaatacctgagatatccttcctgatggctg

SEQ ID NO: 23313 - DNA, 481 bp, Glycine max
  unsure (1)..(481): unsure at all n locations
ttgaagcattgaaggacccgttgatgccattgacgnccttgggatccccagagacacctgaagctgctagctttattgtgtatataaaaacattgtgagatatctaattacttaatagaaaagaatactagcgccttccataacttgaatacaaccgacatggatatatacttactacgtgcaaaaaaaacactaataaagattccctaatccttacgtgaatcaaattcaagcctttataatatattccaataatatggctaagatgtaattcaattcaagatagtattcacttctcacaaagtgttttttaatccgtcctttatgaccttcagaaaggtttcgcacccactagaaaagagcgtcataatatggggttgagcttattaatcacttgtcaaccgtggggattggacacttttcaagacggtaagtaaacaaccgcttcaaatccacataaactaggcatttttatgtccct

SEQ ID NO: 23314 - DNA, 345 bp, Glycine max
taaatcatggtaaatgtacttcttgacatatccaactattgctagggcggcttgacatatgagaaatagctttaacctaatggccttaaatctattaagaagctctctagcgattacgaaaatcactcaatatctgctctctctgtctcacatgcatcactgtgagataagcgtccaaacgaaaggattgagttaaatttaaacctcatgttttgacatgaacgataacatgacagaaattaatgacgctagggaactttgactgaagaataagaaaggtacatcattagtgcctcttaactgattggagtggggagtgtggcacgaaacataaatatttagtct

SEQ ID NO: 23315 - DNA, 343 bp, Glycine max
  unsure (1)..(343): unsure at all n locations
agaaacttgctaacttattaaagctaagattcacttaattcactcaaggttctttcatctagttaaactgacagcgttacaacactttgttcgttttgactcagattattcttgtgagtcgacaacattaacacgaacatcttcaagctttatatacacttcatagctntgatttgttgaaagatcccaactagtcattgtctagtagcttggacgctttacatgagattgttactgtgtagagagagagtgtggggaccacaaacactttttgagcatattttataaaagacaacttgccgtgcaccttggctcaagtgactttagctacaatcaatatacg

SEQ ID NO: 23316 - DNA, 372 bp, Glycine max
tcttcggtccctatggtacttgtctatcctatagagttaataaacataagtcaatgacaatcaatgctttatttgtaacaaatctttttttaataataataagcacaacaaaaaagaaataccttttctgaaaaaggttgtataagatgcgtcaaccaagcaaggaaggtgttaagggtttgtccgactaactcggtaagttccaaatttgagattaaattgttagcacttatcctttgattgtaatagttttcttccaaactacccttgaatctagatgtgtatatatattgtatagttactaatatcgctgcttaaatatgaatgattcatccatgaatatgtaggttttttatggttggttgatgaatc

SEQ ID NO: 23317 - DNA, 444 bp, Glycine max
  unsure (1)..(444): unsure at all n locations
tggaaaggcagagaggaaacaaggaaagaaatttacttttgtagaaattgtatcacatgctacactcaaacccttacatcacctgttttgggaacatttagtctaaatagcacagacccaattctatgtgaaattcaaattagcatcattatacattttatattctcatcataagcatttcaagtttttaagtgctagatcaacatttttttctactgaacaatagcagtatactagttgcacagatggggaaaatcgatcaattaaattttagttaagagtccttatggaataaagcccacgatttccaactataaaaaatcaatcaagcattgagaacatgtgtactactagataatatntagttggttgagtactaggtgatattgaaactaaataattactaactccaacttaatattgtccagagaagcnttgaaaatc

SEQ ID NO: 23318 - DNA, 349 bp, Glycine max
catgcaagcttagtgacatccgtgacttgatctttagcgaagatgttcgcaagatatattcaggagaatcttccagtcatgtttccaattcagcattgaatactgaaggcaggggaaggactacccagaagggtcagaatggtcgaggcagatcaaagtcaagagggaaaggtcagagaaaatttcaaagtgacgttacttgttggaattgtgacaagagaggtcactgtagcaatcagtgcaaggcaccaaagaagaacaagtcgcacaataacaagaagcgcgatgatgatgaatccgcaaatgcagcaactgatgaacttgatgatgcattaatttgcagtttgga

SEQ ID NO: 23319 - DNA, 304 bp, Glycine max
  unsure (1)..(304): unsure at all n locations
taaaanaacaagaaatgaatggaaagtctaggattctaatacttacccgttgaagaacgaagaacggatgaggaacggtgaagaacggacgaaaaccttcacggatttgcttacggaaacatctcggaagcgttacggaagcacctcggcttggattttcttcacggaaacaatttttttcacccaaaacagctgaaatatatatccagggggctaagggatccttagaacagcccccttcaacctatttatatgaaaaagggggaggatgttgccggccatcttgcccaggcgaacttaactc

SEQ ID NO: 23320 - DNA, 292 bp, Glycine max
gcttttgagtgaaacaatgtgaatcttctcatttataattgaatttcaacgttcaaggacactggtaatcgattaccaaaacattgtaatcgattacagccttttgaaaatatttggaacgttgtaaattcaatttgaaaactttttcaaactcattttgccactggtaatcgattacaacaatatggtaatcaattaccagagagtaaaaactctttggtaaaggttttgtcaaaaactcatgtgttattcaaagttttgaaaaacttcttaatacttatcttgattgagt

SEQ ID NO: 23321 - DNA, 126 bp, Glycine max
tctgctattttcctgacaatgtgaattaacttgtattctaaaatatgactaagaaaatgattgaattacgttttgtgatcttcatgaaagttgtagcccttttaaatgaggggggggggggtgttc

SEQ ID NO: 23322 - DNA, 373 bp, Glycine max
gcatgcaagcttcatgaatggagtccttccaactcctctgtgtcccaaagggattgttttctgcttgcagcatgtgaagcacatgaaactttgcctcagagtgcagaattcccagctgatgtgtttacatcttgccttaccacacctataaagatggcattgcgatggcgaaacctctcattaattcctccttactttatcctgttcagaatgtttaatatgttgaacactcataaaggtttagcattaccttatttttttaaacataatagcattgcgcatggatttctaaagcattgtgcatcgatgtctaaagcattgtgcatcgatttctaaagcattgtgcatgggctttaaatcatgtgcacttttg

SEQ ID NO: 23323 - DNA, 380 bp, Glycine max
tagcacgagcacgtcgtcacagtgaatctggtcttttaggctttgacggagaggtgaccttggttcctctcatgacagcttgggaaccctagaggggagtcgaagagtgaaaatgcagagcgcaagagagtacagagagctagacatcaaatattaaaaaaaaagcataaaaccttctaagacgatttttttacaaaaccgtcttaaaatgacagtcttttaagatggttttcgtaaaatcgtcttcgttgaaaactttcgtatttataaaattgtcactgcctatatacgggaaccgtcttaatttcggtgttgtagaaaatatttttttctagtagtgactttctcttttaataaatttaaaaaatagaaaatgttct

SEQ ID NO: 23324 - DNA, 146 bp, Glycine max
atctacggagattgtacatatgatgtgcgcctcctcctaaacgataccatcacccttgctattatctcgaaaaaccctatatctgccatgcttaactgcatatggcgagatgccatggtgatgacaaacgttgggatgttcacatt

SEQ ID NO: 23325 - DNA, 386 bp, Glycine max
  unsure (1)..(386): unsure at all n locations
tgccacccggctcgcccaggcgagctaggttgcttcctacagatggcatcgccttctggtggtggaacttcctggaaagcccaagtgggtctggttgctatttgcgcccccctgtttactaaatacacccccttgccttttttgctgattattttttcgtaacgttatgaaaccttacgaattacgtaacgataattgttntctttccataatgtcacgaaaccttacggattacgtaatcatcccttctttggcttccagaatgttacgaaactctacagattgcgcattaacacttccttttgacttccggcatgtcacagaacttcacggattgtgcaacaatgctttcttttgacttccggcatgtcacggaacttcaccga

SEQ ID NO: 23326 - DNA, 315 bp, Glycine max
agctagtattaactcactttaacctccatttaccacagaattcaaacttagctgtccaactctcaaagcctcactctttttccactcataacaccacattctcactttctaaccctaagttagctctaccctccatctctaacagctttccatcagcaatttcagcatataaacatcacagatatcatcacaaaaaccctaaaacagaatgggtatgtctaactcacccaaacatggcaatttcaacaaagtttcagcaaatgccttcacaaataatcatcacacagcataaagcctgcaagactacccatcata

SEQ ID NO: 23327 - DNA, 347 bp, Glycine max
  unsure (1)..(347): unsure at all n locations
ggtctcagcgtttatgcgagacggagaccaacatgctatctattatcgccaagtaccaagaagagttgggtctagccacggcccacgagcatagaatcacggatgagtatgcccaagtatatgcggaaaaagaggctagaggaagggtgatcgactctttacaccaagaggcaaccatgtggatggatcggtttgctcttaccttgaacgggagtcaagaacttccccgattgttagccaaggccaaggcaatggcagacacctactccgcccccgaagagattcatgggcttctcggctattgtcagcatatgatagacttaatggcccacatanatagaaatcgt

SEQ ID NO: 23328 - DNA, 242 bp, Glycine max
atatgcatgtgaattaggaagcatcaacaagaatcaagccaaggctattgtgcaagcaatcaatggggcaaaacacaccaaatgattatgatggtggatggctcaaattctcacaaaggtaaactcatcactttcaaattgagctttcaaaactatcatgacatgtagaggagaatcaggatttcaagtcacaaaatgtcaagaactttattttcaaaacaattacccatttcttgaacata

SEQ ID NO: 23329 - DNA, 450 bp, Glycine max
  unsure (1)..(450): unsure at all n locations
ntagccaaaccgcttagcgacaccttattcttggctatgcgcgactcagtgtcgccaagcgcaattccttacggccataactaaggtccatgaagctaagcgccagtcatggcagctaagctgaattccttgcggcaatgtgagcgctaagagaggccttatcagctaagcgcatgctcctctgtacttaagatgcatcattttagctaagccagccatagcctggcttagcgagagttacaacttttcggatctgcaaacctcgctaagtggtttgatcctgtcgctaagccaagcctctgttaaaaaaaaaaaaactgattttgaatttgaaacgtcggctaagcgcgcaggtccactaagcgagcctagttgagaaaccaaatgtctctctggctcacttagagcagcggtccactaagcgaaagtgtcaaaaactgctgaagtgag

SEQ ID NO: 23330 - DNA, 121 bp, Glycine max
gaactttaaccctatgctgcaaacctaaaaagcaactcctaactaaaataaaagattcacacgtagatgataacgtaatcgataatatttaacgcggctgccaaccttgaaaaaaaaaaag

SEQ ID NO: 23331 - DNA, 438 bp, Glycine max
  unsure (1)..(438): unsure at all n locations
tcaacccttggtgcccatttctgctccatatcgcgataggagggcattntcggagtcgtgaagcacgtctctacgtgtaggacttcgaaatttcaggtttgggtggacttctttctctcttgattttcgtgggtatgggcttttgggagatatgatgggtagttttgctagttttctgcttcatgatagttatttgtgaagaaacttgttgaaagcatgttgaacttgccatgtttggatgagttaaacatacccattctgttttagggtttttatgatgatgcttgtgatgtttatgtgctgaaattgcttatggaaaactgttagagacgaagggtagaattaatctanggttagaaagtgagaatgtggtgttatgagtggaaaaaaagtgaggctttgagagttggaaggttaaatctcgattctgtggtaaat

SEQ ID NO: 23332 - DNA, 388 bp, Glycine max
  unsure (1)..(388): unsure at all n locations
atttcttttcagtgngatatttggttntcaataatttattattcttggttatttatttaaaggatatagaacttaatctataacaatgtgtaaaagctaaaagaccttgttaaaggccataaacttaacaaagttgtcatatgcaaaccctttgtcacttcaacaaaacagaggacatcaaaatcaagataagatatgataaggtgtttacaatgaataaagatgggcgaggtggtggattttctttatttggaagggtctatanagggtgaatagttctttttctgaaaacatcaccattacaaattgagaaattatattggtagtggtgctgaaggatacatgagtttctgatatggaatcatgaacctgtgcatcatcangattg

SEQ ID NO: 23333 - DNA, 345 bp, Glycine max
  unsure (1)..(345): unsure at all n locations
tagaggcctgaggtggaggaaattgtgatttagacttactctatatcaatgaccaacatctttaataatggtgtcaaccagttacacccttattatgggttatttagatatgacaagcaacttattgatagaacctggagagtaaagtgtaagataaataaattaaccaaaaatgaatctatgagtttaaaacaccactataacacttacttgttgaagacatgataaaaaagataagaatgatntgtgtgtagtatgacctacaaaaacataaaagtcaatcttctttcacctgatcacactctccttatactacagttttaacggggcanaccctatagaaca

SEQ ID NO: 23334 - DNA, 247 bp, Glycine max
accccaaccctcaaaaaaccgagctatcttagatgaaccccccccaatatagaacttctccggcggttaacgactgaatgcaatgaaacatctcaacttaacagtgcacccctcacatacaggaacgaacctacacgctcaggcagacaacccaaaacagaagtctacaatggacccaagaaccgtgaactttctaaccaaccctcaatctatgagaataaccagcgccggctcaacaataccagcc

SEQ ID NO: 23335 - DNA, 408 bp, Glycine max
  unsure (1)..(408): unsure at all n locations
gacacttaaaactaagcttgctcacacaccttgatacaagaaccacccatatgttcttaactcacctaccaatttccagacagactcaaatcaaacagacaaatgcaacaatntgcaataattaatttacctttaaacgatgtttaccaagaggtggttgtaacttgcccaaagtagttagcatgagatgttcagcagaagaaacatctaagagcttgagtaaatcacctgcagagtaagagctagatcagcattttgtttctctgtggaaccagtcacagtgaaactacaaaatactgaaaaaagaatctacattcagacacacttggtgtcactatgtaatgtaacacgatgatatgaatatcaccatctcactatcaattcacatttacatgttagatgtgagta

SEQ ID NO: 23336 - DNA, 341 bp, Glycine max
  unsure (1)..(341): unsure at all n locations
agcttntcgattcattctatgtacccgtagtggtccacattgtgtttcgagcatttttattctcgttntgtttactttttatacccccctcttgacgtgcttaagccattttacttaagtcatttctcgcttaacttaaaaataaaataaatttccaccgaacgtttgaattgtattatccgttaacttcggttaaaataaatttcgaccgttcggtcgtgccgtaaccacgttggaaatataaaaaagaggtaaataaataatataataatcaaaaaacatcttttagcaaaataaagcggaaaatcaatcggacgttttctctttgggagttctcattc

SEQ ID NO: 23337 - DNA, 347 bp, Glycine max
  unsure (1)..(347): unsure at all n locations
tgaaattgaacaacggaagctctctatacattttaatggtcataacttntcacttggaggtacaattcacgcgcataatatatcgagacgctcaaaattgaacaacgaaagctctcgagacattcaaatgatcataacttttcacatggacgtcagattcaagcgcataatatatcgagatgctctatattgaacaatggaagctctcgacacattcaaatggtcataacttttcactcggaggtccgattcatgtgcataatatatcgagacgctcgaaattgtacaatggaagctcttgagcaattcaaatgggctataccttttcacttcggatgcccgattca

SEQ ID NO: 23338 - DNA, 388 bp, Glycine max
  unsure (1)..(388): unsure at all n locations
ntaaagaccaattaaaggaaataggagtgtggatgtgtattacaaacagatgaagatttccttgattagggctcaaattgaagagtctcatgaggccaccatggcaaggtttttgcatggtctctatagggagatccaagacattgtatagttgcaccactatgcctctttggaggatctcattcatcaagctatcaaggtggagcaacaattaaagaggaagcaaacatacaagaagtcctcctatggctttccaacttagaaagataaggagacattcaagaaggagggaagaccttcattcaaatctcatgaaaaaggtgttgcccttggtaaaaaaataattctaaccctactcccacttcttcaaaggcgagttctattaaat

SEQ ID NO: 23339 - DNA, 271 bp, Glycine max
gacctctatttatagcccacgcgtcacagaaaaatggagggaatattgaattttctatttaaacttcacttgaattaaaaattgaatttatggggccaaatttcggagccaaaatttcacttattatgattcgggaattttagctatggctcaacccactagtccaagatctagtccaagattctccactaagtgtgcttaggtgtcataagacatgtaaagcatgaagtttatgcacacagtgtgactatatgatgtggcaatggagtgt

SEQ ID NO: 23340 - DNA, 400 bp, Glycine max
  unsure (1)..(400): unsure at all n locations
ttngtaggtgaaatcaggtgcagccatttcccttagagtcctctcacggagtggaggttgtgccatgttctcagaatgtgcagaatcagaatgatcagaatcataatgctccaaatcaggatgttcaaaatcaccaataacagaatgcacagattcaccagtaatggaatgctcaggatgatcaaaaggtataaaatgatgcctaactaatctatgaaatgtcctatctatctcangatcaaagggttgtaagtcagatggattgcctctagtcatacactacattcagcatgcacaactagttgccttgtcatgtaaataaaggtgcaggtntgaactacaactaccctcaagtgatattcaaatgacttgaaatttgtgagcaccttatacatgatga

SEQ ID NO: 23341 - DNA, 312 bp, Glycine max
  unsure (1)..(312): unsure at all n locations
catgcaagctttgaacaatatacttggccctcatttaactgtctntggactcggcggccacgctcaacatagtactttcgacacctactgtacgttgatttgaccaatgttgatatgggaatgttgcaataatccttcaaaaccttattgatacattctgagaggttggttgtcatgtggccatatcgaagtccttctctatcataagccatcggacatttttcctttgaaattcgatcaatccatgttgctatggctggactcactttacgaaattcttctaaacttagattaaaatgtgcatgcgaggag

SEQ ID NO: 23342 - DNA, 445 bp, Glycine max
  unsure (1)..(445): unsure at all n locations
tgcagcgtcagttgcataanatatgaccatattaacatggtctggagctcattntccttcaatgtttagatgttaaaaagcaatttataagagaactctgttgattatctcctatataagaaaaagtagtacaattgtaattcaaacttctgtcactgtaaacagattagatactcttttgatgtaggattagatagtgataatagggaaaaaaaattgcggttttgctctatggcctttctatatatttttcttttattgcaacttcaaagttatttgagcctgaaagagggttttggtatggtggattgaaatgaaagtgaataggtattttccatatgggtctttatcggtatttatgttgaccaaatcttgtgaataattcaaccatgaaagatattctatatcttcatacaacaacaatgtgtcctggtctttgtcctac

SEQ ID NO: 23343 - DNA, 419 bp, Glycine max
  unsure (1)..(419): unsure at all n locations
gcttataagcgcgggtctgggagacttatgtcaagtgttcgcgatatgcgaagatgatgttccgagtattttggatttggtaccaccatgccctcctgatttccagctgggaaattggccagtggaggaacgccccagcatttacgcaacgagcataatgtaaacctttacgattttaaaagctctatagttgggcctaggctttagagtttttccttttgttaaggctttgcgtcttttgtttttgaatatataatacaaggatctttcttcatctgttcctggnctctacccattctcattcatttgcatgtttacttctttttctgaaacggcagatccgatgacgagtcccccgaagtactaatacctgggacccgctattgacttcgagcaagaaatgaatcaaatggaagatg

SEQ ID NO: 23344 - DNA, 431 bp, Glycine max
ccgcttccatcaagtggtaatcagagcacaagagcttcaagtatgtgctccttaaacctccattaaattttttgctttaccttctcttccattgttgtttcttcatttttttctccatgtatctcctcacatgccttttgctaaatgtttttaacatgattctttagagtttccaccgattaaacttgctatagaagctagatttgattttctatggttcaaatttcttgttcttgttcttgaaccatgaattatgttgagtttaggttcctttgagttttgtcttgttatttttttttggctgaaacctaaaccataaaattcttacaaaaatattaaagtagaagaaaacctcaaaaatctagagtgacttgttcacctattgtagttttgtcatagaagtcatgtttagtcatgaaacttgtcacata

SEQ ID NO: 23345 - DNA, 184 bp, Glycine max
tttgaagagccttatcttttgacatgtccaactctatgagtgacatttgtattgattgttacatcttaatctttatctatccatatattatttgggtagggaatattctcggcgaggctaatgtctttactatgttatgggcggtggatagtgatcggactatcgcgtatggttggcgggatgg

SEQ ID NO: 23346 - DNA, 165 bp, Glycine max
taacatgagcctacacctcgacgaagtccgtgcgagtcccttattattcataagatggatactatgcttcaccttcatctagatcagtcaactagagttcatagttctttggagaatataacttctacggtggaaaacattgagactagtctgacctttagcaac

SEQ ID NO: 23347 - DNA, 196 bp, Glycine max
actcactcttggtgatgcacaaattgtatgatgtggactatgatgcgacatccaatataaaaaccaatacaaatgcctctcaaaggagttgagcatgtaaaagactaaacatctttctgctcttttccagcatcaagctttgtacttatggttctccccctattataacattctttcttgttgaagatctttggac

SEQ ID NO: 23348 - DNA, 335 bp, Glycine max
  unsure (1)..(335): unsure at all n locations
gacatcaagagattataaatatgtgaccatggcattaatttcattaaaaaagaaaataacaatctatctttcaatcttctctcaacatcattcaatatctttcaactttttctatagaattttctgatccatttctcttcatctttctaaaagtttttgttcaacactttcttttccaagaaaatttctttgctcaaaaacttgtgctattcatatttttcattctcttctccctttgccaaaagaacagaaggactaaccgcctgaattcatttgtgtctctcttctcccatacaaaagattcanaggactaaccacctgagaattctttgatt

SEQ ID NO: 23349 - DNA, 602 bp, Glycine max
  unsure (1)..(602): unsure at all n locations
actcgctcacacacacttatntcgtgcgcgtcgntgctntttcctttacngtcacgcacnntctctacaattttagtctagactcnagtgtctaccnctagnagggttgtgaanccctttgatgaccttttggtagcctctctaggacccgcggatcctctcgaacgacctgcagcatgcgaactatagagatgagtcaaattttctantgactgtccttatctaaaaattctcactgggggagcatctctttagaatatcaccggttaccaactattgtgatgatgactcatcaatgtgcattttttaggaattccttatgtttcacatctttaagagtttatctagatttttgtatttaattattctaaggatccgactcttttattctaaaaaagagattacgaattccttatgagagaatgagattccacaccaagtgggagccacaatctttcaaaatgtgagatatgtatcttctggactactaatgggcattcattacgagagatgacctcgccaagatataagtatgtttgtttaactatggatccaggggtcaatgagtttacttgtgtacatggcccaaaaattgaaaatcc

SEQ ID NO: 23350 - DNA, 420 bp, Glycine max
tgtagggttaaagtctcacgattgtcacgtgctcatgcaacaattgttagccgtggctatacgagatatcttgccaaacaaagtcaggttagcgataactcgcctgtgctttttcttccatgctatatgtagcaaagtcattgatccagtcaagtttgatgagttggaaaatgaggccgcaattatactgtgtcagttggagatgtattttccccctgctttctttgacatcatgattcacttgattgtgcatctggtaagagaaatcaaatgtcgtggtcctgtctatctacggtggatgtacccgattgagcgatacatgaagatcttaaaaggggatacaaagaatctatattgtccagaagcatctattgttgagaggtacattgcagaagaagcctttgatttttgttaaatact

SEQ ID NO: 23351 - DNA, 448 bp, Glycine max
  unsure (1)..(448): unsure at all n locations
tatagaatatataataagagaactatgactattgaagaatctattcatgtttccttttatgagtctaatgctattcctccaagaaaggatattttagatgatattgcagaatctttagaacaaatgcatatttatggacaagattctaaaggaaaaggaagcaatgaagatcctccagtagaagccaaatcaaatgatgaacttctgagagaatggaaagcttcaagagatcatccccttgacaacattattggtgatatctcaaaaggggtaacacctagacattctcttaaagatntatgcaataatatggcttttgtgtgtatgattgaacctaaaaatntaagtgaagccataatagatgatcattggatagtttctatgcaagaagaactaaatcagtttgagagaaataatgtgtgtgaactagtagagaaacctgaaaact

SEQ ID NO: 23352 - DNA, 202 bp, Glycine max
agcttctctatatattatgtgcctgaatttgacttgcgtttgaaaaattattaccatttgaatttctccagagctttggctgttcatttcgagtgtctcgatatattatgcgcctgaatcggacttttgtgtgacaagttatgaacattcgaatttctcgagacctttctgttttcaagttagagcgctctaatatgtgatg

SEQ ID NO: 23353 - DNA, 386 bp, Glycine max
tctcgatatattatgcgcctgaatcagacttccgtttcaaaagttatgaccatatgaatttctcgatatattatgcgccttaatcggactttcgtgtgacaagttatgtccatttgaatttctcgatagcattcgttgttcaatttcgagcgtctcgatatattatgcgcctgaatcggacttccgtgtgacaagttatgaccatttgaatttttcgagagcatccgttgttagatttcgagtttctcgatatattatgcgcctgaatcggacatccgtgtgacaagttatggccatatgaatctctccagagcatccgttgctcaatttcgagcgtctcgatataatctgcgcgttaatcgaacttccgtgtgacaagttatgac

SEQ ID NO: 23354 - DNA, 426 bp, Glycine max
cttgtgctcctttgaacgagggtggtcttgatttgtttccaatatatttattaatgaagttgtctctctaaagctctagtgaaattttgctttttctgatgatctttgggccaagtttcttcaagcttggcttttgcccaacatgtaccttgttcagacttataaaatgtacccccccccccttaacaaattttgtcatgttatcttggagaattctagttgggataaaggatctggttgtaaactcaactctgggaatgatgtttggtgccttgatgtccctatagcataagttttgcatcttcctccctcttgtcacaagatgcttacctctattgttgctaaatttttttctctcctactgtaggaaaattccctattcaattctctctaagatacacaaaaacctctatttataacttccta

SEQ ID NO: 23355 - DNA, 528 bp, Glycine max
  unsure (1)..(528): unsure at all n locations
cattacatacaacttgtcgctccgcgaattgcgatgtgtntatcaactacgactacggatgtggatcctggagangggttggngccgttgagccctcggagcnccagagaanacctgcaagcgtgccagcgttccttaagatgattcgtagagaagctagagctatcttcacatacctcctcgaaaactgagctcacctccttgagatgagaaactagagcctagctacacaccccctattatagctcagctcacccccacgaccaaagacatgaaaataataagagaaaagtgcttattacaagacaactcaaatgccccgcataccaggcctgaccctttctactggaatggcaaaatacaggccctgaggagggaaaaccattctatatttcaagagagcgggtgtacttagcccagggctcgaatttccctaggctatgagaaccctgggtcttcctgggatcttgccacactgttggagttgtaaccacgccttgggggtagatgcctcatggggggcccccg

SEQ ID NO: 23356 - DNA, 363 bp, Glycine max
gatgaggaagtgttgaagggtgaaactctctgcttttattgttgaccacagagtggtacctggagatatgttgcgggggtcaggagaccttggggacgtcaagtggggtgctattgcccaaaaccaaacttgaccaatcccgacccaacccgggcatattcggtcagtgagaacctgtgatgtacctaagcaggcgagctcctggcagtctacatattaaaggaaaacaagaccacaaagcaaggaggcttgtggtggctggccagctgtgaatattgtgtaatatgtgagatatggcctctggtaatcgattaccaacggtgggtaatcgattacaaggcttaaaaatgaagacgggggcta

SEQ ID NO: 23357 - DNA, 127 bp, Glycine max
  unsure (1)..(127): unsure at all n locations
cagcttctcaattattatgtgcctgaatctgactgncggcngaaaaaatattaccatttgaatttctcgagagctttggctgttcagattataatgtttcgatatattatgcgcctgaaccggactt

SEQ ID NO: 23358 - DNA, 338 bp, Glycine max
gtgcgggtctgggagacgaaggtcaagtgttctcgatatgtgaagatgatgttccaagtacttctgatttggtccgaccatgccctcctgatttccagctgggaaattggcgagtggaggaacgccccggcatttacgcaacaagcataatgtaaacctttacggttttaaaagctctatagttgggcctaggctttagagttttcgttttgttaaggctttgtgtcttttgtttttgaatttataatacaaggatctttcttcatctggtcctggtctctacccattctcattcatttgcatgtttacttctttttctgaaacggcagattcgatga

SEQ ID NO: 23359 - DNA, 487 bp, Glycine max
  unsure (1)..(487): unsure at all n locations
ttgagacccttgaaagaccccttggatgcgttgagaccctcgaggntcctgcgatattcagagaagacttctangcatgttatcttattactaaattgattttattacctattaatcagttccatatcgctctgaaaaacaaagtacatgtttctctatgatttctagataactagtctgggctaccagtaataaaactgtatggtatcataatcaacaatcactggctccggttcttgccttagaaccctagaaattgtgtcccttctcttcctagcgcacattagttattacaagctttggtggaaagaactagattaaattaatgacggaaactgaattcgtatacaatgtgggagacaaaaaatacttgcaggatggtgaccttgtagcttgcagtgcgcgctaatggtctcaaccaaaatagaatcaaaaatgagtgtggtaactgggaagtcatgtttatcacaatgctagacaaaattcc

SEQ ID NO: 23360 - DNA, 109 bp, Glycine max
ctttctttctttgaaagaagattcaaatccatatctcttttacattataaataaaagcatattagtgagacaaaatccatcatacacaaatcataaagagtccagccta

SEQ ID NO: 23361 - DNA, 346 bp, Glycine max
agcaacctaattgatcaaaggagaattaattactttttggaaaatattggtgcttatctgttgagaagttaagatcgatacaattgaattatcaatgtacttacagataggccaacagttccaagaccaaaaatcaccacagttgatccttttgacacgtcagcaacattccatgctgcgcccagacctaatgttttaaaaaaatgagtcccataatcaacaaaaaaataataatttatcaatgacattaacaacacttattgggatctatggctctgacagtgtctagtagcaaaagttcatagtatattatttgtgaggtataagaaagaggaggaaaataagt

SEQ ID NO: 23362 - DNA, 384 bp, Glycine max
  unsure (1)..(384): unsure at all n locations
aattaatataattaaaatatgtagcatatcatatattttagcaatagcaataacaatatcaattagagaagaaaaatataatataatagtaattataaccaattagtggaatttacagctaatacatttattaataggtttgtatattatagcaactagagtgggtgatcggtaccatgtacggataaataatttttttaaaggaattaaaattaggtatgtattaagtaatgtagtaatttagataattattataaataatagttcaatcaatataatttaagagtttctagnaacatattatatatatatatatatatatatatatatatatatatatatatatatatatatatatatgtgatgaaacaatatttttaaatg

SEQ ID NO: 23363 - DNA, 441 bp, Glycine max
  unsure (1)..(441): unsure at all n locations
tcagaagagaagaagaaaagagcttttctaaagctctgtatttgcaaatataggaatctgatggactagagaactctgttggatccacagatgataaagtgaacctcatgtctagaaaattcaaacaaatgatgaagaagaaaggaaatttccaacattcctctagacgtaaagattcaaggttccaaaagaaaaactaggaagaaagtaatgagatcatctactttaagtgtagaaagcttggacacataaaggctgaatttacctagctaaaaaagagaagatactctaaagacaagataaagaanattntgatggtcacttgggatgaatcagatagtgagcagagtagcatctcaaatgatggacaagccaacatctatctcatggcagatacaaatgataagactaaggtaaaaacttgttctgaatctaatattt

SEQ ID NO: 23364 - DNA, 386 bp, Glycine max
agcttgtgcttaatcctaattatacacacacatatatataaaagaaaagtactaataatagacttctttttaacacattttattattgatagaaatttatcaaaaactgcaaaattagaaaggattctaatttgtaatttttaataaattttagtcaataaataataatatattcaaaagagtctctgactagtatttctcaaaatatattactgatgatgatgatgatgcataagtttagaccatggtccaagtgactggtacttcaccatcatcagtattaaggcctaagtcatgccacacattttcagatgcatcaacaatgtttgtcttgcatggtgattgatttgcgtgttcctggtcacagccttgtgtggagtcacact

SEQ ID NO: 23365 - DNA, 383 bp, Glycine max
  unsure (1)..(383): unsure at all n locations
cgtttcctatcctatcgttccactgcactttcctttttctattatgtcttatctgatttccgtgcaattcctccttttcgcactggcaacaaagaattggaatcactctcatcttctctattgctatgatcttcaacctttctgccctctaaagaagccactgtcagagtcacagtcacagccataggcttgtttatgcagccattagtatccttggttgactttntagtatccatcaataataacaacactctttatgctctctctctctctctctggtacgttttccgtggcagaccgaagtagaaaaaacgaaaattcacggaaattaatgaactggaagaataccatttgacccattgacctgaaaatcacagcgcaag

SEQ ID NO: 23366 - DNA, 85 bp, Glycine max
  unsure (1)..(85): unsure at all n locations
agcttctaaactttatacaagaatgaatctctgataccacttgttaaacaagtggcctcaaatatcttaaaaagngggggggggg

SEQ ID NO: 23367 - DNA, 426 bp, Glycine max
  unsure (1)..(426): unsure at all n locations
cgcttggaaaatgatttctatacaaaagttagtcgtataatgcatctaacaatagactaggtagcttccttgagaagctttcttgagaaaacatccttgagaagcttctttgagaaaacttccttgagaagctagagcttagctacacacaaccctctaataactaagctcacctcctagagaagcttccttgagaagattcctaaagaagctagagcttagctacacatacctctctaatagctaagctcacctctttgatatgagaagctagagcttagctacacaccccctataatagctaagctcacccccattccaaaatacatgaaaatacaaaaaaaaagtccctactacaaagactactcaaaatgccctaaaatacaaggctgaaaccctatattactaggatggcccanatacacc

SEQ ID NO: 23368 - DNA, 373 bp, Glycine max
taggactgaagtcaccagctcgcctagacaagctaatctcactctgggcgagcaaggttacttctggaggaagcaagtagctcgcctgggcgagctgctgtgcaacctccacccctcattttcctataaataggcgtgaggggctaaggagaaggcttcaacacctgatattgagtaaaattagtgagaagaaggagaaagaagaagaaaaaatgaggccgaggcacttctgtaacatttctgtgatcgattttgtgatcgttgtttgttgttcttcatccgctcttcattgtacttcgttctctgaccgattagattttatttttgaagatgtgaatccattctatgcacccttaggggtcccctcgtgctt

SEQ ID NO: 23369 - DNA, 287 bp, Glycine max
  unsure (1)..(287): unsure at all n locations
agcttattatttagtcctttcctagggaaacgttctcattcttctgttgtcttccttgctctgaaatctgaatcttattcttagacacgagttaaaaggtcagatttcagatttcagatactcagtttcttgaatcttggatgataagttagcttaaggcaagagatctgttccatggtcatcagagttgtatttaatagtatttaattataatttatgtccccaataacaaatattntaggtgatattatccattatctgatgcttttaatgattaatatctgatc

SEQ ID NO: 23370 - DNA, 443 bp, Glycine max
  unsure (1)..(443): unsure at all n locations
tgtccttcacggcaaacatgatagcactggcatgttctgcagcattttctacaattggaagcaagatgacagaaataaaagccactgacatattcaatgactcagatgctccctgcaagagaccagaaacacaatgtcaatgaatgaacttatgatgcagaatttatggataataggaatattgtgaatgtatgaatacagagttttgatgatgtcaaagtaaaatcaaacaaggttgtttcaacaaacattattgctttaagattaattcaaggtcaaacaaataagatcaagaaaaagataaggtctcaaataatctcactggttgatngatttttgccttaaaacaaattgtttccaagagatcaaaggctctagtattcgattactaggcaatgtaatcgattaccaggagacaagtttaccaaatcaactttaaaaaa

SEQ ID NO: 23371 - DNA, 394 bp, Glycine max
agcttgttccacatgtcatttatgggttataacaaagcttctctagacataaataaataaatacagcgctatttaactgtgaactcattaataaataataccttcgagttccatagtaatggatgtgtaagaaataaaaaattatttttttatccttaatatatagttgatttatgcatctgacccttgatatatactcattttttgtattgggaccctaataatttttttttatcgaattgcgttcctaatattttaaaattttatcataggtccctactattagtcatgatccattattaacttacatgacccttaaccagacatgtaagcatgtcacgtgtgatgtcacgtgtacgcgttagtaagattgcacgtgggaatttttttaatt

SEQ ID NO: 23372 - DNA, 411 bp, Glycine max
  unsure (1)..(411): unsure at all n locations
nttcatagatatgatactaatgatttgtatatttatgtgtttcattttcaatgtgtggaaaaggagttttagttgcattgtaatttaagcataacaaattctcatttactaataagaatagtcgtgtgagaacaaacagtttggatggacagtcttgctagctcaagttcaggtattgggatgtaaaactctcatgttaactgattgtgctagagagttcttacagttgttccatttaaagattctcttaagtagatgtacttactctccaatgatattataaacctgctatggatctaattgtcaagaatattatatctatgaacatattattgcagagttatattcataagaccactgtatgttgttcacatgttccatcactctctactggagtgaataattctatga

SEQ ID NO: 23373 - DNA, 394 bp, Glycine max
  unsure (1)..(394): unsure at all n locations
agcttatacttcgtatccaatgcttgaccactttttatcttttacttaaatcattcatccttaagctattcctttattagcttcaaaagcccatatatttccagttaaaatggtttgaccatgaaaattctcccatcacggatgttggcttacatattttaggcaccaaggaagtcctcaaaatgtcatgatattcatgcaatgaaataaagttcttggttactaaaccaatggcggagcatcaatcatgttaattatgggaaattntcataagttcttctataatattcatgcaagtggttcaacttagtacatgaatcagtactcactgatatgtttggcagcaagaaatcgactactttgtgtaattcctcagccatccaaattacatttg

SEQ ID NO: 23374 - DNA, 388 bp, Glycine max
agctttgatttcttggaactgctcctcactctcatcaacaagaccagcggagcagtatacgcttaacaccacttcaagtgtcagctcattaggttcacaatttgctttttccatttcaacataagattttacagcctcttcatactgaccttcttgcctaaaagctttgatcacaccattgaatgaatgcacatcccgttttaaaccagactcattcatcctggataaaattgcttctgcttctttgtacagtcccccccttgcaaatgcatgaatgaatgaattgtaggtctcaacagttgggttgcttccaacttcattcatagtgttaaacacaacaagagcctcttcatacagtgcagcctgccccaacgctcatcacccagta

SEQ ID NO: 23375 - DNA, 425 bp, Glycine max
tattattttacacccttggacaagtccggaactgaaagagggaatccactatcttttacaagagaaatctataagctatatattgccctgaccattagtagcaatcacataacgtagaaatcaagtttgtacttccctcaataaacccattttccagaagcatctcaaatcaattgaattcatgggtgctgagaggcctctaggattgattgtctaaactgtttgatgttatcgaacaagtctcaatctttctgccattgatttcatacactacctactgctaaaacatagtcacaatgcatgcaccggaaaaaataatgttactgtgacatacttgagctccactatgtagagcctcttaaagtaagttaaaaaaataaaatagaaaactaacatcattgattaaagcaaccactacaatgaat

SEQ ID NO: 23376 - DNA, 374 bp, Glycine max
  unsure (1)..(374): unsure at all n locations
agctttgagggtgcgtagcccaccatcttttcatatgtagagtatcgataatgtgtctaccatcacgattatcgtctccctttccatcattgggggtaccacttgggccgccagatccctccaccttttangcgtgttctttgaaagatccgtccccctttttgcaaatgttctatagttgcatcctatccggaaccatatcaaaattgtactgatactgcctaacaaaggcaaccattatgtccttccaagaatggactcgggaagattccaagttagtgtaccaggtaacagctaccccagtaagactttcttggaaggaatgtattagcaattcctcatcttttgcggattcccccatcttctgacaatac

SEQ ID NO: 23377 - DNA, 421 bp, Glycine max
tctacttatgtggcagggcgggcttccttcaccttcttgtctccaacgcgaactttgaccattgttcttccttcccgcaatgcttcttttcatgtctgcctgagtgggcttatagcctaaaccatacttcccacgatttccttgagtatttatcaggctagttatgccgccgttgttttttcctaaacccatcccgggttcaaaaccgttccccaacataactcgggccatcattaccgctgcatcggacagacaaggttgcccaaagagggagtccacggaggaaatgctgaccacctcaaaagactggaaagcagtttctaacgattcttctgcggctttcacataaggcatggaggatgggcagcttaccaagatatcttcctcgcctgacacgatgaccaagtgcccctccactacg

SEQ ID NO: 23378 - DNA, 291 bp, Glycine max
  unsure (1)..(291): unsure at all n locations
agcttgctctaaatttacattaatgtttgtatgccatttttgttttaagaatagtgtcccactggtaaaactaactttccaaatgtttgccttcgcaggaaatggccccgaggaagcttgcctcaaagaggtccaggaaggacaaggcaaccgaaggaactaattccgctccggagtatgatagtcaccgctttaggagtgctgtacaccagcagcgcttcgaggccatcaagggatggtcgtttcttcgggagcgacgcgtncagctcangaacgatgagtatactgatt

SEQ ID NO: 23379 - DNA, 206 bp, Glycine max
tgtagaacgactagacatgatatatgtcagggttgtttgtttgccaatggttcaggtataaaggaatgtcctacattatttccatgacacgtgtgcaacaatgatgattcacaaatgatatgcaacattggtcatgcatgcacctatgtggacactcaaacatcgagttttgtggtcatgtgacactatggctcatgattcttttt

SEQ ID NO: 23380 - DNA, 322 bp, Glycine max
  unsure (1)..(322): unsure at all n locations
agcttgcccagagaaggaatccacggatgaaatgcttaccacctcgaaagactggaaagcggtttctaatgactcctctgcggcctccacataaggcatagaggatgggcaactgaccaagatatcttcctcgcctgatacgatgaccagatgcccttccactacgaatttcaacttttggtggagtgtagaaagaacaactcccactgagtggatccacgggcgccccaacagacagctgtaggggggggttaatgtncattatttggaaggtaacttggcatgtataatggcctatctgtactgggagatcgatctcccc

SEQ ID NO: 23381 - DNA, 360 bp, Glycine max
tgacaggttcaggtgcaggtgctgctactggtggaggcacttgaatttggttgccagacctcaaggtgatggcactcacatttttcggattctgcacagtttgtgaaggcaatttgtcagaattctgggactgagcttggttcatctgagtagccatctgccccatctgatttgtcagactctgaatagaagctcttgtctcttgctgaaattgcatattctggatggtcatttgcctcactaactcttctaaggaaggttgaggaggggccttagttgcttgttgtctttgttgttgttgctactgctgctactgtaatggaggaagaacatatggcttgcttggaccagcaacatttt

SEQ ID NO: 23382 - DNA, 350 bp, Glycine max
  unsure (1)..(350): unsure at all n locations
agctttntgacttctaggtggaaattgatggatcattataatgtcgatggtagcttttgtatgtttttgtccagatggtgtccattgatttatatgaatacacctaccttcttctctgttaacagcgttgttactgtatttagggactttcttacttggttgtaggttttcatgtgtcgtgaatttttcggtgagtggtttcatggtcatagaaatgagagaatctgcttcgagctaaaacattgttagtgaagactagaacaagaaatgaacaagtctaagtgtttttaaaataaatgaaaggggtggggacgcatattgttagtcttttgatgaatcagtccacatgt

SEQ ID NO: 23383 - DNA, 425 bp, Glycine max
  unsure (1)..(425): unsure at all n locations
tctgcgtcctttggtatataagcggtcctttggaatgtcactagaagctgaagtagcaaattgcatgaattaaattattgcattttcccaaagtttgaattaatggcaggttcatttggttggcaagtgtgcagtctcaatcactgtttctaaagagtcaaggttgtaggggcattagaatcattggcaagctacacaggtgtgcaagcaactgaacggttatttgtgcatagtaaataattatattataaatgcttttaatactacacattttgtgggtcaactgaatctgataattgggccaacaacatgatcaaacaatgcagactgaggtttgccacttgggttgctaatttaataaacttgngctgatttgaaattttggcatagatgaatgcagagcatgtatgtagatagatgaatgc

SEQ ID NO: 23384 - DNA, 352 bp, Glycine max
agcttgtaggattatggggtacccgtctcatgtggtactaggtggcggtcgggtgatggtgcaagtcgactatccagatccacaaatcacacatgaatccaccattcccaattgcccaccttcaactgagctcacgtactcccacgtagcccttatcctcgttcctctcaacaccgggtccccatcaatccccccaagcttccacaacatccaagaaatttcaacatccaaacatcatgaactatcaaaaccaagcaaaatagggtagaggcagaaaactttgcccaaaacacaaaccaataccacaacttttcttactcaaatacccgaataacattcccttcgttccaat

SEQ ID NO: 23385 - DNA, 419 bp, Glycine max
  unsure (1)..(419): unsure at all n locations
ctaacctcatcgtccctcacagtctntagatttgggagcctttccaatccttgtgttcggactctcagccacttatgatagccgccgatgatcccattactgcttccgctaagctctctgtcctttcttcacgccgcatcccatgccttgcgaactccttggagtaccctcgcgttgtggtcactaaaaccccgtgcgatgaaaggcgtgatgctttcgtctaatggcgctcctctcatggggtagccaagctgtcttatggtgagaacgggattataattaatacaaccccttgttcccatcaagggaacatttggacatccttcgcatgaagatagaatcctgattcttccttccttctagcgagggaaccatataacagacgcccccccatgctagncaagagttggtcccattcg

SEQ ID NO: 23386 - DNA, 402 bp, Glycine max
agcttgtctcagcgtttatgcgagatggagaccattatgctagctatcatcgctaagtaccaagaagagttgggtctagccatggcccacgagcatagaatcgcggacgagtatgctcaagtgtacgcggaaaaagaggctagaggaagggtgatcgactctttataccaagaggcaaccatgtggatggaccggtttgctcttaccttgaacgggagtcaagaacttccccgcttattagccaaggccaaggcgatggcagacacctactccacccccgaagagattcatgggcttctcggctattgtcagcatatgatagacttaatggcccacataattagaaatcgttaggaaacttgtatggtctctcagaccttgactagatatgacttctttttg

SEQ ID NO: 23387 - DNA, 419 bp, Glycine max
  unsure (1)..(419): unsure at all n locations
ggaccttgaaactaagcttgttctttnataaaatgagaagttctgaactcatcacgttatctaaaaaaccttggggtggatccaagtgctccgatcattcatttgcatattcatgttttggtggcatactcaccgttgtatgtttctttagggagttcaccataactaagaaagcacaaaggcacccctataacactcgatccaaaaaaatggataatgaagagggcgtgcaagagcagatgaaggccgatctatcggccttaaaagatcaaatggcttctatcatagaggccatgctaaaactccagaaaactctagaggataatgccacggcaaccgcctccaatgcagttagggaagcggaaccagtgcttcagcccacgataaacttgggctgggatagaaacccaaacggtgtt

SEQ ID NO: 23388 - DNA, 188 bp, Glycine max
agaatactaagcttcggcattctagtccaagcgtctcgatatattacgggttctttatcatgacatccgagttaaaagttattgtaatttgaatttgttcacagcttcaatattcaaatacgagcgtctcgatatattacgggactcatatcagacatccgagtgaatagttgtcgtcctttgaattt

SEQ ID NO: 23389 - DNA, 176 bp, Glycine max
agctttataatacctagttgtttcctctttctactcctttcaatgtcttactctagttctaatgggggagtctctggttgtccaccagaaatccatgttagagaggaaggttctgggaatacggaaagatgagacaaatttatcattcggctcttatatttcacaccctctttttg

SEQ ID NO: 23390 - DNA, 440 bp, Glycine max
  unsure (1)..(440): unsure at all n locations
tcttatagttttcgaaagagtaagttttatctatcactctattcaacccctcttctagtgtgtttcaggtattccaatagtactcttatcaagtacaattttgcacctttgaagtacttataaactttatgtttagaccaattatctaattgcttgctcattattgacattntgtgatcacataaatctagagtatcgttttatttaacctaggtgcctatgtcacttaagtagaaaattaaccgatttcttaattgtctttgggtgtacatagtcacttattntgtgaatattagattaattgaatgtcaaatatagcaagagcctttgttaatttagcctatatgtggtcagtcttgttattaggctattgtgaacacttagatgcatgtggatttcattatggactttacaacttntcagacttaaaatggcatgat

SEQ ID NO: 23391 - DNA, 297 bp, Glycine max
  unsure (1)..(297): unsure at all n locations
agctntataaatacctagttgtttcctctttctactcctttcaatgtcttactctagttctaatgggggagtctctggttgtccaccagaaatccatgttagagaggaaggttctgggaatatggaaagatgagacaaatttatcattcggctcttctatttcacaccctctttttgaagatgatacttttgaaaatttgatgaagggagcatagataacctctagtgttaaggttgttgctggagaaaccgccgatgatgacattaacatcattcctgttgagtttgatgaggaat

SEQ ID NO: 23392 - DNA, 60 bp, Glycine max
tcttataggtttcgaaagagtaagctgtatctattactctattcaacccctcttctagtg

SEQ ID NO: 23393 - DNA, 223 bp, Glycine max
agcttcttgaggaagcctcttaatgaagcttcttgaggaagctacatgaagctaccttggtaaaaatgttgcctagccttcgttaaccgttggatcttctcgaaattttgtctgtagcttcacaagacacttgtccacgatctaaccgttgggatcgttgagaagatgtctggagtgtgctcgaagctttcgttctcgagagcatttcttatttaagcatttc

SEQ ID NO: 23394 - DNA, 213 bp, Glycine max
tgtgactcatagttgtgctaagccatattctgccccttctgtgcaatatgacaaccattttgggggatagaggaccggtggattcaagcccactagtggacgacttcacccaactggtgggagttctcagccagttaacaaggtgtcttaatctgttggtagaagtggtggtggtcctgctactgtgtctacaccactcctgtgtgggaagtg

SEQ ID NO: 23395 - DNA, 385 bp, Glycine max
  unsure (1)..(385): unsure at all n locations
agcttgtaggattatggtgtacccatcttatgtggtactaggtggtggtcgggcgatggtgcacaacaagttttccacatccacaatgcgcgcataaacccaccatcccctgttgcccacctccaactgagctcacgtactcccacgtagcccatatcctcgtttctctcaataccgggtccccatcaatcctcccattcttccacaacatccaagcaaaacaacattcaaacagcacaagctatcacagccaagcaaaacagagcaaaggcagaaaactctgccaaaacaccaaccaaatcacagcttttctcacttaaagaccccagtaacaattccttcgttccggntcattaaccgtnggatcaactcgaaaatttactgg

SEQ ID NO: 23396 - DNA, 428 bp, Glycine max
  unsure (1)..(428): unsure at all n locations
ttntggagtagaaacatgggaccaactcattttattttaaaaaggaagtcgtatctagtcaaggtcttagagaccatacaagtttcctaacgatttctaattatgtgggccattaagtctatcatatgctgacaatagccgagaagcccgtgaatctcttcgggggcggagtaggtgtctgccatcgctttggccttggctaacaatcggggaagttcttgactcccgttcaaggtaagagcaaaccgatccatccacatggttgcctcttggtgtaaagagtcgatcacccttcctctagcctctttntccgcgtatacttgggcatactcatccgcgattctatgctcgtgggccgtggctagacctaactcttcttggtacttggcgatgatagctaacatgttggtctctgtctcgcataaacg

SEQ ID NO: 23397 - DNA, 348 bp, Glycine max
agcttgtctcagtgtgagatttaggtaaaaaaaatgaatgcatgctagagatgaaatgcgggagtgatttgattcgcactgatctttggagtaaaaacgtgggataaactcattttattcagaaagtttattaactagccaagatctgagcgataatacaaacttcctagcgatttctaattatatgggccattaagtctatcatatgctgacaatagcttagaagtctgtggatctcctcggggacggagtaggtgtccaccattgctttggctttggctagcaatcgaggaaggtcttgactcccgttcaaagtaagaaaaaatcggttcattcacatttgttgtc

SEQ ID NO: 23398 - DNA, 425 bp, Glycine max
gtgggaggtctggacttgacatccgaactgacattcatggctgattctgtctgcctcgagcttcagagtgggaatgccagcatcagcacttatgatgcggatgaattgggcgtctgagtgaagcggatggccatacgagtgatgccatatcttgactgcatcatctttggaggatagacatgtggtggagctgctggggacatggggtgtacataggttggaagtgtacattgatctggtgccctcaagtagaacttcactcttctcattatgtaccgcgcctgctgactacgtgaaggtgacatggtatgcttcatgacacagctgacagatgctgatgaagattgcagacagaccctataccaacagggcttggatcagactacgaagtccatcatgagcgtgctttgccattgcaatgacct

SEQ ID NO: 23399 - DNA, 128 bp, Glycine max
gcttagtttatgtgacattcacaattgtatgatagtgcagacaaattttatagcgacaataatttatggttaaaccccataagaataagcttacttctgtttcatcacgagaactattgattcttttt

SEQ ID NO: 23400 - DNA, 254 bp, Glycine max
agattgaaatatggacttcttttatttaagaagaagatagggaatgttttaaatataccggtgaaaaacgtaaagaatcaagatttgatggtttattcttagtcctcttacatgtgaaattttcataatgaacccaacccttgcaccctggaaaaagttgatactcgtgatcctgtcccttattgtaggatgttcctcatgattggcatccgtgcatctcatgaacagggatttccagactggggagtagatgt

SEQ ID NO: 23401 - DNA, 371 bp, Glycine max
agctttccattttatagctacagaatgttaatgatgtcatggatgcaattcaagccaacctaaagaaaaaagaacagattgaggagcttgtcttggagtgggataatgacccacaagattcgcaaattgccaaagatgtacttcaaaacttgcaaccatcaacaaattaaagaaactcaacattagatcctatggcggcacaatctttccaaaatggttaagtgattcttcaaattccaatgttataacccttgtcatcactgattggaattattgttggtcactttcaccatttggtcaattaccttctcttaaggagcttgtcattatgaggatgcacatggtgaatggtataggtcatgaaatctact

SEQ ID NO: 23402 - DNA, 411 bp, Glycine max
  unsure (1)..(411): unsure at all n locations
tagctaaaagatgtgctggcttattagcctctctgcttacatgattgcattggacgttttcatcaagtgaacagtcgagaggggattaagattcaactataatttttctaaaaccttcatgccaaatcaagcagaggccatgataggtcccccaaagttctgcaatttaaagtactgtctctaagaattccactgcaacctgttagaggaaagaagatatcaattgaagcattaacttttacccaatcaatatgaggaggctgccatcttatagcactagaatttgttatttaaagttntgattgaatgactcacataaatcctaatattcactggctaaggagaagtcttgcatgganttttaatggtcttgctagtaaaaaccaaattatntatcaattctccaataca

SEQ ID NO: 23403 - DNA, 307 bp, Glycine max
agctttataagcgcgggttcgggagactaaggtcaagcgttcgcgatatgcgaagatgatattccgagtactttggatttggtacgaccatgctctcctgatttccagctgggaaattggcgagtggaggaacgccccggcatttacgcaacaagcataatgtaaacctttacggttttaaaagctctatagttgggcctatgctttagagttttcattttgctaaggctttgtgtcttttgtgtttgaatttataatacaaggatctttcttcatctgttcctggtctctacccatactcattcat

SEQ ID NO: 23404 - DNA, 406 bp, Glycine max
tgaaccaaaaccggtgagagtgtgatcttaaattgtgatgtgaacgactagctgcgagtaataatctttgcatgaatctctgaattttagaatgaaatgtataaatgaggacatgatgaaggccatgattgtacatacacaagccttttgaccaaaaagcttaccttgaattataattgtatcctttgcacccttttgagctaaatgatattgtcaaaaatttgaaccctgaacttaaataattatctccagataccttgtttagattctaggagagcatatggttcaaggaaaatttaccccaaatttcggggagtggaactaattgggatgcaaagaaagagataaagcatcagcacacacaacatataagttgagtgtttaaaaagaaaaaaaaaaaggaaaa

SEQ ID NO: 23405 - DNA, 110 bp, Glycine max
agcttgtgttgatccaatatggttgaatcattctcacaaaatagagtgaccctgactggtcaccttatgattttcttagtgagagtgacccgacatacccttgtgtggtg

SEQ ID NO: 23406 - DNA, 174 bp, Glycine max
cttctagccaaatggacttaccttgaattaattcctctgttttctcctttgagcctatgatcccctttctttgttctgaatctcattacaagccttaagtgaaaaaccatgatatcaccttacccttaaggaattttggagcttcggaattgttctgggaataagtgtgggggg

SEQ ID NO: 23407 - DNA, 150 bp, Glycine max
agcttatggcagatcaaggagaagcttttctgattccgagagatacaggagacttatgaaaaaattcatttatctcactattacaagaactgatatctcctttggtggtggagtggtgagtcaattaagcaaaatccttatgttgaacat

SEQ ID NO: 23408 - DNA, 374 bp, Glycine max
  unsure (1)..(374): unsure at all n locations
ggagccatttcctgcaaggacacgttcataaattttttttgcatgaactgcacaaactatcattttatttatcttaaacaagcaaagaccaaacaattttgaatggtgcgtatttctttttaccaaatgcaagtgtcaccgtgcaattagaaaacaatcatacattggtgcatatatcatatatatctttttttgaaaagcattttagctacctagatgcaaggtgcctatcattgtgtagcaagttcaaacattagtctaaattcaaaaaaccactctcacacatttatgtaattcattcattttacacctcaaactnacgttagatttctatgcctaactcatgcttcttggatttgaatttaacaacctaa

SEQ ID NO: 23409 - DNA, 257 bp, Glycine max
agcttaatcctcatggccactgtttctttcataagtcacaagtgttttaatgaattcttcaaataaacaaccaacacaagtcttaacttttgcatttcatatcatgtcatacaatcacaaacacacaaattgaatctgaaggagtttcttagcttgggctacaaacaattcatggtttttctaggatgcaatacttaggttctaggagagcattcatccttggatcacctttttcttttaattcccagcttctattg

SEQ ID NO: 23410 - DNA, 428 bp, Glycine max
  unsure (1)..(428): unsure at all n locations
nttaagaagacaatttccaatcatgctatcctatgcaatgactattaacaagtctcaaggccaatcactttctatagttgaactttaatggccaaaaccagtttttagccatggacaattatacgttgcattatcaagggtcaattcaaggcaaggattaaaagttcttattcatgataaagagcaaaaaaatatgacttctactactaatgtagtcttcaaagaggttttcaaaaatcttacaaggtaactctaaattttcaaacaacaaattgtactatctattgacaacaattcctaactgttatcttactcttatacattctaacatacagccaaagatgatatcatatattacaatgttaaattttacattgtcaggtatgtaatcttaatcaccacattaatatcatccatttataatttca

SEQ ID NO: 23411 - DNA, 396 bp, Glycine max
  unsure (1)..(396): unsure at all n locations
ctaganaactatagaggataataccacggcgaccgcttcctttatcagcaagggaagtgaaaccggtgctacaactcacaataaacttgggccgagatagaaacacgacggtgttcagtcaaaggtatagtcctcaagcttacccttatggctngcctccggacttcactccccataccactccgaaagatttgagccaagcccctaccttcgaggggcaactccctccttatgccgactatcccctgcaagaagatgatgaaggagatgcccatctttgccctctatcttctctcaaagatccggccctctattaattatcccaaccaatcatatgtcgccttgtcccgtctccaccctcaccctgtatttaatccgctccctttgtaaacataa

SEQ ID NO: 23412 - DNA, 441 bp, Glycine max
  unsure (1)..(441): unsure at all n locations
gtgtaactcttgacaatttctttatgactagtcacttataaagttgtgaattgtgaacgaatattcagaaactagtcacttgaacaattgtgactgtcggaaatgtattcttcgaaatcaatcattggtaatcggatgccatttaagtgcaatcgattacacatcgacccatgtgactctgcatactgaagcgtgaaagtcggaacattttaaaacactagggatcgatggcatgatgatggtgatcgattacagctttgtggatcagtttgaaaaacaatgctggctactggtaatcgattaccagaagaaaaactctttggtataagattttgtgaaaacttcatgtgctactcaatgttttgaaaaacattntagtacttatcttgattgaggattctcttgattctggaatcttgagtcttgaatcttgaaacttga

SEQ ID NO: 23413 - DNA, 342 bp, Glycine max
  unsure (1)..(342): unsure at all n locations
ngctcgtcttgctgatatttatcatgcacacttttcttatgatgacctacgaacaattagggatcaacttgaaacttatgtgcttcaagtgagaagaaatgcttctttttccacttgtgaagatgttcaaagtttggctatgaagatggttcagactgagaaacatttggtatttccattggtttataaacttattgagctagctntgatattgccggtgtcgacagcatccgttgaaagagctttttcatcaatgaagattatcaagtctaaattgcgcaataagatcaacgatgtgtggttcaatgacttgactggatgttacaccgagcggcacatatt

SEQ ID NO: 23414 - DNA, 248 bp, Glycine max
  unsure (1)..(248): unsure at all n locations
agctttgtagggnngaatatgatgtctatttatattgtanannnggaaaatccaatacatggaatcatggatgctgcacagggcttcgaaaggtttaacgaaacaaaagagttaaaacaacgacatgaatgtgactgtatagaattcatagatagtgaaattgcttaattcaactaaaatgggtgggcatgatgacattgatggatgaaattgtcacatgttatagtccaataattaattaatcaaaa

SEQ ID NO: 23415 - DNA, 323 bp, Glycine max
gtagtttcagatgatgcagatgggtttgtagctattcatgcactcctctaatgactatggcatcatttatggcgctaaactgctgggagttggaggccatcttctcaattaaatttctggcttcagcaggagtcatgtttccaagggctccaccactggcagcatctatcatacttctgtccatattactgatcccttcataaaaatattggagaagaagctgctctaaaatctgatggtgggggcaactggcacatactctcttaaatctctcccagttctcatacatgctctcttcactgagttgtataatacctgagatt

SEQ ID NO: 23416 - DNA, 289 bp, Glycine max
actttgaaagtagatgaggtgaccaccgctcttaaagaaaaccagagaatgataagaaccgaaaatattgatgatgaacataacgcaatagttgtgatggagtttgcgcgagggagaaatcattcaaggagacatgatgggccaaaaggaagatcaaaatcaaaatcgcgcgcacaacgagataagaagaatatacaatattattattgcgatgagaatggtcatgtgcaagtgaggtgcaaacaaatgaatgacgacttgaagaaattaagagatatgaacaaagatg

SEQ ID NO: 23417 - DNA, 419 bp, Glycine max
  unsure (1)..(419): unsure at all n locations
tcatcctcaaatccctcttgttggactaggccctattttacagtcctcctaggtttagactaacttaaactaagcttcgtcctcagatccttcttattggactagactcaacttaaatagcttacgaacgtttagcctaatttaccctaagcttcatcctcagatccctcttgttggactagacttagaccaaacaacattattgtaacaacatatataaaaccaaaacttaatccgcagatccctcttgtaagactaagtttcaatcctgcttcaatcaagttctaaggaaacaatacatttctcaatgctaaagtcacctaactatgcacacaaatgggtgatcagactaagagcatacaaaanttaagcactgaaagaagcattgtacacacgaaacacaatcaattagatattta

SEQ ID NO: 23418 - DNA, 254 bp, Glycine max
ttaattcattatgaataataaaccttatcttttgaatatttattcaactggataatcctggtatccagattatcttgttacaaagaaaaaacagaaagtccattcatcaaagagaaaaaaacagaaaatcctaacgacccttattttttttccagtgaaataaagtttattttggtttaatttgaagcttgagttgagctacctattatatttttagtaatctctatattataaaatttctagttatccatata

SEQ ID NO: 23419 - DNA, 430 bp, Glycine max
tgttccaggcatggaagcttacaaggcatgcatggattaagtcctaggcaatttgaagaaagaactttgatatgcatgaatctcaaatccggtttctagaagttacaaaattcatacatgtactggaaagaagttcagaaatgtgtagaaaacatctgatgttgaattttgcattggtaatgttcatacatgtaaggtactaaggtttataaatgtgtgtatatgtataagtgggactcctctcaactaaatttttcgtacacatcaaaatgcagtagatccgatggctctagaaaacaagtcatatgctacttacagaataaacaagtcaactcttcatcacaaaatgttcatccgagatcttcattaccaaactctattgaattcagggtacataagaattgtaaatactgcttagcgaatctattta

SEQ ID NO: 23420 - DNA, 94 bp, Glycine max
  unsure (1)..(94): unsure at all n locations
agctntaagtgaaaaaccattatatctttcttacccttaaggaattttggagctttggaattgttttgggaataagtgtggggggtatgtttca

SEQ ID NO: 23421 - DNA, 417 bp, Glycine max
tatcggacttgatttccctctgtttcctcttctctttctccaatattaagtgaaataggcttactcaaagttttaggaattttacggaagcattacgaaagccccgaaaaccattctccaacaaaacgtggaggatcttgataagttcaccccacctttgctaaatgcactcctgtttatttacagacaccccactttgctaaatacactcccgttttcgtgttttgttttaccggtttcttcccgaaatgttacgaaactttacggattacgtaatgacacccatttcctttccgaaatgttttcaaactttacgaattacacaacaaggctcttcttgactatcggaatgttgcagaactttacagattgtgttacaatgcttcctttcgactttcggaacggtgtggaacttta

SEQ ID NO: 23422 - DNA, 426 bp, Glycine max
tcttgttgtaacggactcaaccacttcaccactctcctttaacgcatcaccttccacgttacccatcaaacttcacaacaaaacgttcacgttttcatttatttttttaaaggaagaaatgttgatgatttcataaaatattcctcacttataaatatttaaacattacaaaatagttatacaaacattttttaagatattgaattcgaataattaaaaaaacaaacagaagcctaaataatttttactctctagatgaatctattcaaatcaacttaaattagtggttttctatgcttgttaaataattccctcattcatttgaatatcaaaagttaattttaaatatatgtatcttgtcttgacaatttacatatgttcctaaactagctactatcgctctagtttacatacatggcatgaata

SEQ ID NO: 23423 - DNA, 303 bp, Glycine max
  unsure (1)..(303): unsure at all n locations
agcttgaagaagagcttgatgaagttttttcttttacatgctcaactctcttaagtggcatttgtattgattgttgcattgtgtgttgcatcttaatctctatcttttcatatgtgcctcatgcatcatcatgtcggagtaaagagaaagtttgtaaagttagaaaatttcttcataaggcaaaactctctattttaattgattacaaccttacagtaatcaattacacaagttgttttaagctttgagagaaatgtcttcgcatcaatntacatcgattacaagtttatcgtaatcgattac

SEQ ID NO: 23424 - DNA, 378 bp, Glycine max
  unsure (1)..(378): unsure at all n locations
ngagatgaggaagtgttgaagggtgaaacttcctgcttttattgttgaccacagagtggtacctggagatatgtcgcgggggtcaggagaccttggggacgtcaagtggggtgctattgcccaaaaccaaacttgaccaatcccgacccaacccgggcatattctgtcagtgagaacctgtgatgtacctaaacaggcgagctcctggcagtcaacagattaaacgaacaaagaccacaaagcaaggatgcttgtggtggctggccagctgtgaactttgattgatatgtgggttatggcctctggtaatcaattaccaacggtgggtaatcgattacaaggcttaaaaatgaagacaggatgctgagatggtctctg

SEQ ID NO: 23425 - DNA, 383 bp, Glycine max
  unsure (1)..(383): unsure at all n locations
ctcattgtagaacaccggtaacgtggatactatcattgggatcatccctctntntggcantgaaagtgccacttgagctggcaaggccctncnnctttgggcgtaatccttgaatgactcatgctccttcgtacacaagttttcgaactcccatcttacctccactcacaatcccattatgctgtcactccccaccccaacgcctgtacattcactgctcgacaaatccctnnngnncggctcagcgcacgacccaccgcaccaccgccactcacgaccacttctgttatcccccatatcactaccaacacttctcatcttcacccttcctgtcgtcaacnnncnatggactatctaaccacttcatccctactctaccgccg

SEQ ID NO: 23426 - DNA, 278 bp, Glycine max
tctcgattcattctatgtacccgtagtggtccacattttgtttcgtgcatttctatcctcgctttggatactttatatacccccctcttgacgtgcttaagccattttactcaagtcatttctcgcttaacttaaaaatatatataaatttccaccgaatgtttgaattgtattatccattaacttctgttgaaatcaattccgaccgctctgtcttgccgtaaccactgtggatatctaaaagatgttaaaaatgatttaatgatcaaaaacatatc

SEQ ID NO: 23427 - DNA, 406 bp, Glycine max
  unsure (1)..(406): unsure at all n locations
agcttttgtgaaaacttcatgtgctactcaatgttttgaaaaaaaattntgtacttatcttgattgagccttttcttgattcttgaatcttgagtcttgaatcttgatcttgattgttcttgattcttaattcttgaaaacttgaaacttgaaacttctcttgaatctttctcttgattcttgaattgttcttgactcaatcttgaaatcattctcatgggctttttgtcatcatctttgttatcatcaaaacaccttgaatcaatcttgattcatcatcatgaagcaatgaagcttgcttctacatttagaacggttccaagatatatttttaagacgtgatgccctccctggagttattgtgactgacagagacctagcattgatgaatgcattgaaaactgta

SEQ ID NO: 23428 - DNA, 282 bp, Glycine max
aagagagtcactgctgatgtctgctgtttcaagtgttgcctctcctagttcagctctcactattaataataatagttctactgtaatgtctgattctatttctccttctctcagtatttctaatctctagcatgctaggttatggcatcctaatgatcatgtaatgaaacttgttctcagtcattgtaatatttcttcatcaaacaaaaattcctcagggttttatgcttcttgttgatggcttaatctcatatattaccttcctatacttctacttctgac

SEQ ID NO: 23429 - DNA, 130 bp, Glycine max
agcttgcctaattagcctgaaattgagggaaaatgattattaaacacccaaaatggaagcactaagtatttattacctatacttaacagaaaatacttataacactacaatttacacaagttttatacac

SEQ ID NO: 23430 - DNA, 433 bp, Glycine max
cttctttggaccttgaacaagcaatcaactcctctttcagaaccatgctatgtgctcgcgaatggtctctttcttcccttcgcaacttaagttcattattgctaccccatagagctccgcaaaatttgttccggccatactcttccttgcgagccctcttggtctctcgttcaagggcccttgcggtaattgcattctcttcccgtaacccggcacactccttccgaacgtgtgtagcagccaacttgaacttctccttggcgagttttgcctttcctaactcgcttttgagagcttggacttcctcgtcctcttccggtgcttcaaaattctcttcgctgacgacttttaacttggcgagccaatctaaacctcgtatgcgaactttcagccattcgtggtacccaccaatgatgccattacgaatgcctct

SEQ ID NO: 23431 - DNA, 133 bp, Glycine max
  unsure (1)..(133): unsure at all n locations
ctgttgcaagccagtggttggaggagaatgttggatgtgtgatgttgattcgnggagcgcataatcatgaattagccaagtcattagttgcacatccatatgcatggctattgactaaagctgaaaaaccact

SEQ ID NO: 23432 - DNA, 380 bp, Glycine max
  unsure (1)..(380): unsure at all n locations
tggtgtagagctngactttgtaagagccataagtgatattgaacaatactcgtagctcgtgtgaagttagtgaaacttggcggtgttccaagaattgaacgtagtctctgtacttcagactaacccacatgaagctttctgcgcttgaatcttcttgagtttctctaagctttatctgactaaagggtgcgaatattgttttagatttaaatagacatcttgtgttttctaaaatcatttttacattgtctgataggttttttgaaaaatctattatttgctttgtagaaagttctatcatatgaaaatgttgactctttggcaagtgtaccaattcgctctaagtagtaattctcggaagcccgagtatcatttccata

SEQ ID NO: 23433 - DNA, 192 bp, Glycine max
agcttctacttatgtggcatggcgggcttccttcaccttcttgtctcaactgcgagctttgactaccgttcttccttcccgcgatgcttctctttatatctgcctgagtgggcttatagcctaacccatacttcccacgatttcctttggcatttatcacgctagttatgccgccgctgtctttgcctaaac

SEQ ID NO: 23434 - DNA, 409 bp, Glycine max
  unsure (1)..(409): unsure at all n locations
gacactataaaactaagctatcggacttgattcccttgtgtcctcttctctattccaatatnaagngaaataagcttactcaaagttttaggaattttacggaagcattacgaaagccccgaaaaccattctccaacaaaacgtggaggatcttgataagttcacccaacctttgctaaatgcactcctgtttatttacagacaccccactttgctaaatacactcccgtattggtgtttgtttttaccggtttcttcccgaaatgttacgaaactctacggattacgtaatgacacccatttcctttccgaaatgtttcaaaactttacgaattacacaacaaggctcttcttgactatcggaatgttgcagaactctacagattgtgtaacaatgcttcctttcgac

SEQ ID NO: 23435 - DNA, 334 bp, Glycine max
  unsure (1)..(334): unsure at all n locations
agcttatagagagccccagtcattcatttatattagatggngnagaagtataggcgaatcagattagcattacttggattacacggatgaacccagctgatgctgttacaaccttgatcgtaccgttgacatgatatattgaagttaccggcttgcttaacatgtgcgtatgatgagtggacacgcatcagtgctactatgtctgactaacgtagatatgatattgcataacttgcagagtcgcatacccatatgcatgcacataggtacttagtatatattatgacataatcaaatgtcacaagtgactatgctatccattcttttcttaact

SEQ ID NO: 23436 - DNA, 380 bp, Glycine max
tgctcgcggatcctatgataagcagtgtcgagagacttatttgtgacactaaattctcagaagctacacacattatgagtctccgactcatatgctgcatcttctcttagctgaaggaaacacatggcgtatatggcctatgagtatatgactcatagactacatcatcttttcaggagaacgtgatagactcataggctacatctcctgttcgaagaagcatgcacataacatattatgtctatgagtattcgactcagagactacgttatgtgctggtgagggcgaatgaaaattaatcagaaacgcacattctgtactacaggaatataagacaatatccgctgtttaagaccttatcgaacatcttcaagaataaa

SEQ ID NO: 23437 - DNA, 263 bp, Glycine max
  unsure (1)..(263): unsure at all n locations
agcttttccaagtgctcttgagtctttctttcatgaagcttangtaaatgacctttgttttcaactctaagcttgattttcacttcattttgttgccctgttctcacttgtagtttcaaatcttatttttgtactcttgaaggttggaaactagaacctaaactccctcattctttcttctaaatattatggagactacaagaagtagggggtctctccaactcttgaaccctatgcttgctgttaaacttccttgaacatgt

SEQ ID NO: 23438 - DNA, 435 bp, Glycine max
  unsure (1)..(435): unsure at all n locations
ggcttgtaagcatcgtcccataggaatggttcaatttttcttagtagcatgtaaaatggctttgccttttttgcgagcttcgggaggaacttggacaaagacgctagtctaccatttagctnttgaacttctctgatgttagtaaggctatgtatttctagtattgcagtacacttgtcaaggttagcttcgattccccagtaggtgatcatgaagcccaaaaaaattttgtcgctgatcccaaaggtgcacttctcaagattgagatgcatgtcatacttgctagtctctccgaacacttccttcaaatctgctacatgttaagctatgctgtgagacttgacaaccatgtcatccacatagactttgacatttctgcctattnttcatttgaagacccagtccatgagccttttgtatgtagctttctcattc

SEQ ID NO: 23439 - DNA, 344 bp, Glycine max
agctttgagccaaaatcctgactcaccataaaccttgacccaaggtgagaatgccaatccttatcctcggaagcaaaaaaagaggagaagaaaatttccaatcaaaggaaaaaggagaagaaaatttccaatcaaagaacaagagaaagaaaatttccaatcaaaggaaaaaaaggaagcaaagaaattcccaatcaaagagtgggagaaagaaaaaaagaaaagataggaaattcccaaccaaagaatgggagaaagtaaaaaagaagaaagctcctgatcgaaagaaaacagaagaaatgtgcagagaggtctttggaccggacaatatctgaacaatacag

SEQ ID NO: 23440 - DNA, 375 bp, Glycine max
ttttggagtagaaacctgtgaccaactcattttattttataaaggaagtcatatctagtcaaggtctgagagaccatacaagtttcctaacgatttctaattatgtgggccattaagtctatcatatgctgacaatagccgagaagcccgtgaatctcttcgggggtggagtaggtgtctgccatcgccttggccttggctaacaatcggggaagttcttgactcccgttcaaggtaagagcaaaccgctccatccacatggttgcctcttggtgtaaagagtcgatcacccttcctctagcctctttttccgcatatacttgagcatactcatccgcgattctatgctcgtgggccgcggctagacctaactct

SEQ ID NO: 23441 - DNA, 361 bp, Glycine max
ccccaagggcagccacaaatcactaatgttaacaacataagtagcataaacaggaccatgcatacccaacatttgaaaggaatattcattcccaataagataagttccaaggcccaataaagtgctaacaacgggaataccaatcaagtccacaaagcgtctcaattcatcactggaattcaaactggcacctccgacgtagaagaccggcttttgggcctcggttatgaatctgacaatgtgctctaattgggcctcggtggggggcctgggaagcctggcgaggtacccggtgaggtttatggtcttcttctcacttgtactgctagttgctgttgaattctttgcgcactgctacaac

SEQ ID NO: 23442 - DNA, 414 bp, Glycine max
tcgaccaaatcttgggaaacctactcataggcaacctattatgtaatgtgcctcccacattggaatagaatatgagggaattgttaatggaagttaatcgtgtcatccaaaggaccttaatgccgtggataattgacataatatatacctagcttgtttgtttatttgcctatctgaagcatttgtatcataatgtgattgtcatttgtcaacataatgcttttgaagatactcaaaagtatggtcttcttacaacaattatgtcatagaagcacaatatgttatgcgttaaaaaaaacataaaagattctagttcaatgacaagttattgcagccctttgtatctggtatacgattcttatgcaaaaaaaaatgttcacgcattgaaattttaattggttgaacagtaatgag

SEQ ID NO: 23443 - DNA, 341 bp, Glycine max
  unsure (1)..(341): unsure at all n locations
agcttgcaacagacttcattggtaccttttctttttcctcaaaattcccatttaactaaatatcttttccctaatgtccctattacttgcattttttttttaaacttggatttgatctttgtttcattaattcattcactgcagctgaaatcattggatttacctcttatcaaccagcctacctcaacttaaagaccaaaggaaagaaccttttgaatggtgccaacttgcctcagcttctgctggttactttgaattgacatccaatctatatgtaaatacatttaaaagtctaaaactcattntttttcttctttcttntttaacatcatataattggt

SEQ ID NO: 23444 - DNA, 342 bp, Glycine max
agcttcttagtttcagatgatgcagatgggtttgtagctacctcatgcactcctctaatgactatggcatcatttctggcgctaaactgctgggagttggaggccatcttctcaattaaatttctggcttcagcaggagtcatgtctccaagggctccaccactggcagcatctatcatacttctctccatattactgagtccttcataaaaatattggagaagaagctgttctgaaatctgatggtgggggcaactggcacatagtttcttaaatctctcccagtactcatacaggctctctccactgagttgtcaaatacctgagatatccttcctgatg

SEQ ID NO: 23445 - DNA, 229 bp, Glycine max
tctcttagatctttaagtgcagattttcaggaatatgattgatctcatccagcgcaagttgttgcagcccagatacgcacactgctatataaacatgaatgctgcacgagttttccaccaagtccgggattgaagagttattttgtgagttttgggacttgagtgttttgtgagccaccttgatgttaccctaacatcaagcgttggacctgagtgtgttgagttgatc

SEQ ID NO: 23446 - DNA, 97 bp, Glycine max
aaaccaagcttgaccaatcccaacccaacccgggcatagtcagtcagtgagaacctgtgatgtacctaagcaagcgagctcctggcagtcaacagat

SEQ ID NO: 23447 - DNA, 399 bp, Glycine max
ggtcgaatggctagacatgatacatgtcacggtttggtttggttcaatgataaaagggatgccccacattatttccatgacacaaatgctataatgatgatttggaaactttatgcgaaactggtcatgcatgcacctatgtgggacactcaagtgtcaagattttatggtgatgtgatcctagggctcaggattcatttcctctattttagccaacccaacgtttccaaaatatgttcttttatcaattggcgcattcatccgagtccattttgggcgtccgggaaaattttcacagcattcacccttcaggtgtatacacatctttttttcaaaaatcgattatgatcaatgaattttttcaaagaaaagttggaggtcatctcttttcaaagcatg

SEQ ID NO: 23448 - DNA, 350 bp, Glycine max
  unsure (1)..(350): unsure at all n locations
ntgccgatttagttnttgtcggcgaaaagatcgaagtatgcctaagaaaaggcagatttgattacgctgcttcgatgaattctggtgataggaaccctgngccaaatggagggaataagaaggagggagaaacccatgttgtggatgccattcctacatggccaaatttcccattagcctaataatatcaatactcaaccaatatcagtccttctcattacccactattagtcgcttcatacgactaacttttgtatagaaatcattttccaaagcttgtatagttccccaatttatggttattttgtagtcaagaacactcaatcatccataaaggcaacccctaaatc

SEQ ID NO: 23449 - DNA, 326 bp, Glycine max
agctttcataggtgaaatcttgtgcaaccatttcccttagagtcctctcacggggtggatgttgtgccatgttcttagaatgttcaaaatcagaatgctcagaatcaaaatgctcaaaattataatgctcaaaatcaggatgttcaaaatcaccaataacagaatgcacagattcaccaataatggaatgctcaggatgatcaaaaggtataaaatgatgcctaactaatctatgaaatgtcctatctatctcaggatcaaagggttgtaagtcatatggattgcctctaaacatacactacattcatcatgcacaactaactgcc

SEQ ID NO: 23450 - DNA, 328 bp, Glycine max
tcttgtagtaatgaagaattgtttttggttgttattgttgtctacacaaaaaaatgaaacaactatataccttattgcatcaagcacaccaccaatgtttccatgcaagtattccatccttgacacatcttgaagtgatgaatttctcattgttcgttgacctaaaagacaagccagattttcatcgataatttaatccatttgaacttaccttgtgtgacattgacaacatatgttataaatggttcaccaaatcttgaataaatccatctacgcttaagttttacaattccaagcatttgacaaggtcatatgttggaaaatactc

SEQ ID NO: 23451 - DNA, 240 bp, Glycine max
tgctatgtgctcgcgactggtcccttccttccctttcgcacttgaggtcattattgctaccccatagagctccgcgaaatttgttccggccatactcttccttgcgagccctcttggtctcttgttcaagggctcttgcggcaattgcgttctcttcctgtaacccggggcactccttccgaacgtgtgtagcagccaacttgaacttcccttggcgagtttggctttcctactcgcttt

SEQ ID NO: 23452 - DNA, 422 bp, Glycine max
tgctaggagccatgttcttgagtaagtcttacttattcttgttgttgtatgattatttacaaatgagtaaaactaaaattctctaagagtgtgtttggatgaatagaatttaaaattttttaaattttaagaatttcaaatatttcaattgaaattcttttattttcaaaattgtgtttggataaaaaaaattaaaattgtgagtgtgaaagaaaatgaatgcaaagagaaaagaagatatgattggtgtgatttcaaagagaagaataccaatgcagcatggggagttgtcgcatggaaatcgagacacgatgatgtacactactacacccgaccacaacattcagtcaacagcgcaaggtaaggcccaagccctttgtgccggcaagcactttcgctgcgtgataggtaacgacgactgc

SEQ ID NO: 23453 - DNA, 320 bp, Glycine max
  unsure (1)..(320): unsure at all n locations
tgatttattcagaatggaatagcgtagtctaacatattctntctctgtaaattcattgcactttttagcctcagtgaagcaaaagcagcagcactccaccattacactaaaagcttccaaggtttctcagccatgattacaccagagcaagctagtcaacttgcaggtatttattccagtgttatacccttctgtctttatctttcccactatattggccaaggaaacattttgaataagagatggaagactaattcaatattttgagaaaggcttctcgaattaaatggggtggctgcaagcctccaacaatttggagc

SEQ ID NO: 23454 - DNA, 317 bp, Glycine max
  unsure (1)..(317): unsure at all n locations
agctntttatccaaggctcatcttggtggtgaagctcctttttccatggcttattccctagtggatggcgcctcctctcacctcttctcctttgtcttccgctgcatctccatggtggaaaatcaccattaaaggacctcattgaagctcaaagatccagcctccatagaagccccacaagcaagcttccatcaagttggtatcagagcacaagagcttcaagtaggtgctccttaaacctccatataatttttgctttaccctctattccattgttgnttcttcattttttctccatgaatctcctcacatgtctt

SEQ ID NO: 23455 - DNA, 394 bp, Glycine max
  unsure (1)..(394): unsure at all n locations
ngcctcgaagagatccaagaaggataaagcggccgaatgaactatttccgctcctgagtatgacagtcaccgctttatgagcgctgtacaccagcagcgcttcgaggccatcaagggatggtcatttctccgagagcgacgcgtccagctcaaggacgacgagtatactgatttccacgaggaaataagtcgccggcggtggacatcactagttacccccatggccaagttcgatccagaaatagtcctcgaattttatgccaatgcttggccaacagaggagggcgtgcgtgacatgaggtcctgtgtaaggggtcagtggatcccgtttgatgcggatgctatcagccaactcctgngataccctctattgctggaagagggtcangagtgc

SEQ ID NO: 23456 - DNA, 305 bp, Glycine max
agcttggagcatttgagttatatgcttcaacttgaggggaagcgttggaatttcacatattgtatgagtagttatttcacacattgtatgggtaggtgttccaacaaagaataattattaatgtacctagttagtcacatattcatgtatctaaaaattcacatgcatgtacataagtactagaacttcattaatattcttgtaaatttcacattgtatttactctctatgtctatataaatatagatcagctgagtgggttaagcactcaagcatttcacaacctctagtctcttcaataatta

SEQ ID NO: 23457 - DNA, 243 bp, Glycine max
aacaaaatttttactgaagatccaacttccgctcatggtcatgcctttggcctgcaaaacaggcactacataccaaagattgatggatcagatcttcaaatagcagattgaacgaaattttgaggtctacgtcgatgacatggtccttaaattccatagcatatcccaacacacggttgactaggaaaaggtattccgagaaatatgcatatatgtgatgtgccttaaccaagaaaaatgcac

SEQ ID NO: 23458 - DNA, 176 bp, Glycine max
ttaagatttataaactattcacagacagataagagacatatacataaatatgctttattctgaatctataactccgtatcccaccccccccccccccgattttattttatttttatatgtgtatttttccccccccccccccctctctctaacccattcctactcttatactatat

SEQ ID NO: 23459 - DNA, 425 bp, Glycine max
cagcttgaagctctatatcccataaaggctttgatctttatgtagttagtacaaaacatgtggtttacatcttttattagttaaccttttgtttctctcaataataaaaaatacatttttcgtttctataaaattggtaaagttcctttcttggttcatgtaaaaaaagttgtctatttttcgttcctataaaattaaagtgtgatatttttttagttcaaagctaggtttggatgataccaaacctacgtgacattttccaatttaaattttaaaatgcaatttatgagagttaaaaattatcgcaaattgtaaaaaacaatattaaaaaagagctagaatggaacccctcttcccacaacaattagcttgtctcatccaagaaaaaaaaaaactcgaacacaacaatgaaatggttgatcatg

SEQ ID NO: 23460 - DNA, 321 bp, Glycine max
agcttcctcagaacctataacataatattaatatttacaataataataataataataaaaaaaaaatagtacaaaaaccttggtatcaataataataacattagatagcaagataagaacaagtaaagcaaaaatagacaggcctgggcaaaaatttctttagcaccaaactatttgccaatagcggggcagtcaagtcattacttgaaaatagggttttaacatcagttattaaggactgtcaacattaaccaatgttgaaagtatcgacgttcaaagtattatcgtcaacttacaaaatctaatggtacataaaaatga

SEQ ID NO: 23461 - DNA, 466 bp, Glycine max
  unsure (1)..(466): unsure at all n locations
gtatacttcgatgacgncacacttagaatactcacgctcgttaagctcagcttctaacttctggaccgatgtaacattgtattgcttcgtgtgcatcttcaacacacacacaaacacacactcacactcacacacacacacacatacacacacatatacagtgcactacacctacacacattacacacactcacacagcggaagaatattgatcgcttgatttcaaatttcgagatacagccaagacattctacactgtgactatccagtgtaggaattattccatagggtacttgtatcactcatacacagatgatgacccggtgtttagtaatttacaatatgcctgctcggggagctcgagcgtaaaagcatatgtttctaatactgatatcggtacatgacagccgtacatgactctatgtgtatctaagctgcagctcaaaattaatatgctctcgacacg

SEQ ID NO: 23462 - DNA, 347 bp, Glycine max
ggctgcagcttgaaggatttgtgtgggaaatgttagtgagacttaacttggataccaaccttgtgctacaacaactgcagcaagaaccactatccacaatgacagaacaattttttgtttaaaccttgcatcttgtatgaaagatgttctctctttgggtttgggttaggtcacaagattgactcccaagtaaccttctgaccattagaagatcaccttcctcataggggtaaatctcttcaatatggtcatcaccattggcttcaccctcactttcacttgaggaaggagaagatgtagcctccttttggctactatagatgtcttgaccctcatgtcatggtttt

SEQ ID NO: 23463 - DNA, 435 bp, Glycine max
  unsure (1)..(435): unsure at all n locations
nttccattctgcagtagcagatctgtaaactttgaatttccctatgaatttagttactcgcataaagtctattgttattcctcaaccaaggttctccccacgcacagagattagcaccagacccagttgaccgtctcagctcttccttcaacaatatttgagaagcgtagatgctacaccacacataggatggaatgtgacctacaacaacgtccaaaaaatccctcctagggaaatatttatctttgaaaatcctagaaaccatagttttggtgttggatagaaacatccagccttggttccccaacattgccaaattaaagccacaaaagtctcaaaatctatgcccattctttcttaataacggttaatctttcccaagttggaataactgagaatctagaagggggttgaatagattcttttaaatgttta

SEQ ID NO: 23464 - DNA, 126 bp, Glycine max
attttaaatccttaaattagccaaaccttaatttcattcttcatggtcattaaccattcttaaatggtggaaattctttccaaaaatgggtttttgaaaatggtcatttaaaagaaccttaaatgg

SEQ ID NO: 23465 - DNA, 442 bp, Glycine max
  unsure (1)..(442): unsure at all n locations
ctaagctatgctgcnacattacaacaaacctcctccacctcatcatcaaaatcaaccacagcagaacaattatgacctctccagcaacagatacaatctcggatggaggaatcaccctaatctcagatggtctagccctcaacagcaacaacaacagcctgctccttccttccaaaatgttgttggtccaagtagaccatacgttcctcctccaatacaacaacaacaacaacaacaacagccccagaaacaacaaacagttgaggcccctccgcaaccttcccttgaagaacttgtgaggcaaatgactatgcaaaacatgcagtttcaacaagagaccagagccttcattcagagcttaactaatcagatgggacaatnggctacacagttaaatcaacaactgtcccagaattctgacagattaccttctcaatctgtc

SEQ ID NO: 23466 - DNA, 255 bp, Glycine max
agcttgaaggtgtgtaacccaccatttttcatagtataacactggtaatgcgtctactatcattgctatcatttctttctccgtcattgaaggaaccacttaggctgccaggtctctccacctttgggcatattctttgaaagattcatgcccctttttgcacatgttctgtagttgcatcctatacggggccatatcagaattgtatccacattgcctaacgaaagaaaccattatgtccctccaagaatggac

SEQ ID NO: 23467 - DNA, 399 bp, Glycine max
  unsure (1)..(399): unsure at all n locations
agcttataaaaagacccactttcgaattatgtgaaggccaaattgttatccaaccaaagggggaaaaacaattatccataagactagttaaggaggtgtaaatttaattgtctttgtttatgatgagtcaaatctcatagtatatttgtttttgacatgaaagtacaataaacatggtgagatccagctagaatagtgataaggcgtgagagttccatcactttaacacgacatgtaaggagatgagatgttcatgtgcagtgtattgttgcaatgaaaatcaatattngaattattgtggtgaaaagcactgtcaaactctttataataggacaagattcaatgagtcaatttatttnaaattgaaataaaactatgaagatggttttaacttatttt

SEQ ID NO: 23468 - DNA, 341 bp, Glycine max
agcttcccagatccgatcatggaagggcttggtttctgccttcattaggcagtaccagtacaatacggacatggctcccgatcggaaccagcttcagggtatgactaaacgagagcatgagtccattaaggaatatgcccagagatggagagatctcgcagcccaagtcgtaccgcccatgacggaaagggagatgatcacaattatggtagatacgttacccacgttctactatgaaaagctgataggctatatgccagctaactttgcggatctcgttttcgccggagaaaggattgattccgggctacgaaaaggcaagtttgattatgctgccctta

SEQ ID NO: 23469 - DNA, 429 bp, Glycine max
cttggaagaaagtgatgaggtacaagccctaaaggcatatgcttgaaagagcccgagtagtcgaagagaagttcaagtccatagccatcaaagtctgaaaagagtccgagtagtcgaagaaaatgatgaactaagggacgtcaatatggccaccgctgaagccttggaacgagaaaccaagaaggcccgaaaggaagaacacgtgccagcaaagttttgaggggctttatagggcagcaatagtaagctcaagctccaaagaggtgaaaggaatcatcacgggtcaaaagcatgatcttgaaggacgagctaaaggcttaccttaggtcgaaaagaaatttgtcccaacagttaagcgagactgaagggaatatgtgggccatcatcgataagtgcaaagagaagctaaatctagcggcgactcacgag

SEQ ID NO: 23470 - DNA, 419 bp, Glycine max
  unsure (1)..(419): unsure at all n locations
gtaacaagtctgcggctcaatactttatctcaatcatcattctgtatgttatcggcaaccaatcatttatcaagattgccctttacctttaaagtgtaatgctaagttaccgaatttttaaatttggttgccaacaaaagagaaatatattatttattcaaggagacaagctagacaacaaagttgtcacataaccaaatataaaatcctatcatagtaaaaattttcctaataaaatcatatccccttcaacaaaaacctatcctaagacttaagagagagagagagagcataatctcttataacttgagtttgtctntagggttttagttcctgcctctcaaataataaaaagaataaacaaaaaatagtngatagataaatctaatgaaagtgatgaagcaatatacatgcataac

SEQ ID NO: 23471 - DNA, 435 bp, Glycine max
  unsure (1)..(435): unsure at all n locations
ntaacaactacattcatgactacacacaaaaggaggttgataagtagttatacgtttaaaatagaataaaataaaataaaataacatgtttgaaacatcatgcaattaaaatagaaactcatgccctaatgtcacatcctatcagagcattgtgtcctgacgtcctctatcacaaggttccttaaagaaatccacctagtcatctgcttccactaacacaaggttcgagatcatcacatgatccaaacacaaacagcacacggagagtgacttatcacattcctaacaaatagagagaaacaggacaacatatagatatacatgtcatataaaaatacaacttacttaacacaactcacatcattccaccacttgtcacgtaacatcacatctcaacataataagtctcattcattttcacatcattcacgtact

SEQ ID NO: 23472 - DNA, 316 bp, Glycine max
agcttcgagcacactccagatatcttctgaaagttcccaacggtcagatcatggacaagtgtcttgtgaagtttcagaccaaatttcgagaagatccaacggttaaagaaggctgggaagcgttgttaccgaggcagcttcttgtagcttcctcaagaagcttcattaagaggcttccttcagaagcttcctcgtggcttctttgataagatttctcaataggcttctttgataaggtaaaaacttatctattcacaagcctgctttaactataataacctctcttacaattattatccgtctaatatatcgcttc

SEQ ID NO: 23473 - DNA, 439 bp, Glycine max
  unsure (1)..(439): unsure at all n locations
tcatgatgaatcaagattgattcaaagaagttttgatcatgacaaaggtgatgacaaaaagctcaaagatcaagaacaattcatgataacaaagatgatgatctcaagaatcaaagaatgagttcaagattgaatcaagaatacttcaaggttcaagaggaaatttgatttcaagaatcaagaatcaagtctcaagattcaagcttccaagaattaagatcaagattcattcaagaatcaagagaagacttaatcaagataagtattaaaaagttttttcaaaaactgagtagcacatgaatttttctcaaaaccttntaccaaagagtgtttactctctggtaatcgatttccagtagcaaaattggtttgaaaaagctttcaactgaatttacaacgttccaattgatttcaaaatgttgtaattgattacaatatt

SEQ ID NO: 23474 - DNA, 291 bp, Glycine max
  unsure (1)..(291): unsure at all n locations
agcttattgtatataatgtgtgctaaattaagttgtagatgttccctttgagttntgtttacgtataaatgtaataattttgggtcctaacattttgaaaaattgaaacgctcgtcagttttggaagctaaattgatggttggtaatgggtggtaatggccactaatgaattataacagccaataatgagtggtaatggctactaaatgcattcttgatggtagaatgcctatatatagcacatgtatttggtccctgaactcatctctttgaattcattctgattcacca

SEQ ID NO: 23475 - DNA, 417 bp, Glycine max
  unsure (1)..(417): unsure at all n locations
ntntggagtagaaacatgggaccaactcattttatttcaaaaaaaaggttgtatctagtcaaggtctgagagaccatacaagtttcctagcgatttctaattatgtgggccattaagtctatcatatgttgacaatagccgagaagcccatgaatctcttcgggggcggagtaggtgtccgccatcgccttggccttggctaacaagcggggaagttcttgactcccgttcaaggtaagagcaaaccgatccatccacatggttgcctcttggtgtaaagagtcgatcacccttcctctagcctctttttccgcgtatacttgggcatactcgtccgcgatcctatgctcgagagccgtggctagacctaactctttttggtacttggcgatgatagctagcatgttggtcctcgtc

SEQ ID NO: 23476 - DNA, 354 bp, Glycine max
tgtatatcgataccagacacagagaattcaaattcaagtctgagaagtcacaccttctccagatactaatggtgtaatcgattcccgcatttatgtattcgattaaccagtaaggattttcaaaaataactcccagagtcacaactggccaaggaagtttttgattgaccatcaaaggcctataaataggtgacttaggatacgatattctttaaatttttttctgaaaacattgtttaatttttcaaaccaatatttgtaccactttaaaattttcttggccaaaacctggcatattattaggaacttgatcaccttcattgaatattttttcttaaggaaaacattattctg

SEQ ID NO: 23477 - DNA, 418 bp, Glycine max
tgagatggaagacaacccttccttgtaattgtgtggtttattataatatttaataattttatcatactagaattaaaattttatattatagtaattatatttaaaaaaaattataatattttaaaattatttgatatatcatttttgtaaatcaaaataaatgtaatataaattttttaaatatataaaaatgagtttcattcaataatctttttaattttgttcaattcattaaaacttggcacaaataattaatctatataattataattcaatgttagatcaataaaataatattctatataaatttattaactataaaaaaagtaattattagtgtaatatactgtcttgtgttatgtagttaaaagaaagtataataataaagttgatttcttctcatttatcgcagaaagag

SEQ ID NO: 23478 - DNA, 293 bp, Glycine max
agcttgagaggattgatggggacccgtgttgatagaaacgaggatatgggctacgtgggagtacgtgagctcagatggaggtgggcaacaggggatggtgggtttatgcgcgctttgtggatgtgaaaaacttgttgtgcaccatcgcccgaccgccacctagtaccacatgtgatgggtaccccataatcctacaagcttgagatgaggaagtgttgaagggtgaaacttcctgcttttattgttgaccacagagtggtacctggagatatgtcccgggggtcatgaaacct

SEQ ID NO: 23479 - DNA, 403 bp, Glycine max
cgaagaagtttgaaaatgttttgacttttacatgcctaacttgtagaagcaaagcttcatggtgaatcaagagtgattcaaagatgttttgatgataacaaagatgataacaaaagatgatgacaaaggtgatgacaaaaagctcaaaggttaatcaaagaatgagttcaagatgttcaagatagaatcaagaacactttaagattcaagaggaaagttgaattcaagaatcaagaatcaagattcaagagatcaaggttcaagactcaagattcaagaatcaagaaaaggctattcaataatcaagaaaaagcttaatcaagataagtatgaaaaggtgttttcataaactgagtagcacatggatctttctcaaaacatgtttaccaaagagtttgtactc

SEQ ID NO: 23480 - DNA, 436 bp, Glycine max
  unsure (1)..(436): unsure at all n locations
ttgcgaatntggtcttcactggcgaaaggatcaaagtgggtctggatagagggtaaattgatcatcctactttgataaatgcaataaatggggcaagtgaagaggatgagaatgagggagaaacccttgctatgactatcattccaacacagtcaaatttcccatcagcctaacaatgtcattactcagcctataacagtccctctcacccaatcatccacaaaagtcatccctaaatcagccacaaggcatgcttgcttaccacatgcccaatgcccaaacaccacctatagcgcaaaccaaaaaggaattttgcagaaaaaagcctgtatgattcaccccaaattccggtgtcatatactaactngcacccatatctacttgataatgcaatggtagccataacccctgccaggggtcctcaaccttccatttt

SEQ ID NO: 23481 - DNA, 320 bp, Glycine max
  unsure (1)..(320): unsure at all n locations
agcttgatttcctttggtccggaaacctttcttttctcatgtgcacccaaacccaatctccgggttcgaagacaaccttctntctccctttgttggcttggttagcatagnctttattcttcctctcaatttgatctttgactctctcatgaagcttcttcacatagtccgcctttgcttgaccttctttatgcttaaaaacagaaacattatgcataggcaaaagatcaagaggagttagtgggttaaaaccataaacaacttcaaaaggagaacaattagtggtgctatgaacagctctattgtaagcanattcaaca

SEQ ID NO: 23482 - DNA, 434 bp, Glycine max
tcaccttctggtcctcctcatagttgtggcatgagaaaacatgctctattttcatctcccactccaagtaggcctccggatcattctttcctttaaatggaggaatgttgagtttaataccatcaattcggttttgtctaggaacaccatcattccctcttctcctcctttcttcttcattatgatctctattctccatttgatccaacctctcatggagcgcatcatctcgttgttcattaacctctccatatgttgcatcaaagcttgcatttggaatcgcgaaagccccactccatcattaggattagtacctgacatcttaaacaaacaaatcatacgtaacaagacaattatagttgctgtttgaatacctcacccactcaagtgtatcacacaattatggcttttctctaatgaacactcttgccttt

SEQ ID NO: 23483 - DNA, 368 bp, Glycine max
  unsure (1)..(368): unsure at all n locations
agctttgaatgcactattcaatggagttgacaagtacatcttcagactgatcaacacttgcacagtggccaaagatgcatgggagatcctgaaaatcactcatgaaggaacctccaaagtgaagatttccagattgcaactcttggctacaaaattcgaaaatctgaagatgaaggaggaagagtgtattcatgacttccacatgaacattcttgaaattgccaatgcctgcactgccttgggagagaggataacagatganaagctggtgagaaagatcctcagatccttgcctaagagaattgacatgaaagtcactgcaatagaggaggcccaagacatttgcaacatgagagtagatgaactca

SEQ ID NO: 23484 - DNA, 364 bp, Glycine max
  unsure (1)..(364): unsure at all n locations
agcttgtccgcaaaaaaattattatatatgattttaaggttcgatacctcagtttttctcaccaagtaaaaatgggtcattttaaggtccaacgccttaaaaggacatccttccaagtaaaaagaatcgcttgatttcccctttagaaagaactacgtaggtctgatttcctcttcgatggagggtacgtaggagcaagagccccgcttttgtcgacctcaaaaattaaaaaagaaataaaagtttagatacacaatttcacacaattctaatttaaggctgttgtcctttgngacaaacgtgagaggtgctaataccttcctcatacgtatatacaacttccgaatctagaatattcttcatg

SEQ ID NO: 23485 - DNA, 260 bp, Glycine max
  unsure (1)..(260): unsure at all n locations
agctntgataccatagagatttttttattataattgtgngngnaggatgaccatactaatcctttatttataatgagcaaaagagcatctacattaattacatagaatcaatctaacatgagtgataatgaacaaatccctaattgctctctaatcataaataagagaataatatgtaatctaacagtttataagtcagttttgatgtcttttaagctttctgaaaccattgcgacagttgtgaagcatattggaagatt

SEQ ID NO: 23486 - DNA, 425 bp, Glycine max
  unsure (1)..(425): unsure at all n locations
taaaacaccttgttcattactaaacaagctgaaattattcacaatcacaagtaaggtatctattggatttcccctgcagttactttttggtccacttttttctttgtactaatatgttcaagggaaatctggttttccggaaagcgcactggattatcaagtatttaaaattaaaattgaggaatccgagtatcgaacttagggaactagtctaagatagggttaaattcagaaataaggcattgttgaaagaaacattgataattgatgatttaaaacaggattaaattaagtctaggctaaaaacagtaaaaaatgcaagtaagtaaaattgacaacagtaggtagaagtgttgggtctttctaatagaccagctaatgcatataaagatatttctctaatcaatcatgctnttgtgttctat

SEQ ID NO: 23487 - DNA, 256 bp, Glycine max
  unsure (1)..(256): unsure at all n locations
ttaacatgtcaaacaataagcctttacatgagaaccaagggaggggaaataatgtataaaatgaacaagaggaagtagaaaaatattttctcccttcttgatttgatgccaaacatgaggcgaataaaatgctaagaaaaattaaaatcacatactaatccataaagaaatttgtcaagatattattttaaaaagaaccatantatttaacattgtgaaaagttctaaaggtaagttcacaagttaacacccgatc

SEQ ID NO: 23488 - DNA, 433 bp, Glycine max
tgcactaaagaatgctaatgtagatttgcaaaataatttaataactgacatagtgataggaaatcgaataaatagaatgagaatagaaatggatagaatagaagtgaggagtacacttagtaataaaggatgtgggattgaaacgtgggaaaaataagatgcataatgagatatttataatgtattattaattaaactaactagctaggcaatgataaaaaaagaaaatcacattgaagtataaacgatagagacaataaagaaatacaataaaataaagagctattcactaatatgtataattatttttatttttttatttctttttctttatttttctttgttttcttttttttgttttttgtttttgtttctttttggcttttttgtcaaagtcaaaggattgactctgacttaatcaacactgttagac

SEQ ID NO: 23489 - DNA, 288 bp, Glycine max
  unsure (1)..(288): unsure at all n locations
tcagtcccatcaaacctgtcgtggagtggtttaaaattattattattatatagaaaactgtatggttgatttatggaaaaaaagtgtaagaagagaaaaataagggaggaaaaggaatagaaaatatataaatgaattttttttcaaattggtttggtagaaagaaattaaaggatagaaaatntagtttattctcttctcgtatagttgtatagaaagaagaattaaaaatggggttaaaattattaaacaattttaaaccaaaaagattaaaaaattgagaaaaaa

SEQ ID NO: 23490 - DNA, 247 bp, Glycine max
agcttgaccaatcccgacccatcccggtcatagtcggtcagtgagaacctgtgatgtacctaagcaggcgagctcctggcagtcaacagataaaaggaacaaagaccacaaaagcaggaggcttgtggtggctggccagctgtgaactttgattgatatgtgggttatggcctctggtaatcgattaccaagagtgggtaatcgaatacaaggcttaaaaatgaagacaggaggcttagatggtctc

SEQ ID NO: 23491 - DNA, 391 bp, Glycine max
  unsure (1)..(391): unsure at all n locations
ntaaatgaggaagtgtggaagggtgagacttccttcttttattgttgaccacagagtggtacttggagatatgtcgtgggggtcaggagaccttggggatgtcaggtggggtgctattgcccaaaaccaagcttgatcaatcccgatccaacccgggcatagtcagtcagtgagaacctgtgatgtacctaagcaggcgagctcctggcagtcaacagataaaaggaacaaagaccacaaagcaaggaggcttgtgtggtggctggccagctgtgaaacttgattgatatatgggatgtggcctctggtaatagattaccaagggtgggtaatcgattacaaggcttaaaagtgaagacaggaagctgagatggtctctggtaatcgatta

SEQ ID NO: 23492 - DNA, 323 bp, Glycine max
agcttctcaaggaggtgagcttagttatgagaggggtgtgtgtaactaagctctagcttctcaaggaagttttctcaaagaagcttctcaaggaagttttctcaagaaaacttctcaaggaagctacctagtctataaatagaagcatgtgtaacacttgtggtaactctgatgaatgaaagtcttatgagacacacttcaaagctctacttctccccctcttttattccttcaatttcgtgctcccccctctctttttctctccctctttcttttcctccattgaagcatccttccaagcttcttatccaatgcttatcttg

SEQ ID NO: 23493 - DNA, 417 bp, Glycine max
tccatcactttccctttgaaccgcaaaggctcttgccgtcagcttcttaatcactcacccaaccctttcttcttcccagcgtcaacaatgtaactagatttcattcgctaaagccttcttgtgccgcactttcgtcgcttgtttcaccaaggtagtgtacattctcttcctgtttgattccatttcgtttcgattttgattcaatatttgaaataaaagcttttggcttattcgattgttcataaaccacttgcatctagaatcgtgtaatactaaatcactagcatcatggattttagccgaacaaagaggggataggattatagaagacaaaaagaaaggtacacatcgattggatctcgttaataatgccaaacacagtggtaaactggtaattcactattaatattgttggga

SEQ ID NO: 23494 - DNA, 436 bp, Glycine max
cagcttgtaggcatacagaacaacatacaaagccctcacattacttacacttttccagttggtctatggaaaatcttgtcacctacttgttgagttggaacataaagctttttgggcatcaaaatttatgaacttcaactcaaatacgactagtgaacataggaagctccaactccatgaattggagcaactgagggttcaagcttatgagaattccaatctttataagcaaaaagtaaaaatctatcatgacaaaaagctatcaaaaaggaattttcagcctggtcaacaagtattgttatttaattcttgattaagattatttctaggtaagctaaaatccaagtggtatggaccattcatcatcaaagaagttatgccacatggagcagtgatattggaggacccaaccaccaaaaggacatggatcgtgatg

SEQ ID NO: 23495 - DNA, 353 bp, Glycine max
  unsure (1)..(353): unsure at all n locations
agcttatgaaagaagcttctcaaggaatctacctatgctataaatagaagcatgtgtaacacttgttgtaactntgatgaatgagagtcttgtgagacacatttcaaagttcaacttctctctctcttttcctccttcaattttatgctcccctcccctctctctctctttcttttcctccattgaagcttcctctctaagctttttatccaaggcactctcttagtggtgaagcttcttcttccatggcttatttcctagtggatggcgcctcctctcaccttttctcctttatcttccgctgcatcttcatggtggaaaatcagcattgaatgacctcattgaagcttcaa

SEQ ID NO: 23496 - DNA, 430 bp, Glycine max
cggagaggatgcttcaatggaggaaaagaaagagggttatacatatagaggggggagcacgaagttgaaggaagaaaaagggagagaagttgaactttgagttgtgtctcacaagactctcattcatcaaagttacaacaagtgtcacacatgcttctatttatagactaggtagcttccttgagaagctttcttgagaaaacttctttgagaagcttctttgagaaaacttccttgagaagctagagcttagctacacacacccctcttataactaagctcaccttcttgagaagctttcttaagaagattcctaaagaagcttgagcttagctgcacatacctctctaatagctaatcttacctccttgagatgagaagctagaacttagctacacaccccctataatagctaagctcaccccatgac

SEQ ID NO: 23497 - DNA, 285 bp, Glycine max
agcttcttgcgtagccgctcttggtgctcaaaatatcccaaaaacaaatccctcttattactagctattttgaattctttagttcctgaatgtacaaccttcaaattgttgctcgttcccctctttattttctgcaaaaaagaaaatcaaatgctgtcaaaacatggatgaagtcctaagaaaatcaatatcaaagacaacatggatgaaatcacaattaaaaagcacagctacctatctttcagagtcctttggttaatttgtcttgtctccttatgtggtggg

SEQ ID NO: 23498 - DNA, 161 bp, Glycine max
tcttctctgggattgattaatcatctcatcatattttgagtaatcacacgctagctctcattcttcactaatacttctgcaatacagatcactcaccctgatcctgcattcgagtatctctagattttctagcaagctccctactgcctccctacattcct

SEQ ID NO: 23499 - DNA, 391 bp, Glycine max
  unsure (1)..(391): unsure at all n locations
agcttgaaatgttagccaacgaattgtatcaatataggtcttgagtcataagcgattcttggcaacttgttctgaactttgcacatttatgatgttcttcatgtgctttgactgattcaacaagtctttacaagccttcattgcattgttatgtggggagcaaggactatctccaatgtgattaagaaatgcacaatttttccagcattaacctttctacatgatctaaatccttgtctattaagacatttgatccaaaaatgatcactttgctttgtactgaatagatagcataacaaacaataaactctatcattagatggngaatactctagcccagaaagaaacatttaaaccaagtacattggaaaatgcctggatgtttctctta

SEQ ID NO: 23500 - DNA, 428 bp, Glycine max
  unsure (1)..(428): unsure at all n locations
tgtaatcgattacacacaaactgtaatcgattaccatagcatattttcagaaaatattctcaacagtcacatctttttatttggttcttgaatggctatcaaaggcctatatatatgtgacttgagacacgaatttgaaaagagttttccagaacaaaaaggtcttatcctcttaaaaagcaaaatcgatttatcctcttacaaattccttggccaaaacacttgtgattcaataaggaattatttgagtgctcaaattgttcaatctatctctttcaagagagatttcttcttctcttcttctttattctgaaaagggataaagagatcgagggtctcttgttgtgaaagaattctaaacacaaacgaaggattgtccttgtgtgtttagaactngtaaaacgaatttacaagatagtggaactctc

SEQ ID NO: 23501 - DNA, 216 bp, Glycine max
atggatgtatacatgcatttgatgacgtcaaacaagaacctagcatggctgcttcaagactaattcacgattgattcaccaaccaagccttgtttgaagagtcactaaagaccaatccttgccttataacaaagtgctttgaagacatgcaaggctttggacatcgctaccagtaagtgtaatctattaccagaagacagggttgagcataccttg

SEQ ID NO: 23502 - DNA, 432 bp, Glycine max
  unsure (1)..(432): unsure at all n locations
ttcattntcaacagttttcatggaaaccatcttctcatgatcagcaatttcctgctgaataccatcaatgatctcaattttcttgatcattaatgagtttttctcactgagagaattggccaatttcctattttcctccaaactagccttggactttatctacaacttgacatacctagttctccaatggtgaatagtagcagcatacctatagaggaaaatctcaatggaatccaaaatgttttggccccaacaaaatccatcatcttggagtcaacctttataagtagcttatcattagtaatgaactcggaccctttgatgtcagcattccttaacgagggaagatcacgagtaacagtcacatgatcaaccttgcataatggacctgcatgatgtcaaatcaccatacctccagttcgcttttagaca

SEQ ID NO: 23503 - DNA, 315 bp, Glycine max
  unsure (1)..(315): unsure at all n locations
agcttcctcggngccattcaaaagtcttgcgctaatgccattgaggcatttcaccgaacacttggtgggcgtgcgtttaggcatcaatagcaagagaacggngacaatgtggcgtgtcctattgtttcaaaatgcattataggcctagggccatctcataccaacccctaattcaacttgttggtgatgaacaaaagcgcanaacagaatcaaaaaatgcgaanaaggatgaccctagggctgcaaattcgtcaatcccgtgggtatggcttttgaaagggggaaaagaagttttgaatgtaaaacgcccccctt

SEQ ID NO: 23504 - DNA, 246 bp, Glycine max
tctaccatgtgagtgctttgtcatcaaagcccaagatatgccttcctaatcttcttctcttcactatactcatgacatgcaaagatttggtcaactttcatctcccacttaagatatgcctctaggttacgcttcatctgaaaattaggaattttaagcttctccctttctgatgcaatcctaccctccaagggcatcggatagaagactccaagaagactgggccacagatgcaagagaaggccc

SEQ ID NO: 23505 - DNA, 398 bp, Glycine max
  unsure (1)..(398): unsure at all n locations
agcttggaccgatttggggccttcatttcttgagcgagcggcgttggcgcatataaacaacaatgccctagccgcgaatcactctgaggattctcaacagccggagagaaggtcaatttgttaatttgtgatgatgccaaagtgttgtgatcataatggattttattttattggttaatacttaagtgctgacaaatgatgtttgtagttaaaatatatagtaatataagaatttgtaaattgtaaacctaagaccgagcatgacattcgctattacactagtaagagtaanaacgtgagaaacaaaatgaaactcatagtcatcacgagaacatggaccaacatcactatattatggcacanaaatcatttcacctaggggaataagagtatatgat

SEQ ID NO: 23506 - DNA, 409 bp, Glycine max
  unsure (1)..(409): unsure at all n locations
ntctcaatttttcctcttcctcattcagctgcctaatatctcctttttccagtttgttaagctttgattccacttttttcaatttttgttgagcatcaccaaactgatttatgttccattcttttagtcccccccccccccccaaccagttacagaatttttcatcctgcagtcctgcactactttcttgaatgatttatcctcaagccagcaatcaaaaacccgaaatggcttcggccttcaatcagcactaaaggattgcaacaagcaatgattagaaaattacggtccaagattagctgaatgctgtctagccatttggaagaccactctgccgagacaaggatcctattaattttgcttttagttgcctcaattagtttgcaccacgtaaattgtcaccccacac

SEQ ID NO: 23507 - DNA, 389 bp, Glycine max
  unsure (1)..(389): unsure at all n locations
agcttgtgcattcaatatcctgatgattgtgttccatatgttctcaagactggactaatacatttgctgcccaagtttcatggtcttgcaagtgaagatcctcatatgcatcttaaggagttccatattttttgttccaccatgaagccccctgatgtccaagaagatcatatatttctaaaggtttttcctcattctctggagggagtggcaaaagattggttgtactaccttgctcccaggtccattttcagttgggatgacattntaggcatcaggcaacttagtggagagagcttgtatgcgtactangaaagattcaagaaatngtgtgcaagctgtcctcaccaccagatttctgagcaaccccntcttcattatttctatga

SEQ ID NO: 23508 - DNA, 427 bp, Glycine max
cagcttagaacatcaacgcagacaatgcggaaaatgcgagacatgtgatccgcatacaggtcacaaggattgtatgatcataatcatctaactaattttctcgtccaaactaacatatatataaaaacataaacagggatcaggtacgaaattaactccaactctcgtaatctactccctctgggagtgcttgcctgtatgtactccacggccgttgtgtacgcgtcttgtttgtgctttgccatcttgctctgccgtttgtcaccagatcctactctaatttcctctgctgaactaaatcctcactattttcaccgaacataatttgtaaagcatacaacaccattgttataacaaaagacaataaaattgaaattaaagatgaaaaaaaatgtttaacacgctaccaattaatacataacttaac

SEQ ID NO: 23509 - DNA, 343 bp, Glycine max
agcttgtcgaccagtaatgttctcctataatagcacaccataagcatagacatcagtcttttcatctactataccatgcataaagaattcaggaggaaggtagctgctgtagcatccaaggttaatgcaaaagaaaaacataaaaaaaaaagtgtcaattaattggtgaaaagaaggaaagaaaaaaaaatgttaacatagaaagattgtgaagatgttaaatatacaaactccgaatgtgccttccactttggagacggtgtgatgagtccattggtcgggcaaccactttgcaagcccaaaatcagatatctggtgtaagattagcattaaacaaacttac

SEQ ID NO: 23510 - DNA, 432 bp, Glycine max
  unsure (1)..(432): unsure at all n locations
tgttggaacttcatagtttctcttataatccatcttattcttatcaatctttgtacaaacaccagttaaggtttttaatttatataaaaaaagattaaggtagtgtttggtccagttttcttttcttgcatttcttctttaaaggagatgaatcaaatacattttgagaattaaaaaattcaagagcttaatttttataaaagaaaagccaggaaaaagtagatttaatgaaaaagctaactgaagtagctttgaaaaataagccacatacctttgcctctcttccctctcatcttgaactagtcagtgtgggacattgaaacaaagcttttaatttaaaagtaatttttaagttaaaattgtcaaaaccactttatttntaaagccccttattgagctttaaagannagtgggccaaacataaatatgaca

SEQ ID NO: 23511 - DNA, 451 bp, Glycine max
cggatcctctgagtcacctgctgcatgctagcttgcagccattataagagaaagaacatgtgattagtagtatgactgaaaatgttagtcagtttgtcagattgattgtgaaggaatgcattaaccgtatccccgcgagagtgtgatccttaaattttgagagaaacgactatcattaagtactgatttttgcatgaatctctgaagtatggagtgaatgcatgaaattgaggatgatgaaggtcatgtttgattgtgatagccacttagccaaatagctgaccacgtgcttgaatgatttatcctttgcgcccagttttgagctaaatgattgattgattgaaccttgagcctatacagatttatctcctgctaccttgtcttaggttgttggagagcatcatccacagaaaagcttggttctaggcaaattttgttccaatttagggag

SEQ ID NO: 23512 - DNA, 412 bp, Glycine max
tctacctcttttccctataaataggggaagaagggaatatcaaaaatgttcaaccttcctggtatctgagaatcacttaaaattagtgagaaaaattgtttccgtgaagaaaatccaaaccgagacgcttccgtaacgcttccgagacatttccgtgggtgatttcgcgaagattttcaaccgttcttcgtcattcttcgttcgttctttgtcgttcttcggtctccaaccggtaagttcccgaaatcgaacttttcaattcattttatgtacccttagtggtcctcatttgtttcgcgtgcttttatttttatttcattttacttttcgtacccccttttgacgtgctttagtcatttatttaagtcatcttctcacctaatcaaaaaatgaaataatatttcaccgatca

SEQ ID NO: 23513 - DNA, 315 bp, Glycine max
agcttgaaattgaacaacggaagctctcgagaaattccaatggtcataacttatcacacggatgtccgattcaagcgcataatatatccagacgctcgaaattgaacatcgaaagctctcgagaaactcaaatggacataacttgtcacacggacgtccgattcaggcgcataatatatcgagacgctcgaaattgaacaacggatgctgtcgagaaattcaaatggtcataacttgtcacacggaagtccgatttaggcgcataatatatcgagacgctcgaaattgaacaacgaaagctctggagaaagtcaa

SEQ ID NO: 23514 - DNA, 363 bp, Glycine max
tatcattgaacaacgaaagctgtcaagaaattcaaatggtcataacttatcacacgggagtccgattcaggcgcaaaatataccgagacgctcgagattgcacaacggaagccctcaagaaattcaaatggtcataacttatcacacggaagtccgatgaacgtgcatagtatatcgagaagctcataattgagcaacgaaagctctcaagaaattcaaatagtcataacttatcacacggaagtccgatgtaggcgcataatatatcgagacgcttcgaattgaacaacgaaagctctcgagaaattcaagtggtcataacattgtcaacggaagttcgattcatgtgcataatatatcgag

SEQ ID NO: 23515 - DNA, 407 bp, Glycine max
agcttatgaacaacaaaagaagtttgagtccttgagggttaggaagagatgactcatgtgaactaataataactaattggaagtaaagtactacatattttttcaaaaattgacttatttaaagtgaataaaaataaaataagtaattttggttgttcaaaagaaaatcaactaataatatttcaataaattcacaacttattatgtttgtgtatgtaatattgattattgattttttcaaactaagtatggatactttcaatatattgaaatttgaatcttcttttcaatgctttcaagttttgaatacggaaaagttaactaaaaggactggtcatgaacccttatttctgtcaatgaagattcaagcctttataaagatgatgcataccaagtctcataaaagt

SEQ ID NO: 23516 - DNA, 379 bp, Glycine max
taatgcagatacgagagttaatacgggagacgatgaagcttcatatgatagggtgttatgagaccatgcttcagaatttgtactggttttgtagggaggattggtgacatttgtgacattgagagtgtaacaaccctaaacacaaagactttgacaaaaaaagattcacttttactccttataaaactcttgaatttgtttaatttttgaaaatacttaatttttttttttgtaaatacaagtatgtcatataaatatcaatcataaaaggtcttaacaaatctcaagggttccattaagggaataaacataacacaaatctaatatcatatctaaaccctaagttggtccccactaagataaagcataaataaatgcc

SEQ ID NO: 23517 - DNA, 328 bp, Glycine max
  unsure (1)..(328): unsure at all n locations
agcttgaccgagatagtgtctgccggctataggatccatgtaactctgtgaattgcctagattgatcagctctcgttgtcgacgacaacgctaaggaacctccgttctaccccttctgtacatggacaaatttaccacctactcaacaatgccgttactcagccgatatacgcccttgatattacccacctacgaatcagccacagaggctgtctgtagcacaatcaatgtcgaactccatctttcacacataccaagacacgcgatgaggaaagaatgntgtggataaaatacttgtacaattcacccctaatctggtgtcctatgc

SEQ ID NO: 23518 - DNA, 332 bp, Glycine max
tgcctcccagatcgcccacgcgagctatgttgcttactacatagacgaccgccttctgtaacgcgcaagtgggcctggtcgctatgtgaagccccatgattactaacaacacccctaccttgataaggcgaatcttttaacgtagcgcaacgaaactgtacgaatgtcgtcacgaagcttgccacctactcgtaatgatacgataccttatagactacttaaaccactcctgcttggataacgggaagtcacggaacactatggattgcctaacgacgtgtgccacgtaccatatagtggacaaacgatagtggcataccaacaacggatgg

SEQ ID NO: 23519 - DNA, 437 bp, Glycine max
  unsure (1)..(437): unsure at all n locations
agcttcaacatcagaccacttccagggtgctggaactacttcacatggacttgatggggcctatgcaagttgaaagccttggaggaaagaggtatgcctatgttgttgtggatgatttctccagatttacctgggtcaactttatcagagagaaatcagacacctttgaagtattcaaagaattgagtctaagacttcaaagagaaaaagactgtgtcatcaagagaatcaggagtgaccatggcagagagtttgaaaacagcaagtttactgaattttgcacatctgaaggcatcactcatgagttctctgcagccattacaccacaacaaaatggcatagttgtaagggaaaacaggactttgcaagaagctgctagggtcatgcttcatgccanagaacttccctataatctctgggctgaagccatgaacaca

SEQ ID NO: 23520 - DNA, 423 bp, Glycine max
tgtaattgagcaacggaagctttcgagaaatttaaattgtcatcacttttcactcggaagtccgattcaggcgcatcacatatagagacgctcgaaattgaacaacggaagctctcgagaaattcaaatggtcataacttgtcactcggaggtccgattcaggcgcataatatatcgagacgcttgaaattgagcaacagaagctttcgagaaattcaaatggacatcgcttttcactcggaagtccgattcaggcgcatcacatatagagacactccaaattgaacagtggaagctctcgagatattcaaatggtcataacttttaactcggaggtccgattcatgcacacaatatatcgagacgctcgaaattgaacaacggaagctcttgagaaattcaaacggtcattacttttcactc

SEQ ID NO: 23521 - DNA, 432 bp, Glycine max
agcttgattaatacttttctatcagctgaaacccgaaattttcctttaaacttaatattacaaggttaaaagaacaaaagatatcatgaattcatcttttaatatagaagagatattaaattaattttgagattcagattgattattgtataaatatttaatgtggtttttaccagatacgttatggttttaaagtcaagttgagcaagaacttatccttaccttctcaaatcctacttctcaaaaggtacaatcaagattttctttttccttcggcattgtcaaagtgacagatgaagggacacggaaataaaacacaagatttgattgctggaaaaccttgtggatgatgcgattattattattccagtaaatacaaaaaagtatcacattcattcgaaatcaagtgtcttctcttaatccaccaagtgt

SEQ ID NO: 23522 - DNA, 397 bp, Glycine max
tcatactcctgctacatgcttgaaagccaattatgatttgtcaaagcttgtttgacagattttggttcacgatgagtcagtagaagtgtaggattgattctcggtaaatgaataccaaacttagatctagtttgcataagatgagtgtttggaggtccttgaggagatgtgggattaataattgaggaggtggcttctgaactgattgttggaacagaagtaacagtaacagggagagattgattgtgggttcagtactaaatgactgaactagactagacgttggactagatgcttaaatatgtgttagtgtcagaatgagcagaaatagatttagactgtacaacatcaggaggatttaaatgatctgaaatagaagaagtatgtgtttgagtgg

SEQ ID NO: 23523 - DNA, 423 bp, Glycine max
agcttatggtaaaatttgggacttatccatggtagaagtctccacagaggccattgcctccctcgcccagtattatgaccatccgatgaggtgcttcacctttggggacttccagctatcacctatggtagaagaatttgaagagatcctatgatgccctctagggggaaggaaaccctacctcttctcagggttctatccctcattagctagaatttccaagatagtccaaatctcgacgcaggaattagaccacaggaagcaagtcgaaaatggggtggttggaataccgagaaaatatttggagacaaaagcaagaatcttggcaagtaaaggcgggtgggccccgttcatagatattctcgcactgttgattttcggaggagtcctctttccgaatgtggatgggttggtggacctggc

SEQ ID NO: 23524 - DNA, 417 bp, Glycine max
  unsure (1)..(417): unsure at all n locations
tcaagaaaaagatggcctcagcaaactccttattttcataagggaattctatcaatagacctccaatctttaatggagagggttaccattactggaaaacccaaatgcaaatttgtattgaggcaatagacctaaatatttgggaagccatagaaatagggccttatatacccaccacagtggaaagaattacaatagatggcagttcatcaagtgaaagtataactttagaaaaacctagagatagatggtctgaagaggatagaaaacgagtacaatacaatttaaaagccaaaaacataataacatctgccctgngaatggatgaatatttcagggtttcaaattgtaagagtgctaaggaaatgtgggacactcttcgattaacacatgaaggaactacagatgttaaaagat

SEQ ID NO: 23525 - DNA, 424 bp, Glycine max
  unsure (1)..(424): unsure at all n locations
agcttgaaggtgtgtaacccaccattttccataatagaacactagtaatatgtctactatcattgttattatttctttctttgtcattaagggaaaacacttgggctgccagatccctccacctttgggaatattctttaaaagatccgtgccccctttttgcacatgttatgtagttgcatcctatccgaagacattatactgacactcctagtaagactttcttggaaggaatgtatcagcaattcctcatcttttgcgtatgcccccatcttccgacaatacatctttagatggttcttggggcaagtagtcccattgtacttgtcaaagtccagcaccttgaacttgggaggggtgatgatattgngtactangaacaactcttcttgggtagcaaagggcataatcttacttccttcat

SEQ ID NO: 23526 - DNA, 403 bp, Glycine max
tctatggaggctccatctatgagcttcaattatgttcttcaatggcgattttcaaccatggagttgcagccgaagataaatgagaagacgagagaggaggcgccatccactatagaataagccatggaaggagaagcttcaccaccaagagagtgtcttggattagaagcttagagaggaagattcaatggatgaaggaagataatgagagagacagaaagtggcctggaaaattgaaggaagaaagggagagaagttgaactttaaattgtgtctcacaagattctcattcatcaaagttatgacaagtgttacacatgtctatctttatagcctagcacatgggaagcttctttgagaagcaccgaatgtatattccttgggaagctatacgaagaaagct

SEQ ID NO: 23527 - DNA, 376 bp, Glycine max
  unsure (1)..(376): unsure at all n locations
ggtgtttttttggtttgngctaaaggtggtcttcgtcattggaagtgcggtatacaggctttgtggttgatttaaggatggcctttgtggataattgggtggtggggtaaagaagacgtttgttattggctgagtaatgacattgttgggttggtgggaaacttggccgtataggaatgatagtctcaccatgggtttctttctctttctcaccctcttcatttgccccagatttcttaattctcctactaggatgatcaaatatgcctctttttgatccacttcgatctttatgtggcgaacccaaatctgtaatactgaggtgtgtactctcctttttttctatgaaacagcgattcgttatactatattgtga

SEQ ID NO: 23528 - DNA, 392 bp, Glycine max
ttgtcctcaaatccctcttgttgcactagacttataccaaacaacattattgtaacaacatatttaaaaccaaaacttaatccgtagatccctcttgtaagactaagtttcaattctgcttcattcaaggtctaaggcaacaattcatttcctaatgctaaaatcacctaaccaggcacacaaatggttgatcagacaaaaagcatacagaatttaagcactgaaagaagcattgaacacatgaaacacaagcaataagatattaaaataattacatcaattgttctttagaaatccccaacaagggtgtttagcaagccattatagaaaaacccctaataataatgagattacaaaacctacgtatctctgcaaaagttgctgctcttgct

SEQ ID NO: 23529 - DNA, 427 bp, Glycine max
  unsure (1)..(427): unsure at all n locations
agcttcaatcatatgaaattaaatcaattattcggtatgtgtcacaaattctattgataagaaaattaaaaaacttttaatttggttcaattaatatatgaaaacatttcggtgtgcaaagcttaacgtgaagtaattttaaatgaaatggtcatatatttttaccaatttcacagaaaaacgtttaactaagagatagtgtagctcagttggttgatagtgtgggtgaattgatgtaaaccactaagtatgaacagaaatatgtttatcggcttatgcatctgcgcccaatgctttctctgcaataaacaaaacagaaggttcagcgcgtcagccattntatgctaaactcgggctgaaattgttcccagtgtttagtgctagtagctacctttcttgccctaatttctatgctacatatatatat

SEQ ID NO: 23530 - DNA, 292 bp, Glycine max
tgagctcactgtggctgccccacaaagctgcacgaaatttttcctggccatgctcttccttgcgagccctcttggtttcttgttcaaaggctcttgcggtaactgcattctcttctcgtaacccgacacactctttacagacgtctgtagtgaccaactagaatttttatttggcaagtcttgctgttgctacctcggtgattagagctcaaacttcttcatcctcttgcggagcttgaaagttctcttcgttgataatcactgacctggagagccaatcagaccctcgcgt

SEQ ID NO: 23531 - DNA, 413 bp, Glycine max
agcttttaaaaaacaacctattaggtttgtcatgctagcttgtttaatatatatatctatatatatgtatatgtattaaaacttaaaagacataaatcaatcttttaaaaaaagaaataaaataagacaaaatcttttaataaaataagataaaataaaatatttatatttctaataacattttcccccctcaaattgaagctagatgaacaacttcaagaaatcacattgaagatttgattatatgttgggtcattacttcatgtttgggagatggtttgggaattaaaaatattgtacttctttgtatgtaacatggcttggttcttatttcttatttattttagtaattgacattaagagtagatcattgaatggaacttatgggtatttacttaacttgcttaatttgg

SEQ ID NO: 23532 - DNA, 407 bp, Glycine max
  unsure (1)..(407): unsure at all n locations
tatgaaagtnttgcactggtagtattttttattaaagcatctagcatctggcagcttctagcatgaacatgtggtgtatttattatttaccatattttgcattgtggtgaacaggaggaacaaaaaggtgtatgcctggacagttgatgatgcagaatccatgcaaaagatgttgtttgaacatgttgatgctattgttacgagcaacccaactgttcttcaacgcctaatgcaagatatcaaaacacaatgtcttgaagaaggttattcattaccacgctaaaatttgtttcaagaattttagagatgccttctatgttgtgattattaaaactctaatcctttgtgtaacctccattcttctcttggttgcaaattgatactgagctgggaaaaaggatgaatat

SEQ ID NO: 23533 - DNA, 436 bp, Glycine max
  unsure (1)..(436): unsure at all n locations
agcttattgatggaatccatagtggagtgtgtctcagtgtaacccaagacattgaagaacggcgccgcaaattagcaaatgattgtcagagagagacaagaaagttccagcacatgattcataagtcaaaattcaggataacagtaggacaagacactctacagtctacagaaataagtaaaaggaaaaaactactaagttaaacaacctaaaactgattattttttataaaaagatgaattattttttaattaagtttaatgttgaaactgaaatatgtacactgatgcccatgttaaccagcacttttataatgtaaaagcagatccttatttgactcataaaaatagataattataattaatgtataacattattttaaattaattattttaaaattaattattaaatctaattatttntcataattaaaaca

SEQ ID NO: 23534 - DNA, 418 bp, Glycine max
tctcaagaaagcttctcaaggaagctacctaggatatcaaggaagtttctcaagaaagcttctcaaggactaagttcttcaaagttcaacttctcttcctcttttctttcttcaatttcgtgctcccccctttttctttctctctctctttattttcctccattgaagcaccctctccaaacttcttatccaaggcactctcttagtggcgaagctccttcttccatggcttattccctagtggatggcgcctcctctcaccttttctcctttgtcttccactacatctccatggtggaaaatcaccattgaaggatcttattgaagctcaaagatccagcctccatagaagctccacaagcaagcttccatcaaaaaatgtcttagattgcatcagatgtatgcgaacaatgggact

SEQ ID NO: 23535 - DNA, 437 bp, Glycine max
agctaggcaaaagttccttgtatcttgaattcattagtctgcttcaagtaaattatgccaatctgcttcagtaatttaaggatatgtttttgttatctgagtcaaggaagctaaagtttgcaaaacaaaagtttacttcagatcttctctggcttcaaatggtataagagaacttagagaacaaacatgaaattaatcaaataacaattattgaaagggccttcctaaaatatttcccaaacaagacttctttggcctcttcgaagacattatttgggtcagcaaagaaacaaatccttgttttattatttctactttctatacaatatttctaaggtcattgatattgtttgagaacacaaacttcaaattttcacgtgtctctacctgcaatagaaacatacaacatattcatgtatacaactctagtgtcttat

SEQ ID NO: 23536 - DNA, 417 bp, Glycine max
  unsure (1)..(417): unsure at all n locations
ntacatggggctacatcatgtggtagcaaagcatgttcatctaggtgatgttcttttgcttcctctatcttttgttcgttccattcactttaattccttgttcttcattgtcttctccattgtcttgtggtttgatgttgtttagagtagattaaaaaaaaatcgatctacacttgttcttgcatttcaatggttcaaattttatagatatactcttgaatcatgtttttgtgttgattttaggttctatcatttttcattcataatcttaatgtgttgaacctttagatcttaattttcttgaaaaatattgattagaaatgaaaatacaaaaatataagggtaaatcacttcattcaagttgtcttagagtcatgtttagtcatagtaattgtcacattatgttctaagtttgtg

SEQ ID NO: 23537 - DNA, 397 bp, Glycine max
agcttccccaactagagaccttacaaaataccacccatccttcccagactaggagaaggcaaaggacatagatgatgaccattgattaaacggaatgacaaagtccttttcccaccccctcaaccaagaccaggtaagataaattgcatcacccaccaacttagaaatagcaaactgttgatttttaaaaatcatggtgttcctatagttccaaatagaaactgtggctgctacccaccaaaccttccactttctattaatagcctgcgaagcagccaaagagaggtgctgaatgaagtgatccacaggcctacaatgcatgactctagcttccttgacccaagaggtaaattcccaccacagtggcataatcttatttgcagaaaagaagagatga

SEQ ID NO: 23538 - DNA, 413 bp, Glycine max
  unsure (1)..(413): unsure at all n locations
tatccttatggcttgcctccggacttcaccccccgtgccaccccggaagatttaagccaagtccctacattcgaggggcaactcccaccttatgacgactatcccgggcaagacgatgaggaaggagatacccatcttggcctcctgctccacctcaatgatccgtccccccatgaactaccccaaacgaacataatccgccatatctcggcctcacccacacccgtaaaagaatctgttcccttcgcggaagataagggaaagattgaggcgcttgaagagaggctaagagcagtcgagggccttggcaattacccattctcagatttaacgaatntatgtctcgtgcccaacatcgtcatccctcctaagttcaaagtaccagactttgacaaatacaaagggatgacatg

SEQ ID NO: 23539 - DNA, 431 bp, Glycine max
  unsure (1)..(431): unsure at all n locations
agcttcaccgatttagtgtttgccggcgaaaggatcgaggtagctctgggaattggcaagtttgatcatctcgcattgacaaggagaaggggaaggaacccgtgttctaaccgcttcctacatggccaaatttcccacctactcaaccatgccattactcagccgatatcggcccttctcattacccacctcccaatcagccacaaagtctgcctgttgcacaaccaatgtcgaactccacctttagcacaaaccaaaacaccaattgaggaaggaattttgcaaaaaagaaacttgtagaattcaccccaattctggtgtcctatgctaacttactcccatttctactccataagtcaatggtagccataaacccgaccaaggttcctcaacctccattntatcaaggatacgactcanatgcaacatgt

SEQ ID NO: 23540 - DNA, 391 bp, Glycine max
  unsure (1)..(391): unsure at all n locations
tgccacccagctcgcccaggcgagctaggttgcttcctccagaagcaaccgccttctggaaggcgcaagtgggcctggttgctatttgaacccccatttttactaagtacacccctacctttttttggggattctttttccgtaacgttacgaaactttacgaatttcgtaacgatgcttgttttctttccgtaatgttacgaaaccttatggactacgtaaacaacccctttttggttttcgggatgtcacggaactttatggattgcctaacgatgggtgccaagtacctcgaagtggtcaaacgaaagttgcatcccaacaacggatggtccccgaacgaaattagggtatgacaagttcccctctttacttgtcttttatnggagat

SEQ ID NO: 23541 - DNA, 353 bp, Glycine max
agcttgtacgcacatcgttcgcgtgtatgatattcacttcacatggtttgaagtagatgagagcttctaccctataacgcaacgtggtgtacaaaagtgggcagtaaacttgaatggtcgtcattgtctatgcggaacgtattctgcgcttcactattcatgtacacacattattgcagcttgtggttacgtgagcatgaactactaccaatatatagatgttgtttatacaaacgagcacatcttaaaagcttactccgcacaatggtggcctcttgagaatgaagcggctattcctccttatgatgacgcatggacacttattcctgacccaactacaattcgtgcaaaag

SEQ ID NO: 23542 - DNA, 385 bp, Glycine max
ctcagcttgatacttcaatatggctggcctgagcaactttatagtggtttcatctcgccttgcataggaagtcttatccttccaatatctatcagacttagtgtcacttgagttgatggtctgttcatacattgcagactaattctttaaacatgatggaattccacttgacaagttattgcttgatagatccaacaattgagtcccgctcaaataacagagatgaatgggtagatatcctgagaggagatctcctctcatggtcaagattatcaatagatgcatactttctccaatccatgatggtattggacccgacaacatattttcactcatgtccagcatacataaactgctgccattcttcgaagaagtaagcaactca

SEQ ID NO: 23543 - DNA, 428 bp, Glycine max
  unsure (1)..(428): unsure at all n locations
agctagtgcgaatcaaatcactcctgcatttcatctctaccatgcattctttctttctttacccactcctcacgtttggttttttagggaaaaacaccataactaaacgcgccacaaggcatccctatcgcaccagatccaaatctagaacgatgggtgatcaagaggagacacaggaacagatgaaagccgacatgtcggctctgaaagaacaaatggcctccatgatggaggccatgttaggaatgaggcagctcatggagaagaacgcggtcaccgctgccgctgtcagttcggctgccgaagcagacccaactctcttggcaactgcgcaccatcctccctcaaacatagtaggacggngaagggacacactggggcacgatggcagccctcacctgggatacaaccgagcggcttacacttat

SEQ ID NO: 23544 - DNA, 410 bp, Glycine max
tggtggttcctcaaagatgaagtcttgcattattttcttgtttctgtttttgctttcttccgggttttggggtatggtattctggaaaattgtaaaaggtaattaaattcctatactttatgcttatgctgtagaatgattagttttgaaaatataagaggtttttgtttttgctgtcttctgggttcagggtatatatagtattctgaaaaaagttagtagacatgttgccaagatgtataggattcaccattgagcccaagttcatagtttcatgacttgagttttttttattgtggatatgtagttctcctctgtctcctggttcttgcactttgttttatttctcttttccatttaattaaataactaaagtaggtttctgttcattctgtatgccctggaaatat

SEQ ID NO: 23545 - DNA, 430 bp, Glycine max
agctagtggagagatcttcctctcttcttgttgcacacgtgccgcgaaaaatgcttagtcaccattctactcaaactgaaaagattttcaactcattcaacaagtttgaagatgtatacaagggcaaggtcacactacattcctataagggcatttctccttatgctacaatgcacaatgatgtgtgctacttggcacttgaaaagagaacaacttttatcatcataccttttcataagcaatggatacttggagggacaactgagtcatcttttgcttttaagcagctcaataagaatgtcctagagaaagctccttgctcagttggtgtcctcattgatcgtggtaaccaaaagatgttttggtgtggcttcaaaaagggatcaatatatcaagtagctatgctcttctttggtggtgcagatgatcg

SEQ ID NO: 23546 - DNA, 402 bp, Glycine max
tgagctatcagaagatttgcttattcatttaatgctaatttatctaccttcaagtttaagatctcttacaactatcagaaggagagatggtcttttaatgatctcatttcatactgtttgcaagaagaggaaagactgaagaaagaaaggactgaaaatgcttatgttgtaagtacctctaaaaacaaaggcaaaagaaaaagaaatgaggatcctaaaaatgaagctgctaagggtccagcacaaaaaaaaaaaaaaaatcaagataacaactatttcttttgtagtaagtctggacatgtaaagaagaaatataccaaatatcatgcgtagcgtgcaaagattatgtttcttaatttggtctggtctgaagtcaatttagcttcagtacctataaccact

SEQ ID NO: 23547 - DNA, 324 bp, Glycine max
agcttcttcggttatgctcaaccttgtttatactgtctaatctctcaacgtaagatcaagcgcgcaagtgatcatgctatatagagactcctcatatctacgacgagaaatgctcaggacactctatatgcacaccgacttctacatataatgctgcatagatggagtttctgtaccacattaccaaataaatgctgacatggagctcagatgcataggtataaattataatacaggattatattataaagctgtctttgttgttagacagatctactctagtgttttttgggttagactttccaattctttgattgggtgtga

SEQ ID NO: 23548 - DNA, 400 bp, Glycine max
tcttcttctccttccggcgccgtttgcttttcttggaggttcgtttgccgcgcattgggtggttcgtcgtcggcattgaggacttgcaactccattttgctcttccaccgtcaaggtaagcttcacatctccgttaatggctgcatttttgtatttcaatttttgcgttcgtacggatcaagttgattcgtaagaatcatacgaatgaagttgatccgtatgaggcatacagatcaacatcaacttcaccatccaatcttgctctccaaccactggtttcccacgaaacttgaagggacactgacatttcctactctcaatatctcttctaacaaaatctttcttcctaaacctgatcactctcttcacaaacaacacaaatgaagtccttcctctaata

SEQ ID NO: 23549 - DNA, 382 bp, Glycine max
agccttgatgtaacagtgcctacactaaaactatctaaaaactactctaattgtctgcacaactcatctcaaacattctccctcttcattgctcgctctccctcatttgctcaaatcaaattcttgatgttttatatacgtaataaaattcattgacctctatcttttgtgatgttctatatagatatcacactccaaattttagatttaacaatcaattgaaagatttgcaaaaaatatttaatcatatacaatattttttagtagaaaatgtcatataaagaacaattaattagggtttgaaagaaaaggtgacatcttatgtgatattattaagtaacaaaaaggtcgtatttgcaacaacaatgttgcataacttcat

SEQ ID NO: 23550 - DNA, 412 bp, Glycine max
tgcgagctcggccggaatccgaaattgaggagatgttgcagaccttaggtgtggctttgctgtgtgtgaactcaagcccagatgacagaccgaccatgaaagatgtggtagcaatgatgaaggaaattaggcaggagagagaggaatgtgtgaaagttgacatgcttcttaatgcatcttctgcaaatgagcaacaagaaagaaatcatctcactgaagaaccaatgtcaatgataagcaccagcagcacaaatctgcatctgcattactctccccatcgccctcaaacaccaaagtaacttccaaatagttaaatattagcaatgtgtcttggcaactaagatttccttagcaagaatggtttctgtcctgttatcattaattaattcagcttcatatttttggtttcttt

SEQ ID NO: 23551 - DNA, 421 bp, Glycine max
  unsure (1)..(421): unsure at all n locations
agcttgtatactgaattgagtatggcacacacattgcatgtctgatatgcctttcagaggcttgaaaagtgcgagaaaacgggctgtgttttctgcattttctggaaaacacaatgaactcactaaacgagcatgcggtgctaagcaagttcatcaatactcattgtgtataagcattatctgaagaactcgctaagtgcgcttaccgcgctaagcgagttcatcctttgaggatgaacactcatcctcttgctgaactacctatggctaagcgaggctgaaccgctaagcccaggtaactcaaccaaattntgtgttgtaagccttgcgctaagccaagtttacttgagctaatcgtatttcatcactacaacttttaggctaagcgagcttagcttcagctaagccaaaacatgtatgt

SEQ ID NO: 23552 - DNA, 413 bp, Glycine max
tgcttgtgaagctacaatggaggctggatctttgagcttcaatgagatccttcaatggtgatttcccaccatggagatgcagcggaagataaagaagaagaggtgaggggagacgccatccactagggaataagccatggaagaaggagcttcgccatcaagagaatgtcttggataataagtttggagaggatgcttcaatggaggaaaagaaatagggagagaaagagagaggggggagaccgaaattgaaggaagaagaaagggagagaagttgaactttgagttgtgtctcacaagactctcattcatcaaagttacaacaagtgttacacatgcttctatttatagcctaggaagcttccctgagaaacttccttgagaagcttctttgagaagcttccttgagaagc

SEQ ID NO: 23553 - DNA, 428 bp, Glycine max
agcttgccttgccccttgatatatttgagggactcatggtcactatgaatgacaaattccttgggataaaggtagtgttgccatgttttcaaagcccgtactaaggcatacaactccttatcataagttgaatagttaagggtaggaccacttaacttttcactaaaataagcaattggatggccttcttgcatcaacacagccccaatcccaacatttgaagcatcacactcaatttcaaaagatttttgaaagtttggcaacgcaagtatgggggcattagttagcttttgcttaagaacattgaaagcttcttcttgtttctctccccatttgaaaccaacatttttcttgagcacttcattgagaggtgctgccaatgtgctaaaatccttcacaaatcgtctataaaaacttgctaagccatg

SEQ ID NO: 23554 - DNA, 366 bp, Glycine max
  unsure (1)..(366): unsure at all n locations
tcgtataattgattacactgatttggtaatcgattaccagcgatagnttctgaacaaaatcaaaagatgtgactatgccaataggtttgaagcttttctaaaacttataacttttccaaaattattatgtacttctaaaggttatgactcttctaatggttctctttaccagacatgaagagtctataaaagcaagactttgatttgcatttcgatatcttgaatattctttacaaaattttctcaattgatttctgaatctctttgaactccttctttttctccttttaccaaaagccttcaaaagttttctggttttccacaccttgaaaactatgctattcatctttttcattccgttctccc

SEQ ID NO: 23555 - DNA, 361 bp, Glycine max
agcttagagcaacaacttaaaaggaagcctacttcaaaatcttatggttctcactcttatccaaagaaagacaaaggttacggcatcttaggggctgcaccttctaagccctaagatgataaggggaagaaaatagaaaagcaaccccctaaggctggtatgcaagagaagactagctctataaaatcctttaaatgttttggaagaggacacattgcttctcaatgccccaccaagaaaaccctcattatgaggggccaagacatttatagtagccaagatgaggctactacttcaccttgctctagtgaaagtgaagaagcaaaaggggaagaatatagttgatgcaatcctaccccac

SEQ ID NO: 23556 - DNA, 390 bp, Glycine max
tcacacagtttatcattctcaaacttgagttttggaagaccaattactaagtctttcctaactagatgatttaaatgattcatattattgtgtgcagtcctacaatgccacaaccatgaatcatctattttactcaccaagcaacttagctcatgaaaagatgcatgctcaacatttagcatatagatgttacctatccttttaccaatgtggacaactttaccagatatggcttcacttataagacaacaatttctattgaattcaatcttgaaacctttatcacaaatttgactaatgcctataagattatgctttattccatccacatataacacattctttatctaagttttgtgttgattccctatatttccttctcccattata

SEQ ID NO: 23557 - DNA, 434 bp, Glycine max
  unsure (1)..(434): unsure at all n locations
agctntaacgccaaattaactaatttcttctagatatgcaccattggagatgctagagaggtatttagactagaagatatgccaaggcatgccatttttactagggagttaatgtttgggatgctatgctaatatatggtttcaagggattcccatatgcttttaatctaactagtttttagaacaatgtgatacacaggataaacagagagtttaaatattttttatttgaattctatttttttatttatatgtaaaaatgaacataaatatctatcaaaaaatatgataacttttacttaaattttttttttgtatctaattaatgtcataattttatcttaataatgtatttacttttatttatataatggaatagaacaatcaaacaatatttactaagaaaacatatgaaatatgtaaaatcacaatag

SEQ ID NO: 23558 - DNA, 405 bp, Glycine max
  unsure (1)..(405): unsure at all n locations
ntggggaatgatgaattgattatgaccgtcatgatgtgactacagccatagtgagttcactatgactgtcgtcgaaaggctaacgttgtttacaaaggggcatcattatattaccatggttgtcatgctcaccatggccatgttggatgtactatgaccaaggtcaagtggcagagtcttcaaatcttcaagtaaaagtgaaaatttctactattttcacttaattaagtggccattcttctgcaagacaaaactaggacttaaatgttagttgtaccaagaaaattcatgcaaatggaacaaaaactcacaaaatatcactacaaaactagtttgtcaacctcccatacttgagcattgtttgtcctcaagcaatttttctagttctctaatcaaaacaaatta

SEQ ID NO: 23559 - DNA, 422 bp, Glycine max
agcttattaaagaaaattgatcaaccttcaaaagccaagaaaaaactccgaggaaccataaaaataatcttgtaatgctagaaaagccatgaatgatattcaacatacaaaaaaccaattttagctatgaaagaattcaaaattaattttatgacttatcatgcttaacatgtatattgtgtgttatttaatcatcataacttgaccttactctgagtgttagccaccatgagaatgaatttaaaattaattttgaattcatttagtgatagaaatgatgttagtaacaattaaaaataggataattggaggtgctttatcaaagtatagacatgaaaacctaccttcacgttagtaacatcatttctatcacttaattgacttttgaatcttgatttcattatcatccttcttgataatga

SEQ ID NO: 23560 - DNA, 423 bp, Glycine max
tctttgagagaacttccttgagaagctagagcttatctacacacacccgtctgataactaagctcacatccttgagaagcttccttgagaagattcctaaagaagctagagcttagctacacacacctctttaatagctaagctcacctccttgagatgaaaagctagagcttagctacacaccccctataatagctaagttcacccccattccaaaaatacatgaaaataaaaaaaagtccctactataaagactactcaaaatgtcctgaaatacaaggctaaaaccctatactactagaatggccaaaatacaaggcccaaaagaagagaaaacctattctaatatttacaaagaagaattgatccaaccttgacccatcgactcaaaaatctaccctaatgttcacgagaacgctatgg

SEQ ID NO: 23561 - DNA, 375 bp, Glycine max
agcttgaaggtgtgaacccaccatttttcatagtaaaacactggtaatgtgtctactattattgtgatcatttctttctccatcattgagggaaccacttgggctgccagatccctccacctttgggtgtattctttgaaagattcatgccccctttttgcacatgttctgtagttgcatcctatcctgagtcatatcataattgtactgatactgtctaacgaaagcaaccattatgtccttccaagaatggacttgggaaggctccaagttagtgtacccggtaacagctaccccagttagactttcttggaagaaatgtatcagtagctcctcatcttttgcgtatgcccccatcttccgacaatacatctt

SEQ ID NO: 23562 - DNA, 421 bp, Glycine max
  unsure (1)..(421): unsure at all n locations
tcattaagaggcttcctccaaaagcttcctcgtggcttctttgagaagctttctcaagaggcttctttgagaagttagatccttatctatccacacccctctattaactaaattaacttccttaaaaataattacggatgaaaataacgcaacaaataatcaaacatcaaacataattactaataatacatagatatatatatcagggtgttacataggctcctaggtagacatcacattttcaattttgcatccagtttttcatgtaactttctaattcaaattgtgattgtccagatctctggatggactgtggctcgaggaatccatacacatcggaattcctcgcttgcatacttgtctcagtcagatgcctattgttgttaacacaaagttaattatgtatgaatntaaaacaata

SEQ ID NO: 23563 - DNA, 432 bp, Glycine max
  unsure (1)..(432): unsure at all n locations
agctttgaaaatataatatcttgatttctaaataatccatttttctcttgaaaatataatatcttggtttctaaaatatccatttttctctccccctttggcaacatcaaaaaggccaaagtgcataaaacatacataatttaaaaacatacacaaagcatattttgtaaaataaacataaaagattaaccatacatgaagcaagacataaaccaaattataatgcaaaccacatagtcatatatcacagtccataaatatcatgtttattcataattaactgagtatcaaatactaaaaatactaagtgttcaaatgtcataagcatatagccaaatacaaggctntagaaacaaaatataataataataataataaagtctaaactgatggtggtggaggtaaatcaaggcagtcgcatatgatggtgac

SEQ ID NO: 23564 - DNA, 389 bp, Glycine max
cgtagtgaggtttggctacaaaaattcattggtttttatagaattcaaaggtttagattttaagagagcacaagtcctagacttatcccaatgatcttttcttgtatcatacaagtagccttctcactatttttcttctcttaagtcgcttttgaccttattgaaacaagacacttattcttttcttcttctttttttttttttacatataacttatttgttgtgtgtgctgatgattaacctttttcttttcattctaattgactttcctcccccaaatttaaagtaaattgccttgaaccatatgctctcctagaatctaaacaaggtatcaggagataatcatttaaagttaggtttcaattcatgacacacatcattcagcttat

SEQ ID NO: 23565 - DNA, 375 bp, Glycine max
  unsure (1)..(375): unsure at all n locations
agctntgagaaaaatctaacgacaataacttttaactcggatgtctaatcgagccctgtaatatatcgagacgctcgtaattgaaaacggaagctctaagaaaagtcaaacgacaantaactttaactcggatgtctgatcgagccctataatatatcaagacgctcgaaattgaaaacggaagctctaagaaaagtcaaacgacaataacttgtaacttggatgtccgattgagccctgtaatatatcgagacgctcgatattgaaaacggaagctctaagaaaagtcaaacgacaataaactttaactcggatgtccgattgagcgccgtaatatatggagacgcttgtaattgaaaactgaggctctaagaa

SEQ ID NO: 23566 - DNA, 411 bp, Glycine max
  unsure (1)..(411): unsure at all n locations
agcttgaaattgaacaacggaagctctcgaganattcaaatgctcataacatttcacacggatgtccgattcagatgcataacgtatctagatgctcaaaattgaaaaacagaagctctcgagaaattcaaatggtcataacttttaacatggatgtctgattccgaagcataacatatcgcgacgctcaaaattgaataagagaagctctcgagaaattcaaattgtcataaattttcacacggatgttcgattcggggataaaatatgttgagatgcttgaaattgagagataaaagctctcgtgaaattccaatggtcataacttttcactcggatttccgattcatgacacttgaaattgaccaacggaagctantgtataaatcgaatggtcgtaacttttcacac

SEQ ID NO: 23567 - DNA, 412 bp, Glycine max
  unsure (1)..(412): unsure at all n locations
ntgatggtgtcgagaagaaatcacatgtttgtcatcatcaaaaagggggagaatgtgaatgtatgtatacatgattttgatgatgtcaaagaagaatctaacaaggctgcttcaaatgataagcatttgcttcaagaataattcaagattgcttcaacaaacaaagccttgtttcaagattcactaaagaccaagccttgccttaaaacaaagtgctttcaagacatgcaaggctctggtaatcgattaccaggaagtgtaatcgattaccagaagacagggttgagaaatagctgttgaaaaatgttttgaatttgaatnttcaacatgtaatcgattaccatatgtctgtaatcgattaccagcaacgaaactttggaaatcaaattcaaaagtcatacccttcaaatat

SEQ ID NO: 23568 - DNA, 430 bp, Glycine max
agcttcttagtttcagatgatgtagctgagtttgtagctacctcatgcactcctctaatgactatagcatcatttctggcgctaaactgttgggagttggaagccatcttctcaattaaatttctggcttcagcaggagtcatgtctccaagggctccaccactggcagcatctatcgtacttctctccatattactgagtccttcataaaatattggagaagcagctgctctgaaatctgatggtgagggcaactggcacatagttttttaaatctctcccagtattcatacaggctctctccactgagttgtctaatacctgagatatccttcctgatggttgtggtcctggaagcagggaaaattttttctaagaatactctcttcaggtcatcccagctcgtgatggaccttggagcaaggtaata

SEQ ID NO: 23569 - DNA, 400 bp, Glycine max
  unsure (1)..(400): unsure at all n locations
ntaggctattcaattgcttcagattgttgcatataatggcaaaggtctgtgtggtggtcggcagaggagcataaaccacagagtctggcgacaggtgcaaattttttattcatggccaattaggttaccaggttaaccaaggcatctagtttaccttcaagcttcttagtctcgcctaatgaggatgaatttgtggctacttcatgcactcctctaatgataatagcatcacttctgacactaaattgctgggagtttgaagccatcttctcaattaaatttctggcttcagcaagggtcatgtctccaagggctccaccactggcagcatctatcatacttttctccatgttgtagagtccttcataaaaatattggaggagaagctgctcagaaatct

SEQ ID NO: 23570 - DNA, 398 bp, Glycine max
agcttctgcttcttgctgccatcattcttctccctctcacactcttcctcaatggatctatttgaagaagcctccctagtctcactcaaactcaagaaatccctctctacccatttctcatcttgatcttgcttttgctttccgatggatatcttccttcgaagacaatcttgttcaaggtactgttgcgcactaaatgtggacacctctaccatcgacgattttaaccttaattcgtcacgccagataggcatacccaacccagttaggcatttctcatcctgatcagaattcccataaacaacaacttctttgcccttcaccgagcttctatcaccaacctctctctcaacaaaacccaattttgggttctcacagaggtagctgagggtcaactc

SEQ ID NO: 23571 - DNA, 417 bp, Glycine max
tagaaaggaagcttcaatggatgaaaagaatgagagagagagagagagagagagagggaggggcacgacattgaaggagaaaaaagaaggagagaagtggaactttgaagtgtgtctcacaagactctcattcatcaaagttacaacaagtgttacacatgcttctatttatagcctaggtaacttccttgagaaacttccttgagaagctagagcttagctacacacacccctagcttctaatagctaagctcacctccttgagaggctttcttaagaaacttccttgagaagctaaagcttagctacacacacccctctaatagctaagctcgcctccttgagatgagaagctagagcttagctacacacacccttctaatagctaagctcgcccccatgccaaaatacataaaa

SEQ ID NO: 23572 - DNA, 369 bp, Glycine max
  unsure (1)..(369): unsure at all n locations
agctnttcgattcattctatgtacccgtagtggttcacattgtgtttcgtgcatttttattctcgttttgtttactttttataccccctgttgacgtgcttaagccattttacttaagtcatttctcgcttaacttaaaaataaaataaatttccaccgaacgtttgaattgtattatccattaacttcggttaaaataaattccgaccgttcggtcgtgccgtaaccacgttggaaatcaaaaagaggtaaaaaatagtataataatcaaaaagacatcttttagtaaaataaagcggaaaatcaatcggagcgtttctctttgggatttctcattcttaatcgaatcgattaataactaaagtgaaa

SEQ ID NO: 23573 - DNA, 356 bp, Glycine max
atgttattggcctcacactgacatcacctatcatgaggactggccgtgcaaagattccgtgagcgtccacgttaaacgataaacatcggggtatcccatgcctcaccaatgggcattatgagtgaactcgtttggcttatcaaggaaactggaggctcacagaaaacatttacgcgtgcagcatacataattgtcttaattgacaacacataatgacagtgcatgcgtattacaactttgctgcgacttcacattggctgactagcgtacacattctgaaagcacctgacgctcgacaacacattgaagactacgcattggcgacaacacattgactgacttgactacacatttac

SEQ ID NO: 23574 - DNA, 419 bp, Glycine max
  unsure (1)..(419): unsure at all n locations
agcttgatcgatgttggatggctgacatttcaagaggatagtccgaatgtgaggactaatccgctcaccaatcatagaggctcagcggtgaatgtagtggaagaatgggagtctcgggggcatgaagaaacccctcaaaactgaccaaattgggtacaaccatgtcctccggactttgaattagggaattggtaaatcatcgaacgacccaagatttccatgacaaattcaatgtaatccaatacttccaaccctattactaggcctaggctgtagggtcttcttctattatcgggcatacctctttttttaatgttcccacaattataaatacataaccctttttcatcttatgtgttccctctcgcactttcatctantttcattcttctgcatatttatttttggtgcgattaaat

SEQ ID NO: 23575 - DNA, 381 bp, Glycine max
taagctccttcaattgcacaaggctcttaatatttgaagagtatccttgtggaaccttcacccaacgaagacactgacaaaaacttatcttctccttcttggacaaagtatggcaggctgggggcaagtaaattttcttcccattagtccttggatgcaactgtgattgtgtacccatatcagctagatcttgatgggtattcaagacatccttcattttgccttgaatgttaaggagcgtcccaatcacactgtcacaaacatttttctccacatgcataacatcaatacaatgcctaacgtgaagatcacaccagtacggaagatcaaagaaaatggaccttttcttccatatgcaactctgacttttatccttctttt

SEQ ID NO: 23576 - DNA, 408 bp, Glycine max
  unsure (1)..(408): unsure at all n locations
agctagtacattcctnttttctttcaattcaaaccttagtttcatgtttttaaatattgatatttttattacatatatgtttcaaacaatccaaaccttcactatgcatcaagaacacaaaagtaagaaaatagccacagacccttttgcagccaagtcaacaatgtagcaccggttggtcacaatgaacttgttgattaccagcgtcttccctgcaacgaccattaccatacatcagcactaaaccaagcttaaatggtacccgcgacatgtcttcaacactacaccaagcttaacctaagtaagtaagtaagtaaccaacgtaccgtggacaaagccctgatcttcacgaagtgccactccttgattcaaattaactgcgacccgggaagagtcgtcgaagtcgtc

SEQ ID NO: 23577 - DNA, 410 bp, Glycine max
  unsure (1)..(410): unsure at all n locations
ttatgatcaattntatattctctcttttcctctcaactattcttcattcttcttcctcttttcacttatgctcttccatttttgttgcacaaattttgtggcttttccattggtgatgatcatggaaggctaaatacttaatcaatccaaggatccactccaagcaagactaaatttgagttctggtttagtatttctaattttgtgtgaatgttcatttttttctttaatcctatttttgattttcatgattatgaatatgcttaggattgaaagcaaattaaattgtttggatgatattctaacctaatttgtgatctcaatgaatttagggattaattcgattaaactaactctaatgacattaattgaacctttacaacttgatcattctctatagaactgtgata

SEQ ID NO: 23578 - DNA, 410 bp, Glycine max
  unsure (1)..(410): unsure at all n locations
agcttcctttactaagattagaagttgcctacccataacactctagcatttgtctaacatgtcctatgtggatcaagcctaattaggttttatgcttgttttcatgaccatgtcatttccaagatagtttctccttatcgtggattaattgcctttcattatcttcaagatgaccaccaaggtagttagaacaataatacacattttcaaccatgtatgatggtctgttaatgtgtagaagcaaagcttcatggtgaatcaagggtgattcaaaggtgttttgatgataacaaaagatgatgacaaaggtgatgacaaaaagctcanagatcaatcaaagaacaactcaagtgaatcaaagatcaatcaaagaacaactcangtgaatcaagaacanattcaagagttca

SEQ ID NO: 23579 - DNA, 404 bp, Glycine max
  unsure (1)..(404): unsure at all n locations
tgttaaagaacttagaaaaaatcaagaacaagcttgttcacacatcgttcgcgtgtatgacatccactccacaaggtttgaagtagaggagaccttcaatcctattacgcaacgtggcggacaaaaatgggcagttaacttgaatggtcattattgtcaatacggaaggtattctgggcttcactatccatgttcacatattattgcagcttgtggttacatgagcctgaactactaccaatatatagatgttgtttatacaaatgagcacatcttaaaagcttactccccacaatggtggcgtcttgngaatgaagcggctatttctccttctaatgacgcatggacacttatccttgacccaactacaattcatgcgaaaggtcggccaaaatcaacaagga

SEQ ID NO: 23580 - DNA, 430 bp, Glycine max
  unsure (1)..(430): unsure at all n locations
agcttattgatggaatccatagtggagtgtgtctcagtgtaacccaagacattgaagaacggcgccgcaaattagcaaatgattgtcagagagagacaagaaagttccagcacatgattcataagtcaaaattcaggataacagtaggacaagacactctacagtctacagaaataagtaaaaggaaaaaactactaagttaaacaacctaaaactgattattttttataaaaagatgaattattttttaattaagtttaatgttgaaactgaaatatgtacactgatgcccatgttaaccagcacttttataatgtaaaagcagatccttatttgactcataaaaatagataattataattaatgtataacattnatttaaattaattattttaaaataattattaaatctaattatctttcataatta

SEQ ID NO: 23581 - DNA, 418 bp, Glycine max; identical to SEQ ID NO: 23534

SEQ ID NO: 23582 - DNA, 434 bp, Glycine max
  unsure (1)..(434): unsure at all n locations
agctntagagacagacatctactagacattcatctcttattagaaaaaaaatgaagaaaaaaataatcaaacttaaaatcatatgctcatggaaagcttgataaaaaaaagcttttataaataaaatatgttaaatgtttaaattctcgttaagtgagtctcgtaaagaattttatattaatttgtcattttggtggtggattccttccttggtatgatgtgtccagtagaaatgatgggcccatatgatgaagcaccattgtcgagttttcgcatttctaatgtctgatattttggattatacaattaatattcctcaattaatttctttaattaacgatttcagtttcaataaaacacagacgaaacagaaccaattatgaagccaaaagctaaattaaacgtacatacaatcatcatgtgtgtggagaaat

SEQ ID NO: 23583 - DNA, 373 bp, Glycine max
tcgatgactttactcctttgctatatatagtactatagcatgtttgccgacttttgtgacaccagcgcattgtcttgtcctaatagaaaatataaaacaaatttgttatatatttaattttagggaatcttgaaaggtttaatttattcgtaaacgttgaaaacatattttaagaatatgggtttatctagttattaaagacgtatggcatgcaagggaattaaatgataaaaaaaaatgacattcacggccacaatagtgtcctaagcacagccgaggtggacgaccgtccaggaacatacttaaagatgagcataaaaaattttagacaaaattgtatttttttgtctctcaatttatcttcagtttcgga

SEQ ID NO: 23584 - DNA, 393 bp, Glycine max
agcttataacactgctagtgctattaattgaacaaacattaaacatctaaagaagttccaacataacagcaatagtccaaacccaaacacaaaacaccatatttatcgaaaccaaaccaaatgaaatttcgaaaaccatacacacataaaaggattgattggaatttgtgtggtttagtgatggaatttgtggtagacatttgcagatcatggttaagactagaggattaggccatgcgttaggtagggttatagccatatgtttgaggagaagggatggtgatgattctgacggtgtttcccagcgcctaaggccgaccgtatcggcacacaatcgactggtacccgacattgttgatgatgttgtgcctgtggtacctgcggactctcgtg

SEQ ID NO: 23585 - DNA, 417 bp, Glycine max
aaccaaatgctcaccactattagaggagaaaccttcaggttgtttcatataaatctcttcctctaaatcaccattaagaaaagttgttttcacatccatttgttgtaactcaaggtcaaaatgagcaactaatgccaagattatacaaagagaatctttcttagatactggagaaaaagtctctttgtaatttattccttccttttgggtaaatcccttagcaataagtcttgtcttgtatctctcaatgttgcctaatgaatccctttggtcttaaagacccatttacatccaatggcctttgccccattaggcatctctacaaggttgcaaactttgttactctgcatggaattcatctcatccttcatggcatcataaccataaattgactatttacaactcatggcttgatct

SEQ ID NO: 23586 - DNA, 413 bp, Glycine max
agcttcatgcttaactatgtatggcaaatcttcattattgttgttcaagacatacaagcgagcttgtaacaaatcttctacacttggagtgatcacatgcagtcctcttgaacccttaccacccattctgtcatcatgctaagactcaggaagcccaacagatttagctttctctaagtattctgaacaaaattcaatggcttcttctgcaatgtacctctcaacaatagatgcatctggacgatatagattctttgtatacccttttaagatcttcatgtatcgctcaaccgggtacatccaccgtagataaacaggaccacaacatttgatttctttgaccagatgcacaatcaagtgaatcatgatgtcaaagaaagcggggggagaatacatcttcaactggcacagta

SEQ ID NO: 23587 - DNA, 357 bp, Glycine max
tcatgatgatgaatcaagttgattcaagtagttttgatgatgaaaaagatgatgacaaaaagcccaaagaatgatttcaagattgagtcaacaagttcaagatcaagtttaatttcaagcttcatgagaagattcaagaatcaagagaagtttgatttcaagattcaagagaagaaaacaagaagacttcacaagagaagtattgaaaagatttttcaaaaaaacaaacatagcatagttttgtttttcaaaagagtttttctgaaattttctaagttactagagtttttactctctggtaatcgattactagtttcctgtaatcgattacaagtggcaaagtttgatttcaaaaag

SEQ ID NO: 23588 - DNA, 325 bp, Glycine max
  unsure (1)..(325): unsure at all n locations
caagctttataggtgaaatcgggtgcagccattttccttagagtcctctcacggngtggaggttgtgccatgttctcagaatgttcaaaatcagaatactcaaaactataatgctcaaaatcaccaataacagaatgctcgggatactcaaaaggtactaaatgatgtctaactaatctatgaaatgtactatctatctcaggatcaaagggttgcaagtcagatggattgcctctagtcatacactaaattcagcatgcacaattagttgccttcttatgcaagtaacagtgtaggtttgaactacagctaccattaaatgata

SEQ ID NO: 23589 - DNA, 392 bp, Glycine max
ttaacattcgaattcaaacgttcagaaactgctggtaatcgattaccatatatgtgtaatcgattacacagtgcaaattttgaattcaaattttaatagctgttgtaaatcatttttggccactggtaatcgattacatcctctggtaatcgattaccagagagtaaatctcttgaagaacactttttaacatgcattacttggccaaaccttttgctacttcaattggaattcccctcctatttaatataccctttctaagactagagacttgtcttgatcatccatcttgaatatctttaatttctttgtcttgaataaagctttgagacgcatgtgaaactttggcatcatcaaaacattcagcttgatcttttgtctacacaatcatc

SEQ ID NO: 23590 - DNA, 393 bp, Glycine max
  unsure (1)..(393): unsure at all n locations
agcttatgcgcatatttccctactaacgttcacttgcacaagacatcctattaactaagaaaaatgcacccatatacaatcaaggtagcttcattacctagattatttacatgtacttccaaggtgtatttgttatttacatcacacacgcctccttggctaaatttacatacatgcatactcaaagcatttcggggtaccaaaaattgcacatgcgctcatcttggtatttctaatacctatacatatacaaacttcatgatgaatcttgactacctacgcaataaggtgctacatttcatgctctnttttttttttttttttttgaggggaatattaaccatgtcccctcccttctcatggagtagcatcttgcctaacttgaacttactt

SEQ ID NO: 23591 - DNA, 412 bp, Glycine max
  unsure (1)..(412): unsure at all n locations
tcttttctagacctcgatcagtcatgtttcctggccgatgtcaactgtcatttttttcgatcaatatcggtgaataatattttttttgccaagatggtctaatgttttcctggccgaataaatgggaacatgccagtttcgacccaaacaaaaggtcggtcgagctcgaacaaaaaaacctagccgacctacattgtaaattttttatgcaacaccaaaacaagaaatttcctctgccgtaaaaaaaaatattatcggccagcgagcgtttttaaaaaaaattgctcaatgtcagctgaaaaatatcagtcggggctatttcacgaccgatgtcgactattgagatttcaattcaatccatgaacgaaatttgcatgatatcaattangaaaagtttgatcggcatcatctt

SEQ ID NO: 23592 - DNA, 426 bp, Glycine max
agcttaatttatataaaaaattgaaatgtttgaaatagatcatgaggagtaaaatcacaaatctctaaaaagtgagaaacaaaaaatctcatttaaaaaatggaatgattaaaattatgaaattttaaaaaatgagaagacaaaatgtctcaattaaaaaatagaggaaataaaattacatatttagaaaaataatgaaataaaaattacattttaaccaaatttatttattaatattttaatatcaatttctattaatggagtgatattattgataatagctattttatactttttatagtaattgttggtgtagtattgattggcaatgactaaagccttatactataaaatacttttagaaatgttctacacttttgcaaattaaaaaagttataaaatttacatcctgaacgtgcaaatcat

SEQ ID NO: 23593 - DNA, 405 bp, Glycine max
tgtaggtgcaaaatgacaagggacgaatttaattataattttaaaaatatgagaatttaacctaagtaataagtttcaagctattaatctatataaatcactcttatatttttctttttatatttaacagttttagataataattcacaatgtatcacattttcaggtggtgcattcttatttattttgctatttccctcgtcatttgagttcaaacttccttttacttccaaaacaaactaacctttttcagtacgtaacaccctaaccctatcttaaggaagattcaatcgcttgaattttgtcgttgtgtattttaattcaaatataattctatcaagagaatatcttttctttagtcccatcccgtgcggactggtgtcctcctaaagagaacataacaat

SEQ ID NO: 23594 - DNA, 427 bp, Glycine max
  unsure (1)..(427): unsure at all n locations
agcttcttgttatgctcacaacctgccacagagatatatcttaagcactggaccaatcaattgaattgggtgccttgaattgcttataaagtacgtgtggcatagtaaatcatatggacctcgttcatagaaaagcatgtcctctggtttgacgacaatctttggaaatggctatgcttactaggacgttcactttcactagtcccatcccatccctgttttactttgctaatgtgctttatcaataaatgctaatcatcttttttgccactttccatttccctcgatgatgcctccttttctcttccaaacttttctttgaaatgactttcattcttttattaatntagtcttcatgaatatacgaagactaaattaatatagtttactaattntaaaagtaacatatattgaattagtaaataat

SEQ ID NO: 23595 - DNA, 413 bp, Glycine max
taaaaagcccttagtcattcacaatatgtgtgtatgattgctttaactgagaagaagtataaagttgggaacattagtttagttgttaaacttagaaacaattttagccaagacacttgtgcgctgagggaaacactagccttgtgaggaatgaagtgttgtattcttccttgatgaagttttatttgctaacctttttcatctccatgtgtattccttcatgcttccatgacaagatcaaaacaaatgcaagctcaggatcagtcattgaaaggtttgaaaggatttgcagttatctcatgtattggtacacttagaacttgtattttgcttgaggacaagcaaatattttaatttggtggagttgataactacggagttaatttcatagtcaattttggccaataataatt

SEQ ID NO: 23596 - DNA, 393 bp, Glycine max
  unsure (1)..(393): unsure at all n locations
agcttccatcatgtggtatcaagagcatcttgatctangtgatgttcttttgcttcctctatctttttgttcggtgaattatctttaattccttgttcttcatcttattctccttgtatatcctccattgtcttgtggtttggttctttttagagtagattaaaaaaaaataaactgattaaatcttagatctacacttgttcttgcatttctatggttcaaattttgtagatctactcctgaatcttgtttttgtgttgattntaggttctatcattcttcattcataatattcttgtgttgaaccttagatctaaatgttcttccaaaatattgattaaaaaaacacaaaaatctaagtgtagatcacttaatccatgttgtcttagatct

SEQ ID NO: 23597 - DNA, 405 bp, Glycine max
tgaaggtgtgtagcctaccatcttttcatagtagaatattggtaatgtgtctactatcacggttatcatctccctttttgtcattgagggaactacttgggctgccaggtctctccacctttggacgtattctttgaaagattcatgcccctttttgcacatgttctgtagttgcatcctatccgaagccatatcagaattgtattgacactgcctaacgaaggcaaccattaggtccttccaagaatggactcgggaaggttccaagttagtgtaccaggtaacagctaccccagtatgactttcttggaagaaatgtattagcagttcctcatattttgtgtatgcccccatcttccgacaatacatctttagatggttcttcgggcaagtagtccccttgta

SEQ ID NO: 23598 - DNA, 395 bp, Glycine max
  unsure (1)..(395): unsure at all n locations
agcttagatggagaagaagacacagagtgccagcttcttagggctcaccatattttttaaaatataacttcaacatcggtttttaaaaaaacccgatgttaacaaaatgatgttaaggttaacatcggttttctggagaaaaccgatgttatcataacaaacgttaacatcggttttctaaaaacccgatgttaataaacatatgttaacatcggttatttaaaaaccgatgttactaataaatgttaacatcggttctccaataaccgatgttaatgaacttcgttaacatcggtttttcacaaaaccgatgttaacgtatacacagtatntacaattatgccaccgcgcatatgttaacatcgngttttttaacaaccgatgttaacacaccg

SEQ ID NO: 23599 - DNA, 423 bp, Glycine max
tgtcagatatatatatcggattaatttcaaacagtatcttatgcataataggtggttctagtaataagaaagttttagtggttgatgtaacgttaagaaatcgaatcttttaagtcatcacgtttttttttttcctatatgcaatgttttaaaaataggaccaaatcgatattactactagtccaatactgtgtttctccatgtaatagttgcaacattttttatataaaaataactactgccacatatataattatgtatttaacttatttgtattaaatataacttaaagagtttaatgataatgtattgataatatttttatattatcgtttaatcataattttttgttaatatgacttttaaagtaattattataaaagttataaatacaaatttattatacataatggattatgatcg

SEQ ID NO: 23600 - DNA, 418 bp, Glycine max
  unsure (1)..(418): unsure at all n locations
agcttgaacatacaaatggattattgtaaaccatanaaacaaatttctttatgtttactaattactcctctaattgaaaaatgctaccaagtactaacatagtaacatgcccttagtccaagttattcagtaatatccatcgtaaaactttatccaataatatttgaaaagtgatcaaaactagaagtagttttgatgctgccctagatttttaagcataggaaggtagtaatttaagccaaaactcattatgccttttaacatgctatcctatcaaattatgacaattttataaatttataatcattactctcaaaattcttgcaaaccataaaatgttcgtctagttntctttctttttggatatcctttggccgagagtcaaaaactatatttttaaagtactaatatccattta

SEQ ID NO: 23601 - DNA, 407 bp, Glycine max
tccacccggcctgtggcatggcaacaggcacatggttcactaaccatgaatgtcacgcttggtcgaacctgtcaaacattggtaattcattttaataaatcttactaaacttaactgagtgctgtgccaacaattatcagagggaatgcaacttaaaaaagaaaaatgtagttcaagcattattcttttaatctatagccattttagcatgtctttttttttggaaggaaaaattaggaatattattaataaactaaacagtaccagaggtactgaagatagcaattacaaggcactaggtgccaccttccaaaaacagaaataacaaaaccccaacagagcctcacacaaaggacaccaatacagatatcagtaaaatttagcatgtctgagttgaagcaagcatg

SEQ ID NO: 23602 - DNA, 422 bp, Glycine max
agcttataagaacaacattgccttaatcatttccaaatatgcatgtgaattaagacgcatcaacaagaatcaagccaaggctattgtgcaagcaatcaatggggcaaaacacaccaaatgattataatgatggatggctcaaattctcacaaaggtaaaatcatcactttcaaattgagctttcaaaactatcatgacatgtagagaagaatcaaggatttcaagtcacaaaatgtcaagaacttttattttcaaaacaattacccattttttgaacatatcctataattcaaagaaaaatatgcaaagtcgtacgtgcacacgaaattgacccaaaatattaaactaaaaatccgacgaaactaacaacattaacaaattaacacaactaacaaattaacaaaaccaaccaaactagcaaa

SEQ ID NO: 23603 - DNA, 409 bp, Glycine max
  unsure (1)..(409): unsure at all n locations
tgtccaccaaaaaatcactaaaaagatttgaaagttttatctcagctttttcttaccaagttaaatggatcatttttaaaggcccacctttaagtgatcacctttcaagtaaaagaatcgcttgattcactcttaaggaagaactacgtaggtctgatttcctctttgatggagggtacgtaggagcaagagccccgcttttgtcgacctcaaaaaataaaaagaaataaaagtaaaggtaaaacaatttccacaattctaaaaatgaggctgctgtcctttgagataaatgtgagaggtgctaataccttcctcaaacgtaaatacaactcccgaacttagaattttcattttgaccagnttccttcggtttttccgatgttgtccacaaataaatgttggtggcgac

SEQ ID NO: 23604 - DNA, 429 bp, Glycine max
agcttccatgggcgaagagaacaagttcttataaacccattggtggttttaactatgaccctttaagctatgctcaaaactttgacgagggatgggtagaggatgatgaagaatctttacatcgtgggttctctgctagatatgcagcaccttcctcacataaattgttcaagcaatgataaggttcaacatttaaggtcagctaatatatgtacaaacaaacaaaaaaccattcgtacgtatatttcttggctcattttactttaccttctagtgatattgattgtataaaatataaattatcacttatgtttgatgcagcaaataagtagtaaaaagggaaatagttaatctgcacagcacctatttataatcagtttgtacactaatagagaaattaatatcttaaagctcttgttaacttagtat

SEQ ID NO: 23605 - DNA, 416 bp, Glycine max
tatattctatatcaggaagatcctatgccttttgggttacttactgcaacatattctactcttgcttttggaatctttgcagaaccctcttactttcctgaagcatggactgaataccttctaactctaaatgggaaggttgtacatgcaatgttgtaggtataaataaagggaactgcactggccaccctggagtaactgcataatccggctttatagtttcattggattggggcttttcagtctctcttgccaccttctgtctagtctttctagcattatttctttggcaccatatcatcaacaagctggttagacaaggtcattgctgatctgaatcataaactcacccataattgatgactgctacaaaaggtaccagaaagatattgatgcataagaagttgaatagatga

SEQ ID NO: 23606 - DNA, 416 bp, Glycine max
agcttgtccctgtaaaacttttctatgttgtagcatacttttctatacgagaataactatttaaaagattagaatatggaaagtattgaccagtgaagtgttggtagaataatctttttatacctgttacaagtctccagtcttgttttgaaatcttaacaaggatgaaagcttgcaaatccttgatgccctgaccaaccatttgaacggggtaattttaagcaagatatagaatgagttggcaaagcagatactgcagcttttaataaaacttcttttttgtgtgtggacatcttaattgttcgttaattattaattatatttgaaggaaatgttattaaaactcctttcgtaaatagttcatggaaccaatgattagtattttaattttcttgtgccaataaatgcagtttctt

SEQ ID NO: 23607 - DNA, 393 bp, Glycine max
tgagatgaggaagtgttgaagggtgaaacttcctgcttttattgttgaccacagagtggtacctggagatatgtcgcgggggtcaggagaccttggggacgtcaggtggggtgctattgcccaaaaccaagcttgaccaatcccgacccaacctgggcatagtcggtcagtgagaacctgtgatgtacctaagcaggcaagctcctggcagtcaacagataaaaggaaaacaagaccacaaagcaaggaggcttgtggtggctggccagctgtgaattttgtgtgatatgtggagtatggcctctggtaatcgattaccaagggtgggtaatcgattacaaggcttaaaaatgaagacaggaggctaagatggtctctggtaatcgattacca

SEQ ID NO: 23608 - DNA, 412 bp, Glycine max
  unsure (1)..(412): unsure at all n locations
agcttctcccncattttcctataaatagggggagaagtgaatggaaaaaatgttcagccctcctggtaatttgagaatcacttgaaattagtgaaaaaaattgtttccgtgaagaaaatccaagccgaggcgcttctgtaacgtttccgtgggtgatttcgcgaagattttcaaccgttcttcgacgttcttcgttcgttcttcgtcgttcttcggtcttcaaccgataagttcccgaaatcgaacttttcaattcattctatgtacccttagttgtcctcatttgttttcacgtgcttttattttcatttcatttacttttcgtacccccttttgacgtgctttagtcatttacttaagtcattttctcgcctaatcaaaaaataaaataaatttccaccgatcattttag

SEQ ID NO: 23609 - DNA, 348 bp, Glycine max
tctactgatgtggcagggcaggcttacttcactttcttgtatcctacgcgagctctgaccactggacttcctccccgcgatgcttcttttcatgtacgcctgagtggacttatagcctaaaccatacttcccacgatttgcttgggtatttatcaagctagttatgccgccggagcttttgcctaaacccatcccgggttcataaccgttccccaacataactccggccatcattaccgctgcatctgacagacaaagctgcccaaagagggagtccccggaggaaatgctgaccacctgaaaagactggaaagcagtttctaacgatacttttgcggcttgcacata

SEQ ID NO: 23610 - DNA, 368 bp, Glycine max
  unsure (1)..(368): unsure at all n locations
agctntgcatgcacaaacataatccttgaaatggaaaccatgtttcttggatcattattgtctggtgcagccatgattaaatgtaaaaaattatattcgaaaatattattgctaaaacttcctgtccaaaccaatatttggtttatttgtgataagtggtgagatacatagaaagcataggattacatttatagagggagatgtagaagacataattatgtacctagattgttatacacaactaattaatatacttttctagttaagcatgtagaaggtggttttatattttatacattatggactaatgagaataatgttgatgctaatttagtgatattgagccatatcttctttctcactacttg

SEQ ID NO: 23611 - DNA, 372 bp, Glycine max
tctcccccattttctataaatagggggagaagtgaagtgaaaaagggttcagccccttaggcacttctctctctttcgaatttgcttggaaaaattgtttccatgaagaaaatctaagccgaggtgcttccgaaacgtttccgtaacgtttccgtaaggaatttcgcgaaggtttcaaccgttcttcgacattctgcattcgttcttcatcgttcttcgatcttcaacgggtaagtaccttgaaccaagcttttcgattcattctatgtacccgtggtggtccacattgtgtttcgtgtatttttattctcgttttatttactttttataccccctttttacgtgcttaagccattttatttaagtcatttc

SEQ ID NO: 23612 - DNA, 410 bp, Glycine max
  unsure (1)..(410): unsure at all n locations
agcttgggtaagaaatttcaaacaaaacaaacgggaggacatggtaattttaatatcatttcctcatgttcatgttgaatagcttgagtagtataatacaacttaaacagaatcaccccggccccacccaaaaattgtttataggtgaacaacacttacaaaaagaaaagtatgttcccttggttgaaccatgtgagtcctttatctgatcatctttgaacaatatttatggaacctgaattttggtctggtcaaagatcacccaactagtatatattgagatgatgaatgatctggatttcattacattggttgatgtaaaattntaactgttattcactctttgtatatcaatttagcaaagaacaagtattttctgaatgattatgtgaattatgtcatcttccagt

SEQ ID NO: 23613 - DNA, 422 bp, Glycine max
tgtagcaaaagttgtaggctagctggggtaacttttcagcaacaattttactgtacatactatatagatgtatatatcatgtgtgtgcatatgtgggtggcaatgtgtgtgttctcaatcttcaaaagaaattgtagctttctgcatttatgtatgtatgactattttactggacatggttattaaaattaaaaagtgattcattatatggtgactcttaacatctgattctgattattctatataattttggaatttatgctgctgcaagagatcttcattcaatattagtttggtgtttaggtaaatctgatggatgctattgatttcttgtctcttgacatctagcacacagaactgaactgtacttgttatatacacatttttctatgatatttactttgcaagaatgaataggaaat

SEQ ID NO: 23614 - DNA, 423 bp, Glycine max
agcttggacaatggaaaggaaatcttgctaaaatcttagatgaatctcctgtaaatacctctactagagatcaaatgccctaagactataccttcatggacaataaaatgacatttttcaaagctaagaacaaggttagtctcaatgcattggtcaagaactctagagaggcatgcacatttggaaggtgccaagagcgttgcataggccaaaaggcatcccggtgtaggcaaatgtgtcgaatggacaggtgaatatggtctagtgctggtccttcgatgcaatataaatttgcatgtaacctgaaaaaccatcaagaaagcaataatgtgatttacctgccaacctttccagaacctagccaatgaatgagagagggaagtgattcttgcaagttgcctagttaaatctcctataatcaat

SEQ ID NO: 23615 - DNA, 414 bp, Glycine max
  unsure (1)..(414): unsure at all n locations
ggtacttattttagaagtgattgatacatgatttgtgacttgtaggattcaatttgggcaaaattgggtgagggagagtgtgatttcaaaaatctgcacttatgcagaattttgctgtcaaataggtgcaacagaattttggctttgtgcagaaaatgttatgtatttgctggttgtggaaagagtagtacagattatgctctagacgtttctagcagatcccaacggtcataatgtagacttatgtactagagacttccagtaaaattttcgagtcgatccaacggttaaagaattggaacaaagagaatgttactggggtttttgaatgtgaaaagctgtgatattggtttgtgttttgggcagaagtntctgcctttgccctattttcttggctgtgttagtttgtgatga

SEQ ID NO: 23616 - DNA, 422 bp, Glycine max
agcttcgccggatcatgccgatcgaacatttcccaattgatatcatccaattgtttttcagggattgaatagaataaacaatggccggtgtcggtcgctatatggccccgactgatatccttcagccgacattgcacaatttcttttacaaacgttggccgataatgtgtttttacggtagaggaagttttttgtttttgggttccctaaaaaatttacaatgcaggtcggctaggtttttccgtgcgacctcaaccgaggttgtggttcgaccgacactggcatgttctcatttagtcagccaagaaaacgttagcccaccccggcagaaaaaaaacatctttcacagaaatttatcgaacaaaatgatacctgatgtctgcgtggacagatgaccgatggaggtctaaaaaggaagcatc

SEQ ID NO: 23617 - DNA, 416 bp, Glycine max
tctagtcgtccatagacctcctctgtggtacggtctatcaaacgttgcatctgtgcattcatcgcatccactaacagacgttgagcgccgtccaactgatggtactcgtcaccaccaccacctgctccagccataattcaacaggaaaaaaaaaatgtgcaataaaaattattaaggtttcaggacctcacaacactctactcacgtctcttagatggtagtacactcgtgtttaatgctctcaataggcttttgtgtaatgtattccctcttgccttttaccactcgtgtttcctcttaagttcctggatggaccaaattagacacacaaggtaatataaaataaaaggaaagacaatataatgatcacaaacagatttgatttgggataacaacttggacttgattcggataat

SEQ ID NO: 23618 - DNA, 352 bp, Glycine max
agcttatcattaaaataaatctaaatggttgatgatgccatgatctatatctttcaatttttgtatgattacttgtatgatatgtttaaaagtatttgattgattgctcatgtttttcaaaattattatattttgtttctaaagccttgtatttggctatatgtttatgaaatttgaacacttagtatgacttgaatatttatggattgtgatatatgactatgtggtttgcatttaaatctggttttattcaagatattatatttgcaaaaactttaatattaagcataaattcaaaaagaaaaggggtgaaagggatgagtgaacagtacaacaaaaattgtatgcattc

SEQ ID NO: 23619 - DNA, 409 bp, Glycine max
ttgatgatatggtcttcaccgacgaaaggatcaatgtgggtctaaaaagaggcaaatctgatcatcatgctttgataaatgccaaaaaaaacaagggcaaatgaagagggtgagaataagggagaagcccatgctgtgactgccattcctatacagccaagtttcccaccaacccaacaatgtcattactcagccaataacaaaccttctccttacccgccgcccagttatccacaaaggccatccctaaatcaaccacaaagtctgtctaccgcacttccaatgacgaacaccacctttagcacaaaccaaaaacaccaaccaagaaatgaattttgcagcgagaaagccttgtaaattcaccccaattccagtgtcctatgctaacttgctcccatatctacttgat

SEQ ID NO: 23620 - DNA, 427 bp, Glycine max
agcttgtaatggtaagaaaagagcaacacacacaatcatctaataaacaacaagtatttaaaaaaattgtaagtatagaataaaagtgtgtatgttgctattcaagaaaaagaaaagctaagtgcggaaaggcaagtaatagagctggaataaaaagaaaaaaaaggtttatctatggatgaatgctctcttagaacctaagcttttgcatcctagaaaaaccatgattgattgtagcccagcctcgttacaagcctagtaaagtccttcggattcagtttgtgtgttcttaactgtatggcatgagatgaattgcaaagattgagacttgtgttagttgttgattgttgaataagtctaaacacttgtgtttgagtgaaacagtagttgtgaggctcttggtaatgatccttccttgatatttgtc

SEQ ID NO: 23621 - DNA, 395 bp, Glycine max
tggcttctacaacgagagctttgttcctgccttgtttgtagcatgctagaaacaatgaaaaatgctaataggctaataagctaatagatcatttttggtagatacccaacattgccatgaatctagtcatgagtctcatgacctaagtatatttccatcctttttttattcctgttaagttatatttttcaacctctaatttctaaccaaattctagagttgtacaagttttgcatatgtctgtctttcaaaattttgttgcttagcctttttctgtatgggaagctttaaacagataagtaccaagcaataagcattgaattttgaaatactactattggttttgcttcactactcatgtatgcttctggataacgctttgatccttctaaaaa

SEQ ID NO: 23622 - DNA, 431 bp, Glycine max
  unsure (1)..(431): unsure at all n locations
agcttatatagtagaggtgcttaaaaggttttatatggaaaatcacattctttgtacattccaatgatcaaagatctctagatgtgaactaaaatccttctagatcttgagaaaatgaaagtacttcttggtcttgaagtaccaagtcttagtgttagtgaaacactagtgtatcttattgtgcatacacgacccgatgtccactaattcactagcaaaatataattcttcaccaatatgaagacatttaagcatgtacttcgttatattagaggttatttgttagatcctcataatgatataacataagtatacatgaggtgttacaaaaatttcataacaagatgtgaaataagccaaaataggcacataagctaatcatgtagaaattntagctcaacatgaagaaaaatgacatcgacgatcacata

SEQ ID NO: 23623 - DNA, 417 bp, Glycine max
tgttaaaaagggaagaaagtcaaaaactcttttcaaattaaaaatgttgtttctacttcaaaaccccttgaactacttcacatggatttatttggtccctctagaactatgagtttgggtggtaattactatagcttacttatagtagatgattactcaatgttcacatggactttgtttttgaaaacaaaaaacgaagcttttgatgcttttcgcaaattgccaagatgattcaaaatgaaaaaggtctcaacattgtttcacttagaagtgatcatggaggcaatttcaaaatgagtcttttgaaagcttttgtcaagaaaatggaattcaccataattttctgccccaagaacacctcaacataatggtggtgtggagaggaaaaatagatcccttgaagaagctgcgagaacc

SEQ ID NO: 23624 - DNA, 380 bp, Glycine max
  unsure (1)..(380): unsure at all n locations
agctttcataggtgaaatcaggtgcagccatttcccttagagtcctctcacgaggtggaggttgtgccatgttctcagaatgtgcaaaatcagaatgctcagaatcagaatgctcaaaattataatgctcaagatcaggatgttcaaaatcaccaataacagaatgcacagattcaccagttatggaatgctcagaatgatcaaaaggtataaaatgatgcctaaataatctatgaaatgtcctatctatctcaggatcaaagggttgtaagtcagatggattgcctctagtcatacactacattcagcatgcacacaactagttgccttgtcatgtaaataaaggtgtagggttgaactacagctaccctcanatgata

SEQ ID NO: 23625 - DNA, 407 bp, Glycine max
tgtaggattatggggtacccatcacatgtggtactatgtggcggtcgggcgatggtgcacaacaagttttccacattcacaaatcgcgcataaacccaccatcccctgttgcccacctccaactgagctcacgtactcccacgtagcccatatcctcgtttctctcaacaccgggtcccgatcaatcctaccaagcttccccaacatccaagggactcaacattcagacaacacataccatcacagccaagagaacagggcaaaggcagaaaactctgcccaaaacaccaaccaaaatcacagcttttctcacttaaagaccccagtagcaatttcttctttccaagtcgataaccgttggatcgactcacaatttttactggaagtctctagtacataagcctaca

SEQ ID NO: 23626 - DNA, 355 bp, Glycine max
agcttagctacacatacctctctaatagctaagctcacctccttgagatgagaagctagagcttagctacacactccctataatagctaagctcacccctatgacaaaaaatatgaaaatacaaaaaaaaagtccttactacaaagactactcaaaatgccccgaaatacaaggctaaaaccctatactactagaatggccaaaatacaaggcctacgaaggaaatacctattctaatatttgcaaagataagcgggctcatacttagcccatgggctcgaaatctaccgtaaggctcatgagaaccctagggccttcccttggatctctagcccaatctacttggagttttcta

SEQ ID NO: 23627 - DNA, 406 bp, Glycine max
tgttccacctaaatagcataggttcttcattggtaatcagcctaggctatggttgctaatttgttaatctctcccacacccaagtttggaccaagttgtaaaactgtgaccaaagagttaacaacaattccaattcttcattaccagtcaaataaactattgttttcttcgataaaccaaaatcattttatatgttggataaaactgttggtcacaaagctgattctctccagcacgatgaacaacaataaggaaaacaaactttctcaccaagccactaggagagaagccaatcattgccaagcaagttgcaagggatgtttcatgctcaatttcactaccactattgacaaaaatccatccatgctaatgtttatataaaccccactctttttactccttggag

SEQ ID NO: 23628 - DNA, 415 bp, Glycine max
agcttaagctccttcaattgcacaaggctcttaatatttgaagagtatccttgtggaaccttcacccgatgaagacactgacaaaaacttatcttctcctttttggacaaagtatggcaggctgggggcaagtaaattttcttcccatcagaccttggatgcaactgtgatcgtatgcccatatcagctagatcttgacgggtattcaagccatccttcgtcttgccttgaatgttaaggagcgtcccaatcacactgtcacaaacatttttctccacatgaataaagagtttagtccccattgagcatttcaagaagagcatggagggagtgtgtcagaattcggtgaagcagaagccctttcttggacaataaaggtggaattacccagggtagtggtcttgactatggcaat

SEQ ID NO: 23629 - DNA, 405 bp, Glycine max
tctctcctattttcctataaatagggggagaagtgaagggaaaaaatgttcagccctcctggtaattcgagatcacttgaaattagtgaaaaaaatcgtttccgtgaagaaaatccaagccgaggcgcttccgtaacgttttcgtaatgtttccgtgggtgatttcgcgaagattttcgaccgttcttcgatgttcttcggtcttcaactggtaagttcccaaaatcaaacttttcaattcattctatgtacccttagtggtcctcatttgttttcacgtgcttttattttcatttcatttactttccgtaccccctcttgacgtgctttagtcatttgcttaagttattttctcacctaatcaaaaaataaaataaatttccaccgatcatttgaattgtaaca

SEQ ID NO: 23630 - DNA, 394 bp, Glycine max
agcttctccgaagggcatggttatttccagtttcctcaaaatatctaaaaatctcaccagatgacgatctttttctttcttggaaggtaccacaggatatggtacttccacatcttcatccacagcttttcactcctactcttctttgcattcttattattttttcttctttttcatttttttcattttctgtttctttttctacttctttttatttttcttggtccttcaattctttattcttgaccattatttgttcctctttttcttgattactttcacctctcacctcatttttcttgccatcagtacctcttttgtcagcaattttcttcttatgcacaacactatcctcatcctcagcctccacaaaccttgtactccatgtcatcac

SEQ ID NO: 23631 - DNA, 422 bp, Glycine max
  unsure (1)..(422): unsure at all n locations
ntggaaaatgatttctatacaaaagttagtcatataaaacgactaacaatgaacctttccttaaaacatgtgctttgtttgactccataatccaaggaatagcaattttgatcgccaatactttgacaacatatccaagagatgaatgactagagcatacttatgttatgcatggcaaaagattgcataaataaagaagaagtcatgataaaaaaaaaagattgcacactgactgaatggcctaactctctaacaagtcccttgtggagtcaccaactcttgcaaactatccttcgacaggagggcaaaatggccaagagagatgggccagagcgtatgcctcgaagggagaaaatacgtggagtcaccaccaatgtttattcaaggaaaacactagaaaaaccaaagaagatgatggtctg

SEQ ID NO: 23632 - DNA, 432 bp, Glycine max
agcttgtcatcgcgagacatcataacatgtattctaaccgacgtgagtagaaaaaattaacttaattgataaagaaaaatctaaaataacaatacatctttcgcataacggatgttaggtctcaacattatcacattctaaatttatcttttatcatcgtctttattttttatttttcttatcttttccattaaaatttattatctattttatcttctatttttttttatcttttatttaaaattccttatcttttatttaagtggattcgacacttgtactttcgaatactttattacttaagataattaggtgcacttacaaataagttaacaaacaccaaagttacgcattaattataataacctaacttagattagaactaagcctagtcatttgagttatttaggaaattttaaagtggaaaactca

SEQ ID NO: 23633 - DNA, 411 bp, Glycine max
tgtagttagtagttgtgaaagcatatgcatattaattaattctatcaaaggttcttatgattattataatgtcagtcctgtatttactcacctggctggaagtattgggacgtggaaggctctttcacccactgttctgcgggctgctttcaatgtagatgcaggacttgagcaactcttccgttcaaagaggaatgctgatgccattttcttccctcctccaaattaaattagcgttactatgcttatgatgtttttctagtttgaattagtttcaggtttttaatccagttcttcatgagtagtatttacatttcttttgggtttgtaaggaattgattattgatgccttgtttcttaatccaaagtttattctaatccttccttataccttcgagttatctctttatg

SEQ ID NO: 23634 - DNA, 437 bp, Glycine max
  unsure (1)..(437): unsure at all n locations
agcttagcctgcaaaaaataatgaatatagagttaacatgttggttccacaaaccaaatgctagcctaaacccaatgcttaggcattcactttaagactacacagtgtaacatgatagacacaaaacagaaaagatatttatggaactataagggcataaaagagttaccttattgcaagttgaagaaaaaacaagaacaactttatcaatgtattccaaagattttgagaagttgcccgaatcatagaaggactgagttgtttccaaagcactttgagcctgcagtagttgagagagcttattttctgtagctgaatctccaggttttaactccagagaanatgtacaagcgcacaattaactcaagcaattacaaactttatcataatcactagtncaaatatacagatagtattcaattgagaaaatagagaat

SEQ ID NO: 23635 - DNA, 412 bp, Glycine max
tgctaacccatggaagctcctaatatctcccacactttttggggtggaccattcttggattgctttgattttctcagggtccacttggaccccatttctaccaactacaaaccctaagaaaactatattatctacacaaaaggtacacttctctatatttgcaaagagggtgtttttcctaaggactgaaagaacttgcctgagatgtcctaagtgatcatctaggctcctactgtacactaaaatatcatcaaaataaacaactacaaatctacctatgaaatcccttaaggcatgattcataagcctcaaaaaggtgcttggtgcattagtaagcccaaaaggcatcactagccattcatacaaaccaaactttgtctttgaaagcggtttccactcatcaccctttttc

SEQ ID NO: 23636 - DNA, 400 bp, Glycine max
  unsure (1)..(400): unsure at all n locations
agcttgtatcaaagcatggtaccctgcatttgggacaaaatctgtgggggcaggatcatctttgtgaggtccatctatctcctctggatgtctatggtcaccaccattgttgaaaacaatgatgaccacaggcaactggtaccgaaccaacgtctggatagaagatgaagtgtcacaaacatgcttgaaaccagaaaattaattgcaacagtagcaacaaatgaaagcaaaaacatatggaaccatatggtcatattaatggagagagaatttacatacacatatagtaataaaagtattttaaaaactaaaaaaaatggttctaacaaaattgaatttctcaaagttatttaaacaagaaatccattntgatcaactaanatccacaagcactggcatt

SEQ ID NO: 23637 - DNA, 424 bp, Glycine max
ttaattgatggttgaaaagttagatgtaacaatcgtatttaaaaactcaggaatatgtacattatctagtccgaggtagagcttcacttttttaatgcaacaacttgcaaaagcatcacaatagagtcttgttaggtgttttttgcatggtcaaatgaaaccacaagtttcaaaataataggacttgcgtccaagtcatctcccaaaggactagtgcttatccaagcaattctaatcgaaagactcaggttttggaataatgatttctcacatgtttgtacttgaataataaagaacaatgaacagtaaaaataattaattaaagaactaatgtaagaacaaaagtaatgtaaaagagaatagtagtagaacaatcgtaatgttgttgtgagaattgagaggttagacttggtttccctctctt

SEQ ID NO: 23638 - DNA, 429 bp, Glycine max
  unsure (1)..(429): unsure at all n locations
agcttagatgaccttgtttgagccgagatgactttattatttatttggacatgtttgaatatgatgtagaagaaagtgaatgtgagccttttacccctttgaaaggtttgtatttaaaaatattttataaatatttttaattaatatttgaatttttattcctttattagtatatatgtgaggggtagagggtgtcacaatgaaggatcacctatttatccatatttatcgcttgagaatgtacgacttatttattccacaacttattcatttttacttattgactcgtggttntattacaacacatgtttactaatgagaaaattacgtatgttttgataaagaagaacgagtttgagaagtttatataaaaaagttttattntcngcaaaatatgcttcacttcttttattcttatgaangtatatg

SEQ ID NO: 23639 - DNA, 400 bp, Glycine max
  unsure (1)..(400): unsure at all n locations
nggatagaccctgtgcttcaagcatattagggaagttaaacccttgttgaaagaaccactccaagtctagatacttgggtattctcacattgttcacaatgtatatcatcttgaagtcattctttttactctcattcgtgaacaatgtatcaatcctgttgagagcactcttcttgcttcctctatgagtacttgactttcttctgagctctggaggggtttctagccatctccagaagagagacatagggtttagaggtagaagaaaagttgggttcagaaatgggtgattataggaggtgttggtgtgacttgtgaagacgtcacggttgccttttatagagaggtagtgacattttggttggctgaggttggtggcgggagtaactgtggagataat

SEQ ID NO: 23640 - DNA, 416 bp, Glycine max
agcttgttgctcgagccatcaaatgtgttttccttggatattctagattacataaaggttaccgatgttactctcctattcacaatcgttattatatctctacagatgttacattttttttttgaagaaaatccatactttgctccttccatggttgagtccaatattcttcaagaagtttttcctattccctatcttggtccatcaccttcttttcaggaatcagagtcaactgtagattctaccatagatattcctgacaatccttcacttgagcagactcaaagatcacccatcgtatatcgacgtcatcctcgaattcctgacgcagaacttgaaggtaatgaaagaccagctgaatcatgtcttactccaacagacaactcgaccatggacctacctgaagagaatcttga

SEQ ID NO: 23641 - DNA, 418 bp, Glycine max
tgaaggcatgtaatccactatcttctcatagtagaactttcgcaacttatcctttgacgggagggtgaggcgaaataaaaaggagcgtcttccaaaaaggaaaatgcgtgggagtcgccaccaatgtttatttaaggaaaacgttaaaaacaccaaaaaggggtttgcggattttgaaaataagggttcaggagttgtttacacatggggaaggtattagcaccctgcgtgcccatcacaagggacgacaacctttaatggagtgtgcaaaaacatgacttctatattatttattttcccttttatattttttatttttttggggtcgacaagggtgttgcccttgctcctacgtatcctcaggtgcaatgaggaattcagacctacgtagttctttaagtctgaaagtttgtgtgtt

SEQ ID NO: 23642 - DNA, 371 bp, Glycine max
  unsure (1)..(371): unsure at all n locations
agctttntttgttcgatgttgcctaaaaaatttacaatgcagttcggctaggtttcttcgtgcgaactgaaccgaagttgtgtttcggccgactggcatgttctcattttgtcggccaggaaaacattagcccacctcggcataaaaaacatgattcaccgatattgacaggaaaagaaaaatgctagccgacgtcggccaggaaagatgaccgaccgaggtctgaaaaagaagcatgaccggatgactccggtcgaacattttctaacagatatcattcaagtattattcatggattgaatagaaaaaacaatagccgacatcggtagttaaatagccgtgactgatatttttcggccgacattgcgcaa

SEQ ID NO: 23643 - DNA, 408 bp, Glycine max
tcctctgccgtaaaaaagatattatcggccagtgtttgtaaaaaaattgcgcaatgtcggctgaaaaatatccgtcggggctatttaactaccgatgtcggctattgttttttctattccacccctgaattatatttggatgatgcctattaggaaatgttcggtcggggtcatccggtcatgcttctttttgaggcctcgatctgtcgtctttcctagccggccgacgtcggctagcatttttttcgatcaatatctgtgtgaatcatgtttttttttgccaaggagggctaatgttttcgtggccgacaaaatgagaacatgccagtgtcggccgaaacacaatcccgcacgaaaaaccctatccgacctacattgtaattttttaggccataccgagcgaaaaac

SEQ ID NO: 23644 - DNA, 417 bp, Glycine max
  unsure (1)..(417): unsure at all n locations
agcttcttccttgtaagtcaggcttctttatggacaccatntaagcataaaaaatcattgtaagcgaactaactnttgtcttttttaatctttcaatgaaatgagaagtaaaactaagtgaagcagaaagtaagctactgctttcacttactattctcacacaaaacaactcaataaatattcaatcactcagatttattggctaaatatgagttatnttgataataaaaatatattgaaaatatctttaaaaatattaatttaacagctatctctggcttaaatattaaaaattgatatttttcttatctaattaattttttaacttttaattacaaataactgataaaaaagtaatttcaggtcaatatttgactaattttctactatcaaaatacaattatttagcaattatta

SEQ ID NO: 23645 - DNA, 415 bp, Glycine max
taagtttcatttcttttaacaatattcaaactcaaacttttaattatgctgcttaagtaaattgataagctttatttaatttaagcaacttatttaatttttttccatgtaagtttaaagattaagtattcatctcgacttgactggtttacacacttaggcacaaaaacacccaccccatggtgactaatccaaaatcaaaccaacattacatgcagatataaataagaaaataaaaggaaaagaaactgctcttcaagaattcaattttgtagagcacacaaacagtgacacacggaagcagaatgccctacccaaatggccatgcagtttcacttgacacccttacttgtccctaacttggaagtagtccttgttcttgacgattatgtcatacatgtgcgtggctctgaag

SEQ ID NO: 23646 - DNA, 426 bp, Glycine max
  unsure (1)..(426): unsure at all n locations
agctatgaaattgtggatgagccaaccatgaaattgggacaatgtatcttgtcctgttttcaccaacatacactgcaaagtgcccttttggcacatcttctggaagaccaccctcttcattgtagccctgttgctgcttcttcccaaagcttgaacaccttctcacaatttgctttatcacatctgcttggggtagcttattggattttttgatggccattgtgaaattgattgttagtactctttgcacaccttcaagttgttaactttgaaagggtctcttgagggtgctgaaagtgtgtgattcatggggcgagtttggagaggctntatttatcattgggacattggtatgtgtggaaaatagacaatgagttttagagaaaacagggtcacgtggatgtggtgacatgtagcagaccacac

SEQ ID NO: 23647 - DNA, 425 bp, Glycine max
  unsure (1)..(425): unsure at all n locations
gcttaacacattccctcgcaaaatgccctggcttcccacaattaaagcaagtgctttttccaccgccgccgccgcttccgccaccaccaccaaatctccctccttccatgccgcaatccctagccaaatgaccaacctccccacaccgaaaacaacctccaccgcttcctccaccgccaatgttgcccttcccggtggcgcaatccctcgccatgtgtccaaatccgccacacctaaagcaagatccgcctccgccaccacctccaatgcctacactgccgccgcctccgcgcacgcaatctctcgcgaggtggccgaaccccccgcaattgaaacaaccaccgccgctgccgcctncgccgccaccagaattactgctcctgttgcaatccctggcgaggtgtccaaactcgccacactggtag

SEQ ID NO: 23648 - DNA, 358 bp, Glycine max
agcttgcctggaccaagattatgatatatttaattctgctgcaatatcactagagtactgaatcatcctaatattatctagcatgtcacgtaacatattccaggtgtgtgggtctaccttataatacttctcatctgtcagaacacttatacatgctgctccacctttctcataagctttagcaatttcgacctatcacagagacctctaaaattgtgacgtataccatgaagagaataaatacaaacgttcaacagtgttaaataagttgcttgaagggcatgaaacattgtgttgaacaacaattctaagagatcaggatgctgaatgagaaaacataacatatcgctgactgata

SEQ ID NO: 23649 - DNA, 337 bp, Glycine max
cgttgaataaccgtacaaatacgaggtaattggtttgacatgctatcactagatttgtcacttcttatctaaccttggaaacgctctacaaagagaaaggtcatattaaaaagacgcctattttttatgaatggatcttaaacaagtcatctaaggagcctagcgggaaagaaactgcagaggtagggctcatgccttctttttggaatagtgtggatcacactcttaaagtcatgactacacttgtcaaaatgcttcgtgcttgtggacgatgaaaggaaaccaaccatgggctatatttatgaagcaatggacaaggcgaaagaaacaattatca

SEQ ID NO: 23650 - DNA, 383 bp, Glycine max
  unsure (1)..(383): unsure at all n locations
agcttgagccaaaatcctgactcaccataaacctttgacccaggtgagaatgtcaatccttaccctcggaagccaaaaaagaatagaagggaaatttcccatcaaagaaaaagagaaggaaaatttccaatgaaagcaaaaaaagaaaagaaagaaaattccccaatcaaagagtgggagaaagctaaaaaagaaaagaaggaaaattccccaatcaaagagtgggagaaagcaaaaagaanagaaaggaaaattcccaatcaaagaatgggagaaagtaaaaaaggaagaagaagagtgaaagaaagctcctgatcagggatcgaaggaaaacagaagaaatgtgcagagaggtctttggaccggacaatatctgaacaata

SEQ ID NO: 23651 - DNA, 409 bp, Glycine max
  unsure (1)..(409): unsure at all n locations
tggaaggatgcttcaatggaggaaaagaaagagggtgagaaagagagaggggggagcacgaaattgaaggaataaaagagggagagaagtggaactttgaagtgtgtctcataagactttcattcatcaaagttacaacaagtgttacatatgtttctatttatagactaggtagcttcctggagaagctttcttgagaaaacttccttgagaggcttctttgagaaaacttccttgaggagctagagcttagcaacacacacccctctcataactaagctcacttccttaagaagattcctaaagaagctagagcttagctacacacacctctctaatagctaagctcacttccttgagatgagaagctagagcttagctacacacccnctataatagctaagctcac

SEQ ID NO: 23652 - DNA, 413 bp, Glycine max
  unsure (1)..(413): unsure at all n locations
agcttcttatccaagggtcatcttggtggtgaagctccttcttccatggcttattccttaatggatggcgcctcctctcacctcctttcctttgtcttccgctgcatctccatggtggaaaatcaccattaaaggaccccattgaagctcaaagatccagcctccatagaagccccacaagcaagcttccatcaggttacatgccatccagcttcgcggacctagtgttcgccggggaaagaatcgaggtagggttgaaaagagggaagttcgattacgtttcctccacgagtgcgaatgccaaaagaatcaggacaacgagggcaaaaaggaaggaaggagatgcccatgccgtctcttcaacgcccgcgtgggtcanacccccgcagacacctcatggtacccatcagtat

SEQ ID NO: 23653 - DNA, 401 bp, Glycine max
tccttaagaagattcctaaagatgcttgagcttagctacacatacctctctaatagctaagctcacctccttgagatgagaagctagagcttagctacacaccccctataatagctaagctcacccctatgacaaaaaacatgaaaatacaaaaaaaaaaaagtccttactacaaagactactcaaaatgccccgaaatacaaggctaaaaccctatactactagaatggccaaaatacaaggcccagacgaaggaaataactattctaatatttacaaagataagcgggctcatacttagtccatgggctcgaaatctaccctaaggctcatgagaaccctagggccttcccttggatctctagcccaatctacttggagttttctacccaatgcccttg

SEQ ID NO: 23654 - DNA, 428 bp, Glycine max
agcttctatataagctgaaccattttatcaataaacagaagttgagttttattcagaaaattagagtttatctcttttatcttagtgagagtgattctcctaaattcttgagtgattcaagaacaccctgtctgtatcaaaggactttcacaacctttgtgtgttgccctcgctggaaagagtgattctttccttcctttcatcttcacccttgctctttcaaaccacaattccagaaaatccacctctgcccagaattatctcgtggccataactcccattttacgcactctaattaagtgattcttgagcctaaattgactttcaaaacgagacctttcaccttgttatggaatcacctcatttggagccctgtagcttcagttattgccatttctatatttctgtccagccaccacttaacctac

SEQ ID NO: 23655 - DNA, 407 bp, Glycine max
  unsure (1)..(407): unsure at all n locations
tcatgatgatgaatcaagttgattcacgtagttttgatgatgacaaagatgatgacaaaaagcccaagagaatgatttcaagattgagtcaactagtttcaagaatcaagagaagtttgatttcaagattcaagagaagatgagttcaagattcatgagaagaaatcaagaagacttcactagggaagtattgaaaagatttttcaaaaaacagacatagcacagttttgtttttcaaaagagtttttctcaaaattttctaagttaccagagtttttactctttggtaatcgattactagtttcctgtaattgattaccaatggccaagtttgatttcaaaagttttcaactgaatttgtaacgtttcaattgatttcaaaatggtgtnatcgattaccagatatt

SEQ ID NO: 23656 - DNA, 415 bp, Glycine max
  unsure (1)..(415): unsure at all n locations
agctntacagcagattntagtaatgacccactaacctataattaaaataacttaatgccattaacctagggaattaaaacaaactaaatggctgagtgtaactgaaattgttggcaaccaaaagtcacccccaacagccaacaagtcagccaccatttggtctcccaaaaggctgatgcctaggttgccaattgggcccttattacaacttgaactaaagcccttttagttgattaacccaaaacatatttttggtcagccaactttacaaggattgggccattatttagacaaactaaacactctaaaattgaaataaagtggtgtcatttagtcctccatttgggccatgatacaaatcacaaccttggacagcacttgttgaagaagctccttggctttccttgctctaccc

SEQ ID NO: 23657 - DNA, 431 bp, Glycine max
  unsure (1)..(431): unsure at all n locations
agcttagagaagcactgagcaccacccaacacatgggaataggaaatctgtccttgatcgtgagggcgtttaaagctntgtaatcaacgtagaagcgccaggatccatcttgtttcttcaccaacaataccagcaaagaaaatggactggtacttggctgaatcaggaccttttggagcatggagtcgatctgcaattcaatctcgcgcttttggaagtgagggtacctatacggtctcatgttaactggagtggattgaggaagcacgtgaatgtggtggttggtgtccctagccggtggcatcgcatggtggggtcgaaataaggcaccaaatatggtgagcaatgttcggagtacgaagggcaagtcctccatgcgtgaaggagggatatcctctatgagtactgtgatgtggaagtaaagtccaggt

SEQ ID NO: 23658 - DNA, 421 bp, Glycine max
atgatacttgttaatgttttcttactaattgtggttatttgatttttgtattaatttcttttataataaactcacccctcgcaatttttgtaccgtgtggttggtacttatgatgatcgcaaacttttattcgtgggagcagaatgacagtagtagagtacgagaagtgagattcttttgtggagccgccgagccgacgtgatgatgttgggattattttgggagagagttgtgttttgttaatcaactcctacatagctagttccataattattttgttgaatcgaggaagtaaatcacaattttaattataagtatgaacaaatttactttccattatgtgaatgatgtgtacggagttactataccaatatatatatatatatatatatatatatatatatatatatatatatatata

SEQ ID NO: 23659 - DNA, 400 bp, Glycine max
  unsure (1)..(400): unsure at all n locations
agcttaaatacaactcccgaacttagaattttcattntgaccagtttccttcggtttttccgatgttttccacaaataaacgttggtggcgactccgcgcatctttcctcctttggaaagcgcacccgttagcttcgccttcgctcgcccttaaaagggcacgttgcgacacctatcaacaacaacaaatatggaatccttaccattacttgttctaggcagccctaaaacaaagtccattgataaattaatccatggagaatccgaaattggtaaaggggtatacaaaccataaggcattacctttgacttggcctttntgcaaacaatacaacgctcacanaatttctgcacatccttcttcatgttaggccaataaaaatgctctttcaatgtatct

SEQ ID NO: 23660 - DNA, 424 bp, Glycine max
  unsure (1)..(424): unsure at all n locations
tgtaggattatggggtatccatcacatgtggtactaggtggcggtcgggcgatggtgcacaacaagttttccacatccacaatgcgcgcataaacccaccatcccctattgcccacctccaactgagctcacgtactcccacgtagcccatatcctcgtttctctcaacaccgggtccccatcaatcctcccaagcttccacaacatccaagcaaaacaatattcaaacagtacaagctatcacaaccaagcaaaacagagcaaaggcagaaaactctgccaaaacaccaaccaaatcacagcttttctcacttaaagaccccagtaacaattccttcgatccaattcgttaaccggtggatcgactccaaaattntactggaagtctgtagtacataatcctacattgtgaccgttgggatct

SEQ ID NO: 23661 - DNA, 425 bp, Glycine max
  unsure (1)..(425): unsure at all n locations
agcttaaagtatgcccgagtcattcatccctatgagatgttgttgaagtattggcgatcagaatttccattccttggattacggggttgaaccaagctcaagcttttacaaaaaggttcatcaagtcaagttgaaatatggaagtaaccatcctgcaaaattggggcaaaagatgaatcgagtcacatcactgcttcgtctactgccaaacatatttaggattattgatgtccttgttacttccagtttcaccttgacaaagatgtcatggaccatgttgaaaatctaaattgattcaaccccatatcctgcgtaaaaattcgcaatacttcgactgtacatcattcgcatgcatccatgcttttcattggttgcattgctcattgcattcttttcttgaaaaataaaataaaatanaatgaact

SEQ ID NO: 23662 - DNA, 417 bp, Glycine max
tctatataagctgaaccattttatcaataaacacaagttgagttttatttagaaaattagagtttttctcttttatcttagtgagagtgattctcctaaattcttgagtgattcaagaacaccctggctgtatcaaaggactttcacaacctttgtgtgttgccctcgctggaaagagtgagtctttccttcctttcatcttcacccttgttctttcaaaccacaattccagaaaatccacctctacccagaattatctcgtggccgtaactcccattttacgcactcaaattaagtgattcttgagcctaaattgactttcaaaacgagacctttcacctcgttttggaatcacctcatttggagccctgtagcttcagttattgccatttctatatttctgtccagccaccactt

SEQ ID NO: 23663 - DNA, 375 bp, Glycine max
agcttcaattgttgaaaggtatgttgctgaagaatgtatcaatttttgctcgcagtacattgaagccggtaaatctatcggggttcctgaaactcgtaatgtgagaacaccatcggggggtaagggtacacgaggatacaatgttgtgacaatgacttgtgacgaggtctcataagcgcatctatatatattgaataatacagccgacgtcattccatatatagatgctcacaaaaaaaaaaaaactcatcgcaatgaacccaaaaatgaacatgatgagggttttgcaagagcataatagaactttcattaagtggtttaaagaaacaattcttgttgatgatggtgcttccaaaacattacgattattagcta

SEQ ID NO: 23664 - DNA, 414 bp, Glycine max
  unsure (1)..(414): unsure at all n locations
tgtactagtcatatatatgttacaaaacaatgaattctaaaattgaatcgtttattgcagatacagaaatacttaaacaaacctgccaattaagagttttgcggctttttgcaaattccgcccatgtttctagatcaaggccatacttgactataggatcagatatttgctgactttcattgtcagcaaagacaaattttgaagtcaatgaagacttaaattgcctccatcttgctgcaactgtcgacatcaccttttttttttgcattttcaccttcagggatatcaaatttgcgctgcacaacaaaatgagttatgtaacagtatgtaaatgaatcctttaaaagtaacttaacaacaaaatcatgaatacaagtgtatttagaattacataccanaatatctttccatatt

SEQ ID NO: 23665 - DNA, 430 bp, Glycine max
agcttataaaagttgttaaccccactactaaattatgtttagcacatttgaatccatttcaaacattggttacagtagtgtaaaaccatagttcacagaagtgtggataatattcatatcaaccatatcttgtttggataatttttttcattagcatttataagagaataaaatagaaaaaaaaattatgtattaaaattaattcgtgtaaattaatgtgtagaaattctttgaaattaacaagttagatattaacttacgtataatttacttttatcttatagaaaaattatattatttttcttcttattttctttttgtaataagtgcttataaagatgtttttcaaaaataaaacctaaattaagatcaaaattacacatcgataatagtggtttggtaatcttttggtcacaaagctaaaagctga

SEQ ID NO: 23666 - DNA, 412 bp, Glycine max
cgtaaagcttttggtgggaaatgatagtgagactcaactcggataccaaccttgcgctacaataattgcagcaagacccactatccacaatgggagaacaatttttgtttaaaaccttgcatcttatatgaaaaatgttctctctttcggtttaggctaggtcacaagattgactcccaaggagccttctcaccattagaagatcaccttcttcataggggtaaaccttttcaatatgctcatcacccttggcttcacccccacttccacttgaaaaaggagaagaagtagcctcctcttggctactatagatgtcttgatccctcatgatcatggttttctttgtggggcatcgagaagcaatgtggcctatcccaatacatttgaagcatttgatgttactagttctatc

SEQ ID NO: 23667 - DNA, 424 bp, Glycine max
agctatttcttttcctacaaccaaccttttctccccctttggcaacatcaaaaaaccaaagaactcgggaatcaacacagatataataatggagtagaacgatttaaatatcagagtataaaacacaataatccaaactcacaaacaagaaataatcaaaccagaatccaaataacttagaatgtcaacaaccacaaaatatccaagactgaaaattaaaaaaccacaagataaataagctaagtacttagcataataatgtaaactctaagaaactaagagccgaaatacatggcttatagaagacatataatcagaaactaaaatctaagaagacggaggtggtggtggaagatcgaaactctgacgaatgtatccaacatgctcttcaagctgtgtaaggcgaatgtccataccggcaaag

SEQ ID NO: 23668 - DNA, 419 bp, Glycine max
tcttgtcaccttcattttttgtgtgttgcttaccaatgcattcaatgatccataaaaagaaagaaaatcatgcgagaaaaatgatgtgtaaaaaaagtagagaacacgttggtcttcctaataggtgcctgatgctaaaaagatattctctatctaacaatgctcatgtgttcttatggtgtctcctgagatactaaaccccgattcctcatgatagtttagcctaatcttgatcaagcatcgtccgcagattcctcttgtaagactaaactcaaccaggaccacattaagacaaacatattcaactaaattatcgcaccccgattcctcgtgaaagcacgacaactcagccctgcactatcaaggactttagagtcagaccagtttccactgttgaataatcctaacaaagcatgcat

SEQ ID NO: 23669 - DNA, 416 bp, Glycine max
  unsure (1)..(416): unsure at all n locations
agcttaatcaaatcataaaaagatttatcctatctgaatattatgctttattaatttctaatcattatataatcagtttttacgtttgacttttctaaatttaatatcaataatatactttttttaaaataaattttattagaatttatatttaatcaaatttaaattattgtatagtcaactatttttaacataattgattgtcgacttctcggcgattcacacattacggtacttcacaccgtgacacttcactcaacatccttattagttagaatcctctatcaattacaaccttccataagtaatccttttcgagacctcttcaatcaattntacccatttctagattaatgatggaacccacaaaccacacaagacttttcagcgagttttatcctcacttacacgcattc

SEQ ID NO: 23670 - DNA, 410 bp, Glycine max
  unsure (1)..(410): unsure at all n locations
tttgttctaaaactatcaagtgagataactagctacaaatccactaaaaaagataataaatgtattgcaccctttaaaaatattgttcatgaaattaattattgaataaaattctatttggtctattgcttattaagaatacaaagacattaagaacatagagaaattaaagcacagttacactaagaatgcaaagaaattaaaacactgaataaagttctaatacaaatgaagaaataaaatcacaagtcaactatgcaatagcaaatagaaagtaagcatcggataaaaaatgcaaagattgggggtgtccaacaacaacaactntaaacaaagggtctcctctctcgagtctgaaaatgaaagaaacacaaaaatcaaaacccacaaagaanaccaagaatgaaaca

SEQ ID NO: 23671 - DNA, 242 bp, Glycine max
agcttgaccgtgacgagtcacttgagaagctagagcatacctcctcgcaccgctctcattgaatagctggccttcttgtgatgcgcccttcagacgattactatcgaagctagagcttagactctcctacttctgtactagctatatttaactgggagacacgagaatctcgagctgagatacacactgcctttagaagctaacttcatctccccgacaatcaccctgggactacttaacat

SEQ ID NO: 23672 - DNA, 335 bp, Glycine max
tgatataactgatcgacctcaaacatatggtcatactgtgcaatccacatacactctagctaaattcctaaacgcgcgtatcatatagcatgcttgacgctggatggatcgattgccatagaatgaagttacttgcaacaacaagctaccacgccataaaatgtatagcgactgcttgagcgctataggaacaagagtacgaaaatgctatatgctttgaccagaacctgaagcataaccttcatgtacctcaaatgtttccacagataaccgaacacttgacatttattcgagagactaattaagcatcttcggatttgcagccgagctaatat

SEQ ID NO: 23673 - DNA, 407 bp, Glycine max
  unsure (1)..(407): unsure at all n locations
agcttctagccaaatggacttaccttgaattaattcctttgatagcccttttgagccttgtttccctttccttgttttgaagctcactacaagccttaagtgaaaaaccatgatatcaccatatccttaaggaattttggagctttggaattgttttgggaataagtgtggggggtttttgtttcattggacaacttgttttgttggctatgcttcatgatgtattttgggccatacttgatgtacattgtatattggttaaatgttggacatgctgaatgaaatgttgtttctcaaaggctatagagtaaaaaaaaaaaaaaatcgaanaaaaaaatcgaaaaaagaaaaagaaaagcaataaagttgagtgaataagatcttaaatggcacaagaatgatgaaac

SEQ ID NO: 23674 - DNA, 413 bp, Glycine max
tgaaatgaggaagtgtagaagggtgagacttcctgcttttattcgttgaccacagagtggtacctggagatatgtcgcgggggtcaggagaccttggggacgtcaggtggggtgctattgcccacaaccaagcttgaccaatcccgacccaacccgggcatagtcagtcagtgagaacctgtgatgtacctaagcaggcgagctcctgacagtcaatagataaaaagaactaagaccacaaagcaaggaggcttgtgtggtggctggccaactgtgaactttgattgatatatgggatatggcctctggtaatcgattaccaagggtgggtaatcgattacaaggcttaaaaatgaagacaggaggctaagatggtctctggtaatcgattaccaagggagtgtaatcgatta

SEQ ID NO: 23675 - DNA, 426 bp, Glycine max
agctttgaaaagattgatgcccaacaagatatcctgttaaggccacttactgatattctaaaactaatcgagtgggagaacgaacatgaaatgaaattgacctgcctatgaaagccaataagattgaaaagatactctatctgtaccaatagcgaataggtgtgaggtgtcattgccatttggctcactcattacacatttgatatcgctccttcataacttgttctgctattgtgaatttagtcacatacaaatttgaagaaattgtgtaagaaaaaattatagagaatatatacacttaacagttcactctaaaaatatatcttgtaatttaatataatattttctataaaaatatttaatagtacaaacagttgatatttgaagaaaacttttaacataataaatttaaaataaataattaaa

SEQ ID NO: 23676 - DNA, 421 bp, Glycine max
taagggcattgtaaaactctgcccgcccaaggaaactcactctggctttggtttgcaaatgcccaaatctgcagacagacaggtcaagtgaaacggatttctaaagcagtaactaattaattcaaaaaaacatgcttggtggcacttgatgtgaagtaaatcaaataataagcataagttgattgagaataaagattgagacctgcgcaagaacatgtttgggcaatccggagccctggaagaaggaaacggcttcggcaccgctgatacggccgtctcgatccaaatctgcacggcgaaaataggcatcgaagagatcgacattaggcgctgctgatgccattgcagaattcaacagcaccgcctgatttcaattgattccacacttttttagttctcctttgccttttcagatcacacc

SEQ ID NO: 23677 - DNA, 429 bp, Glycine max
agcttccatgggcgaagagaacaagttcttataaacccattggtggttttaactatgaccctttaagctatgctcaaaactttgacgagggatgggtagaggatgatgaagaatctttacatcgtgggttctctgctagatatgcagcaccttcctcacataaattgttcaagcaatgataaggttcaacatttaaggtcagctaatatatgtacaaacaaacaaaaaaccattcgtacgtatatttcttggctcattttactttaccttctagtgatattgattgtataaaatataaattatcacttatgtttgatgcagcaaataagtagtaaaaagggaaatagttaatctgcacagcacctatttataatcagtttgtacactaatagagaaattaatatcttaaagctcttgttacttagtatt

SEQ ID NO: 23678 - DNA, 415 bp, Glycine max
tatattctttatcgtgaagatcctttgccttctgggttacttactgcaacatattctcctcttgcttttggaatctttgcgaaaccctcttactttcctgaagcatggactgaataccttctaactctaaatgggaaggttgtacatgcaatgttgtaggtagaaataaagggaactgcactggccaccctggagtaactgcataatcgggctttatagtttcattggattggggcttttcagtctctcttgccaccttctgtctagtctttctagttttttttctttggcaccatatcatcaacaagctggttaacaaggtcattgctaatctgaatcataaactcacccataattgatgactgctacaaaaggtaccagaaagatattgatgcataagaagtagaacagatga

SEQ ID NO: 23679 - DNA, 247 bp, Glycine max
agcttgaaattgaacaacggaagctctcgagaaattccaatggtcataacttatcacacggatgtccgatttacgctcattttttatccagatgctccaaatcgaacatcgaaagctctcgataaactcaaatggtcatgggttattacaccgacgtactattttggcgcataatatgtgggggcgctgaaattgagcaacgcaagctgtggagaaattcataaggtaataacttgggccactgatg

SEQ ID NO: 23680 - DNA, 388 bp, Glycine max
tataattgaacaacgaaagctctcaagagatgcaaatggtcataacttatcacacggaagtccgattcaggcgcataatataccgagacgctcgaaattgcacaacggaagccctcaagaaattcaaatggtcataacttatcacacggaagtccgattaaggtgcatagtatatcgagaagctcataattgaacaacgaaagctctcaagaaattcaaattgtcataacttatcacacggaagtccgattcaggcgcataatatatcgagacgctcgaaattgaacaacgaaagctctcgagaaattcaagtggtcataactcttcacacggaagtccgattcatgtgcaaaatatatcgagacgcttgaaattgaacaacagatgc

SEQ ID NO: 23681 - DNA, 433 bp, Glycine max
  unsure (1)..(433): unsure at all n locations
agcttgtcaaattagtgtatggattgaaacaagctcaagagtttggtatgaaagaccaagttcatttttagttcaaaatttattctccaaaggaatagcggatattacaccattcataaagacttagaaaatggatctgttgatagtatagatctatgtagatgacagcatctttggtatttcctcaaaaaggatgtgcaaacaattttttgagctaatgaaaggaaaatttaaaataagcatgatgggagaactaaagttctttctaagggctttaaatcattcaaaagaggtttagaatggatgaaaccagaccagtggctaccctcatgcatccatccactgttagtgataaagcagaanagaaaagcaccaatagtgcataccaatttcatgggaaatcactagtgtcataatcttcaagaaacaacac

SEQ ID NO: 23682 - DNA, 444 bp, Glycine max
cgctatcaggaccttgaaactcagcttaacaaaggcatgcgaaatgggtggaattcctagagcaattcccttatgttatcaaacataaaaagggaaaaggtaatattgtagccgatgctctttctcggcgtcatgcattactttctatgcttgaaacaaaattgattggtcttgaatgtttgaaaagcatgtatgaaaatgatgaaacttttggagaaatttttaaaaattgtgaaaaattttcagaaaatggtttctttagacatgaaggctttcttttcaaagaaaacaaattgtgtgtgcctaaatgttctactagaaattttcttgtttgtgaagcacatgaaggaggtttaatggggcattttggggtccaaaagactctagaaacattacaagaacatttttattggcctcatatgaaaaaggatgtgcagaaatttt

SEQ ID NO: 23683 - DNA, 425 bp, Glycine max
  unsure (1)..(425): unsure at all n locations
agcttgtagaatggctagacatgatacatgtcagggtttggtttggttcaaggataaaagggatgccccacattatttccatgacacaaatgcaaaaatgatgatttggaaacttcatgcaaaactggtcatgcatgcacctatgtggacactcaagtgtcaaacttttatggtcatgtgatgctagggctcangattcatttcctctattttaaatcaacccaatgtttccaaaatatgttcttttatcaatttgtgcattcatccgagtccatttcgggcgtccggngaaatttcacagtattcacccttcaggtgtagacacattnttttcaaaaactagttatgatcaatgaattttttcaaagaaaagttggaaatcatctcttttcaaaagcatgttggnttttcagctcgacaactta

SEQ ID NO: 23684 - DNA, 389 bp, Glycine max
tctctcccaattttctataaatagggggagaagtgaagtgaaaaagggttcagccccttaggcacttctctctctttcgaaattgcttagaaaaattgtttccgtgaagaaaatccaagccgaggcacttccgtaacgtttccgtgagtgatttcgcgaaggttttcgaccgttcttcgacgttcttcattcgttcttcggtcttcaacgggtaagtacctcgaaccaaacttttcgattcattctatgtactcgtggtggtccacattgtgtttcgtgtattttccttctcgttttcatttactttccgtaccccttttgacgtgcttaagccattttatttagtcttttctcgcttaaactaaaaataaaataaatttccaccgatc

SEQ ID NO: 23685 - DNA, 355 bp, Glycine max
agcttcaacattcaatatcgagcatttcgatatattacgggactgaatcagacatccgagtaaaaagttactgtagtttgaagttgctcagagcttcaacattcaatatcgagcgtctcgatatattacgggactgaatcagacatccgagtaaaaagttaatgtcgtttgaattatctcagagcttctgtattccatttcgagcgtctcgatatattacgggactcagtcagacatccgagaaaaaagttactgtcgtttgaatttgctcagagcttcgataatcaatttcgagcgtctagatatattacgggactcactcagacatccgagtaagaagttattggcgtttgaa

SEQ ID NO: 23686 - DNA, 405 bp, Glycine max
ttgagcaaattcaaacgacaataaatttttactctgatgtccgattgagtctcgtaatatatcgagaagctcgaaatggaataccaaagctctgagcaaattcaaacgacaataactttttactcggatgtcttattgagtcccataatttatcggaacgctcgaaatagaataccgaagctttgagcaaattcaaacgacaataacctttttactcggaagtcggattgagtcccgttatatatccagacgctcgaaattgaatgttgaagctctgagcaaattcaaacgacaataacctttttactgatatgtcggatagagtcccgtaatatattgagacgctcgatatggaataccgaatctgtgagcaaattcaaacgacaataactttttactcggatg

SEQ ID NO: 23687 - DNA, 426 bp, Glycine max
agcttagcgcaactccctctgcactaggtctcgcttagtgggccaaaactcgctcagtgcaattccctctcgggttggaattgcacttagcgcgcccctgctcgcttagcgcaattccctcttaggttggaattgcgcttagcgcacccttctcacttagtgagacaccaaaatttgttagtttcaaaatctcaacagtcagactatgtagatgtgtcttaggaagctccaggaaatatttgaagacgatctaacggttaacaaatccgggattttgattttactggaataggtttaggtaaaatttaaaatctcataattttaacttagctcaacaaaactccacataactcaacatccacatcaagaaattcgcacatgattaattcaagtcatacctccactcattcaagtcaaccatatagt

SEQ ID NO: 23688 - DNA, 415 bp, Glycine max
ttataatgggttttctcttcattgctactaacatctataatagtaacaaacttctgttccaacatagcaagatcatgatccaaaacaccaaggtgaaattggacttgctcattccagttagagaagttaagtccattaaaattgacactaatgatacataaaaattcagttaattgagaacatgtattacataatacaattcacataagtgttttgagacataaaatacatgttatacatatgattcatttagataacggtcaatgtatattgatgttttcctttgggtgatacaccaacacacaacatacaaacatgatgatgctaataaaaattcttaacattatttggcaattaaatatgcaccaattagtaatatctatttcctttgggtatataaataaaactaatgata

SEQ ID NO: 23689 - DNA, 429 bp, Glycine max
  unsure (1)..(429): unsure at all n locations
agcttgtagaaactcttagaagctgtcctgtaatctgtcaccataggctaggctgtagctttcagtatgaattattttttgtactatctatcaattctcatatatatatatgcatctctcagcaaactaaggctgaggatcctttttgtgtgcttatttttgcactcaaacatttcaagtaatctaaattgattctttgcaatccttgtttattttcttaatctaagctcaatcaccttttttcataatttcaaagtgactcgtgttttatccttttgcaatttactcaattttgaatatctttcttattcttaaatacaggaaccaaaggtaaaataaggttataatcatccatgaattggtttcatatcacaagacatannnatgtgagccagtgattttaattttcattaacaaacttcaattttg

SEQ ID NO: 23690 - DNA, 407 bp, Glycine max
tgctatttataaggatgaggcgttgaatttttgtttactttctgtaccgtataattaagtctttatttgatgatggaccattcttcaacaactaatatatcccagcttgatgaaagagtagactaaggagttagatgctccacgtgatgaaaaacaaaagtttccgtattacctcttccacttggctttagtttctaccgaattcttgttcctgtaatattatttaaaaatttgatgctccttaagtaaatgaaagatcgatttaaagcatgtttgggttaacgttgatggggttgaatataagtttttcagcagattgaaaaccttttttgtgttgatatgttgaatttgtctcaaaatttgtgtaacaataatttaaactgataaataaacatgcacttaattag

SEQ ID NO: 23691 - DNA, 212 bp, Glycine max
agcttgtcatagaagcaactaactaactgctgactcagtagcttactaaaagattagtctaacagaaattgtaactgtacaaacaaacttacgtagttctttgaaaagcaagaaagttatgcggggtgttgattctatacttttaaacagttcgctttaaccgataaaagtaaaaagggggggggggggcattaaagcattggacctttaaa

SEQ ID NO: 23692 - DNA, 387 bp, Glycine max
tcataatttttgtgtacaaatttcctattgttgagtgtatatgagttaccatttttttaatatgacaacaacaatattataccatatcctaagagttattctagacttttttgctgatgatacaacttgacatctatttattttgtttgttctattattctaaaaaaatattcaggttgaatagtatgtgacattatgttgttatacccaaacaagttctaaatatagaatctagaagcaattttctcatatcttttgcatagtctatcaattcaaattcaacttggctaaaccggtcaaatagtcaaagttggtaaattgacatccaataattgatgcactgtgcttgaaattgaaaatccttccatgttacatatgtatatgtgt

SEQ ID NO: 23693 - DNA, 427 bp, Glycine max
  unsure (1)..(427): unsure at all n locations
agcttctggtgggacatcttgacttgctttccaatctgacattcaccacagattctgccttcttctattttcagattgggaatgcctctaacagcacctttgtcaatgattttcttcatgcctcttaagtgcagatgtccaaatctttgatgccatattttgacttcatcttctttggaggatagacatgtggaggagtaactggtttcttgaggtgtccataggtaacagttgtcctttgatctgctgcccttcattagaacttcactcttctcatttgtcaccaagcattctgactttgtgaagtttacattgaatccttcatcacacaactgactgatgctgatcaagtttgcagtcagtcccttcaccagcagtactttgttcagactaggaagtncatcatggactagctttcccattccag

SEQ ID NO: 23694 - DNA, 304 bp, Glycine max
tttaaatgttttcaatgttttagaaagcatgtaatcggttacacatggcttgtaatcgattaccagtggtttggaaaattttaaaacaaccataagaaatttgaatttaaatttcaaagttgtgtaatcgattacagtaagttggtaatcgattaccagtgtttaaaaattcaaatttcaaatgtgaagagtcataactcttcagaagtaattgtgtaatcaattacaccattatggtaatcgactaccagtgagtagttttgaaaaatattcccaacaatcacaacttttcatttgaattttg

SEQ ID NO: 23695 - DNA, 416 bp, Glycine max
agcttgtacccttgagataaattatgaaataggggacagaaaatgagtatatattatatggcactatatatatatacctcaagggcattgttgacggcaagttctgttgtcttcctatcatttgggaaggaataagtgcctaatccaataagaggcattgtaatgccccagttcatacgcacatgattgctcctcattctggctgtctttttctatgtgtatgtatgtgtttttatttctaactattgctacagtgctattgctaatgagtctctaactttggctatatatagattctcggagtcaacgtttactaactagtcagtttatagtttaggtttgaagcttttacgaacatctaatttaatcatatctaattaatatataatatagcatttgattgaggaagatataac

SEQ ID NO: 23696 - DNA, 408 bp, Glycine max
tggatgtttaacacaatatatacagagattcagattattacttacagttttaaaagtcgagaattaaaatcaaagatacttgcttttaaggagctaaaataagaataccattaacccttatcttgaaatacttagttcacttctctagctactttctttgacattcatgtatatatgcactataaagattaaataatggagtactaaggacttatctagttatctaccacaataaatatatctctcaacttcaacccaatatatagtattataaacggctaaatattcccaaaacagaatatataaaaagatttattttgatgattatcaatataaaaatcgttctattaatcaattgaaaatcatcataactctactgctatatatggtaatattctaataaataat

SEQ ID NO: 23697 - DNA, 405 bp, Glycine max
  unsure (1)..(405): unsure at all n locations
agcnttggggctggaaaactatataacaacaccaaggttctagtttaggctctctcttctctttctcctttttttcgtttttgcaattccagttctgactttttgttttagcaataaatttccgttcttcaatctataattttgttctctattgattaatggaaggctaagtccccaacgttgttttctcttgaggatcaagcacagttctctttgaggttctattattactgttaaattttgttcagtttttcctcctcactaattactctgaatttgttgctattaattcatgcatgcttagtgcttgattaattgtctctgcgcttaatttatgttcatgcttaatgatcatttatgagtaatggttgtatgtgttgcttaatcacataatgaatgacttat

SEQ ID NO: 23698 - DNA, 413 bp, Glycine max
tgatgtttgtgttgaatgcattaaaggtaaacagaccaaaagtaagaaattatgtgcatatagagctacagacgtcttggaattgatacatacagacatttgtgggtcatttcatataccttcatggaatggttaacaatattttatatcattcatagatgattactccagatatgcacacctgtatcttatacatgaaaagtcacaatccctggatgtgttcaaaacatttaaagttgtagttgaaaatcaactcaacaaaagaatcaagagagtcagatctgaccgtggtggtgaatactatggcagatatgacggttcaagtgaacaacgtcctgggccttttgccaggtacctagaggaatgtggaatcgtcccacagtacacgatgtcgaggtcacctagcatgaatg

SEQ ID NO: 23699 - DNA, 652 bp, Glycine max
agcttaataaagtccttagtgatccatatcatgtgtgtgtgatcgcattgaataagatgatgtgcaaagttggggattataacttcaatcgacttaaatgaaatacaaataaccgaaacacttatgtgcttgagagaaacactatccttgtgaggagtgaaacatagttgatctttctgtgacacatgtcgtacttgctaacctacttcaatctctgagtgcattctttgcatgattccatcatgaaaaccatggcaagtgtgaacttgagggttggaagctaaaattgtttgaaaagtatgcaattatcttacttgttgggattggttacatcctgaacattgccattgatataacttagtgtagtattagttcacttttgcttgaggacaaccaaaactttaaatttgggggagtttgataaatgatatgcttacgtaatttaaatatttaaatcaatatagcattatcttatttttctctcttttattgctttttttaggggagaacatttagaaattagcctcttctgagttttttgcccaaaaaatggccaaagtattctaatttaccagggtttttgagtgttattttttttataaataacatagccggaaggcctggaaaaacggtttaaaaaactttagttccc

SEQ ID NO: 23700 - DNA, 441 bp, Glycine max
ttgcctaccatatctgaggttggatgattcatttggttgatgccggatggggacgtcgggtttaccttagcaacagcgctggtagcggcaactgcaaccacattggcttccattatcttcttcatgctcatcatggcctccatcattgtggccatttgctctttcatggcctcctatgtcggcctccatctgctcttgcacctcctctacttcacctattactcttgctctagcacaagttcggtaagggcgccgtaaagcgtgttctttttcttttttataacaatgattaagttccctttttttttcaaggaaagaatgcaatgagcaatgcaactaatgaacaacatggatgtatgcgaatgatgcacagttgaagtattgcgaaattttacgcaggatatggggttgaatcaatttagattttcaacatgggccatg

SEQ ID NO: 23701 - DNA, 376 bp, Glycine max
  unsure (1)..(376): unsure at all n locations
agcttgttaaaaacggaagaaaagaaaaccgataatgaacgaaatgaagatgaaagctaaaaaaataagaaatgaattgaaagtctcggattcaaaaacttacccgttgaagaacgaagaacggtgaagaacgacggaaaaccttcacggatttgctcacagaaacgtcttggaaacacctcagcttggattttcttcatggaaacaattttttttcacccaaaacagctgaaatgcatagccaaaggggttagggatattaggaacaacctcccttcgcctatttataggaaaaagggggaggacgttgccgcccagctcgcccaggcgatctgggttgcttnctctacaagcaaccctgcttcaaaaatatttt

SEQ ID NO: 23702 - DNA, 388 bp, Glycine max
gatttctccagatttacctgggtcaactttatcagagagaaatctgacacctttgaagtattcaaagagttgagtctaagacttcaaagagaaaaagactgtgtcatcaagagaattaggagtgaccatggttgaaagattggaaacggcaaggttactgaattctgcacatctggaggcatcactcatgagttctctgcagccatcacaccacaacaaaatggcatagttgaaaggaaaaacaggactttgcaagaagctgccagggtcatgcttcatgcccaagaacttccctataatctctgggctgaagccatgaacacagcatgctatattcacaacagagtcacacttagaaaagggactccaaccacactgtatgaaatct

SEQ ID NO: 23703 - DNA, 480 bp, Glycine max
agctttgagccaaaatcctgactcaccataaaccttgacccagggtgagaataccaatccttaccctcggaagcaaaaaagaatagaggggaaatttccaatcaaagaaaaagagaaggaaaatttccaatgaaagcaaaaaagaaatgaaggaaaattccccaatcaaagagtgggagaaagcaaaaagaaaagaaaggaaaattcccaatcaaagaatgggagaaagtaaaaaaggaagaagaagaaggaaagaaagctcctgatcaaggatcgaaagaaaccagaagaaatgtgcagagaggtctttggaccagacaatatctgaacagtacagaattgtcaccaaatgaacaaaaaggaaggaaaggaaaccacgacctaaaatggtcttctccctttaataccaaccaaaatcccgtgcgctagcgacctttttttcttcgcccgcactaaacaaaaaaaaaaaaaacggaaaaa

SEQ ID NO: 23704 - DNA, 426 bp, Glycine max
tggtttgtgagttgatttaagccttactttcactttgattattagtcaattcattcaaggaaactttcaaagaaaaacgtccgattgattctttttggctattttattattatttttttctaaatatttcgattattttattattttttttgaagatattttgattattttattattattttgcttttgatttaaccgaagttacaacgtgaacgatcggttggattttattttaatagtgattaaatgagattacaacacaaatgatcggttgaaattcattttatcaattattgggcgagataacggcttaaataaacggtaaaaagcttgtttaaagcggaagaaaagaaaattgaaagtgaacgagatgaagatgaaagccaacaaaacaagaaatgaattgaaagtcttagattcgaacac

SEQ ID NO: 23705 - DNA, 478 bp, Glycine max
  unsure (1)..(478): unsure at all n locations
agctttacacatgtactgtcatgcatttcttgcatatcggccttcgtaataaatgacagacctcttacatattacaataaataaaacaaaacaacaaaaataaaagagaatattgcaatgacaatttcaaatatatacatataagaaccaaaacaaaaaaaaaaacaataaaatacagataccaaaacatatttaagcataatttaatcataaattcctacgcagcctaatatctagattaacttttgaaacatttaatattgtaaaagcattttggttctaaatatgtaaaagttcaattttaattaatataagtttgattttggtcactttaaaaaatatataaaagtntaatttcagtctattattgatgtcaagtttcaaccaaggacaccttataaaaaagtctattttaaaaagaaattacaaaataaaattaattaagctttttaatcaacgcaaatgagttttttttttt

SEQ ID NO: 23706 - DNA, 489 bp, Glycine max
tgtgattccttaatacatccttattaattgtttaattcttacttcttaaatgtacgttatatacttgttataggaaccttataattctaagtatatatagttgtagtatggtgttctgccttaattgcatagatagtatggttgtttgtgatttcttgttcttagtgatgctaatactttatagttggatgactcatatcaagttatatttcataaggaatactcttttgatcgtaccttctaattctagtgcaacctattctttgtgttgtgtgcttaagtcaaataaattgattacacttgaaagcctgagtataattaattctttgtgttatgagactacatcaaacaattggattattgatgtttctatcacaatcaagcgattgttaatgtcttcatatgggtgtacattgtggtcatgtttttgtttctagaattcattgaaatattgttgttgattctgaataagggatcattttgttttat

SEQ ID NO: 23707 - DNA, 399 bp, Glycine max
agctttgacgtttgtgttgaatgcattaaagataaacataccaaaagcaagaaattaggtgcatatagagttacagacatcttggaattgatacatacagacatttgtgggccatttcctacaccttcatggaatggtcaacaatattttatataattcatagacgattactctagatatgcatacttgtttcttatacatgaaaagtcacaatcattggatgtgttcaaaacatttaaagttgaagttgaaaatcaactcaacaaaagaataaagtgtgtcagatctgaccgtggtggtgaatactatggcagatatgacggttcaggtgaacaacgtctagggccttttgccaggtacctagaggaatatggcattgtcccacagtacaccatgccg

SEQ ID NO: 23708 - DNA, 392 bp, Glycine max
  unsure (1)..(392): unsure at all n locations
tgatgatttcctataggcatatanaacagccttcaaaactcccattggcatctctttgtttcaaatggtgtacgaaaaagtgtgctacctaccaatggagttagaaattaaagctcattaggccatgatgttcctcaactttatctttatagcatccagagagaaaaggaaggtataactacaagaacttaaaaaaatatgccacaacgcatatgatttatccaagctctacaaacaaagaaccaataggaaccatgacaaaaagatcctctacagagaatttaggcccaaacttcaagtattgctctacaactcaagattaaagttgtttcttggaaaattaaaatcaagatggagtgggctttttactatcaaagacattaagccttatg

SEQ ID NO: 23709 - DNA, 471 bp, Glycine max
  unsure (1)..(471): unsure at all n locations
ctgcattctactaatatatggaattgcccattgctttgcctgattataacaattggttgaccacaacagcgctgggggcggcaacggacaatggtctttcaaataaacctgttgtacatgaacaaacattatatcatgcgctgaccgtgccaaacgaacaagcgaagtcattgcataattgttacactaactatattcaatgtacctgaacaaaatgattttcaaacacgtgaccgacgcatatgatgcggcggccacaagagtcatgtggtggttgacttctaagagggaaaaatgtcatgctttgctgttgagacaacgatacaaagattacgttataccgtgaagcaatcacatatcccatgtctgttatatccatccacttgtccacactaacctgaatgaaccaaacatacacatgntagtaatttaaacatttgttataaaaaaaattacctaaaaacatacctt

SEQ ID NO: 23710 - DNA, 431 bp, Glycine max
tgaatgcatgtaacccaccatcttctcatagtagaacactagtaacgtgtcttctatcattattatcatctccctatccatcattgggggcgctacttaagtttccagattcctccacctttgggtgtattctttgaaagattcatcctccttcttatacatgttttgtagctgcattttattcggagccatatcagatttgtactgatactgcctaatgaaggcaaccattacgtccttccaagaatggattcgggaaggttccagattagtataccaggtgacggctgccccagtaagactttcttggaagaaatgcatcaataatttttcatttttcgagtatacccccattttcctgttgtacatcttcaagtgattcttgtggcaagtagtccccttgtatttatcagaatccagcaccttgaact

SEQ ID NO: 23711 - DNA, 469 bp, Glycine max
agcttgtcaaattagtgtatggattgaaacaagctcaagagtttggtatgaaagaccaagttcatttttagttcaaaatttattctccaaaggaatagcggatattacaccattcataaagacttagaaaatggatctgttgatagtatagatctatgtagatgacagcatctttggtatttcctcaaaaaggatgtgcaaacaattttttgagctaatgaaaggaaaatttaaaataagcatgatgggagaactaaagttctttctaagggctttaaatcattcaaaagaggtttagaatggatgaaaccagaccagtggctaccctcatgcatccatccactgttagtgataaagcagaaaagaaaagcaccaatagtgcataccaatttcatgggaaatcactagtgtcatagtcttcaaagaaacaacacaattgccatcaaacaccacttcattagagatcata

SEQ ID NO: 23712 - DNA, 487 bp, Glycine max
taacaaaaggcatgcgaaatgggtggaattcctagagcaattcccttatgttatcaaacataaaaagggaaaaggtaatattgtagccgatgctctttctcggcgtcatgcattactttctatgcttgaaacaaaattgattggtcttgaatgtttgaaaagcatgtatgaaaatgatgaaacttttggagaaatttttaaaaattgtgaaaaattttcagaaaatggtttctttagacatgaaggctttcttttcaaagaaaacaaattgtgtgtgcctaaatgttctactagaaattttcttgtttgtgaagcacatgaaggaggtttaatggggcattttggggtccaaaagactctagaaacattacaagaacatttttattggcctcatatgaaaaaggatgtgcagaaattttgtgaacattgcattgtatgtaaaaaggcaaagtctaaggtaaagcctcatggattgtatactccattg

SEQ ID NO: 23713 - DNA, 368 bp, Glycine max
agcttaaatacaactcccgaacttataattttcattttgaccagtttccttcgggttttccgatgttttccacaaataaacgttggtggcgactccgcgcatctttcctcctttggaaagcgcacccgttagcttcgccttcgctcgcccttaaaagggcacgttgcgacacctatcaacaacaacaaatatggaatccttaccattacttgttctaggcggccctaaaacaaagtccattgataaattaatccatggagaatccgaaattggtaaaggggtatacaaaccataaggcattacctttgacttggcctttttgcaaacaatacaacgctcacaaaatttctgcacatccttcttcatgt

SEQ ID NO: 23714 - DNA, 494 bp, Glycine max
  unsure (1)..(494): unsure at all n locations
tgtaggattatggggtatccatcacatgtggtactaggtggcggtcgggcgatggtgcacaacaagttttccacatccacaatgcgcgcataaacccaccatcccctattgcccacctccaactgagctcacgtactcccacgtagcccatatcctcgtttctctcaacaccgggtccccatcaatcctcccaagcttccacaacatccaagcaaaacaatattcaaacagtacaagctatcacaaccaagcaaaacagagcaaaggcagaaaactctgccaaaacaccaaccaaatcacagcttttctcacttaaagaccccagtaacaattccttcgatccaattcgttaaccgttggatcgactccaaaattttactggaagtctgtagtacataatcctacattgtgaccgttgggatctactatcanacattcagaacccattttacattactctttccacaaccagcaaatacatagcatttttctgc

SEQ ID NO: 23715 - DNA, 503 bp, Glycine max
agcttggttcatatcacacatatgcttcaactttagggggagtgagggattatattcctgatattctatttattattagaatattctatttcctattaatgagtaattgattgatcttgtaatctatactaattccttttgcatattataaatagcgtgaggtgtattctactgttacacacaacacatcaatgaaacactgttatagacctttcttgatgagggctcatcccatcccaaaccggcatggcccttactatgaatggtggtgattggagaattccctctttgccggatgcccaattccctgttgatactggggctatcaaaaatattattattcctattgattctcatgtggatagtttactctggaccccattggtcttgggggaatagtttttacaagatgcttatatgcttgtaaatcctttgatgcgtgttctgccttcgacaaaagataattttgaaggaactctactccctccttctaaatctttttt

SEQ ID NO: 23716 - DNA, 457 bp, Glycine max
ttggggctgaggacctatataacagcaccggggttttagtagatggagtctgttaagggaagagagaaaattttagggttttgcatttttgagtttggtgttactattcacttgcactgttcacgtaacaataaaaatttgttttctgcttcaaattgcaatttcattttctacttctgcccttgaattcattttcttttctgctgattaatggaaggctgattctccaaagttgatttctcttggtatacaactaacttttgtatagaaatccttttccaaagcttgaatagttccccaatttatggtcattttgaagtaaatttggtaaataaatcttgatttatggttaatgttgcctctagaacatttccattggatttaatgatgaaaactgtgcattttcaagtaaaaaaagaggctaagttttgaattgcaaaatgtcacagtagggcta

SEQ ID NO: 23717 - DNA, 406 bp, Glycine max
agctttgcgaatttagtttttgttggcgaaaggatcaaagtgggtttgaaaagaggcaaatttgattatcctaatttgatgaatgagaaaattggggcaattggagagaatgagaagaaaggaggaacccatgctatgacagccattcctacatggccaagtttaccaccagctcaacaatgtcattactcagccaatatcatcccttctcattatccatatcccaatcatccacaaaggccatccctcaatcagccacaaagccttcctgccacacatccaatgccaaacaccacccttagcataaaccaaaacaccaaccacaaagggaattttccaatgaaaaagcctatagaattcaccccaattccggtgtcctatgatgacctgctcccatatctactcg

SEQ ID NO: 23718 - DNA, 362 bp, Glycine max
tatgctacaaacatctacaatagacctcctcaacctcagcaataaaatcagccacaacaaaacaattatgacctctccagcaacaggtacaatcccgggtgagggaatcatcccaaccttagatggtcgaatccttcacaacagcagcagcaacaacaacagccttattttcaaaatgctgctggcccaaccaaaccatactttcctccaccattccaacaccaccaccaccattaccaccagcctaaaaaccaccaaccagtgaaggttcttcacaaactttccttgaaaaacttgggaaggcaatgacttttccaaaaaatgcagtttcaccaaaaaacaaaaccctcattttaaacctt

SEQ ID NO: 23719 - DNA, 318 bp, Glycine max
agcttcattgcctaacaagccaacttacaacagcaagccccaagagactcagcataaggatgcacaggtcaaagttgagtatgtgaaaacattgtatgaccaagtgaaggtgcaaattgcaaagaagaatgaaagttatactaagcacgccaacaagaaaaggaaggaagtggtacttgaacctggtgatgatcctggacatttgagggcaaatgttttccaagaaggagggaatgatgataatcctgaaattggccaaatacaagcttaaagcccaagtggagaaggacgaatgctcaagtggagaatgacaaagcc

SEQ ID NO: 23720 - DNA, 493 bp, Glycine max
tctagtcgtccatagacctcctctgtggtacggactagcaaacgttgcatctgtgcattcatcgcatccactaacagacgttgagcgccgtccaactgatggtactcgtcaccaccaccacctgctccagccataattcaacaggaaaaaaaaatgtgcaataaaaattattaaggtttcaggacctcacaacactctactcacgtctcttagatggtagtacactcgtgtttaatgctctcaataggcttttgtgtaatgtattccctcttgccttttaccactcgtgtttcctcttaagttcctggatggaccaaattagacacacaaggtaatataaaataaaaggaaagacaatataatgatcacaaacagatttgatttgggataacaacttggacttgatttgaataataatatattagatttggatttggataacaggtgagctttaatttgggtaacagatatgataacaaataagatattatag

SEQ ID NO: 23721 - DNA, 501 bp, Glycine max
agctttcataagtgaaatcaggtgcagccatctccctaagagtcctctcacgaggtggaggttgagccatgttctcagtatgaaagttagtagtggaatgttcaaaatcagaatatttagaatcaccctcaacagaatgcttagaatgctcaaaatgcacaaaatgacaaggatgcacactatgcctaactaatctatgaaaggttctatctatttcaggatcaaagagttgtaaatcacctggattgcccctagtcatgcactatatgcagcaaataatgtgtttctcaacaagcacctaacaagggggtaaaactacaactattctcaaacaatatcaaaatgagttgaaattttgtgaggaacaccctagaatcatgaaaagatagcacaaaaaatttcaaacaaaaattcaaagtctaactatgaaaactacctaaataggacaattatacttgaaaaataaaaaagaaaacttagtacacagctgatttttggagc

SEQ ID NO: 23722 - DNA, 489 bp, Glycine max
tgtagaatccaccccaattccggtgtcctatgctaacttgctcccatatctactccataattcaatggtagccataaccccatccaaggttccttaacctccatttttttgaagataccactccaatgcaacatgtgcttatcatgggggagccccggggcattccattgagcattgtaggtccctgaagcataaggtacaaggtctaattgatgcgggctaggtgaaatttgaggagaatcgcttgtgaatcctgacattgacaagcgacgccatacatggggaaattttgaaagttgttggtagatgtctctaatgactcattaggattttcaagtttatgccattattgtaaaccacagttacaatgctaataacatggataaatttgacatccttgtctcttatcctctcacaattacatctttgcttatttgacttccactggaatgtgaatgtaagccattgattcgtttgctcaagcgacct

SEQ ID NO: 23723 - DNA, 499 bp, Glycine max
  unsure (1)..(499): unsure at all n locations
agcttcataacctcagcactctttgatagatgtcccacagtacgagcaattgctgcaaaaacaaccaaagtcattaatttatgtaaaatgcgagaaaatatagagttaatagactaaaaccatgttacacagcggattcttgtttatatagacaagtagtattgattacacataattagaagatattcaatttctctatatcagatatcaaatcctatcacatcattatacattaaattcctgattctcaacactcccctcaatctaaagctttgttacaagaaaatttattcccaactaataaataaaaacataaaattgagttccaccaaaaaacaatgtttgaaagacaactcagggatgttggcgaagttggagaatattgctagaaagataacattgccaaagagctggaataaccatcaacctaagaaatntatggcaagcaagttccagcctacttaagaaccacatttggatgcttcaaaccaacattttg

SEQ ID NO: 23724 - DNA, 386 bp, Glycine max
taatggacttttattacgaggagataagttcatataaaatttatgtatgttcttataaagatataagaacacaaaaaataatctgtacattcaccaaataacttcaactttgggaaataattattagttcatgacacatttttatttgttgatctgaatatcttctttgtttggtgtaaattctctctctctctctctctttctctctatctctgtatatatatatatatatatatatatatatatatatgtatatgtggaacgtaaagcctttttatccatttcttcaaaagatgttggagaaagccctcaccgccaaataaactacttcttgtctttataaatgagggggagataaatttatttgtctatgcatctatataatg

SEQ ID NO: 23725 - DNA, 444 bp, Glycine max
agcttctacttatgtggccgggcgggcttccttcactttcttgtctccaacgcgagctttgaccactgctcttccttcccgcgatgcttctgttcatatccgcctgagtgggcttatagcctaaaccatacttcccacgatttcctttggcgtttatcaggctagttatgccgccgttgtccttgcctaaacccattccgggttcgtaaccgttccctaacataactcgggccatcattactgctgcatcggacagacaaggctgcccaaagaaggagtccacggaggaaatgctgaccacctcaaaagactggaaagcggcttctaacgattcttctgcggcttccacataaggcatagaggatgggcagctcaccaagatgtcttccttgcctgacacgataaccaagtgcccctccactacgaatttcaacttttggtgga

SEQ ID NO: 23726 - DNA, 495 bp, Glycine max
tgcatttggaattgcgaaagccccactccatcattaggatttgttcctgccatctcaaacaaacaaatcaaacgtaacaagacaattatagttgctgtttgaatacctcactcactcaagtgtatcacacaattatggtttttctctaatgaaacactcttgccttttaccactctaattccccttgagttcttaggcaattcaagagattatggccacaacaaagaacaattcaccaatatgtgtaaggtaaggctagagaaacaaggaaaaggttaaccaagaaaaaggctaacaatgtttttaggcacaaatgaaggaaacaaaattcagaatttatgaattcaagtaacaatccttcatgcaaccaatatattaccttaaagagattttttttttaaagttcctcaagcatgaaccattcagcccaattttttttttttaattttgcttatacgaatttctgctttttttttataacaaagagatcaaaag

SEQ ID NO: 23727 - DNA, 382 bp, Glycine max
agcttgagataaggaagtgtagaagggtgaaacttcctgcttttatttgttgaccacagagtggtacctggagatatgtcgcggaggtcaagagaccttggggacgtcaggtggggtgctattgcccaaaaccaagcttgaccaatcccgacccaacccgggcatagtcggtcagtgagaacctgtgatgtacctaaacaggcgagctcctggcattcaacagataaaaggaacaaagaccacacagcaaggaggcttgtggtggctggccaactgtgaattatgtgtgatatatgggttgcggcctctggtaatcgattaccaagggtgggtaatcgattacaaggcttataaatgaagacaggaggctaagatggtcttt

SEQ ID NO: 23728 - DNA, 464 bp, Glycine max
tgagatgaggaagtgttgaagggtgaaacttcctgcttttattggtgaccacagagtggtacctggagatatgtcgcgggggtcaagaaaccttggggacctcacgtggggtgctattgcccaaaaccaagcttgaccaatccctacccaacccgggcatagtcggtcaatgagaacctgtgatgtacctaaacaggcgagctcctggcagtcaacagataaaaggaacaaagaccacgaagcaaggaggcttgtggtagctggccaactgtgaaacttgattgatatgtgagatatggtctctggtaatcgattaccaagggtgggtaatcgattacaaggcttaaaaatgaagacagggggctaagatggtctctggtaatcgattaccaggggatgtaatcgattaccaggcttgaaaacggagtcaggaagctaagggaacctctggtaatcgattacca

SEQ ID NO: 23729 - DNA, 523 bp, Glycine max
  unsure (1)..(523): unsure at all n locations
agcttgatagtagcatattttgtgaagcttattaatgcttaggaattttccaacctttccttcaagtagttttttgtgtttttgtatatattcattaatcaacttgttagaatcaaaatgattgaaatcaggtgcgtgtcaggtgcataaaggttgattagagatatgggggaacgaataaacttgttatatttaaagctcgacattgattgatttaagcatcaaataaggactaaggaggaccatttctaaaaaataaagtaaaataaaatcttaatatcagatgttaagctacatactaattatggctaataccaatnntaacgatttgtgtccctgattatcgatgattcaacttctaattgatttttagatataaaatagaacaattacgtatcaatatcatcataaaaaaaaagaagaaattaagttacatataggactaagaaaaccaaaggtgatgagattattaacattcacaaaccgacctgtttcataacttgagtcttaatttttgttaact

SEQ ID NO: 23730 - DNA, 493 bp, Glycine max
tggtgtgtgggaaacatggactaaacaatcctgtgtggcagctccaaaaatgaaatcacaatagacttagcatgccaacttggtgacatttctaaagaaaaatattcttcttgtctcctttgtttcctttaacctgataccatcaagaatttcttatgattgcatgggaacaggttcatctttgaagtatttttcccttccaatattttaatatatatggatcagagacatgccaaaatttcatattctataatttacttatccagagttcagaactagtaaatatcatctcctagaattctttttgccaagtagagaagatggcagacaaatacaaagagttctctgcatcttcgcagcaacaacttgcatattgcacctcacccccttgtgccacaatttgaggatcattcaaatagattgaaggattctcaagccttctcttctttggcattatgttcataagccaaaaactcattggattgcaagatgt

SEQ ID NO: 23731 - DNA, 407 bp, Glycine max
agcttgttaagctttttcttaagcttttgctacaacctttttctccccctttggcatcatcaaaaagccaaagatctgggaaatcattacaattataacaatggagtagcaagatataagtatcagagtattaaagacaataagccaaactcataaacaagaaataatcaaaccagaatccaaataactgaaaatgtcaacaaccacaaaacatccaagactgaaatttaaaatccacaagaataaatgagcaaagtacttagcataatgatgtaaattctaagaaactaaaagccaaaatacacggcttataaaagataaattatcagaatctaaaagctaagaagacggaggaagtggtggaaaatcgaaactctgacgaatgtatccgacatcctcttcaagct

SEQ ID NO: 23732 - DNA, 375 bp, Glycine max
tctaaactttatacaagaatgaaactctgatgccacttgttagacaagtggcctcagatatcttaagaagggggggttgaattaagatattccaaactacttccccaattaaaatctatttcactttcttttcaagttataaattcccttaacaatgaacttcttaaatattaattcaaataaaacaatttgaatatgaatataaagcaataataaacaaaggagattaagggaagagaaagtgcaaactcagatttatactggttcggccacacccttgtgcctacgtccaatccccaagcaacccgcttgagagttccactatcttgtaaattccttttacaagttctaaacacacaaggacaatccttcctt

SEQ ID NO: 23733 - DNA, 133 bp, Glycine max
agcttctaattatgaggccgggcagattttgttaacgttctaggagcaaacgcaaccgtaggacacagattcatgaatcggccaagctcctggtaaatacatgcatgagtgggcttattgccctatgcataca

SEQ ID NO: 23734 - DNA, 124 bp, Glycine max
ctttgagtatttaaggacttcattaaattttgggccacttatacaacctgcccataacatgtggtaggtatgacctactatattcagttgacgagaccactgaacaatgctaaaaaagatttca

SEQ ID NO: 23735 - DNA, 451 bp, Glycine max
agcttacccctatggcttgcctccggacttcactccccgggccgccccggaagatttaagccaagcccctaccttcgaggggcaactcccaccttatgacgactatcccgggcaagacgatgaggaaggagatacccatctcggccccctgctccacctcaaagatccatccccccatgaactaccccaaccaaacatagtccgtcatgtcccagcttcacccacacccgtaaaagaatctgttcccttcgcggaagataagggaaagattgaggcgcttgaagaaaggttcagagcagtcgagggcctcgacaattacccattctcggatttagcggatttatgtctcgtgccgaacatcgacgtccctcccaagttcaaagtaccagactttgataacgacaaagggacgacatgtccaaaagggcatctcctgatgtattgccgaaag

SEQ ID NO: 23736 - DNA, 456 bp, Glycine max
ttccctttaatgccacaaaacaattctcgtaagccttccaatagttccagtggtccacaaactccttccaacgatgacgttgaaatgcaatttccaatattttctactcaaattgggctaaaatatcacattggaacaatgagagtattctaaaaaaaagtcatgagttttcttttctattaaataggatacacatgttattggttcatggctaaatgtctcaatggatccaattgttggtgatggtcaagcaagagaccgtttttggctaagtaacaacaaattacaacaactttcaaggggaactacgcgaaagaacagtgaatcaactgaaatcacgatggcaaaaaaataatctgggtgtgcaaaaggacaaagaattccacatctggggcatattcattgtcatctaatccaaaaacaccggtaaaagattataaagctgacacactgtct

SEQ ID NO: 23737 - DNA, 312 bp, Glycine max
tatacagcctacctgcatgcatgctagctaagtcgactgtgccagacagtgcttcttaatgcctctaactcttcgaacccactcccgctcgttctcactaagcattcgagctgattctaacttcgcctgataatttgggttgcgatcgcaaagcactgactgtcacaaacttatatgtatctttcacataataagtataccataccctctactatatcccaagcatgccaacgactgcaatcatgatgataatatgatccatgccgactactattttgcgatagtggaacatctgcatcttgtaccattgat

SEQ ID NO: 23738 - DNA, 371 bp, Glycine max
actctatagaactctcacgctagatctcgtcctggagactgttctccttaaactgaacctgggtcatgcgcagagacgtagcgccttttgtctcagtgttgttatcggaaaggtacatcgatcacattgcgctgactccccattgtcgtccttttcccccaccccgaacatggaccctttacaccccttccctccttctgcttcaaaactcaccatggatctcgaacctgaaacaaaaattgatggagccgacaggaagagagaacaatcgccaggttgggaagagggttgttggttgcgaacgaagctaaagatgttggaataggaacttccactagcctgcatgtttactccgaccaaggtggatcttt

SEQ ID NO: 23739 - DNA, 392 bp, Glycine max
agctttgaacgatatattgggggaggatattgccaagcatgtaactctctccgtcactgaagatggatcaggcggtggagcaacactgcttgctgcctcgcattcatcctatgatggggatacagcatagctatatattgtatatgcatacatgtaatcatgtaaatcagaaagaattttttcccctcttttttatcaatctctggataaaggaaggctctgtctattctttattaagatcattaatattaatattattcttgtcaatcttttattagtaggaaatctttactgtcattcttggcaagtttggatgtgacacaacagtactatcagccattaagagatcctaattgagttggcgggtttaagaaatgattgtttattacgta

SEQ ID NO: 23740 - DNA, 477 bp, Glycine max
tgcgtttcttacaagatgaacataaaacgaggagaaaaaaatacagctaatactactaaataatagaaaaaatgaaaataaagcaaagttcatatagttacccgagaaatttctagcttgatatcaagaaattaaggttaatacaaaataaaaaaaatatcaataaatattttacgaaagagaaaagatatctgtggagattacagttatttacttctatactttccccgttgttttcattttgtgcttccaagctagagaagaaaaacattttctccccaagttttttcccctccagtcgtgagtttatccaaataaatcaaagttcttggtcgtcttctgattcacctctcacacaatcttctttgtaatataaaatatgaaagagaccaccaacaaactttcccataggtaaaataaaaggaaggacaagactagtattaagatctgtataatcaagtgataataaaaattatt

SEQ ID NO: 23741 - DNA, 460 bp, Glycine max
agcttctaaactttatacaagaatgaagctctgataccacttgttagacaagtggcctcagatatcttaagaaggggggttgaattaagatattacaaactatttccccaattaaaattctatttcactttctattcaagttacaaattcccttaacaatgaactcttaaataatgattcaaatagaacaatctaaatataaatataaaccaataataaataaaagagtttaagggaagagaaagtgcaaactcggatttatactggttcagccacacccttgtgcctacgtccagtccccaagcaacccgcttgagagttccactatcttgtaaaatccttttacaagttctaaacacacaaagacaatcctttctttgtgttcagaattcttttacaacaagagaaccctcgtcttcttatcccttaaagaattagaaagaagagaagaatgaatctc

SEQ ID NO: 23742 - DNA, 495 bp, Glycine max
tgatgcctgtttcaaaattaaaatgtttcaccacataccatccaaacttagtacgttgtaatttggattctaatgttttcctacgatcctcgttccattcatccacaatggggatccacaaaatcttgaaatcgtccttcctgtaaccctcaacctctcttggtttctccttcaatttctcgtatattgattttagaagtaaggtctcctcttcaatgctatcaaggccagaaataaataacaacacatgcttcttcttgaactcttcaattttaatctgtcatagtaagaatacattcaactcaagaaaactttattcacagggttgacccaacgacaagttaagcctaaaacaaaatttaaaataaaaggtttgcttttaatgagaaaactatatagagtctttttgcccaacatatggggatattcttttgggcttaaatatgtttgagaacccctaatatatatattatatatatatatatatatatatcc

SEQ ID NO: 23743 - DNA, 420 bp, Glycine max
tctacaggcgagctggcggcatgcaagctcaggtggaatatagaatggtttgtctatgttatgtgcgtgaactgctacacacccaatttgttgatttttataaatatgaacctgtttcaaacacactataaaaggcgagaaagcctgaactattttttttctccccttttgcatgacatttgtggatatatatgaatgccttttccctaagaaaccgaggaagcttggaaaaaaagtgattgatttcttgcgtgaaaacctgaatctgtcatgattttaaatgcttgaattaatttatctcatagacaaagagtacttgttttctatttgcagattactaagggagtttgcctataatgctaaacgctagtattcttcagcatatcatctcaaataaacttgcacttcctgacctggttg

SEQ ID NO: 23744 - DNA, 420 bp, Glycine max
ttaatgaagtggatgctattatactaagtgaggaaagtatgaggaatttgatgcttgaatctccagatgctgaaagctcaaccatgattgctggaaaagccaaaaatgaccaggcataaaaagtagattgggggtgcgcttattgtaatgaggcatggcatacacagcagaattattggaaattacatgataaacctcccaatctataattgggacaaaaagaaggaacatccggaggagcatcttataaaagtggacaggtctatgtggctgaaaagaatgaagaaaaagcgtactcttccaacttgccgaaaactactaaccttagtcaagatgaaatagagagaatgagagccttttttagcagccttgaaaaaccattaggtactgggacatcggcatattcatgtatgcttcctc

SEQ ID NO: 23745 - DNA, 346 bp, Glycine max
agcttatcccatgcctccttagcagatgttgcataagaaatcttctcgaatgcatcattttttaatgcttgatagatgaggaatagagctttattgtctctctttcttgaatcctttaacgtctccttttgtacttgggatagcgaagtctcatcttgtgactccttttagcatttttcaaccatttcccaaacatcatgtgctccaagaagggccttcattttgatgctccaaatgacataggtgctcccctttagaagcggaacttgaaaggataccgcttcattgcttgccataactatataggaatttcttatcagaacctaatctctgataccactatgtt

SEQ ID NO: 23746 - DNA, 424 bp, Glycine max
  unsure (1)..(424): unsure at all n locations
tcgaaaatgaatcgaactgcatccatggtttctgttctccatttgttgttattgttttgatttctgtctttttgtaatgattaaaactttgttttgtactcttaattgcttaattttcttttaatttcatgttttnaaattcaatattgtcttcttgcgtttgtaggggtctaatacagttagttaagtaagagtgtgtaagttggtgtaagtccagcgacatcatatttaattctccattgatgaaaaaaataatatagtcttttgttaatgttattagtatgatgaaattcaaataattgaacttaatttgaagttaattcatcttaggttgaaatttagaccacataattgcgaaggctttaggaatgaaggtcccagggtcgttgctctctcaagaatcactaaccctatgcatgagtgc

SEQ ID NO: 23747 - DNA, 431 bp, Glycine max
agcttgcctgtccgatgcagtagtaatgatggcccgagttatgttggggaacggttacgaacccggaatgggtttagggaaagacaacggcggcatgactaacctgataaatgccaaaggaaatcgtgggaagtatggtttaggctataaacccactcaggcggatataaagagaagcatcgtgggaagaaagagcggtggtcaaagctcgcggttgaggcaagaaagtgaaggaagcccgccctgccacataagtagaagctttataagcgcgggtctgggagacgaaggtcaagtggtcgcgatatacgaagatgatgttccgagtacattggatttggtacgaccatgccctcctgatttccagctgggaaattggcgagtggaagaacgccccggcatttacgcaacgagcataatgtaaaccttta

SEQ ID NO: 23748 - DNA, 486 bp, Glycine max
tgttagtgtgtgtttaaatgtctaaaataaaagaaaaattatgtaataatgtttctttgaagaaaattttatcagtgaaaataaaatattttgaatatgaattttgtagtatttttttaattagattaggttggtgttaatgatttattagtgtgttaataattcatgaacgtttcaactttcatttaaaaaaattagtagatcatatttatttgaagaaagtattttgagtatgaaatttattttaatatgaagttgtagtatttttttaattagattaggttcatttttttgtgttaaaaattgataagcgttcaagttgaaagtgttatttgatgatgttttgttgtttcttgtatcatatttaatttaatatatttgtagtaattttgtaattacctattttcattttgaaagtattattgttaaaattaattatttttactactaacttcggtcatgaattattttattttgtggtaaaaa

SEQ ID NO: 23749 - DNA, 443 bp, Glycine max
agcttggtgaattctactaatgaacaaatatatgagcaacgattgaaaatctttacacacatttgcccacgttatccgacttttcagaagtatgtttattatacatggttattgcatcattaggagagatttgcacaagcatggactgatcgtgttatgcatctcagaaacacaataactaataggtagattttttgcaattacttacttgtttcacattctttttattatgcatcttctattgacattacatcaaactgctttacaggatcgaaggcatacatgcaagactgaagaggttgtttcatgatagcacaggagatttgtgtacttgttgggatgcaatgaataacatgcttatgctacaacatattgaacttacaacattgtttcagaaaagcatcaatgtggttgaccacaagttcaatacaccattttacaag

SEQ ID NO: 23750 - DNA, 497 bp, Glycine max
tgatgtgagaaagcgtggaagagtcactcttcctacttttgtttgttgaccacaaagtggtacctggagatatgtcacgagggtcaggagaccttggggacattaggtggggtgctattgcccaaaaccaagcttgaccaatcccgacccaacccgggcatagtcagtcagtgagaacctgtgacgtacctaaacaagcgagctcctgacagtcaaccaataaaagaacaaagtccacaaagcaaggaggcttgtgtggcggctggccagctatgaatcttgagtggtatctagaaatggtctccggtaatcgattaccaagggtgtgtaatcgattacagggcttaaaaatggagacaggaagttaaaatggcctctggtaatcgattaccaattgggtgtaatcgattacatagggtgattgggcactggtaatcgattaccagtttggtgtaatcgattacacagtgctacctgccactggtaatcgattacca

SEQ ID NO: 23751 - DNA, 364 bp, Glycine max
agcttgccacccagctcacccaggcgagcatggttgcttcctccagaagcaacagccttctggaggaatcttctggagggcccaagtgggcctggttgctatttgcacccccatgtttactaagtacaccccccttttctatttttttggaactctttttctgtaacgttacaaaactttacgaacttcgtaacgatacttattgtttattctgcaaggttacgaacccttacgacttatgtatttactctttgttagctttcaaagaaaatacaaaagcttacggattgcgcaaaaacacctgtttttgacttccgccacattacggaagttcacggatcgcacaagcctgatttcttttgat

SEQ ID NO: 23752 - DNA, 407 bp, Glycine max
  unsure (1)..(407): unsure at all n locations
tgtgtcagcgtttatgcgagacagagacccatttgttagctatcatcgccaggtaccaagaagagtgaggcctagccacgggccactagcataaagtcgctgatgacccttccccngtataccccntaaatcacgctccatgaacggctatccactctttaccccataaagaaatcatgttgatggatcggattgctcttaccttgaacgggagtcaagaacttacccgattgttagcccaaggccagaggcgatggcagacacctactccgccccctaagagattcatgggcttcttggctattgtcagcatatgatagaattaatggccctcatacttagaaatcgttgggaaacttgtatggactctcacaccttgactagatattaacaactttttgaaataa

SEQ ID NO: 23753 - DNA, 421 bp, Glycine max
agcttgtcaagtcccccagcctggacaagtgttgttcgggctgcttctgtcaagttgtccaaggtggacatgcttttggttttgcatgtgaggtctaacatgtcaggtgagggaagcctgtatatttggcaactctgtccttttctaacagttggagaatgcattgaagacaaactttatgttttgtctgttaatgcagttgcgtgtagtgcacacgtagtactcttgcacacgtgtcactcgtggagtgggcacgtactaaatacgtgttgcgtgggatatgaagttgttttgtggtctcctcttgccagtgaccaccgtcacttcaaatttctatcttctttctctcgaagtataaggtttccctcacctacacagcaagtgtcgttgcaaacgcccaggggaactagcaaatcctgat

SEQ ID NO: 23754 - DNA, 489 bp, Glycine max
tagcaaatggacttgggtgttgcccaatttcatcgtatcttttgtaatactcaccacctctattagatctaataattttcacttttttgtctaattgtctttctactttattcaagtaaatttctaaggcatccattgcccgagatttctcatgcagtaagtaaacataaccataacgtgaatagtcatcaataaaggtgataaagtatctttcctttccgaaagaactaacatcaaaaggtccacaaatatcagtatgcacaatttcaagaagctgagtgcttcttgtagctcctttctttgtatgttttgttgttttcccttgatacaatccacacaaatatttagatccgtaaaatctagatcatgaagaatttcattctttattaatcattccatcctttctctagaaatgtgacctaaacgtttatgccacaagaaagcagatcggtcattcactaaactacgtttagtgataacattatgatg

SEQ ID NO: 23755 - DNA, 446 bp, Glycine max
agcttgcagccattagaagagaaagaacatgtgattagtagtatgactgaaaatgttagtcagtttgtcagattgattgtgaaggaatgcattaaccgtatcccggcgagagtgtgatccttaaattttgagagaaacgactatcattaagtactgatttttgcatgaatctctgaagtatggagtgaatgcatgaaattgaggatgatgaaggtcatgtttgattgtgatagccacttagccaaaaagctgaccacgtgcttgaatgatttatcctttgcgcccagttttgagctaaatgattgattgattgaaccttgagcctatacagttttatctcctgctaccttgtcttaggttgtaggagagcatcatccacagaaaagcttgttttcaggcaaatttttgtccaaatttacggagacactgcgtaaagtaataaaatg

SEQ ID NO: 23756 - DNA, 320 bp, Glycine max
tctacctcttttccctataaataggggaagaatggaagaacaaaaatgttcaaccttcctggtatctgagaatcacttaaaattagtgagaaaaattgtttccgtgaagaaaatccaaaccgagacgcttccgtaacgcttccgagacatttccgtgggtgatttcgcgaagattttcaaccgttcttcgtcattcttggttcgttctttgtcgttcttcggtctccaaccggtaacttcccgaaatcgaacttttcaattcattttatgtacccttactggtcctcattttgagacatgacctctagtaatctatcacc

SEQ ID NO: 23757 - DNA, 391 bp, Glycine max
agctttgatataatattgggcaactttctgtcgcaacctacccttcggcgggaggacgacggagggctcacgggtgcgtcttccaagggagaaaggcgtgcggagtcaccaccaacttttatttggggaaaacgtccgaaaaaccggaacgtttggtctatgaaatttaagtgtgaaaggttcgggagttgtttttatgcacgagttatgtattagcaccccacgcatccgtcacaaaggacaacaacctttaatcaaatgtgtaaggtatgacttcaaatttatgtattttccctttttttatgttaataggctatgtatggggcatcctatatttaattatctttttgaggtcgacaagggtgtttccctcgctcctacggatcctcat

SEQ ID NO: 23758 - DNA, 491 bp, Glycine max
tagagttttacacatgagttgccaaacttgaaggccatggtctcaattccctgcgaaatatgttttagatgatgtactaccgagtaaggttttggtgtttaggccttggagggcagtcacatatccttgcagaagactaactctaggttagaggatgtatagcagtattcatggatgtttccttccttttcaagcgtgaatatatgtatcatatgtttagaagtggaagtctattttatcaaaatagggttattcactaaatatattattaaagaatgtaaagacaaggatctcactgagtctgatcaaccaggagaaatgctaaagcaaattttttagttggacttagtatagtttacaattacaaagtgctatgagaacctgttcatggttttgatttgatgcttgctaagtgcttgcttgcacatattgtaatgtttttctgcccaacaattagctatgttgcattctttcatggaacaagttgggat

SEQ ID NO: 23759 - DNA, 465 bp, Glycine max
agcttatcaaaccaaagcaacttctatctagaacaacttgaagagctatattagaagaaatttcaattgttgaaatgtatagtaagtcggtcatctagtgacagcataacaaagtcacaaatactagtactaagttgaagaacatattgcagtatcgagtgtttgctggttacatattttcaggttatatacctggaggagttccacaacacatattgcggtcatcaatatgctcaacttcaagaccaatgaaccatgcaccaagtgagacatcttcattagcatatttatgcaaaatcggcctgcaatcataattagactccacatgaaatttctatatgtaagagaatattctatgagaaacatggactgatccccgaactgagatttcctattaggaaaactttaagtttatgaaaaaaaaagtttctttattttaatcaaatcttgcaaaatgagtatttt

SEQ ID NO: 23760 - DNA, 488 bp, Glycine max
ttcagagcccaaaccgactcatgttgccaattttttaataagaaattgtataattaattagtatttactctaaaaaaatatgaaaaactatcgtattttaaaattatcacggtttttcaattgcttcaatagttatcaattgagtatatatggtggaagcaaatttcagaatgcgagaaatgtatgttttatatgatttttgtcgaaacaaaaaataaggccaaagcaacttacattttacaattacttcattattaacttgccaaaaacttgtctacacaacttggtaaactaactgtaactcatgcatttctggaaagttgtctagtatgttccaataagtatgtggaggagatccagttcttggtcacgagatggagctccgaccaccgaatgagaagagaatatgatgcgagaacccattaaatactctaccaaaaagctttttctcacttacccaacccatcatcaaataggctaactagact

SEQ ID NO: 23761 - DNA, 383 bp, Glycine max
agcttttagggttaaagtctcacgattgtcacgtgctcatgcaacaattgttagtcgtggctatatgagacatcttgccaaacaaagtcaggttaacgataactcgcctgtgctttttcttccattctatatgtagcaaagtcattgatccaatcatgtttcatgagttggaaaatgaggccgcaattatactgtgccagttggagatgtattttccccctgctttctttgacatcatgattcacttgattgcgcatctggtcagagaaatcaaatgttgtggtcctgtttatctacggcggatgtaccggttgaccgatacatgaaaatcttaaaagggtatacaaagaatctatatcacccaccaacatctaattgtgaga

SEQ ID NO: 23762 - DNA, 484 bp, Glycine max
  unsure (1)..(484): unsure at all n locations
tgtaggcactttgaacgcaatattctccattattttccatcctccaaatgactattttgtttttgtaccttgcataataggcacttgaagaatggtattcacatcccttanattgaatatttgattaatcacatccatgtttcaacttccatgtgaagtatccataatatttgttactttgagatttttcatcccattgattataagagtttcaatagtgagattttacttcattctcaactagggttcgttccaaataccaatattagtaccatttcccaactttcatttatatccttcctttatgaccattttagaagagaacatacttcaccatgtaaatgatgggttgtgccttactaaagcttccataaactctccccttaagaaatatttagctttgatgactcttgacagtaaaacatttagcatagaaaagatcctccattattgctttcctaacatggcaaagttgaaagcaaat

SEQ ID NO: 23763 - DNA, 411 bp, Glycine max
agcttggttcgaggtacttacccgttgaatatcgaagaacgatgaagaacgaatgaagaacgtccaagaacggtcgaagaacggtcgaaaccttcgcgaaattcttcacggaaaacgttacggaaacgattcggaagcgcctcggcttagattttcttcacggaaacaatttttccaagcaaattcgaaagagagagaagtgcctaaggggctgaacccttttcttcttcacttcctcccctatttatagcacaatatgggaggtggttgccgcccagctcgcccaggcgagccaggttgcttcctccagaagcaacagccttctggaggaatattctggagggcccaagtgggcctgggtgctatatgcacccccatttttactaaatacaccccctctgcttttttttg

SEQ ID NO: 23764 - DNA, 415 bp, Glycine max
  unsure (1)..(415): unsure at all n locations
ttgcatgtctagggtttctagagagagaaaggtccaagttctagagagttttgagagattttgttgtgtgaagatctgcagagaccagagcttgaaacaagatccggtttgaaagcttgaaatgantttgtgagtgattgcgagatcctanaggtgaaggagacatcttcaccacttgtatatttgcaatctttcatcttgttcttctctttgttcttaagaaggctttctggtatggaaagctaaatcctttgtggatcttccctgtaggtacctgatgtaaatatatttctatctatttaatgatgttttgtgtgttctctgggctatctgcttttcatttcagtatgcctttaccttgatcacgtagatgcatgctttgttagggtcattcaataatggaaactggtctgac

SEQ ID NO: 23765 - DNA, 194 bp, Glycine max
agcttgcagccattagaagagaaagaacttgtgattctttgagcgacgaagaagtcctttaagggtgacctattcacctgggagagaaagcttaagacatattccaacaggagtgagatacttaaattcgcagagaaacgactattattaaaaactgctttttgcatgaatctctgaagtatggagtgaatgca

SEQ ID NO: 23766 - DNA, 353 bp, Glycine max
tgagatgatgaaatgttgaaaggtgaaacttcctgcttttattgttgaccacagagtggtacctggagatatgtcgcgggggtcaggaaaccttggggacgtcaggtggggtgctattgcccaaaaccaagcttgaccaatcccgacccaacccgggcatagtcggtcagtgagaacctgtgatgtacctaatcaggcgagctcctgtcagtcaacagataaaaggaacaaagaccacaaagcaaggaggcttgtggtggctggccaactgtgaaacttgactgatatgtgagatatgatctctggtaatcgattaccaagggtgggtaatcgattacaaagcttaaaaatga

SEQ ID NO: 23767 - DNA, 367 bp, Glycine max
agctttgataccttttgaaagatccattcaacctaacagtgaggagcaaatgaaataatttcagtgtctaaaattattgatgcctgataacttttgttctttgttttccagagttttttttattaacttattaatcactgtatggagtatttgtaatgtgggaaacaaatactaaatactaaaataccatatatcacgtggagaagtgtaagtagtcagtttatcatgctttggagttggaacacagttaagttgatggagtgttctcctcattacaagcaggcctgcaaataattaaccatttttcaaaccagaagcttgttgatacacatctttaactgtttcttggttgaagatattttaaatg

SEQ ID NO: 23768 - DNA, 494 bp, Glycine max
tgtaggattatggggtacccatcacatgtggtactaagtggcggtcgggcgatggtgcacaacaagtttttccacatccacaatgcgcgcataaacccaccatcccctgttgcccacctccagctgagctcacgtactcccacgtagcccatatactcatttctctcaacaccgggtccccatcaatcatcccaagcttccacaacatccaagcaaaacaacattcacacagcacaagctatcacagccaagcaaaacagagcaaaggcagaaaactctgccaaaacaccaaccaaaaatcacaggttttcccactcaaagaccccagtaacaatttccttcgatccaattcgttaaccgttggatcgactccaaaattgtactggaagtctatagtgcataagcctacattttgaccgttgggatctactatcagacattcagaactcattctacattactctttccacaacccaacaatacatggatttttc

SEQ ID NO: 23769 - DNA, 439 bp, Glycine max
agcttcgaaattgtggatgagccaaccatgaaattgggacaatgaatcttgtcctgttttcaccaacatacactgcaaagtgcccttttggcacatcttctggaagaccaccctcttcattgaagccctgttgctgctttttcccaaagctcgaacaccttctcacaatttgctttatcacatctgctagggagagctgattggatttttagatggccattgtgaaattgattgacagtactctttgcacaccttgaagttgttaactttgaaagggtctcttgagggcgctgaaagtgtgtgattcatggggcgagtttggagaggctttatttatcgttgggacattgggatgggtggaaaatagaaacttgagttttaaaaaaaacacgggtcacgttgatgtggggacatgtatcataccacaccctaatgactc

SEQ ID NO: 23770 - DNA, 493 bp, Glycine max
tatgtgagagactctataaattactctagctggaacacatgacctcgcaaaatgccctgacttcccacattaaagcaggtgctttgtacaccgacgccgtgggtgtgatcacgaccacccaatcacccttcttacattccgcattccctaccccttctacctacctccccacacctaaaactacctccacctgttcctgcaccgccaatgttgtccttcccgggggcgcagaacctcaccatgtgtccaaatgcgccacacctaatgcatgatccgactccatcagcacctgaaatggctacaatgccggcgtctcctggcacacaatctcttatgaggtggacgaacccctccgatttgaaacaacctccgccgatggagccttaaccgacaccagaaataccgctcctgttgcaatccctggttaggggtacaaacttgccaaactggtagcacgcggagccgcctccgacattgggcctggcgccgaaac

SEQ ID NO: 23771 - DNA, 357 bp, Glycine max
agcttagaaatcaagtgatcatcgattccaaaacatagggggagtgaacgcacaatatattatgcatatacattgcttgcttgtatcttgatttcaggacttatattgtcatcatcaaaaagggggagattgtagaagcaaatgactttgatgttttgatgatgctcatgatgatttgatgcaaatgcgcttttcaagtttaaattcaagacaatgattcaagaatacaagacacaacatcaagatgatcactagtattttaggaagggaattcctaattgatatagcaaaaggtttggccaagtaatttaagttaaaaagtgtttttcaagagatttactctctggtaatcgatta

SEQ ID NO: 23772 - DNA, 451 bp, Glycine max
tctcccccaattttctataaatagggggagaagtgaagtgaaaaagggttcagccccttaggcacttctctctctttcgaatttgcttggaaaaattgtttccatgaagaaaattcaagccgagccgcttccgaaacgtttccgtaacgtttccgtgaggaatttcgcgaaggtttcgaccgttcttcaagattcatcgttcgttcttcgttttcttcagtcttcaacgggtaagtacctcaaaccaagcttttcaattcattctatgtacccatggtggtccacatttcgtttcatgtatttttattctcgttttcatttactttttatactcccttttgacgtgcttaagccatttatttaagtcatttctcgcttaatgtaaaaataaaataaatttccaccgatcgtttgaattgtatcatccggtaattttggttaaaatgaattc

SEQ ID NO: 23773 - DNA, 422 bp, Glycine max
agcttgttgaaattgccatgtttggatgatttagacatacccattctgttttagggtttttgtgatgatgtttgtgatgtttatatgctgagatttcttatggaaaactgttagaggtgaagggtagagttaacttagggttagaaagtgagaatgtgatgttatgagtggaaaaagagtgaggctttgagagttggaaggttaagtctgaattttgtggtaaatggaggttaaagtgagttaatcctagcttgaaatgtcatttaggacttatgagaaaggttaggctgtgctagagagaaaaacaaatgaccaaagtgaacaaagagccatttctaggacaaatttgggtgttgaagagtcaaactttgattcggtgagattttaggtgtaaatccagttcgaacaagtctaaattgatg

SEQ ID NO: 23774 - DNA, 497 bp, Glycine max
tgtagaatggctagacatgatacatgtcatgacttggtttggatcaaggataaaagggatgccccacattatttccatgacacaaatgcaaaaatgatgatttggaaattttatgcaaaactggttatgcatgcacctatgcggacactcaaatgtcaaatttttatggtcatgtgatgctagggctcaggattcatttcctctattttaaatcaacccaatgtttccaaaatatgttcttttatcaatttgagcattcatccgagtccatttcgggcgtccggggaaatttcatagcattcacccttcaagtgtacacattttttccaaaaactagttatgatcagtgaatttttttcaaagaaaagttggaagtcatctcttttcaaaagcatgttggtttttcagctagacaacttattttcttttttctccttcatctttatttgcattttttttctcttatttgctctctttttcttttcactttcttttct

SEQ ID NO: 23775 - DNA, 471 bp, Glycine max
  unsure (1)..(471): unsure at all n locations
agcttaaagtacacctaaaattttttgttctaccaagccactattagttttaaacaaattagaaaatttgttggtgcttgtttgctcactaactaattcttaacgtctcatagatgattatacaaatgaagtacttagtcttttctcttaggatatacaaagagttttgagagctttataaatttttaaatttacatagaaatgacttagaataaaaaggaaaaacctatttgaattcttagcacattgattcatcacttgaactcttcaaagcttctcgtatttatagacaatcttcaacaagtatttgttgtctctaaatggcttcattgtctttgttgaaggcttgtgtctgaagaagtgtttgttggagtatttaatgctngcattaaattcacaatcctttacattctaaaacaccaactccttttagctttcttgaagcacactttcacataagtcaatgtgctt

SEQ ID NO: 23776 - DNA, 436 bp, Glycine max
  unsure (1)..(436): unsure at all n locations
tgtgggattttgtgatagtgattttgccggagatgttgatgatagaaaaagtactaccggatttgtattttttgtgggtgattgtgtttttacatggaattctaaaaaaaaaggcattgtgacactttctacttgtgaaaccgantatgtagctgcaacttcttgcacatgtcatgccatttggctaagaagattgttggaggaacttcagttgttgcaaaaggaaagcacaaagatctatgttgataatagatctgcacaagagcttgccaagaatccggtgttccatgaacgaagtaagcatatagatacaaggtatcatttcattagagagtgcattaccaagaaagaagtagaattgactcatgtgaaaactcaagatcaagttgcggatattttcaccaagcctctcaaatttgaaaattttcgaagattg

SEQ ID NO: 23777 - DNA, 324 bp, Glycine max
agcttgaagggacactcatatttcctagtcccaatgtctcttctgataaattctttttttctacacctatactcgtcagtcttttcacagccaattaacacaaacatagtccttcctctactacctgtgtttgtatccgaccttaaaatcaccgtcacaaatctaggggtgggtacacgggcccaagtccatgggctggcccacggggcccgccgttcgcacgggttacgaaccaatttttttaaacggtccatggttatgtcacatttttgggcccgccccgcttaacccgcggactatgcgggtttggcccgcggggtctgc

SEQ ID NO: 23778 - DNA, 492 bp, Glycine max
tgaacaattcatactcaaaatgattgttagtcttggcaagcttggttgctaggctctaccatcaaaaattgcatgggagcaacttcatgtttttgcactgcatgcatttttgttgccttttcctccaacaccttcattttctacttttccagctccttatgtctatgccgtttcttctccaatttttggtcaactgcaacttcaatgcttttctttaaaaacttcttcaatgtaaatggtatcttctacaatttttcttgtccaagaaaaactcaaaacaatggtgatgtggaaaggaaaaataaatccttacaagagatggctagaacactgattagtgagtatagcatacaaaactatttttgggaagaagttgttagtatagtctgctacattctgaatagagtttttatcagaaaggttttgagcaagactctttatgaacttgggaaaggaggaaaaccaagtgtatcttacttccacatttttggt

SEQ ID NO: 23779 - DNA, 310 bp, Glycine max
agcttgcacttgaggccatgtttggatgttttatacatacccattctgttttaaggtttttgcgatgatgtctgtgatgtttgtatgctgaaattgcttgtttaaaaactgctagagatgaaaggctacagtaaacctagggttggaaagcgataatgtggtgttatgagtggaaaaagagtgaggctctgagggttggaaggttaagcctgaattctatggctaatggaggttaaagtagagtaatactatcttgaaatgttatttatgacttgggagaaagtctggactgtgctacatagaaaaacaa

SEQ ID NO: 23780 - DNA, 394 bp, Glycine max
tagcaatagcaggaaaagaatggaatctattggtctcacatttagtagttttccctccatggagtacttgtgaatttgcttaatttagtgcctagatgataattaaagatatgtcacgtagtataatttggttgtatatgttagatatccttgatcacacggaaagagtgaatttgtaaaggtatttggatgtatataatatataatcttgcgatgatgaggcaacaaatcgtctttacatgttcaccttcccgtggttgtaggtaaatggaatagaatttatccagagagatgggttaatgagatattcttttaacatactttttaattttaatatactttttattaattacttaaaaattatttaaaatttcaaaatacatagagatttatt

SEQ ID NO: 23781 - DNA, 166 bp, Glycine max
agcttgaagtgagatagcgtggaatattattcttcctacttttgtttgatgaccacagaggttgtacctggagatatgttctgggggtcacgagaccttggggacgtcaggtggggtgctattgagtaaactcaggcttgaacaatgctaacgcaaccttgtcatt

SEQ ID NO: 23782 - DNA, 479 bp, Glycine max
tgagggggaatgtgttggaaactgtttatattcctaggaaataatgtctaggatagtggaatagccagattcatgtatagtggctattagtgttatggggagttacagttcttattattattgttgctctttaatgtaaatcaatctgaaatgattataaataaggggtactgttgactgcttctaatttcatcatatattcttctcttcaacattagacttgatcttaaaggggtctttggacttccgaagggtcaatagaccaagtccctttatcttatcagaatacaaatgaaccaagtcaatgaaacttttttagtcaaggtcttcacagtattcctcaagagctatcaattttacattttgatgatagatacacaatttcctgttgttgatgatagattatagaatactcaagtgaatatcactttacctaggtaattgcacattagatttaatttaaacaatgtgttcatatg

SEQ ID NO: 23783 - DNA, 334 bp, Glycine max
agcttgaacctccggttgtgcaatgctattgaaaaattatggtacacttgaacttgaatagtcttcaagggtcactctccttggctgctcagccatgatagtgtctcctctaactcctgtatgagattgcccatgagtaggaaaactagaagatgccttacaagatcgaggttcttctcctgcagttgttgctgcttctaagtcctgcaaaaattttctaattctctatgcgtttcgattcctgcaagtagcgttaatctccaaatctatgggaattaaatcacctacagcatatctcctttgcatacaaaacaagcagagcaactattatcca

SEQ ID NO: 23784 - DNA, 381 bp, Glycine max
tgcttctacattatgggtatccacaccttttgtcagccagaagcaagcgagcccgttgacacacagaaactaacgtcgtcatctgtacatttgtcaaccagagacggggagtccgatgacatgcagagatactttatggttatctgcaccttttgtcaaccagaggcaagcgagcccattgacacatagagacaatgtcgtcatctgcacctttgtcatccagagacggtgagtccgatgacatgtggagataccttatgggtatccacaccttttgtcagccagatgcaagcgagcccgttgacacgcagagactaacatcgtcatctgcacctttgtcatccagagacggcgagtctgatgacatacggagatacctta

SEQ ID NO: 23785 - DNA, 423 bp, Glycine max
agcttagaagaaatacattgagtttgaggtccctaaagattgtcgacatgtctaaaatttggccattacaattagcagattcaataattatttcttcaaacagaacctttttctcaaagaaaaagatgatgaatttttatatttgcttctttcatgatactttacatgcactatgaaggactgcttcataatcacaatattgcttcctctgctagatgtcacaaaacttgaatccttaaaggaattctttgatccaaataagctcacaagtggttcttgtcggtcttatattttccaatcaatgttggatatctcaagatttgaataaggctctggattagacaacaattatgatttggatccatgggactatcaatgggtaaacaatgttaatttcttaagatagtcgcttcttttagtatg

SEQ ID NO: 23786 - DNA, 478 bp, Glycine max
ttgtgattaaattcaagtccaaatgtctgcatataggttttaagttttaactctacctactacctgatgtaattttattgtttatttcaaaaaaatttctttttaaaaaaaatatttaattacagaatattataaattacttataactctcaatctctttgtttctggttttctttgtactggattaatgttcatttgacttattcaaaagttggagattttgataactaacataatttgttttaaacgatagagattttgataactgacataagttgtctttgcatgggacactgccaataaacgttttagtttagtgactagcatgccccagcagcaacaccacctagttcctacctgtcttgctgctcttgctctattcgtttaccacatgctttgggtgcagttatccttgtttttttttatgcttgtagtcttcaatcaacaaagcattagttactcatgcatatcttatgac

SEQ ID NO: 23787 - DNA, 352 bp, Glycine max
agctttctgaagtgttctggttttctaaaccttgaaaacttgtgctattcatcttttcattctcttctccctaggccaaaaagaattctccaaggactaaccgactgaattctttttgagtctttcttctccctttaccaaaagaacaaaggactaaccgcccgaatgcttttgcgtctcccttctccctaggcaaagaattgcaacacgacacaggctgaaagattcttttgattcttgccattccctaatacagaagccgccaaaggttataccgcctgagaattcttttgcctccccatacaaaaggtgtacaatgttaaacagatggagatcgatgtcttaacacact

SEQ ID NO: 23788 - DNA, 490 bp, Glycine max
tgcaggtgaatccgatccattgggagagttgatgaagatattgttttatgtgtaccagaatccagtggaagtgccgtgggaggcgaaccaatttggacttcctgatattggggcaaaattttacatcacacatgcagatctagcagaaataatatcaggtgacaagtgtttaaacatagcgatactacaattgtggaccatgtaagtcattttcctacaacctttatgtttgattacctgataaccattatttttacattcaaacatttaaaataatcatgacttgtcttcgaaatagatttatgaatgagtgcggtagaagcaaagctgatcagtcactatatggtttgctggagcctcaatctatacaaaatgctaaggaaagacgtcaacaatgccaacaatacattgaaacatgggtcaaggaatcacaaaggcagttgtatttaggagcttacttgaatcagtaaggtcaattgttctttgaatt

SEQ ID NO: 23789 - DNA, 504 bp, Glycine max
agcttcttatccaaggctcatcttggtggtgaagctccttcttccatgacttattccctagtggatggcacctcctctcacctcttctcctttgtcttccgctgcatctccatggtggaaaatcaccattaaaggacctcattgaagctcaaagatccagcctccatagaagccccacaagcaagcttccatcactgcctttgaggatcgaggatagacgaacaaagcacctaagaaggaaggaggttccattggtcaaggtgacctggggaggtacatcaggagaagatgccacgtgggaattagagagtcagatgcaagccgcctatccatccttgtttgagtcaagtaaatttcggggacgaaatttctaaaagggtaggagagttgttacaccctgagatattataagttattttcgatgtttaattgtatttatgtgttatttgactatatgatagacttgaatgagttaagtatgccttgacctaaatcatgtgtgaa

SEQ ID NO: 23790 - DNA, 429 bp, Glycine max
tgtaggcctaaaatcttcttcatcaatggattcctttgcttcttggaagataaatggcagcggaatggagaaggaagagagagaggagatgccactttaaggaaaagattagtctagaagaagctcaccaccataggaggccatggataagagcttggaggaagaaggagatgaatgaagggagaaggagagaagaacacgaaatttgtgctctaaaagagctctgaaatctgaagttaatattcaaatgatcaaagttcaaaaaaatgcaccacacatgacctctatttatagcctaagtgtcacacaaaattggagggaaatttgaatttcaattcaaatttcacttgaatttgaaattgaatttgtggagcccaactttggaacccaaatttcacttaattatggattagggaattttagttatgg

SEQ ID NO: 23791 - DNA, 302 bp, Glycine max
agctttgtagaatgttgacaagataaagggcaatcggtcaaaacataaaatgttcctatagatgaagctgtgggaatgtttatgcatatccttgctcacaacctagagtatagagttgtgcactttagatattgtagatccatggaaacaattgagttgcaatgcaagaatgtcctgcgagctgtcttgaaagttgacacagaatatatgaagttctatgagtataatctagagggctcggcggaaaacaaatggctatggcctaaggaaagattgtcattatgtagcaattatcatgtact

SEQ ID NO: 23792 - DNA, 381 bp, Glycine max
tttattacataacagatttaaccattttacttattgaaatgagccaataagaacacataggagtcataaacccaaataaactgaatagaagctcatccaaggattcagttaccaagtaaacagaaattaaaaacaaatcgatgaaagatagaaaagacattcagcgatacatacaggacggattgaagaggaaaatgagaaaattgtagcatgcgtggaaagacacaaattaacctgcttcccgaaagatccacaaaaggtgaatgtgtaaaaagccatcatgatatttcttggcggtcttaggtaatcgtgtaatatataggacctgccattctgaattgaagggaaagagatatatatgtgaacactcaatgatgatga

SEQ ID NO: 23793 - DNA, 463 bp, Glycine max
agcttgtaaggctttccgtgggaaatgatagtgagactcaacttggataccaaccttgtgctataaaaattgcagcaagacccactatccacaatgagagaacaatttttgtttaaaaccttacatcttgtatgaaagatgttctctctttgggtttggattagtgtcacaacctacccttcggcgggagggcgaaaaggtcaaaataggtgggccaaggagtttgtctccaagggagaaaacaaatggagtcgccaccaatgtttattcgaggaaaattttagaaaaaccaacaagacaaaggtatgagtattttgaacatgagggttcaggagttatttacacacggggaaggctataccaccccacgcgtccgccacgaggaacgacagcctttaatcaaatgtgaaaaaacatgacttcacatttattttaattctcccctttttgatgatttctatct

SEQ ID NO: 23794 - DNA, 452 bp, Glycine max
tatcccatgcttctttggctgtcgttgcgttggatatcttctcaaatgtatcttcatccaccgattgattaatgagaaaaagagctttcttgactctctttcttgactccttcaacgtctcctttacaccttggcttaccaaggcttcatcttgctcctcgaagccattctctacgatatcctacacatcttgagctccttgatactccaattatcatagctgttctttgagagcatcggcatttggaaaggaaaacctccattcgccatcttttgaggatcttgaagctctgataccactttgttggaaataaggctttttatgtttaggaaaagtgtttatgaatattggagactttgaatagaaccttgatagaaaggagaattctttatggaggagagaactttgtatttttgcttgataccaatgtgtaggattacatctctattta

SEQ ID NO: 23795 - DNA, 414 bp, Glycine max
agcttgtataattattttaggtgtttgattcaggttcaaacaagcagtctctttgatgatctacataaaatcaataaggaaattctatgcttcattttatttaattaattggttatttttttgtatggttttaaaattttaggctttcactaattctgatttcatctgttttcgtgaattagatgtggactttaagtaggatactgagataaaagccctgcagattagtactacagaatataaaccctttttaattccctgtgtaccttagattacaatatttaatgtaacctcttccctatcttttcttcgtctctgcctctcccctgtttacataataaaaaaacattttctgtcactgtcttatgctcagctacagaaatgtactctattacaggtaaatgccatgttgaa

SEQ ID NO: 23796 - DNA, 455 bp, Glycine max
ttgagaatttgagaacatgacaaaaacaagtgacagtaatatccaagatatacaaatgggtgttggtcaatgtaccacatttaatagtacaaactaaaagaacaagaaaaacagaccaatttctaggcgtctcagaaaaaactttaaacaagacagttcacctaataagtttttggattagtagtaatcatatttgtgtaaataaatagcttaccagagttcattggactccatcgctggaaccgaaaaggagatggtatgttgagaacagaagcaccagaaacactgttatgcctggaaatgggaagatattgcctccggaaaaaccttggcatccaattgccaatacatgataaagcacaaagaagaagaattaaagaaagcaacaaaaggggcacaagaacaagaggatttatcttcatctgaaaaagctccaagtcacgaagcccaaatct

SEQ ID NO: 23797 - DNA, 430 bp, Glycine max
  unsure (1)..(430): unsure at all n locations
agcttgtgcaaatcaaatcactcctacatttcatctctagcatgcattttctttctttacccactcctcacgtttggttttttaggggaaaaacaccataactaaacgcgccgcaagggatccctatcgcaccagatccaaatctagaacgatgggtgatcaagaggagacgcaggaacagatgaaagccgacatgtcggctctgaaagaacaaatggcctccatgatggaggccatgttaagtatgaagcagctcatagagaagaacgcggccaccgccgccgctgtcagttcggctgccgaagcagacccgactctcttggcaactacgcaccatcctccctcanacatagtaggacggggaagggacacactggggcacgatggcagccctcacctgggatacaaccgagcggcttacccttatgga

SEQ ID NO: 23798 - DNA, 481 bp, Glycine max
tcttttggaccttgaacaagcaatcaactcctctttcagaaccatgctatgtgctcgcgactggtccctttcttcccttcgcaactcgagttcattattgctaccccatagagctccgcgaaatttgttccggccatactcttccttgcgagccctcttggtctcttgttcaagggctcttgcggtaattgcattctcttcccgtaacccggcacactccttccgaacgtgtgtagcagccaacttgaacttctccttggcgagttttgcctttcctaactcgcttttgagagcttggacttcttcgtcctcttccggtgcttcaaaattctcttcgctgacgacttttaacttggcgagccaatctaaacctcgtatgcgaactttcagccattcgtggtacccaccaatgatgccattacgaatgcctctaagctcttgatctttccttaacggggtttcccatgccttatggattctt

SEQ ID NO: 23799 - DNA, 422 bp, Glycine max
  unsure (1)..(422): unsure at all n locations
agcttcaacatcagaccacttccagggtgctggaactacttcacatggacttgatggggcctatgcaagttgaaagccttggaggaaagaggtatgcctatgttgttgtggatgatttctccagatttacctgggtcaactttatcagagagaaatcagacacctttgaagtattcaaagagttgagtctaagacttcaaagagaaaaagactgtgtcatcaagagaattaggagtgaccatggcagagagtttgaaaacggcaagtttactgaattctgcacatctgaaggcatcactcatgagttctctgcagccatcacaccacaacaaaatggcatagttgaaagganaaacaggactttgcaagaagctgccagggtcatgcttcatgccaaagaactttcctataatctctgggct

SEQ ID NO: 23800 - DNA, 474 bp, Glycine max
tcacaacatgtggattatcctgcagcacattaacatcctgccaactaggtatattgtacagtcttcatcagactcttcagtcaaagagctatcctcaccttgcctcgtgatatcactgacgaccaaattccaagaacgatcctacatggagtccttcgttacatatgtatcatatatgccataattaacccctaccttaatgcaagattctaccataacttgtgccttgacttgaaatcatactctatcgacatggaaatgcatcctattagatgtatactcgttcgcgtacatatggtccccataggagctacattccgatttgtaagaatacagaattgcgttcatgagtagggacaacattcaatttaacccataccaaatggtcatggtctaccgggcgagcgagaattgcatataacattgtctacagaccgctcgacttcccatgctttttttccctcacaaagctat

SEQ ID NO: 23801 - DNA, 383 bp, Glycine max
agcttttaatggaagtcaagagcacgaaactgcgcggacaccgttaactggtgagcaggtcttccagcgggttgaacaccttaatactgtatttggaaagacccaaaagaaggataaaagtaagagttgcatatggaagaaaaggtccattttctttgatcttccgtactggtctgatctagatgttagacattgtattgatgttatgcatgtagagaaaaatgtatgtgacagtgtcattgggacactccttaacattcagggcaagacgaaagatggtctaaatacccgtcaagatctagctgacatgggcatacgatcgcagttgcatccaaggtctgatggtaaaaaaatatacttgcctccagctggtcatactttat

SEQ ID NO: 23802 - DNA, 482 bp, Glycine max
tgtgcaaatcaaatcactcctacatttcatctctagcatgcatcttctttctttacccactcctcacgtttggttttttagggaaaaacaccataactaaacgcgccgcaagggatccctatcgcaccagatccaaatctagaacgatgggtgatcaagaggagacgcaggaacagatgaaagccgacatgtcggctctgaaagaacaaatggcctccatgatggaggccatgttaagtatgaagcaactcatagagaagaacgcggccaccgccgccgctgccagttcggctgccgaagcagacccgactctcttggcaactacgcaccatcctccctcaaacatagtaggacggggaagggacacactggggcacgatggcagccctcacctgggatacaaccgagcggcttacccttatggattgccgcccaactattcaccacccgtcttgcaagaagatgcgggccacattgctttt

SEQ ID NO: 23803 - DNA, 303 bp, Glycine max
tgcactgcatgcatgctagccgtgcccaaagagccttggataggaggtagaaatgcgatgccacgctacatcgacaaacttataacactggccagtatcctgacaaagtatggtggattagcttacatttaaatcaatggtgggacccttgcaaagatattctgatctacatgcctaccttaccccccaactatatctggatataatggatcaccactagagattttaattattcatatctcccttacctacccagaacaaaactactctaggtcgggtgctcactatccgacatactatgcc

SEQ ID NO: 23804 - DNA, 409 bp, Glycine max
actatataatactcccgctcatttatctcctgatctctccataaccattactctaaaaaaaactccacaccactctcaatttccagattcaactttaaaaaaacaattttgttgggatgcctaagcttacctgcaaatgggctagcttaacgcgcgtaaaagacttctggcttaacgccagtaatgcttgctcaacctggaggttcaagcgatgagcttagcgaatttattccttctgaacacgtcattgacaactcatctacttccaaaatcttatacgcgcttagccatgaactgatacgctcatcagaaagctcgttaacccataaatttggcttaactagcggcttaaaaatagacacttacaccaaattttgactaattaattctaaaaatgcaaaggaatgat

SEQ ID NO: 23805 - DNA, 337 bp, Glycine max
agctttgagcaacttcaaacaacaattactttttactcggatgtctgattgagacccgtaatatctccagacgctcgaaattgaataccgaagctctgagcaaattcaaacgacgataagtttttactcgtttgttcgattgagtcccgtaatatatcgaaacgctcgaaattgagaaccgaatctctgagcaaattcaaacgacaataactttttactcggatgtttcgattgagtcccgatatatccgaacgctcgaaattgaatggtgtacctttgagcaaattcaaacgacaataactttttactcggttgtctgactgacacgcgtaatatt

SEQ ID NO: 23806 - DNA, 424 bp, Glycine max
tcaacattcaatatcgagcgtttcgatttattactgggctgaatcagacaaccgagtaaaaagttattgtagtttgaagttgctcagagcttcaactttcaatatcgagcgtttcgatatattacgagactgaatcagacatcagactaaaaagttattgtcgtttgaattatgtcagagcttcggtattccagttcgagcgtctcgatatattacgggactcaatcagacatctgagtaaaaagttattgtcgcttgaatttgctcaaagcttcaacattcaataccgagcgtctcgatatactacgggactcaatcagacatccgagtaaaaagttattgacgtttgaatttgctcagagctttggaattcaagttcgagcgtctcaatatattacgggactcaatcagacatccgagtaaa

SEQ ID NO: 23807 - DNA, 850 bp, Glycine max
  unsure (1)..(850): unsure at all n locations
cataacttgttatactcgtgataacccccntcactttactcatctacccttctcntgtatacttattaatnttgttgttctttcactcttcctacaagtatgcntnacttgtagtcgttctcgtgcctacggaccctcgatactatacagtctagcctgctgcatgctagctatcgaggcagaggtagatttaatactccactctaataaatgttgactgaagacgtctaatgctgtgtgcatactaggtatgattaaacttaattaccgcgcttcattgtttctttgctgcacaaggtcctaatcaatactaaagagtgagagaatgggtattcttatcactgacagtggatcaaacttacatttagatattccacatgactcacacattgtgaagcgacataactttgtattagcttatacttcatatgtctattatacaacagtccaggggttctgttagtacaacattattggccctgggggaaataacacaacagcattatttgtcgatatgaagtccgaatcagtcgaccgtggcgactagatactgttcattgggaaaaaactaaccatttattctattaaaaaaccccgtggtttgtcctggccctataaatgatgcggtgaaaatcttttttgtccctggaaacagaccttaccagaacactgtggacccttcggttctttcgaccaatttggaggggtgaggaacccacccacattcccctatgggttctgttgggatccgggccgcaacctaaaaagaaaaaatgaatttttatttgcaataatatgttccccctccctactagttaaggtgggaacttctccttcctcaaaggaaacc

SEQ ID NO: 23808 - DNA, 493 bp, Glycine max
tcctcaagtgtcacattctctagcctctttgttgagcatctgttgagcagataggctgttgttgacactacttcaccccaaaactcctttggcaagtcaaaattccttagcatacacctggtcatgttgactatggttctattgagtctctcagatacaccattgtgttgtggtgtatatgaaggtgtgatctcatgaatgataccctcatcctcacaaaatttctcgaattcatgtgatgcgtattcaccaccaccatctgatctgagtctctgaatcctgtttccactttgtgtttttaccatcaccttgaatcttttgaaggtgaaaaacacttcactcttccttcttagcaagtagatccacacttttcttgagtaatcatctataaaggacacaaaatatgaactaccccctagagaaactttctcaaaagggccacacacatcagtatagaccaaattcaaaactgctgaaaacttagttggtactt

SEQ ID NO: 23809 - DNA, 969 bp, Glycine max
tgcagagcgctcattgatgcccttgctaggtacgccggcgatcactcttcagtcagacctagctaggcgtgcctgcgcttctttgtatgaataggagttagacatagatatctttgttccgggccctcgcgtattgctttgtgagaggcggacaattggcatgtacctcattatatatactttcagtgacatgcagattgcgacaaatcgactgactgtaggagtgatatttcatgcacgagcttgcgttcatgcaatgcatcctgatgcatgtacactttaagttgttcatatttctgatatgtctatgatgactgctagaggcttgatgtataatagttaccgcttatttgtaaaatcaacaccatatggtctgcaaatatcttgtgggctatctatctaatatagtcgcatgtcattaccaactacattgtgcttgctgttcgtgggaatatatcacaagctattcatgcgttctacgagtcacaccccgtttattttttgtttttctggaaatagaaaaaatcaacctctcgtcccaccttgttcgtaatacattgtagggtaaggccacttattctttttcagctctgtctggtgtttcaactatccaaacctcactgtatgcttcttttcaccatattttattaactttgccttattgctattttatctaactccggtcgtggattttctttaacctcgcaatcaatcacgtattcgtatcgaaccgatctcattgcttgctaaactttggccctcttcttctgcactttatagatatctatgttcacatcacaaatctgtatcattgcgtgtctctaggtatttattaattactagatggatcaacgtctgcggcgctcttctttgacactactctatatgcatcttcgtaacaatcgacgtgtctgtatcacattctcactgcgtgctctttgacgtacgtcgaaatgtttctatcttctt

SEQ ID NO: 23810 - DNA, 443 bp, Glycine max
tgaccaatcccgacccaacccgggcatagtcggtcagtgagaacatgtgacgtacctaagcaggcgagctcctggcagtcaacagataaaaggaaaacaagaccacagagcaaggaggcttgtggtggctggccagctgtgaattttgtgtaatatgtggattgtggcctctggtaatcgattaccaagggtgggtaatcgattacaaggcttaaaattgaagacagggggctaagatggtctctggtaatcgattaccaaggggtgtaatcgattaccaggcttgaaaacgaggtcaggaagctagggaagcctctggtaatcgattaccaaggggtgtaatcgattaccaggcttaaaaagggaaatgggagatggtggaagcctctggtaatcgaataccagcttgggtaatcgattacacagaggaatgggtcactagt

SEQ ID NO: 23811 - DNA, 153 bp, Glycine max
agcttatcaacatgaagacgtgggaatttattttttggggacagtatccgataagcagtcaagtattgtgctacaatcctttgctaaaggggagaaccctcttccctcattttttatttgtatcatcaggaacaatctttgtcccggtgtgat

SEQ ID NO: 23812 - DNA, 502 bp, Glycine max
tgcagatgaataacactcggagactctcacgtgttcctcctcacaaggtagctatcggatgcggatggatgcacaagatgaaatatcgggctgatggttccatacaaaggtataaagcacgcttggtggccaaaggttaccctcaaatggaggggttagactacctcgacacattctctccggtggcaaaactcactaccggtcgcgttcttctcgcgttagcagcacaaaatcactggcacttgcgacaattggatgtcaacaatgcgttcctccatggagagcttgaagaggaagtatatatgcaaattccacctggacttgaaactgaaaacccagagcttgtttggcgacttcaacggttctttctacgggccttaaacaaaccccctccgacaatggtttacccaaactataaacttttcttagatttgccatggggtttctaaaatccaaattcggaccaaaaattccgggccaaattggatttttcccggccatg

SEQ ID NO: 23813 - DNA, 362 bp, Glycine max
agctttttggagtagaaacatgggaccaactcattttatttcaaaaaggaagtcgtatctagtcaaggtcttagagaccatacaagtttcctaacgatttctaattatgtgggccattaagtctatcatatgctgacaatagccgagaagcccatgaatctcttcggggggcggagtaggtgtctgccatcgccttggccttggctaacaatcggggaagttcttgactcccgttcaaggtaagagcaaaccgatccatccacatggttgcctcttggtgtaaagagtcgatcacccttcctctagcctctttttccgcgtatacttgggcatattcgtccgcaatcctatgctcgtgggcc

SEQ ID NO: 23814 - DNA, 421 bp, Glycine max
tgtcgaacttcattttggaatctcgacatttcttccatctgaatgtagcccttggctcgctcccgtaactcgtccatgctgctggaaagcttcttgcacaatctgttagcaagtttgccaagttgtagggctagcaacatagaatgcaacgccacctcaggattaaggttcctaatttggacaacaagctgaccaaatctgcccaaaatttgtagagtggctcttcgtctacctggcttagactagcaagggcggcagaagtcacatggtgcgatcagcttgtcgcatattgagagctgaaatgaccgacaaaggtatcaaaactatcaaaaggtcggggaaggagtgctctataccacgtcaatgcagctcccttaagggacgtaaggaagaatcaacataagactgtgttttcattaat

SEQ ID NO: 23815 - DNA, 391 bp, Glycine max
agcttttggggttgagttagatccaaacccacattctaagatatattgtatcaaatgtttttagcctatgtaaatactaaatatgattaaatttaattttagtccttcattttttttttgttgaatatggtcctcataaattttaaattttttgaaaatgggttttgttatcacttaatggtgatcagacttacatttagatattccacatcagtcaccattctgtagtggcatttttttttattagcaaaaatatcatatatatattagaaaaagtaccaggggtactaagagtacaagattataggtaggtaggatgttaagagtacaagattataggtaggtaggatgttagatccactgttgggatccaagctagatactgttacat

SEQ ID NO: 23816 - DNA, 492 bp, Glycine max
tagaaactccacctacgggagaaacccacccacaattattgtagagaccagagacaaatcaaaggatttgaggtccaatcccaaaaagaaaacaaggtcccccgtgatgaggacatgacaaggactaagggcaatgaacctttacaaggacttggaagacctatggcaagggctataacaaagaaggccaaagaagctcttcaacaaatgttaaccatgctatttgaatttaggcccaagttacaagtggagaagcttcggattgtcaattacaccatgtttcacgaatagtagagggatccacctttgttgagtggttttattagcattttgttagttgaaataaaggcccaaacttgagttatagtggttgtcaattctctttggatttgcaccacctaagcttgttttaatttgaagaaattaaggtttaataaggtggaaactctaggcttggggctgcctcttgggtggctaagagttgcacatttt

SEQ ID NO: 23817 - DNA, 485 bp, Glycine max
  unsure (1)..(485): unsure at all n locations
agcttaaaggaagtgaaagaattagtatgggcaaaaatgtctccgcattgattggtaaatctgttccccaaatccctgaaaaatgtaaagatccaggtacattcatcatcccttgtattatagggaacagtaagtttcacaatgccatgctagatttaggagcttctattagtgttatgcctctttctatttttaattctctatctcttggtcctttgcagtcaactgatgtggtaattcatttagctaatagaagtgttgcatatcctgctagtttcatagaggatgtcttagttagagttggtgaactgattttccctattgattttttatattttgaatatggaggagggattttctaagggatcagttcccattattttatgcagaccttttatgaaaactgcttgaacttngatagatatatatatgcacgcacactatctatggaggttgatgatataactgttcttttaatattcttg

SEQ ID NO: 23818 - DNA, 486 bp, Glycine max
tgcctcaaagaggttcaggaaagacaatgtctccgaaagaactaattccgctccagagtatgacaaccaccgctttatgaacgctgtacaccatcttagcttttaagccattaagggatggacgtttctcccggagcgactcgtccagctcagggacgacgagtatactgatttccaggaagaaatagggcgccggcggtgggcatcactggttactcccatggccaagtttgatccagaaatagtccttgagttttatgccaatgcttggccaacagaggagggcgtgcgtgacatgagatcctgggtaaggggtcagtggatcccgtttgatgccgacgctatcggccaactcctaggatatccgttggtgttggaagagggccaggaatgtgagtatggccagaggaggaaccggtctgatgggttcaatgaggaagccctcgcccagctgctatgtttacccgggcaggattttgccccgac

SEQ ID NO: 23819 - DNA, 331 bp, Glycine max
ggcctgcttgcttgaggaatcttatggaacagataattactccgcactcactgccggactacacacatgagcccacttacaggtaagggacgagtttatcgcaattggggttagaatgcacatgtgtatggatccttagaggaatacatatgaggaatattttgggaggataatggaattataatcattctttgggaatataacttccattttgatttgcctgatggactaccatgacgtactggtgctatttcattgttacacttgagtgctattgatgttatagagagttcgaccggtgcttataattcattgtttttagtatgattgt

SEQ ID NO: 23820 - DNA, 446 bp, Glycine max
tataaacttcacctaccggagaaactctccctcaattattgtagagaccagagacaaatcaaaggatttgaggtccaatcccaaaaagaaaactaggtcccccgtgatgaggacatgacaaggactaagggcaatgaacctttacaaggacttggaagacctatgtcaaaggctagaacaaataatgtcaaagaagctcttcaacaaatgttaaccatgctatttgaatttaggcccaagttacaagtggagaagcttcggattgtcaattacaccatgtttcacgaatagtagagggatccacctttgttgagtggttttattagcattttgttagatgaaataaatgcccaaacttgtgttatagtggttggcaattctctttggatttgcaccacctaaacttgttttaatttgaagaaattaaggtttaataaagtggaaac

SEQ ID NO: 23821 - DNA, 413 bp, Glycine max
agcttctcccccaatttcctataaatagtgggagaagtgaagtgaaaaagggttcagccccttaggcacttctctctctttcgaatttgcatggaaaaattatttccgtgatgaaaatctaagccgaggcgcttccgaaacgtttccgtaatgtttccgtgaggaatttcgcaaaggtttcgaccgttcttcgacgttcttcattcgttcttcatcgttcttcgatcttcaacgggtaagtacctcgaaccaagcttttcgattcattctatgtacccgtggtggtccacattgtgtttcgtgtatttttattctcgttttatttactttttatacccccttttgacgtgcttaagtcattttatttaagtcatttcttgcttaaactaaaaataaaataaatttccaccgat

SEQ ID NO: 23822 - DNA, 493 bp, Glycine max
ttgaaggagcatcaatataaacacacccattcttataaaaataaaaaaattgaagctttagtgtgttcttcgagcttctctgcgaaaccaaaagcatgcaagaaaactttaagcatcaaaaaccgcaacagatcggaataataaaaaacgcaggagatggggagggtaaacgaagcgcatcaacgtcagagcaacaaagaaaacacccccatactcatcaaaatcatagctttagtgtgtttgtccaccttctctgccaaacaaagaacacaggaagcgaaatggaaaaaaacaaaaagaaaaaacatagaagacgggtgggcaaatgaagaaatgtggtgttaaaaatcgcatctttagatgtaacaaaaatacagaagacgaggagggaaatgaaaacttatgaaggttccgtttatgcgtgtatgcaactacagtggaaggaagccagtggtgagataagcaagagcatgagcaacaaaggagacatcag

SEQ ID NO: 23823 - DNA, 401 bp, Glycine max
agcttgaagacaagactatacgaggtatcttccttgggtatagcaatatctctaagggctaccgtgtctacaacttgcaaactaagaaactcgtcatcagtcgagatgttgaagttgatgaatatgcttcatggaattgggatgaagaaaaagtggagaagaacgttcttatactcgttcaactacctcaagaagaagatgaggaagaaaacccaggtgaaccaccttcacctccatcacaacaacaagaagagatggagtatccatacagaaaaatttgcaccagtagctcgtcttaataagacaaagctcaactctgatggcaccatacagaaacacaaggcgaggctagtagctaaaggttacttacagcaacccggaatcgactacaatgagacatt

SEQ ID NO: 23824 - DNA, 294 bp, Glycine max
tgctgactttgaagataattgcctcaaaattaagtcctccaaaagaagattttttttaaaggttaaattactcatttgatctctatagtttcaagattcttacctttttagtctctataggttggaagtggtttttttagcccctatagtttctcaaggacgacgagtattctgatctcccagaggaaatagggcgcccgcggggggcatcactggttactcccctggccaagtttgatccagaaatagcccttgaagttttatgccaatgcttggccaacatatgagggcctg

SEQ ID NO: 23825 - DNA, 441 bp, Glycine max
agcttctacaccaagatgtctataaaatattattttttttaaataaatgtttttcttcaatttcaaccaatgtcgatcaccaacgtgagccaaaacagtgaaaaaaatagaaaaattatttccctcaatttatataactatataactataagacttcttggatacacaattatcattagcaaacactagacagatagcaatgacatctcttgaactatctttacttaatttacatgtcacatgttatatagtttatgcacaaactttgtatacaacattattaattagtcccatgaatagttatagttcttccacacactgtacaatgttagacaacaccaaggaattccgacaaaactgatctagtgagattgtttaaggtatggtcacatttaaacaagtatatcactttacatgaaaaagttctatatgacaaattgc

SEQ ID NO: 23826 - DNA, 387 bp, Glycine max
agctaaaatcaaaaaagatttttgctggatgctcatttgtagatgctaaattacataactttgtgatgcataaatagttatctctgcttacactctttccctagctaacaaacattggtgttcaagcgattgcatgcacgttaactattgaggaactagctagcatataaaatatcccttataaaaaatgttagcaatacacttttaattatctactgatttaagtttttttgaaattaattacatattttgtcaattctatttcttattgaataagtctttttcttaattttgggggtaggaataaatttttattaataatagggtgttaattaaatagaatgctagtggtccttttcttattccactactcaaaattatctataa

SEQ ID NO: 23827 - DNA, 250 bp, Glycine max
agcttctaagctttataccagaatgccttttcgttacatctcgaaaaggaagtcgtatctagtcaaggtcttagagaccatacaagattcctaaccatatctttttgtgtggtccaataatattatgctttgtatacaagagccgagaagcctatgaatgtcttctgggggcggagatagagtctgccattgtctaggccttggttaaccattggtgaatatcttaacttcagggaaaagaaagagcaaa

SEQ ID NO: 23828 - DNA, 816 bp, Glycine max
  unsure (1)..(816): unsure at all n locations
cgcnccccccccncnntttatancgcccaaatagctcttgggagaggactactttagnaacttctccactccttagtcaacactctaaatcttagtatancccttgttttcttctctatcgatcctgacatgtaatctcctctgagcttcatattccacagcaaccctcagaatcttggcatgcatggaaacagcctttctcaagaactaactccacggaccgcctagaccttgcccaccgtctcgtttggtgcctagtcagaccattaccaaatggccaatagtccaaccaccgactgagataaattgtatcactcaatatttgcgactagacacagcattgacacaaacatacctgccccacatatttttagttagaagatgggcctcgtatctggtctacccctggactttaaaatctaagcactgcgtgccggcattagagaacaccatagggtcgtctatacaaacctttggtcagcactaatcgaatgaaccttggaaaatcgacccgaatgaacccggatttgcaacaaacgcttttaaaaacacggctcaagaacgacagcggaagtctcttcataataccacaacggtccaacttggacacagttccccctttaacggggaacgttaaggggtaaagaaacttctaggcattgatacaacctggtggggttcctcctttttagatgtttaataagggggtacggccctctggaatgttaggagacaatgcccatacccccgttggcctcccgacaatttccgaaacccggacggaatctcaccctgtgttggaacacgcccgtatcg

SEQ ID NO: 23829 - DNA, 453 bp, Glycine max
agctttgcatacttccccgccgcgtttagaagatcacccgcggcgtccgccaactttgccttgtccaccttgtcgctctccctctttagggcggactgcgccgcctccgccaccagcttcgcgctcgcgatgagctcggtggtcgactgctcgctgggtggcttaatgttatgggattcttcggaagccattgatacaatgttacttgcttattgcagcttttgagagaactgttctgtgttatttatagatgtcactatgatattagtataaaagtgtatctttcaaataataataaactttatatttaattatttatttacttgctatagcctctaaatttatctttttttaatccttaaaagaaatttttaagtttacattttaaattattaaaaaatagaatatttggtgttaaaagtttaacaaatttaataatattaatccttttta

SEQ ID NO: 23830 - DNA, 495 bp, Glycine max
tgataagaatggatcgaactcctctcctttaaaataacagaattaatggtaataaggagtgatatttgaaagaaagccacaacatttatttttcttacttatttaaaagttaatttacaaagtaaaaaacttggaacaattcgtttaatattaattagatcttgactttaatatcttcaaattaattcttttaaaaaaaatatcttcacattaatgtgcatgaaacaaaacaaaaataattcaattaaagaaacatctaccttataattttagagataattggcgattcccgatataaaatacaaagacagtcgacttttcaattttttggtagatggcaaatattggatttggtctttcatagaatttcaatgaactcaaagtattcctggtaaggtaagtatttttgtacattgaacatttttttatacatataagtttaaaaatatttaaaagaagattaatttaattgatataatgttaaaaaaaatgaat

SEQ ID NO: 23831 - DNA, 396 bp, Glycine max
agcttgtaggcattggatattctttattaatggagtcatttgcttcttgatgttcattggcagcagaatggagaaggaagaaagatgattggagacaccacttcaaggagaagatgagtcaaacacaggctcaccaccataggaagccatggataagagcttgaaggaggagaaaatgaggggaggtagaaggagagaaggagcacgaaattttgtatctcaaatgaggtctgaactttgaattataattttcaaatgatcaaagttgaaaaaacgcacacacctggcctctatttatagcgtaagtgtcacacaaaattggagggaaatttgaatttctattcaaatttcacttgaatttgaaattgaatttgtggagcccaaaatttcactaaa

SEQ ID NO: 23832 - DNA, 493 bp, Glycine max
  unsure (1)..(493): unsure at all n locations
tttagcaacatttttatttaatgttattgaaaaaatattcctaaaagccacatgtgtagtagtgataaatcatgcatcttaatcgttattttgaatagaataagaaattttagcaaagagtaaagagaaatacaaacaagaaagtctacgcacaatgaagtgcagaaaaaaaaactaagaatgcaacaagaatgcccaatcccatttatcatagagcttagtgaatctaagattcacattggttccaaacactaaagaattaagtttagtaattttggaaatcattgagtactatttgttatatttatttgaatgcattgatgtgttaataatattattgaatgctttctttattgagaatattacatcaataaattgtggttgatcttttagaatttattttattcactgggattaatgttgaaagtgaggagacttgaacacttagttttcttttaattacatttgtttcagaatanagtgtacgatgtgg

SEQ ID NO: 23833 - DNA, 266 bp, Glycine max
tgctttgagaaaaatctaacgacattttcttttaactcggatgtctaatcgagccctgcaatatatcgagacgctcgtaattgaaaacggaagctctaagaaaagtcaaacgacaataacttttaacttggatgtctgatcgagccctataatatatcaagacgctcgaaattgaaaacggaagctctaagaaaagtcgaacgacaataacttttaactcggatgtcctattgagccctgtaatatatcgagacgctcgacattga

SEQ ID NO: 23834 - DNA, 492 bp, Glycine max
gagactctataaaactctcacgctacaggttaagatcacaagcgtcgaaatatacttgggtgcacattcggacacgctaaataacataaattggcgatgcataaatagcaatgtctgcttacactctttccctagctaacaaacattggggtgcaggctattgcatgcacgttaactattgaggaactagctatcatataaaatatcccttataaaaaatgtaagcaatacacttttaattatctactgatttaagctcttttgaaatcaattacatatttggacaatcctatatcttattgaataagtctttagcttaattatgttgtttgtaataaatttttattaataatagagagttaattaaatagaatgttagtggaccttttcttatccactactcaaaagtatctataatggcgagtgatgaggatgacgaatatgtttaatatctgagcatagagacctatggaacagattcattgcccttaa

SEQ ID NO: 23835 - DNA, 326 bp, Glycine max
agcttatgaccattcgaatttctcatgtagtttccgctgttcaatttcgagcgtgtagatgagttatgtccccgaatcggacatctgtgcgaaaagttatgaccattcgattctctcgagagcttccgttgttcaatttcgagcgtctcgatatattatgaccccgaatcggacatctgagtgaaaacgtatgaccattccattttctcgagagcttccgttgctcaatttcgagccgtctagatgaaatatgtcccccaatccaatcatttctagtgaaaacttatgaccattcgaatttctcgagagctctctgttgttcattt

SEQ ID NO: 23836 - DNA, 377 bp, Glycine max
ttgatgcaacatttggagaggttaatgaaacaaccagatgatgcgctccatgagaggttggatcaaatggagaatagagatcataatgaagaacaaaggaggagaaaagggaatgattgtgttcctagacaaaaccgaattgatggtattaaactcaacattcctccatttaaaggaaagaatgatccggaggcctacgttgagtgggagatgaaaatagagcatgttttctcatgcaacaactttgaggaggaccagaaggtgaagcttgccgccacggagttttccgactatgctcttgtgtggtggaacaagctaccaaaggagagagccagaaatgaaaagccaatggttgattcatggacggagaagaaaaa

SEQ ID NO: 23837 - DNA, 368 bp, Glycine max
agcttgcattttatttcatacattcctttacttgtactggcaaatttagtttctagcttctctcacatctctaaaagaagtatcttctctattgaaacgatttatgaaatgacaaagtttgatgagtagctttcccttaagcccttctattagaatgccttcaaacaaagccatcctaaaaccggtttcgaagatgtgtctttgcgtgctgcagattatgccaagcgtcttctattggctttaaaaggaataagctctcatttggctactctttcatagaaagtttaggcacttgggaatatgcattgaatgactatcataccctaatttcattccgggaccattggttgttggcatgcgacctttcc

SEQ ID NO: 23838 - DNA, 388 bp, Glycine max
tttcatggggctctggataaatttttagggtggaggatacaccaacaatgctaggcaatcaattcgtggggctccagactcgatgctggaggatgcatgaatgataagcatttcatagggctccggataagatttgaaggtggaggatacacgaacaacgctaggcaaccaattcgtggggctccagactcgatggtggaggatgcgtaaatgacaaccaattcatggaattccgaaaaagatttaagggtggaggatagacgaacagcccctagaaatcaattcgtagcgctacagactcgatggtggatgatgcctgaatgatttgcattttaaggagatccggataaggattgatggtggaagaaaaaagaaaaccctctaggac

SEQ ID NO: 23839 - DNA, 370 bp, Glycine max
agcttctgcttcttgctgccattattcttttccctctcacactcttcctcaatggatctatttgaagaagcctccctagtctcactcaaactcaagaaatccctctctacccatttctcatcttgatcttgcttttgctttccgatggatatcttccttcgaagacaatcttgttcaaggtactgttgcgcactaaatgtggacacctctaccatcgacgattataaccttaattcgtcacgccagataggcatacccaacccagttaggcatttctcatcctgatcagaattcccataaacaacaacttctttgcccttcaccgagcttctatcaccaactctttctcaccaaacccaattttgggttc

SEQ ID NO: 23840 - DNA, 491 bp, Glycine max
tagaaaggaagcttcaatggatgaaaagaatgagagagagagagagagagagagagggaggggcacgacattgaaggagaaaaaagaaggagagaagtggaactttgaagtgtgtctcacaagactctcattcatcaaagttacaacaagtgttacacatgcttctatttatagcctaagtaacttccttgagaaacttccttgagaagctagagcttagctacacacacccctagcttctaatagctaagctcacctccttgagaggctttcttaagaaacttccttgagaagctaaagcttagctacacacacccctctaatagctaagctcgcctccttgagatgagaagctagagcttagctacacacacccttctaatagctaagctcgcccccatgccaaaatacataaaaatacaaaatagtccctactacaaagactactcaaaatgccctcaaatacaaggctaaaaccctatactactaaa

SEQ ID NO: 23841 - DNA, 282 bp, Glycine max
agcttggtccccaacactctgttcaagctctcccaaaatctagaggtaaatctaggatctctatcagatactatgctagatggcacaccatgtaacctgacaacctcacttatatacaaggtggtcaacttcttcaaggaaaatatgatattaatgggaacgaagtgagcagacttaatcaatctgtcaacaataacccagatagaatctaaacctctaggggtcctaagtagtcctaccacaaaatccatggaaatactgttccacttccactggggtatc

SEQ ID NO: 23842 - DNA, 478 bp, Glycine max
tcaccaccaagatgagccttggataagaagcttggagaggatgctttaatggaggaaaagaaagaggcggagaaagagagaggggggagcacgaaattgaaggaagaaaaaaagggagagaagttgaactttgagttgtgtctcacaagactctcattcatcaaagttacaacaagtgttacacatgcttctatttatagactaggtagcttccttgagaagctttcttaagaaaacttccttgagaagcttctttgagaaaacttccttgaaaagctagagcttagctatacactcccatctaaaaactaagctcacctccttgagaagcttccttgaaaagctagagcttagctacacacacccatctgaaaactaagctcacctccttgacaaaattcatgaaaatacaaaaaaaagtccctactacaaagactacccaaaatgcccttaaatacaaggctaaaaccctatacta

SEQ ID NO: 23843 - DNA, 271 bp, Glycine max
gctttgggggctgaaaataataacaacttcttggttctagtttagtcttctctctctcctctttcgtttttagtttttagatttctcttctctttctccttttttcgtttttggcaattccagttctgacttttagttttatcaataaaattttgttcttcaatctataatttcgttccctattgattaatggaaggctaagtccccaacgttgttttctcttgagaatcaagcacagttctgtttgaggttctattattactgttaaatt

SEQ ID NO: 23844 - DNA, 471 bp, Glycine max
tttgttagtagtcacttagtctgattcatgaaaaatttagaaattcagcttactaattatactttgagttttgatctaaataaacctatttgggagtcctaagctctctcttagttattggcttttacttgctgtaaagctcatggtctttttgaaggggtttcccttacagagatgtttaggactgggtaacttaattgatttttttttgtcatctttttttggttgaattttccaatctattgtaatcttctctttttatctcaaccaatttcctcttttataaatataatttttggttgggtcttgagttgactaacacatgatcactagctgtgcgtaatccagatagtaaaaatcaaatatatatttgatttctactatctgagaattgcgtccaattttttttttttgtagtttcatctatttgatttgtattgattccaatgaatctgaaataatcgaaaaatg

SEQ ID NO: 23845 - DNA, 490 bp, Glycine max
  unsure (1)..(490): unsure at all n locations
tttctnnttatgaaacatatngaaactgatttgctagtcttctatggccatttgtagtttcctcttccccatgtctaccacacagcttgtggtggatagaaaaggtcttccaagaattaagggaatgtcagcatcttcatcaatgtccatcactacaaaatcagctggaaagatcaaatgtttgaccttaaccaaaaggtcttcgatcactccatatggtcttgtgaatgagcgaccaaccatttggagggtcatgcgtgtggcaattatctctatctctccaagttgccggcacatggagagagggcattaattgatactagctcccaagtctatgagagctttacccacaaacaccctttgccaatggaacatgggatagtgacactttccggaatctttgtgcctttaggggaaagatgcgttgaatacccacactacaatttcctttcaatactaatcataccctggggatttcccggtttttttt

SEQ ID NO: 23846 - DNA, 481 bp, Glycine max
ttttaattcattctatgtacccgtggtgttttacattttgtttcatgtatttttattctcgttttcattaactttttatacccccttttgacgtgcttaagctatttatttaagtcattcctcgcttaatctaaaaataaaataaatttccactgatcgtttgaattgtatcatccgttaatttcggttataatgaattccgaccgttcggtcgtgctgtaaccacgttggaaataaaaaagaggtaaaataataatataataataaaaaataccttttagtaaaataaagcgaaaaataatcggacgttttctctttgggatttctcattcttaattgaattgactaataactaaagtgaaactaaggctaaaattaactcgcctagtcaagctcgtccacaaaaataggattttgaaaggttattattttaattttttaccaagtaaaatggatcatttttaaggtccaacgcctttaa

SEQ ID NO: 23847 - DNA, 610 bp, Glycine max
agcttgtaataaataaataaaaacaaagttctttacaagtctttacttaaaacggaacaaggaattaaagaatgaccaagcttgattacacacactccctaattgttttgtttgttgttgctataattagatcatgtcttacaaaaaggagatctaatttaagaacatttaaatacaaaagtgtcatctcttactttttatctctagtatgaattatataataacatcatatttacgtttaattatttgacattcgaattaataaactttaaatacaaagaaatttaaagtggtatggacgatcgcaccacagaaatatgtaatcctttaacttcaaattatgtagcatgaaaaaatctaaaataacaagaatggttagtttactgaaaagatcctattataattcgtaaagtgaactaatcaatatttataaatacgagtttttattttagaacatatctaatatattttaatcttgggaaaagtgtgactttatcattatttaatatattaaaaccttaaagctaatcaatttttttttacattattatctccccaaaaaattatcctaaatttttttatggaaaaaattttttaaaatttagctttt

SEQ ID NO: 23848 - DNA, 379 bp, Glycine max
tctttaatccttcaaaagtaaagaacaattttaaaaatgtgcataattattgaaacatctaatcaactaatcaactatgcatacacacgaatacgtgccaactgcacacgacatttataacgctcataaaatttccttatatctgcattaacgttcacaaccttgcatgaacctataagatttatactacctggtggaacaggaacactctttattgtgtttttgattgtcttgaggaattatctggtgcagaataaattccaatattccttttgttcttaatgtcagggacatttcattactggggacaggggaggatgaggcatggtagaaatctcaaaagaaattcgtcctggtgtagtataacatgaattcaaaa

SEQ ID NO: 23849 - DNA, 423 bp, Glycine max
agctttgtccgtaaaaatcactgaaaaccgcattagggtccaacgactcaaacggtcctctttgcttttatcggttaacatgaaccgttcaaaagcataaaatcaacatgtaactttaccgcattcgcgagaactacgtaggtctgatttcctcttcgatggaggatacgtaggagcaaaagccccgcttttgtcgacctcaagagatggttagaggtccaacgccttagctttctcaccaagtaaaatggatcattttaaggtccaacgccttaaatgacccccctttcaagtaaaaaagaatcacttgattcgccccttttgcgagaactacgtaagtctgattttcttttcgatggagggtatgtaagagcaagcgccctgcttttgtcgaccctcaaataaaaagaaataaatttttga

SEQ ID NO: 23850 - DNA, 381 bp, Glycine max
tcacatgattgatagtggtgttagatttggtcaatttgaaggcaagatatgggaggagtgataaaattttcactgaattgcttgtgttgttgaagaagatgatccctaaagataacaagttgttgaatattcactatgaggtgaagaaaatactatgtcctattagtatggagtaccagaaaatacatgcatgccttaatgattggataccaaaaaatgagtttgcagaaatgcataagtgccctacatgtggggtatcgtgatacaaagtgaaggatgatgactacagtaatgatgaaagcacacaaaaaaaccatccaacaaaggtgtgttgctatcttccaataatttcaatgcttaagtgattctttgcttatggag

SEQ ID NO: 23851 - DNA, 457 bp, Glycine max
  unsure (1)..(457): unsure at all n locations
agctttagttgccccttattaccttaaataaacaaagcctgtggtaactatgaattcacaaaggtatcacaattaaagaaattcaaatacttcaaggattgcagacaatgtggtcacaactaaaaaattgcagagctaaaaacttctaactaaatgcttaggtgtaacataaatgggaaaatcaaaattttgatacttactgggtatagttcaaaatcaatatctggcccaatgtttaatatgttcagaacctcagcttttgccaagtcatcctatttaacacttgtcaagaactcattgatgctctctcttgtttgaacagaggcagcagtgtcaaccaaataatcataaacctgctagatatacaacacattcatctaccaaataaaacttacaagtattcctatttattagaaaaaccaaatctaaccttgtatncagactatgctactttggc

SEQ ID NO: 23852 - DNA, 434 bp, Glycine max
tatcgggtgtcgcaaaaaatcgtgcttggcccaggaaagctcggcttaacgtgcggctatcaacaaaaaattgtctaagttacctggcttatcgattcagcctcgcttagccacaggtagcttagtaagaggatgagtgttcatcctcaaaggatgaactcgcttagtgcggtaagcgtgcttagcgagttcttcatagaacgcctatatacacaatgagtactgatttcaggcttaaataggtggccttgttcgtgctcgtgcacttagcgcacttatggaccgcttagcgtacattagtgaattttggcttaacgcatgcctttctcgcttagcagatgaactgaagtggtgcacttagtgagatgaagcggtgcgcttagagaacctgtacaactcatcttcttccagtgtcttcctcgcgcttaacccat

SEQ ID NO: 23853 - DNA, 792 bp, Glycine max
  unsure (1)..(792): unsure at all n locations
cgccccccggggnnnttacttaacaccgccttgaaatngtcgnggcannnntnngtnanggagtctagacgccccaagctngagntgtaaagtttagggatttttttcattaagngagttgtttaattnttggggtttttnttgaagggtttagtttataaattgtggtggaattgataggnanggggatagaataggggttgttttgatttttgataatgaacatctgtatataaattatttgatttagtgtaatgattgattaaaggaatgatgtgtttaagttgttggtatggtttggggaatgagggtagttttatttgagggttatgtgtgtggacatatctcatctattccagttatatctcatagatagatcgtttcatacagacattaacctcccctctccctacactctccctcctcccccccctcgccctcgaatcttcgcctcccgctctttccacacccctgtctcttttcctccactgctctctacatcacccttcctccgtcccccctactatacgtcctcttacctcggcgccctctgtgcaccccttacttctcccaccgtgccttacaaccatcttcccattcccatctacccgatgtacttctatgtcccacctctatcgtcatccttatttccttacaatctaatccatcctcggcctgcctccattctcccttcttatctgtgagatccgccagcctctcggtcttgctctatctcagtgaccacctattcctccagctactatcttcgccactactctcgtgccctcctct

SEQ ID NO: 23854 - DNA, 490 bp, Glycine max
taaaggttgcaccttatcctcaccccttagtggctgaaggtactcaagtcataagtgtggacaaagagcctcaaacccgagccctgaccattgaccatataagcctggatgacaaattgaatataggtttgtgtgacgacacttctgatagaggcccaaagcctattgaagagctcatcaagttgtagctcgagcccaaacccaggcagtgtatgctgctcagtagggacctcaccagccatgagcacaagcgcatcactaatgtcctacacagaaacacagacctgctcgcttgatgttcatctaacgtgccagggatccaccctagcattatcttgcacaagcttgccatttgtcccccagccaaaccgatatcacataatattaggaagatgggtgaagaacaacacaaagttgtcagagaagaagtggacaaacttctcaatgccaactttttcagaaaagttagattttccacctggctcgccga

SEQ ID NO: 23855 - DNA, 440 bp, Glycine max
agcttgaaatgttagccaacgaattgtattattataggccttgagtcataagcgattcttggcatcttgttctgaactttgcacatttatgatgttcttcatgtgctttgactgattcaacaagtctttacaagcctttattgcattgatatgtggcgagcaaggactatctccaatgtgattaacaaatgcacaattttttcagcattaacctttctacatgatctaaatccttgtatattaagacatttgatccaaaaatgatcactttgctttgtactgaatagatcgcataacagacagttaactttatcattaaatggggaatactttatcccaaaatgaaacattttaaaccaagtacattggaaatgccttggatcgttctctttaaaaaagggtaattttggaattttatttggtatggaccccctttgata

SEQ ID NO: 23856 - DNA, 490 bp, Glycine max
tgtaatcgattacacacaaactgtaattctattaccagagcatattttcagaaaatattctcaacagtcacatctttttatttggttcttgaatggctatcaaaggcctatatatatgtgacttgagacacgaatttgaaaagagttttccaaaacaaaaaggtcttatcctcttaaaaagcaaaatccatttatcctcttacaaattccttggccaaaacacttgtgattcaataaggaattatttgagtgctcaaattgttcaatctatctctttcaagagagatttcttcttgtcttcttctttattctgaaaagggataaagagatcgagggtctcttgttgtgaaagaattctaaacacaaaggaaggattgtccttgtgtgtttaaaacttgtaaaaggaatttacaagatagtggaactctcaagcgggttgcttggggactggacgtaggccccaaggtgtggccgaacccagataaatctg

SEQ ID NO: 23857 - DNA, 177 bp, Glycine max
tgtacggttaaagtctcacgattgtctttgtgctcatgcaacaattgttagtcgtggttatatgaaacatcttgccaaacaaagtcaggttagccataagtcgcctgtgctttttcttcctatgctatatgtcccaaagccgtccattcctgtccaccaccccttgcgctagcccca

SEQ ID NO: 23858 - DNA, 399 bp, Glycine max
agcttgtagaattatggggtacccattatatgtggtactaggtggcggtcgggcgatggtgcacaacaagttttccacatccacaatgcgcgcataaacccaccatcccctgttgcccacctccaactgagctcacgtactcccacgtagcccatatcctcgtttctctcaacaccgggtccccatcaatcctcccaagcttccacaacatccaagcaaaacaacattcacacagcacaagctatcacagccaagcaaaacaaagcaaaggcagaaaactctgccaaaacaccaaccaaaaatcacagcttttcccctcaaagaccccagtaacaattccttcgaacccatttgttaaccgttggatcgactccaaatttttctggaagtctatagtgc

SEQ ID NO: 23859 - DNA, 313 bp, Glycine max
tataatatattgatacgctcgaaattaaacctcggaagctctccacaaattcaaatggtcataactattcacacggatgttcaattatggcgaatcacatatcgagacgctaaaaattgaacagcggaagctctcgagaaattcaaatggtcataacttttaacactgaattccgattcaggattataatatatacagacgctcgaaattaaacattggaaggtctggagaaattcaattggttataacttttcacacggatggccaattcgggcgtataatatgtcgacacgcttgaaattgaacaacggaa

SEQ ID NO: 23860 - DNA, 110 bp, Glycine max
gaccctatacagtctgcctgcacgcatgcaagccttccatccaaggctgagcttgttggtttttcttcctcccccttgggccttatcaagtaggccgggatctccgatat

SEQ ID NO: 23861 - DNA, 441 bp, Glycine max
agcttcatccgcagatccctcttataatactaggcttaacttaaacagcattatcgcaacaacataatcagaaaaccaaaaccccaacaatccatccctggtaatgtggttattcagtcctgcttctatcaagttctaaggcaacaatacatttcccaatgctaaagtcacctagctgtacacacaaatgggtgatcagaccaagagcatgcagaaattaagcattgaacacataaaatacaattaattagatatcaaagtaattacatcagttgttccttagaaatccccaacaagggtgtttagccagccattacagaaaaaccctaacacaaatgagattaagagtatagaataattgttccttacataaaggggatcccttcttctttttttaacaactcacaattactctacaacccactttatttcttttaattg

SEQ ID NO: 23862 - DNA, 490 bp, Glycine max
tctcaaggaagtgagcttagttattagaggggtgtgtgtagctaagctctagcttctcaaggaagttttctcaaggaagctacctagtctataaatagaagcatgtgtaacacttgttgtaactttgataaatgaaagtcttatgagacacacttcaaagttcaacttctctccctcttttattccttcaatttcgagctcccccttctctctttcttttcctccattaaagcatcctcttcaagcttcttatccaaggcacattcttggtggtgaagcttcttcttccatggcttattccctagtggatggtgcctctcctctcctcttctcctttgccttctgctgcatctccatggtggaaactcaccattgaagctcaaagatccaacctccatagaagctccacaagcaagcttccatcattgagtttagtccaacaagaggaatctgcgaacgatgcttgatcaagattaaggttaactatcat

SEQ ID NO: 23863 - DNA, 334 bp, Glycine max
agcttataatatattattacactcgaaattaaacatcagaagctctcgagaaattcaaatggtcataacttttcacccggatgtccgattatggcgaatcacatatcgagacgctcaaaattgaacaacggaagctcttgagaaattctaatggtcataacttttaactcggatgtccgattcaggcgcatcacatatagaggcgctcgaaaaggaacaacggtagctctcgagaaattctcatggtcataactttccacactgagggtcgattaaggattataatacctcacgacgctcgcaatttttcactcgtaagctctcaagaaattca

SEQ ID NO: 23864 - DNA, 380 bp, Glycine max
ttgatgcaacatatggagaggttaatgaaacaacgagatgatgcgctccatgagaggttggatcaaatggagaatagagatcataatgaagaagaaaggaggagaagagggaatgatggtgttcctagacaaaaccgaattgatggtattaaactcaacattcctccatttaaaggaaagaatgatccggaggcctacttggagtgggagatgaaaatagagcatgttttctcatgccacaactatgaggaggaccagaaggtgaagcttgccgccacggagttttcccactatgctcttgggtggtggaaccagctacaaaaggagagaccaagaaatgaagagccaatggttgatacatggaccgagatgaaaaagat

SEQ ID NO: 23865 - DNA, 710 bp, Glycine max
ttgcttttattatggcagttgcggcaaacctcaaggacgacgcacctgaaaaagaaagtgagcatctcttcccttcgaacgagtggacgaagaaatgcaggcctgcaaacactctaaattaatgcccgaatgcccttgactgcgtatgagaacgcatgcgaggggcacgagggcctgaaccgaccaacagccccgcccattctcatgcctggacagataaggtgcgatccatatcacactgtcaccaacacctgaccccgcacgcaaaaacaccaccacaaggcgtgacggcccgacctcaccgggacgcccgatcacagatgacggccccctgtcttccacacgccggccctcgacgtatagccgtacccctgcgtccacccctaaaacacgctgagaaggtgctcgaacactccccattatccctccccaaacggagcacgcatacggtcgctggggcacgccctgcgacctcccaccaacagccgggctctaaaccacccggcagaccgacctgcaccgtctaaaccccgctaccccacccggccatcagtcgttcgccccatggaacacttgcctgcgcccgcgccatatcacacacgcaggcctccccatctgtctatcccacaatcatgacccttctgcccccacgtaccctgcgcgtctccgacctcggtcccgccgctgcgccccgccccgctccccaccag

SEQ ID NO: 23866 - DNA, 381 bp, Glycine max
tctggtgggacatcttgacttgctttcctatctgacattcaccacagattctgccttcttctatttacagattgggaatgcctctaacaacacctttgacaatgatttttttcatacctcttaaatgccaatgtccaaatctttgatgccctattttgacttcatcttctttggagaatagacatgtggaggaataactggcttcttgaggtgtccataggtaacagatgtactttgatctgctgcccttcattataacttcactcttcttatttgtgaacaagcattctgactttgtgaagttcaaatggaatcctttatcacacagctgactgatgctgatcaagtttgcattcagtccctttaccaacaagactttgt

SEQ ID NO: 23867 - DNA, 411 bp, Glycine max
agcttcaagtctgcttaacataacactttttattttactattttcttaattgcttcatgctattagtgcaaactgttttgctatggtctgtgatattttgttcgcgctgtggttttgagtttgaaagttgaccggttgtgcctagctttttgaaccactggtgccaaggtccttgttttgatgtagactcatctttgttcataaaaaacaaattgtactttaaagaagcatgtgcgtggatcattcatatgataggtgattcttcatgcctagcttactcagctaaatattttatccacttgcaaaacatatattgatgcttcttaatggtcatataacacgggggaattttctaccgaaaactacttctaataaaatgctccttattataaccttctatttacatgacct

SEQ ID NO: 23868 - DNA, 956 bp, Glycine max
  unsure (1)..(956): unsure at all n locations
ccccccgcgcactactacggtacaccgtccctcacaccttctctctttccgcactcctccgtccgagtctccccccgacttctctcacccatcccccccccaaaccccccgnnnnttttagacccctcaagtatctatgtgacactactataatactccaagccttccttggtatatcccagggcctcaaaacaccaaactttttctattaactaaaatacgcttgttaactaaacacacaactgctgtatgtaacatgaaacctctaataaaagaacaaggggatatagatcactataacgccagcacgtctaacatatcactaaatctcctattccttccacctcatttacttcccaatcgtactcgtcaacccttcactattatntcgctcctctctattacctagtatgcgccaccttcaatcgacagtgttctgcaagcaaggtacagcacccacaccaactagactctctatgcctcaattgttctgtcgacgcagtaagagcagaggaaccgactgcatcgttcggaatatttgtcctaatcgttaccaataaagcgacacccgtggctgaaacgtggaccgtaaccctccattcgaaaccaagagggaaaccgagatgaccaattgataaatcccccacaacctaagaaacagagggaaaaatcctctgcacataagcagtggaatccaaaacaaatttgcggaaatatcgggacaaaagagaaagttaggagacgaaaccgtttccacccctggaattttccttgaagaacagaaaacccctttaaatcttgccgccaactgaagaaaagtaaagaaaatcattggtggtaaacaattggataaggcccttaaattctttcctcgggacgaaaccagaactctaactggaggggcgggcatctacattctaaacaacacaggggaatcacagctcccagcgcgttca

SEQ ID NO: 23869 - DNA, 403 bp, Glycine max
agcttgagaaactcatccaattccacagtatacaccatcagatgaaacccaatgaaaattttgaagcaactgagcgagccaaagatgaaccgaggccaaaccaagggccttcccaggacacactcttcttccagacccgaaaggtgccaacctcaaatcagaccccattatgctcacatcctcttccacaaaccgctcgggcctaaacttctcgggctcggcccacaccctctcgtcgtgggttatggcccacatgttcaccatcgcggtggtgcccttgagaatcacgtgcttgccgccaaccgtaacgtcgtgcacagcaaggcgagcccacgagagtagcgggcctggtgggtgcacacggagggtttcttttactatgcactgaagggagcgcaggttt

SEQ ID NO: 23870 - DNA, 1084 bp, Glycine max
  unsure (1)..(1084): unsure at all n locations
accctccccttaccgcgcgcctaagccttctccccacgcgacctctcacctccccttacccccctacatatcgatccctctctccctctctccctccncctccctntngcnnnttttctttgggggctagtctacttacggtgacggggtatgggaattaccgccagccctttaaattttataaactcctgatacaatcttnttcaaccttctttatttatactaccctatnctaatactcgcactacctccctcgtggccttctgtagtgaactcctacagtggagagagagagccaagtgcccttccccttatccattggcgacattgtaccatggagcccttaattttcggaggaagaattctcttcgcgcgttaaccctaattcccctcaataggccaaacgcttcttccttaaaaccttcgaccccaaaatcaaccaacccccaccatttccttcctttcgagtctctgaaaagtgactatctcgacggaaatacacacggcgtccaattttaatatcatcgggaattttgttgagcgcatggatagaagacaacatgacgacgttcaattggcctatacccctaaaaagtcccgaaaattcccttatactacctttcactactcacatctaggaagagggttagcccacccgcctcttaactctgggcggtcctataaccttctccccatctggtttagcctcactattgcggggaatcatcgggaaaaaaaaattctacntcaagcgactttgtctaaacaaacgcccccaacaatttcgggcaatctatctgcgcttgccgatttttggccccctctgcgggggtctacataagcaaccaccatatagggcgcaaccctctccgcaaactaaactgcgcggtgccactacttcctcctctgcctctcaatagtctcccgctccaanctgctcatcnctcttgattacgtcactccaacacgctcgcccaaaacacaacccgccacccccaccacatggtccttctcnacaccggggcgtcttgctctattacacaacatctctcctcatacacagcgcaatctctcggtacagtca

SEQ ID NO: 23871 - DNA, 621 bp, Glycine max
  unsure (1)..(621): unsure at all n locations
gcactgnnaataccgcgtgcacnctttttaagagactctccatctgcattggaagggcaagagatttttgttttgaagtttcagatcgggaaggtatcttgtattcgaacagggcaaaagtggcttactataagacttctaaagagtgttttgttagtgaaatagttcataattaatagctactcttttatgacaattgactgtgcctcagccttattacccaaagggaaaagaggtcctatacagtatcagtctttaaattattatagatatctggatgtttgatacaacttttatatcttgaaggaagtgctttttattgcatgaaaatcactttgacatctctctttggaatctaaaatgagtccctcatcctgtgtgttagaactctgtgcaactctacatacctgtctctaacattcccatctgggttttatgttcccccccccccnnnngngccccccctgttttttatgtgtttgattagttattattaatttcttacttccaatattccccccccggggtttttgattgtatatgtatatttttttttatttatattttaaattgatatgattttttgtatatttataatatcgtctatccctccctctcccc

SEQ ID NO: 23872 - DNA, 830 bp, Glycine max
  unsure (1)..(830): unsure at all n locations
ccaccacacatcacgacacttaccattccccccccttctcgaacatcttgctcatccacctcacactgataatctcntcccccctcttnnccaccnccccggggncctgaaccctnaaactccctagggggactatttaccccccatctcgtccccatttcataaatttaatacctctctttttttcccattaccccccaacctctcctcgctgctaaccaccctaaatataaaatcataaaatcaaacctaaatacttcatatccctaacttctcaaaagcacaaacactccctcttgccccaacaccccaccgataaacaattctagactaatattaaaaaaataacacccattcgaaattcttaggaaaaatgccaagagaaacgacacctatcaactcatcaattcaccaaaaaacgcagccccgcatagaagacttttctcgacatcatactcagaagcctaaaaatcgcataaaatgggaacccacttacttctaaaatatccgctctcaaaccgaagcccagcgacacataaacaaccaatctacccctaataatacttggcccccacacagaaatacgacacaacaaaagcctcgcccaccgaaatctacggcctcaaactccccccccgaatagactgcccccaccaccgcgtcatagcgatacactagaacacgcgcgcttccacgaaatcaacaataaacaacacgctacaccccaagtagccgaacaaaaaaggacagatcggccggcaacaataagcaagacacaaaacaattcgggcgacctcaaaaagtcgacgataaagaagaattactatccg

SEQ ID NO: 23873 - DNA, 441 bp, Glycine max
agctagcatttaataataccgcttatctttcttttggataacatcaagctgtatgctatctattttctatgtatgacacaatgttcaacctataactgatcgagttcatggtaatcatgagccttagagtcaatgagagtatgcttttgacccaacaaaaattaaatttctttataaatgcatataaaggaaaaatatgattcctaatggttacgtttcgcaatatttcttttctggactccgattttattagaaaaactggtcatctcattattcactgtcccatttctcttacatttgtttacatggaagaatcagtgcacaaattacatggggagcatttgcttgtttttcaaaaactatgctattgctttcttgcattctaaatacacaatgccccacatttttgctcatatttttattttgcaaaattaatcccct

SEQ ID NO: 23874 - DNA, 423 bp, Glycine max
ttttcatgaactaaaataaagtttatttttgatcttggacaagctacacgaaacctattttaatatgagctagatgcatgaagtgacttatataagaaaatattttaatccttggagagggttgtgttaggctttcgacagccaacgtaaaactttatcgaatctctatgacatggatcaattacgtaataatgtgaatgctacgccgttgcccggaagcaacgcgctgtatggctcgagtacagtggccaaagagcaagggccgctgcatcgccgcccggatgtagtgaaaagtaagcaagggttcccacattttcctgaacgggtgggggtaaagaagctagttcatgacaggaagattcgctttggtacatggaatatagacacacttactggaaaaatctatggaaaatattggatgtt

SEQ ID NO: 23875 - DNA, 432 bp, Glycine max
agcttaagctctttcaattgcacaatgctcttaatatttgaagagtatccttgtggaaccttcacccgacgaagacactgacaaaaacttatcttctccttcttggacaaagtatggcaggctgggggcaagtaaattttcttcccatcagaccttggatgcaactgtgatcttatacccatatcagctagatcttgacgggtattcaagccatccttcgtcttgccttgaatgttaaggagcgtcccaatcacactgtcacaaacatttttctccacatgcataacatcaatacaatgtctaacgtcaagatcacaccagtacggaagatcaaagaaaatggacctcttcttccatatgcaactctgaactttatccttcttttgggtcttcccaaatacagtgtttatgtgttgaacccgctgatatacc

SEQ ID NO: 23876 - DNA, 443 bp, Glycine max
tgataaaaaattttgaaagattatttgagtcgttcctataaaggcctagagaatactaagggtgaagcctagtgaggtttttttttttaattttttataaagaatacttggtagagcctacaaaggcttagagaatactaaggttaagcctagataggcttttcaaaagaatactcagggagcttgcaaatacttagagaatattggttgtaggagcctgtggctaaccgatcattgtgcagagcacaagactaccaagagaaatgacaaaggaagtgatccacggtcacaactctgtagcaactcggctccacttttcctcctcttctttttcttctacgtttttcaagctgctggatcttttcttctcttctcctgcatggctatttatagaaaaaaccatctaatgtaggggaaactcgcccaggcgagctgtttgctta

SEQ ID NO: 23877 - DNA, 988 bp, Glycine max
  unsure (1)..(988): unsure at all n locations
acggaatgacacaatcgtaccacaactacacgccgaaccccactcaattatccatattgtcctcccattcccccccacagctgagccgtttgtgatcgacgtcgttccnaccnacccaacaaatctaaccaaccggcacgcaagcacgcaggcctgcggacaaaaggcggcttattcttagacacagcgccaccaagcagaggcggagcatacctcaccgcaaaacgcaagaccacggcgacgagggtgcctcacgctcaggggaactgccagcagacgaccgaagcgaagaatgaccacgagagacctacaagaacaggcccacgcggcggcaagaggacaccanacaacaaactatcgagcatccccagcagacacacaccctagcgatactacacagacacgaccccacatacccggacaacgggacatcatgaccaacgaccaaatcaagaacaacaaccgggcccgcgcccagcaagaaaacacagcaccactacatacacgggcgaacaaaggcaacggacacctcatgccacgcacaccagcgagcaccagcaatgacgagacagcccaaaggacacgacacacgcacgggaacgatatacttgggaaacccaccacaaagaacacggcccataaaaacatccaccatcgcacgccagaaaaggaccacaatgactacccgaggcgcgcccaggcgaaatcgaaaacgacacacacagcgcggagcatccgacacacatatcaaaacctctacaaagacaacacacccacaaccctcacaactcagtgaagccaagccgacgcacactcccgcacgcatcggacaaacaactggccacccgccaaacccggaacacagaaccgatatggaaaagcgcatcgtttatcccatacggaactcgccactccagcaatagaacaaacacctcaccgctcaacacgaacacaacagcccgcgaaacacgccgcgacacacacaacc

SEQ ID NO: 23878 - DNA, 863 bp, Glycine max
  unsure (1)..(863): unsure at all n locations
ccccgaacactgagggcgaagtaactagccctgggcaccactcacccgcgctcatcctgcgtccccccacacacttccncccagccttcnncncnttctagcccttagactcctgagggacgatatacaatactcacgctggtccttgaaaaatcatgactcagccttttttgtacttacactgaggcatgctaagaatggaacgaaaatcttcaatggggagggagacccatactgggtaaagccctctgcttgctccttctctttgccctttaaccgaaatactcctgaaaggccaacaaaatgaggaccccttattcacctctcccacgcctggtactagaatttacccttgaggaatgcgcaagacctcagctccgacgcagacaaattgatagacatcttaggaacaataacgtacttggattagagagcgccccgtattaaagaataaaaagtaccgtggagtccgagtacgccccacattatctgcccctaaatcatttatttaaattacttcgtgtccccccgagagtaaagcggggatttgatacaacttcatctacaagggcatttcttaaacatcgacgaaagtaagtaggctctaaccgagaccagagagattgggggaactcaaccttcctttgtcggaatttaatacaacacactcgggagccggaagatcttgacacaataatggggtgtttaaacacaaattcgcccaggggaatttttattcgggcgaccttccaccccttctcttgggaagtaaattgtagaatataattgtttgaaaacatggtgacaccgcgtcaagatattgcatanattatatctgtctcaaaacgaagcattgccaacct

SEQ ID NO: 23879 - DNA, 1238 bp, Glycine max
  unsure (1)..(1238): unsure at all n locations
ccgctctgcanacgtcactaatgcactgatgatgacgtgntgacgcatacngctnctactcacagctacnctgccttcacactattcgcactacataccactcgactacttagtacntgtgcccgtntcgcgtactgnattnctatctccgcctacgananctgtcgactctcntntgctccctntcnccnccccccntcnctcnctcncatcccccnncnnccnncnnnnnnnnnnnnnnnnnctcnnnannncggcnnnnnnnnctaggtatcnctcactctctgagcggctggaacgcagcgtgattatgctatatcatcctncactncaccttctatactatcacctattgtctataatagttaatcaatatctcgccgntttttctatgtgcaatanatacacacattactccctttgcancatactagctcacantatgatctcatacacactcctcctcccatcatccttccagaaagcaaatgcacttctacttaaccttcacaagttcactaattcatcctttaccacagtaggtactatgtctgaattggttgtaaaaaccttggaaacctccaacgttcccctaaactttgtcaaaggcaatcaggttttttaaaaaacccccggggttcgggcgatccccaagccctaaataatgtccccccccctggggggtccctgggggggcttgggtattttttttaaatttccttacatctttttaaactacataattaataaactacgcaaatagtcttttaaactggattagaaatctaaatctaatttctcaattttaaagaggaactttttgtacttcactataaaacaataaactttctttatttgtaaaagataatttaaacggttacttccttaatttgttcaatctgcccaattagtccctttggaacacaaaaaaacgggtttttaaactttctccgccttttcgtcttaataacgcatatttcctatttcgcgcaaataacacttaaaactcgaaacacctctntcctttcccctttcgcctcttttaaggaaccccgtaactgntcntacctactcactttatttaccacatctctcnttctgtttgtcaccgatcaacttagtcacctaactgatggcgacgcgtagtgactcactacgttactaactcaatctctccacttgctcactgagcttagacgtacagcgtaattctctttccgctccttctccctcaaacg

SEQ ID NO: 23880 - DNA, 450 bp, Glycine max
gcatgcaagcttggttttgggcaatagcaccctactctgtttgtccccaaggtctcctgacccccgcgacatatctccagataccactctgtggtcaacgaataaaagtaggaagtctcacccttccacacttgctcacttcaagcttgtaggattatggggtacccgtcacatgtggtactaggtggcggtcgggcgatggtgcaagtcgactatccacatccacaaatcacacataaatccaccatccccagttgcccaccttcaactgagctcacgtactcccacgtagccattatccttggtcctctctacaccgggtccccatcaatccctccaagctttcacaacatccaagcaatttcaacattccaaccattaggaactattcaaacccagccaaaacaggggcggaggtagaaaactctgtccaaaacacaaacccactac

SEQ ID NO: 23881 - DNA, 1041 bp, Glycine max
  unsure (1)..(1041): unsure at all n locations
cacgatccatactcagtagtctagctcgtgntagatatcgactctgtcacactgcatncaacagagccataacatangtcactcgctcgagcgcgcctctacacaaccgtcgtgctttcgnctcccntcctctcccnccnncgtcctctcccaacccnnnnnnncnnnnnnnnnnntttttttttcggccccnntaagtatctcatctgtagggttggacgacgtgatcagnaactacctccacacgcctttgccatccttttacatatttatacacatttcncctccgcacttatattataaatgctcttcactctaaccactccaaattccncctttttcttcattgtntctcttatgagtgcgggatcacacgggaacatagccctcttttattgcccactattccacacttcccctctttattccctattaatccctaatcaattagtttaaatagaatctccgggggcttcccctttttagaatttatttnttagcagaggaaaaagatttctaattttccaccctggtaaatcccggaatttccgctaacttccccggatgaatcgtggaccccgctttttaatcttccaataatacaacattaaattcccccttcccctttatattagtggtggccaccatttacccaagaaagtctcgcgcggttaagccgctttctttgttttctttgggacccaaagatttaatataaaaacccattttttgcacccaggtttaaccgggcttttcgcccaccttttttgtttcccttttacaaaaatttcccgacccacttggcccacaaatatgcccccccttcccaaagtggtgtaacccttcaaatggggggggcccggaaacaatcaccctccccctttggggcactgggtgcggcccctccttttttaaacccggcgatttggttacacccccacccaccccctatgcccacccattggcccctttaaatatttattggtgggggcgccgncacccatttcacaaaaataaaaccgtctcttcttatattttttg

SEQ ID NO: 23882 - DNA, 90 bp, Glycine max
agcttgagtacaaacgcaacgtttaatttttaccatgacctgaaggtgtttagtcagattgtcataatgattggtgatgaatgccttacc

SEQ ID NO: 23883 - DNA, 235 bp, Glycine max
tatagatactcaacttgtacattataattttatctctctaaaattgtaagctctgggttgtaaaggaggaggagggtcataccttttactagcccttttctgaattctttgcagatatttaatactttatttccatctgtctgggtttccgttagaattattttccagcgatttggctataatgttatctttgttctgaaacttatatcaggtatatggctggggaatgggggag

SEQ ID NO: 23884 - DNA, 280 bp, Glycine max
agcttatggtaaaatttgggacttagccatggtagaagtctccacagaggccattgcctccctcgcccagtattatgaccatccgatgaggtgcttcacctttggggacttccagctatcacctatggtagaagaatttgaagagatcctaggatgccctctagggggaaggaaaccctacctcttctcagggttctatccctcattagctagaatttccaagatagtccaaatctcgacgcaggaattagaccacaggaagcaagtcgaatatggggtg

SEQ ID NO: 23885 - DNA, 484 bp, Glycine max
tcaagaaaaagatggcctcagcaaactccttatttccataagggaattctatcaatagacctccaatctttaatggagagggttaccattactggaaaacccaaatgcaaatttgtattgaggcaataaacctaaatatttgggaagccataaaaatagggccttatatacccaccacagtggaaagaattacaatagatggcagttcatcaagtgaaagtataactttagaaaaacctatagatagatggtctgaagaggatagaaaacgagtacaatacaatttaaaagccaaaaacataataacatctgccctgggaatggatgaatatttcagggtttcaaattgtaagagtgctaaggaaatgtgggacactcttcgattaacacatgaaggaactacagatgtaaaaagatctaagataaatgccctaactcatgagtatgaattatttagaatgaatgcaaatgaaaatattcaaag

SEQ ID NO: 23886 - DNA, 495 bp, Glycine max
tttgcagcctggaaacttgcctgccaggtaggttaaagaacttgccaactcgaacttgttgattccctccccggaagaatcaaatgtgtcagatctgacccttgatgtgaattctctggcatacatgaccgttctggttcacatctcataggaccttttgcctgttacctacaacaatttgtgtttttccacattcacaccttcccctgtcaccatcaataatggggtggttatagacaaaacacacctctttagtatttgtgaaaacccagatttttcgttctacctacctcgggtccccttggggaaacgcttatatactgcgtcttcccttttcttttaaacgccttcccttgtctgtgcccacacccctttttacctttgtgttgcaaaactctacctttaacaatttacttcggtgatgtcctccactggaaggtctcttattcacctaaaggaaatagatcttccctcaacacaacttctttttttttt

SEQ ID NO: 23887 - DNA, 350 bp, Glycine max
agctctaagtgaggaagtggggaattgttttcttcctacttttattcgctgaccacagagtggtacctggagatatgtcgcgggggtcaagagaccttggggacgtcaggtggggtgctattgcccagaaccaagcttgaccaatctcgacccaacccgggcatagttagtcagtgagaacctgtgacgtacctaaacaggcgagctcttgacagtcaaccgataaaagaacataagaccactaagctaggaggcttgtgtggtggctggccacctatggatcttgagtaatatttggagtatggcctctgtgaatcgattatcaagggtgggtaatctattaccaagct

SEQ ID NO: 23888 - DNA, 399 bp, Glycine max
tgcacacaagattctccttgcctggcacttcaaaaccttttggttggggcatataaatgtcttccgctaaatccccatgcgagaatggagttctaacatctaactgctccaagtgaagattctttgtagctacaatactcagaataactctgatggtagtcatctttacaactaaagagaagatctgtgtgaaatcaattccttgttcttgctgaaaccctttcaacacacgtctcgccttgtatcttcttctaccgtcagattctttctttagcctatacacccacttattctgtaaagctttctttccttctggaaatgtaattaaaaaccatgtcttattcttctgaagggatgacatctcatgtttcattgctagctcccactaaatagagtcat

SEQ ID NO: 23889 - DNA, 358 bp, Glycine max
agcttgcgtctctactttcatattttgatttctctttattcgccgcgggaggggcaaccagatagagtaatttctgatttttgtttgactctaccatatcttaatctcgtgcaagctaggttttgtacactagaaaacggaagaagaaaaatgatagaggaagaaaagatactaaaccatctcttttcttgtttggttacttggtaagtgaagacaagggaataaaacgttagattattttaatctaagagtgtcctatgtaattatgaaatgattttaataaaaagacgtgtaatgtaattgtcgctaggctttaaattatattaaaggcattgagaatcgcaaaaaaatatccttt

SEQ ID NO: 23890 - DNA, 394 bp, Glycine max
cgcattgatgcttcaagaacgtccaaataatgcaccagctatttatgctatttggctctatctagctttgcgttttcagttgctagctaccccaacactagagtagactgtaacacctaaatccccaaacatatataactacattaattggtttgactattctgacttatatggccaatccttttttttattatatttatagcgtaacactaactaatggcacttctttactttcatctcgttgatcatgtgagagctactcggtgtttcgtatgctcttcttgaattccctgataagcatttatttcttgaggaatagttcggaatataaaatgtccaaatatcactgctgattccaaataatctatgaatgcgtggtacagaatatgtgaaa

SEQ ID NO: 23891 - DNA, 383 bp, Glycine max
gcttactttatgaaaggtagaaatttaatgttagtgaaccagctaatgaacaaaccaaattgtattgagaatacgtaatcatgctctcttcatactaaattgacaaatctgtctatgaatgatatagctattacttactctgcaaagcaatacttgacgtggaaattttgacttgaattgcaacatttcccagttgagtgttccttccttcagactacacaaatgaaaattgattcctacatcaactttccataataataccatcccttgaaatagagaataaaggatttgaagtatttatgtgcaagtcgatggtacaatagccaatgtatatggttaaccaataatgagttacaattatatccgtacttaaattaataatg

SEQ ID NO: 23892 - DNA, 245 bp, Glycine max
aatgaatttggtatgccatttatcctctctttcagaattggaaaggaccagtgaaattaagtgtgagatttatgatttcaatactctaccaaccctacccataaataactttcaaaaacatgatcaccaaccttgaatttaggtctttctcctttatatcctatagctcaacgcttactctgaatagtctctcctttttggatcaactaaccttttatggattgttcaccacttaatctaattga

SEQ ID NO: 23893 - DNA, 207 bp, Glycine max
gctgcgtgtaaaggaaaaatcctatttcaaagaaagaagctaaaaatagaagacgccccccgttaaaattacgtgaagaacaagaacgggaaacgaggaaacttacggttgctaagaacgttgaaacacctagtggatttttaggaaacaattttttttacccaacagctgaaatgctaccaggggtgggatattggaacccccttg

SEQ ID NO: 23894 - DNA, 420 bp, Glycine max
tcaacatcagaccacttccagggtgctggaactacttctcatggacttgatggggcctatgcaagttgaaagccttggaggaaagaggtatgcctatgttgttgcggatgatttctccagatttacctgggtcaactttatcagagagaaatcagacacctttgaagtattcaaagagttgagtctaagacttcaaagagaaaaagactgtgtcatcaagagaattaggagtgaccatggcagagagtttgaaaacggcaagtttactgaattctgcacatctgaaggcatcactcatgagttctctgcagccatcacaccacaacaaaatggcatagttgaaaggaaaaacaggactttgcaagaagctgccagggtcatgctttatgccaaaaaacttccctataatctctgggctga

SEQ ID NO: 23895 - DNA, 382 bp, Glycine max
agcttggatttggggaatagtttctttcctgacgtccccaaggtctcctgacccccgcgacatatctacaggtaccactctgtgggcaacaataaaagcaggaagattcacccttcaacacttcctcatctcaagcttgtaagattatggggcacccatcacatgtggtactaggtggcgggcgggcgatggtgcacaacaagttttccacattcacaatgcgcgcataaacccaccatcccctgttgcccacctccatctgagctcacgtactcccacgtagcccatatacttgtttttctcaacaccgggtccccataaatcctcccgaggttcctctcacatcaaaagaaaacaacattcacaccgcacaagctttctc

SEQ ID NO: 23896 - DNA, 312 bp, Glycine max
cagcaaactccttattttctgagggaattctatcaatagacctccaatctttaatggagagggttaccattactggaaaacccgaatgcaaatatttattgaggcaatagatctaaatatttgtgaagccataaaaatagggccttatatacccaccacagtggaaagagtttcaatagatggtagttcatcaagtgaaagaataactatagaaaaacctagagatagatggtctgaagaggatataaaacgagtacaatacaacttaaaagccagaaatataataacatctgccctgggaatggatgaata

SEQ ID NO: 23897 - DNA, 210 bp, Glycine max
ccccagaaaccccacaccacccgaaatcccgccacacgaccgcccaccccccccaccatcccaaaacgcccccacatccggaccccgcaacccccacccggccaacccgggacgccaccccccgccaaccccccacagccgtgcccgcgcccccaaacaccgcaccccccagaccccgcgcgccccccccaccaaaacccccccccgccc

SEQ ID NO: 23898 - DNA, 303 bp, Glycine max
acatctaactgcttcactagaggatactttgtagctgcaagtctcagaatagctctgatggtccatatcttgacaactacaaagaacatctatgtggaagagattcctcgttgttgctgaaaccctttcaccacaagtctcgccttgtatcttcttataccgacagattcttcctttagcctatagacccacttattctgtaaagctttcttttcttctggaaatttcaatataaaccatgtcttattcttctgaagggtggcatctatttttattgtagctccactaatagagtcattccct

SEQ ID NO: 23899 - DNA, 380 bp, Glycine max
  unsure (1)..(380): unsure at all n locations
agcnttgatgcaacatatggttatgtttatgaaacaacgagatgatgcgctccatgagaggttggatcaaatggagaatacagatcataatgaagaagaaaggaggagaagagggaatgatggtgttcctagacaaaaccgaattgatggtattaaactcaacattcctccatttaaaggaaagaatgatccggaggcctacttggagtgggagatgaaaatagagcatgttttctcatgccacaactatgaggaggaccataaggtgaagcttgccgccacggagttttccgactatgctcttgtgtggtggaacacgctaccaaaggagagagccagaaatgaagagccaatggttgatacatggacggagatgaaaa

SEQ ID NO: 23900 - DNA, 280 bp, Glycine max
tgaatcggacatccgtgtgaaaagtgatgatctttctatttactcaagagcttccattggacaatttcgaacatcgtgatatattataagcctgaatcggacgttcgcgtgaaaagcttagaccatctgtatttatcacgagcttacgttgttcaattactagccccttgacactttatgcgcctgaatcggatatccctgcgaaaagatatgaccatttgaatatctggacagcttttgatgtttaatggcagcgtttcaatttattattagcccgaat

SEQ ID NO: 23901 - DNA, 367 bp, Glycine max
gattattattttatataaagaaagcctgtggtaactatgaatttacaaaggtattacaattaaagaaattcaaatactttaaggattgcagacaatgtggttacaactaaaaaattgcagagctaaaaacttctaactaaatgcttaggtgtaacataaatgggaaaatcaaaattttgatacttactgggtatagatcaaaatcaatatctggcccaatgtttaatatgttcagaacctcagcttttgccaagtcatcctatttaacacttgtcaagaactcattgatgctctctcttgtttgaacacacgcagcaatgcccaccaaatatcataaccctgctgatatacaccacattcatctcca

SEQ ID NO: 23902 - DNA, 445 bp, Glycine max
  unsure (1)..(445): unsure at all n locations
atgaaacaaggactccggtaccggtcgaaaattgntgtatntgacaaacgggtgtaganaaaatngtgnttgggttaagaaattttggnnttaagtgnggntatgaanggaaaattgtataagttaaatggnttaaggaaatantttagatatagtaagggtgnaaagaagaggagaattgttgattaataaagttgaagtttatgttatttataaatatttttaaaatatatgttaatgttattatgaatatgatttataattttatggataaaaatagagaggaaaatagattaaatgttaatttagtatatttaaaatggagttttgaatagttttaaaaaanaatgaaaagtataaaataggattattaatatatttaaataaaatgatatggattaaaatataatgagtataattttaattgttataaatgatgaataag

SEQ ID NO: 23903 - DNA, 386 bp, Glycine max
  unsure (1)..(386): unsure at all n locations
gcatgcaagctnggatgaattaancaattattatttttattaancgannatagaagccaattttataaggaggaaggctctatccctcgagataatcgattaacatgtgctataatcgattaaattacttttggaaacttaaggtgccccttgtgtgatgaataattgattaccacaattgctaatcaattattccaaaaagaagaaaagcatgagaaactctttatctgaaaagagataatcgattaaatttttttcaaaaggtagaacaaataggattttggagaattatttgattaccatatttgacaattgattaaatttgttttacctgtcaaaattataaatattcttttacgctcttttcattagcgactggtgataca

SEQ ID NO: 23904 - DNA, 511 bp, Glycine max
  unsure (1)..(511): unsure at all n locations
cgtagatactaactccagcactgtttttgtatcattattttgtacntcgatatnnaagtnnntaatgggattgaccctgagtacntcgcgatccgtgacactattaaactcacgcttgtacggttataggcgtacgagagccacatgtctctgctctaattgggagtngnggggatatgaaacatcttgccaaacaagagtccgttagccgtaactcgccagtgcgttttattctatgcggtatggagcataagcaatgattctgtccagtttgatgaactggaaaaagagggggcaataattctatgccaagtagagaggtgttttcccccagctttttatgacacacatgaatcacttggatgtgcgtgtgggtacagaaaaaaaagttgtggggcgtctattatggtggatggacccgttggggcgcctataggtttctagggcgtactcaaactttggaacagctttcttgaaggccatggccaagaaaactcttattgttggaaac

SEQ ID NO: 23905 - DNA, 335 bp, Glycine max
gtcgcgctaagcgcgaatccctctatgtctttaaaaattatggaaatgggctgagcgagcctgctcgctaagcctattctgcagaaaaatgtctttctgtgttcaaccgctaaacgcgtggctatcgcgcttagctcatgaagaaaatttcataaggcacgcttagcgcagtcgtcgtgctaagcgcccagccttaattttagttttattttctgcttttcactttgaataaatcctgtataatcttgccttatgaatctgttggtttggagatggctttccataagagaaaagtagtagcttcagtgtcccaggaaaggtatgatagaacaaga

SEQ ID NO: 23906 - DNA, 386 bp, Glycine max
  unsure (1)..(386): unsure at all n locations
tagcaccactatcgcgcttagcgcgagtaaatggatttggacttggcgccaatgttgcactgagcctagcaagagatggacgactcgcttagcgagctgatctcgcgcttagggcgctgcttcgattcaggtgctcttccagattcctttttcacgctaagtgcactgaagccgtgcttagtgacggatacgcactaagcccactgagttcgcttagtgcgacaaccactttggcacttcaagaaattagctcctttttacctgaaattgtacagattttaacattaattccaataaaagagaccccaatgacagagatcanaacacatcaaagtttatttacaattcctacaaaagaactataaattggggaaaattatacatat

SEQ ID NO: 23907 - DNA, 374 bp, Glycine max
ctgcatgcatgcaagcttgacacagtttatactaagattttgtgagtttacaaaccatgttgtcattcttgacaagataaccaagaggcatgtccatgtatactccctcaatcaaatcactattgagaaacacattatttaaatcaagctgaaacatgttccaatttctgtgaggcgcaatggaaagaaacactctcattgccgtatgcttggcaacaagtgagaaagtgtccaaaaaatcgatctctgcttgttgtttgttgtgtgtacccttttgcaacaagacgagccttgtatctatcaagggagccatctgctctatacttgaccttataaatccatctgcaactgatgggtcttttatcgggtggtag

SEQ ID NO: 23908 - DNA, 290 bp, Glycine max
tataataacgcttaagtatgacttgtttatcttatttatattttattgtgaatttttttttattttttaattttaataatttagcatttaataatttttatactagatgataataatctacaaatataaatagttttaaagatgtggtgtgatattataaaatttatgtaattttaattttattataatatttgtgtgtgtaccaatttttaatgtcaagtttgtaaaatttaaaataaatgttggaatagtttttaaaaatcaagtgagatctcatattaaatttattt

SEQ ID NO: 23909 - DNA, 362 bp, Glycine max
agcttcaacacagccaagtgcaatgtttactatttccagatctcaaggcaatgccaactccactttgaatccggattctggagctagtttccatgtgactggggaacttcagaatatcaaacactttagtcactttgatggaccaaataaagccgctgcatcgccgcccggatgtagtgaaaagtaagcaagggttcccacattttcgtgaacgggtgtgggtaaagaagctagttcatgacaggaggattcgctttggtacatggaatataggcacacttactggaaaatctatggaaatagtggatgttatggggaagaggaaaatcaattttatgtgcttacaagagactaagtggaca

SEQ ID NO: 23910 - DNA, 339 bp, Glycine max
tggttatcaaaaactagcttgtttctatgatgccatatggtcctatgtgagggctatccaccaacaactccatctcatatcctttgttcgagaagcattcaacctgcaatgatgcaagaagtgatctttcggatctttagggaaagcacccactgatttgacccatgcgagtgtctcccaccacaagggaagaaccttgctgcagttgaaaaaaaggtgcgctacatcttcatcgaagttgttatagaacgggcatagtggatcagctatctccacttgtcttcctcttatattcagcttcgttggtagacggtctttgatgagcctacatgtaaatac

SEQ ID NO: 23911 - DNA, 359 bp, Glycine max
  unsure (1)..(359): unsure at all n locations
agctnctgaaccatgaaaganaatatattattccatttataaattcgcataccagcctgaatatacgccaagagataggcaacaatcttacattgtatgatatcatatgcaccaccccatcagctatcatgactctattgtcgtcttgcaacctctgaaatttcagaaaatatactactaacgtagttcaagctgggaaggtggcactagaaatgcatcagaagatcatacctctaataggagtaggaaatccgcagcactggaaggaggtggatcttgccctctgttgataacattccctaagatcgcaataagtatttgcaccaggcgggtggcatgcatacgctgatcaaaaagag

SEQ ID NO: 23912 - DNA, 261 bp, Glycine max
gcagataacacctcacatgtatcgggtcattgcttattatcaaggaaggtgcaacacaaggatagcttaaagagctctgcctacacatcatcacgattatttgtaacattccaagccaacaaagggaccacgatatcaacacgatgttctagtccatgtgcaagggctattgtcaccacttcatgcatagagatcggaaaaccatcctcttgagggagttcagtcggacatctttttgatagaaactccattactatgatg

SEQ ID NO: 23913 - DNA, 329 bp, Glycine max
agctttgaagaaacgagatacagcgttcaatttatgctaattagtatgtcagtatttctcgtaaaacaagctgagaattcttttaaagatacaaagctttcaaaacactttgtataccttaagagaaaagactaaaagtgtggagtgatatatccgtctgttagacaatcatactttagtcaatgagcaaactttcaacaatttatgttgatttggttagagccaataatgacttattaggacaaagaatactagggtgttaagataagcttgaaatacagattgctagtgtaagaactagaaacggtagtgaacaacattagtgactt

SEQ ID NO: 23914 - DNA, 376 bp, Glycine max
  unsure (1)..(376): unsure at all n locations
ntgttgcaagggtccaaatcatagattnttttatattgttctcctattatgagtnggntgtccatgaaactggtttacgatatgtttttcttgggattctttgatgttaaactatggaaaaaaggggtcacgaatattagtaatgtgttggacataattttaaaaaaaaatgcaaaacataggcacttaagctntgttgcaagggtccaaatcataattgtttttattttgctcttctactttgaggtggttgtccatgaaactggtgcatgatatattgttttggattctctgatgtctaaaatatggataaactatgtaacggatattactaatgtctcggacataattttacaaaattgcatatcatggacac

SEQ ID NO: 23915 - DNA, 377 bp, Glycine max
agctctgagccattaaacttttttatgttttactcggatgtctgattgagtcccgtagtatatccagacgctcgaaattgaatgttgaagctctaagccaattcaaacaacaataactttttactcggatgtctgattgagtcccgtaatatatcgagacgctcaaaattgaatgttgaacctctgagcaaatgcaaacgacaataatttttttctcggaagtcttattgagtcccgtaatatatcgaaacgctcgaaattgaatgttgaacctctgagccaattcaaacgacaataacgttttactcggatgtctgattgagtcccgtattatatctagacgctcgaaattggatgttgaaccttcttaccaattc

SEQ ID NO: 23916 - DNA, 373 bp, Glycine max
tcaacattcaatttcgagtgtctcgatatattacgggtctcaatcagacatccgagtaaaacgttattgtcgtttgaattggctcaaagcttcaacattcaatttcgaggttctcgatatattgcgggactcaatcagacatccgagtaaaaagttattgtcgtttgaaatggctcggagcttcaacattcaatttcgagagtctcgatatatgatgggactcaatcagacatccgagtaaaatgttattgtcgtttgaattggctcagagcttcaacattcaatttcgagggtctcgatatttaccggactcaacagacatccagtaaaagttattgtcgttgaatggctcaagcttcaacatcaatttcag

SEQ ID NO: 23917 - DNA, 265 bp, Glycine max
ggcacgcgcgaaacgcaccactacgtgccaaccaccatacctttcacacgctaaacgagcccttgcttgcactaagcgcgatgacccctgagcattggctgaacgtgtctccctaagcgcacaaactcgccaagcgcaaaaacctctcaggaattcaaatcaattggagtgagctaagcgagcctaatcatgctaagcataagccaccactggatagaatgagcatgaattcgctaagcgcaaactctggcggcttagcgcaaga

SEQ ID NO: 23918 - DNA, 217 bp, Glycine max
cacacaaggaaaggatgactagtattgtttaatcgaagacacaaacataaaatactttaaaaatgtctaaacacacgtcgtcactattgaaatttgaaatctcaacatactaaagcaccagtaatcgaacactaccttctggtgaacgaatactagagagtgaaactccttggtgatgaatgtgtgaaaacccattgtgctacgcaatgtctgggaa

SEQ ID NO: 23919 - DNA, 329 bp, Glycine max
agccgagaagaccaagagatttatattttgataaaaaaaaaagcccaattccagcatgagaaggaggacttgagcatcgtcaccgcttcatgcccaaaggggccctgtgtgaggggacacgctacaaataacgaaatattatacaaaaccattgacgtgtctccacctaccaacacaagcgctcgaaataggcgggtcatgatagcagctaccaataaggctcttcacatagcaatctttttggtgagaaatccgacataacaaggaaacctctgccaatcaaagcgaacagggaatcactaccatggcaccattactccgataggaag

SEQ ID NO: 23920 - DNA, 363 bp, Glycine max
agcttgaagacaagaccatctagtgtttcttctcttgggcatagcaacatctctaagggctaccgtgtctacaacttgcaaactaagaaactcgtcatcagtcgagatgttgaagatgatgaatatgcttcatggaattgggatgaacaaaaagtggagaagaacggtcttatacccgcttaactacctcaagaataatatgaggaagaagatccaggtgaaccaccttcacctacatcacaacaacaagatcaagaactatcatcaccagagtctactccaaaacgagtaagatctttggtggacatatatgaaacttgtaacttggccatacttgaacctggaagctttgtagaagcgtca

SEQ ID NO: 23921 - DNA, 184 bp, Glycine max
  unsure (1)..(184): unsure at all n locations
nnaacaaaggcatgcgaagcgggcggaatttctatattctttcccatanggaatcaaacataaaaagggagaaggtaatactcgtaaccgatgctctcactcgacgtcacgcaataccacactatgcttgaaacaaaattgaatggtcttgaacgctagacaagcacgtaagaaaatgaagaaa

SEQ ID NO: 23922 - DNA, 525 bp, Glycine max
  unsure (1)..(525): unsure at all n locations
cgcgatccgtacactgacaacggctaacggggcatngaatattgtaattgataaataaanaaacnannnangaganaactgagactgagacatcgaaancgcgaacataaaactcagctncgngggccaaacctgcgaaggcagacatttggattattagaaataccacngggacggtactctctaaagcaaaaatggcatataaccttcgtccataaattcaaacatcaacgaaagatgtatagaaagcttatgcgcagactgccttacaaatgacctcatgcacacgacattctatcaaccgaaaaatgcgcccagacacaaccaaggccgctgcggcacctagattatttatacatgccaccaaggaggaattgtaacaaacagcacacacatatccttggcttaactcacaaacaagcgtacacaagcagtatggtgcaccaaaaaacgcacatgtgcacatcaaggaattctaaaccaacaacgcaaacctatgagaagcatacgaccaaacacaagggc

SEQ ID NO: 23923 - DNA, 269 bp, Glycine max
cgcatcttcttttatcttagtgagagtgaatctcctaaattcttggtgattcaagaacaccccgtctgtatcaaaggacattcacaacctttagtgttgccctccctggaaagagtgaatcttttcttcctttcatctacacccttgttctttcaaaccacacttccagaaaatccacctctgcccagaattatcgttgggccataactcccattttacgcactcgaattaagggattcttgagccttaattgaatttccaaaccagac

SEQ ID NO: 23924 - DNA, 384 bp, Glycine max
  unsure (1)..(384): unsure at all n locations
tccatcaagttatgaccatttgaatttctcgagatctttcgtggntcaatttcgggcgtctccatatgtcatgtgcctgaatcggacctccgtaagaaaatttatgaccatttgaacttctctagagcttccgttgtttaatttcgagcttctcgatatctgatgtgcctgaatcggacatccgagtgaatagttgtgacaatttcaatttctccagagcttccgttgttcaattttgagcgtctcgatatgtgatgttcctgaatcggacctccgtgtgataacttatgaccatttgaactgctctagatcttcctgggatcaatttcgggcgtttccatatgtgatgtgcttgaatccgacctccgtgtgaaaagttatgac

SEQ ID NO: 23925 - DNA, 373 bp, Glycine max
agcttcattgcctaacaatccaacttataacagcaagccccaagagactcagcataaggatgcacaggtcaaagttgagtatgtgaaaacattgtatgaccaagtgaaggtgcaaattgcaaagaagaatgaaagttatactaagcaagccaacaagaaaaggaaggaagtggttcttgaacctggtgatgatcctggacatttgagggcaaatgttttccaagaaggagggaatgatgagaatcctgaaattggccaaatacaagctaaaagcccaagtggagaaggacgaatgctcaagtggagaaggacaaagcccccgagtggagaaggatgaaggcctaaaagcaaagacttattcagactattaatt

SEQ ID NO: 23926 - DNA, 397 bp, Glycine max
tctagtcgtccatagacctcctctgtgtgtacggtcttttaaacgttgcatctgtgcattcatcgcatccactaacagacgttgagcgccgtccaactgatggtactcgtcaccaccaccacctgctccagccataattcaacaggaaaaaaaaatgtgcaataaaaattattaaggtttcaggacctcacaacactctactcacgtctcttagatggtagtacactcgtgtttaatgctctcaataggcttttgtgtaatgtattccctcttgccttttaccactcgtgtttcctcttaagttcctggatggaccaaattagacacacaaggtaatataaaataaaaggaaagacaatataatgatcacaaacagatttgatttggataacaactg

SEQ ID NO: 23927 - DNA, 127 bp, Glycine max
agcttctagaatggaaagccatgcttttatttttcctgtcaagctggcgagaaagaaattgaccaacaaaatattatcccctagaatacgcccccaactgttgggacttcattccgagaatgccttt

SEQ ID NO: 23928 - DNA, 169 bp, Glycine max
  unsure (1)..(169): unsure at all n locations
gaaaaaaagaaatgaangaaagaaanaaaaagaaaatgactgatcgtaaaaaataaagtgaaaaaggagagaagaagataaatatttaaaggaaagaaggggaggagaaaaaagagaaggaaagaaaaaaaagaaaaggaagaaaaatggaggaaaaaaagaaaagaga

SEQ ID NO: 23929 - DNA, 410 bp, Glycine max
atccttaagcacctgcggctgcagcttgagccaaatcctgactatcatataccttgacccagggtgagaatgtcaatccttaccctcggaagcaaaaaaagaatagaggggaaatttccaatcaaagaaaaagagaaggaaaatttccaatgaaagcaaaaaaagaaaagaaggaaaattccccaatcaaagagtgggagaaagcaaaaaaagaaaagaaggaaaattccccaatcaaagagtgggagaaagcaaaaagaaaagaaaggaaaattcccaatcaaagaatgggagaaagtaaaaaaggaagaagaagaaggaaagaaagctcctgatcagggatcgaaggaaaaacagaagaaatgtgcagagaggtctttggaccggacaatatctgaacaatacagaat

SEQ ID NO: 23930 - DNA, 413 bp, Glycine max
tggaaggatgcttcaatggaggaaaagaaagagggagtgaatgttataggggggagcacgaaattgaaggaataaaagagggagagaagtggaactttgaagtgtgtctcataagactttcattcatcaaagttacaacaagtgttacatatgtttctatatatagactatgtagcttcctggagaagctttcttgagaaaacttccttgagaggcttctttgagaaaacttccttgaggagctagagcttagcaacacacacccctctcataactaagctcacttccttaagaagattcctaaagaagctagagcttagctacacacacctctctaatagctaagctcacttccttgagatgagaagctagagcttagctacacaccccctataatagctaagctcacccct

SEQ ID NO: 23931 - DNA, 361 bp, Glycine max
agcttatcacttaaatatttaagattttttctttaatttctatccactgaaaattatacctttaaaagagactaaacataacgaataaaaagtgatactttttgttacaaaaatcacacacgtatagttaaccataaagactaggagccacatgatcttccaaagtaatggttgatggtgacaatgactttaccagcgcgaacatgattatgatgttttggtcatccaatggcaacaatgaatatattctcacgcccttgggatacaaaggtaccctgtgtgcagtgctcttgtaaggatttctacaaccaaagaaatttactcagtcagtgttgtatattataaaagttgcatattccat

SEQ ID NO: 23932 - DNA, 395 bp, Glycine max
ctaagctatgctgctacatttatatagacctcctcagcatttttctttcttctcagaataattatgacctttcgagcaatagatacaatccaggttggaggaatcatcaatatctgagatggacaagtcctccataacaacaataacctgtccctcctttccagaatgttgctggtccaagcaagccatatgttcctcctccaatacagccacatgttgtaggaagtacatatacttttgacttgctttatgaggtacaggctaaggaaccttcttcttctcctaccctgagtcctcccattggtcaaccaccacccacaccagagttgaagcccttaccagctaacctcaattatgcttacttggaggacaaggaaatagttccagtgatcatc

SEQ ID NO: 23933 - DNA, 304 bp, Glycine max
agctagcagcaaacacaaagaccgtgttttgtttctgacagaaaaaacaaacaaccaattatacttctataaacagaatcatctgctgtatcaacaccatcattcatagataactttgcaatcacaacatttagagtggcaacaggcttatcgggtaaaggagctggattgcttccattttccactgcttcccacagacattgagctctcaaataaggtctcatcttggcagcccacatatcataatgctctcttgcaagcactggaggtggagggcaagagtcactaatggaagccaccggtc

SEQ ID NO: 23934 - DNA, 509 bp, Glycine max
  unsure (1)..(509): unsure at all n locations
gcatacggactcgcgacacgaacgaagatagaacttgaattcacacaaaaaaaggaaaaggaaagaatgagatgagacactcgaaacccgnaaaaactnaagcctnaagaaaacaaaaaacgaccgaggacaagagaggggtctcaacttgttgagcccacccaagccgaactctgtctccttggatagtccactatcaaaaccaccctcttgggaagaaatcacccgcgaaacgatggtaaagacacctacatctcaaagagacaagtcaaaaaccaaacaagtgacgcccactccatagcaagtggcaaagcaatatataggcactatagccgatgcgacgcaaaactagaacaggaccagcaaccctatagtgaagaaaacattgccttgagaagaaaacctatgatcgccaagtgaatccacacccaatcacccagtatgaaaccatcgacacgaccccgcacaggaaaaccaacacaagcaccaccggccacaaacgggctccc

SEQ ID NO: 23935 - DNA, 338 bp, Glycine max
agcttaaaggagcactcacgccgtgttgttttaccctatagacctaaataccgaagagttcgccgggggcactccttcttgattcaagtcgaacccataaaacatgttaacatgcaaactctatctatgaactatacaagacacatgactcctctattatgctcaaaatagatttaactcgcggcacctcagaatgagacaacttgtcgagttcccacagtggatctcatcacaatactcatcggacaaaacatgccatcctcaaagacaccccgggcgtgtgaaaggactatccacagctcacagactcatgggtacgacatctaaatacgccatgg

SEQ ID NO: 23936 - DNA, 545 bp, Glycine max
  unsure (1)..(545): unsure at all n locations
tggactgctaacangcgctatcgccgctcgcttttatcgtaagtattctgtttgtnttatananaaatggaaaagagnanacctgaacctgagttcggtccgttacactatcgagtactnaagctacacagaaaagncattggaaatggggatatccgctagacttgggattgtttcaaaaatacaccccaggttaatatagtcaccatttattcaccatgtgatatccataatcagagacgtcggtgggagcctgagaagctaattaaagatgcaccgacaggggggctttgagtgagttctgggggactatacacccatcagggaccctgatgaacgttttggtaaatgtcctaggttacccaaagataatggtttgggggtatcgtaagaacggatcgccgacttggagctccctgaggccccatggatgggtctaaaagttaccttgtacagaaccaagggagcgatttggagcactgtgcacaggctactggtgtacccgtagtgtgttgtaacatgatccgctgctctacacatactcc

SEQ ID NO: 23937 - DNA, 129 bp, Glycine max
caagtccaactacttcgatccggaagcaaaagggaaagcctgggtgcctatgagggagctaactacattaatgcgcagcgctccagtccgcttccagtcaggaacctgcgagccactgcctcaatgaaa

SEQ ID NO: 23938 - DNA, 537 bp, Glycine max
  unsure (1)..(537): unsure at all n locations
atacgaggactctcatanactgtcaacacgcactacaaaganaatccatacntactaatatcactaannanaaaganaaagaaaaggagatgatcctgatgcactcgangccgncanatanannaaangaagggagcgnnaaagaaggaagagagcgagggagataaaactgatgggggagcacaaaaatgaacgaagagaatagggagagacaaggcactcacaagcgagtctcatcagaccgtcaaacaccacagagccaaccagtgagccagatggcacaacagagagactacgcagcagaccggagaagcacgcctgcgaaaaccatcatgagaggccagaaagagataacccccatgaggagccagagcggagggacacacaccccacgcaaaccaagcacaccaccccaagaagaagccacaagaagcgagagccaagccacacacaccaccctaaaagcaaatcacaccgccccgagacgagaagcacgagcgaaccgcacacccccgcaaaggcaggctcaccacaccc

SEQ ID NO: 23939 - DNA, 61 bp, Glycine max
agcttgcttctataactgctttatttttttctacccgcccttaagcgggaaaccttctcta

SEQ ID NO: 23940 - DNA, 357 bp, Glycine max
agctttgcataccacaagtattcattatgaaattactcgagaaggagagccatgagggtgggctcatgggccactatgggatagacaagacccttgtcttactcaaagaaaaggtctaatggccccatatgaagaaagatgtccataagcattgcactatgtgagtggcttgtatacaagccaagcctagggtgatgccacatgggctatacactgccttacccattccatcagcaccttggggagacattaggacggacttagtccttgggctccctaaaacccagagaggagtagaccctatctgtgatgggagggataggcttagcaagatggcacactttataccatgcccca

SEQ ID NO: 23941 - DNA, 229 bp, Glycine max
tattaggcttagcgtgcaacaggcgcttattctaactttattatacaaacattgaggaacactattgcttatcgtgtaagtgcgcactaagcttgctgcgttggagacataccaaaatagaagtgcaagaatatttgacttttttttttgcgcactaattcacaaacttgtgcgctaagtcctcaaattattatttgcatcttagagatattattgggcttatcaatgc

SEQ ID NO: 23942 - DNA, 132 bp, Glycine max
ggactaaacaacattgaaagagggaccgatccattatgaaacaccaaagacatgcccggccgcagacaaacgggggagcaagacaacacaacaccgaagagcagagcacgacgcgagacgttcaagggcaag

SEQ ID NO: 23943 - DNA, 376 bp, Glycine max
agctacacaggtgttttgttgttggatttttagttaatatagagggtactgggaagaaaggtattatttgtattcacaaaagtgggttagtgcctgattggttgaatcacacgaattgggctacaagttaatgcggattggatgagattttttggcctcttaattgctatgactatgtacgttgagattggccaagttattttatagtatttccaacccgagtgtttcatgggttaattaaaattaattaacgttgcttaacaagaagtatagcaaatgactagctagtgcgttacttaaatgagaagcttatataagtaatctttggttgattcatacttaccacataaagaagtttttttcaataaccaaatta

SEQ ID NO: 23944 - DNA, 378 bp, Glycine max
tgaaggtagaagacgatgaatggagggagaatgtgtcttacatggcctctatttatagcttaagtgtcacacatggcctctatttattcaaatttcacttgaatttgaaaatgaatttgtggagccaaattttggagtcaaaatctcactaattatgattactgaattttagctatggttcagctcactaatccaagatcaagtccaagattctccactaagtatggttaggtgtcatgaggcatgtaaaacataaaagacatgcacaaagtgtgactatatgatgtgacaatggggtgtagcaagcaaatgctcacctccccctctaaaattaaatggatgggcttctctcaattaattaaatttattccaaccaca

SEQ ID NO: 23945 - DNA, 364 bp, Glycine max
agctattcatctctcttcaatgttttctccactggatcgaggccttttctcaccttggagtggtttaaagcatctgggtatctcagctaaaccaaaacctcttcttcacataggtaacaaaacaagcaatgtcacgtggggattttgacttttttcatgtttgttgagctcattatagtcatttgcaaatagaaagggagggtgtaagggtaaagtggtatatgcttctctctttggggttggagctcctgaggctttggtaattggggtcgttgctttgttggtttttggccctataggtcttgctgaagtgaagttgaatgaggtgtatctatgaacctcttgctctgtgtcattctttttt

SEQ ID NO: 23946 - DNA, 344 bp, Glycine max
  unsure (1)..(344): unsure at all n locations
ntttgtcattagatatcaataattctcatgcaatacttgagacatttttttatctttggtttgaaaaactggattctttatttgtcttctaccatctctttctttgtaatctcatgtttctatttgcgcttggcaaaaccaagaatgtctaattcagttgattaaacaaggtgcatgattgatgtaaatcttttggtcctgtcttcggttcctatagatcaatatgtgctttgcaaagcttgcatctctacccgtgtaactccacgtatgctatggctttggctttggcttgcctgttctgtaccttataacatgacctcgttggtgcgaaacatggatttatc

SEQ ID NO: 23947 - DNA, 347 bp, Glycine max
agctttgagcaaattcaaacgaaaatttctttttacttaaatgtctgatcgagtcccacaatgcatcgagaggcacgaaatagaatacagaagctgggagcaaattctatcgacaataactttttaccctgatgtccaaatgagtcgcgttatattcgagacgctcgaaactgaatacagaagctgtgagctaattctaacgacaataattttttactcggatgcccgactgaggcacgtaatatatcgagtcgctcgaaatagaatacagaatctgtgagcaaattctatcgacaataactttttacttggatgtccaattgagtcacgttatatttcgagacgct

SEQ ID NO: 23948 - DNA, 348 bp, Glycine max
cacttcaatctaagctttccccatttctataatgggggagaggatttgaatttctttcagccctcctggtaattcagaatcacttacaattagtgaaaaaaattggttccgtgaagaaaatccacgccgaggcgctttcgtaacgtttccgtgggtgattttccgaaggtgttccgccgttcttcgacgttcttcattcgttctttgtcgttcttcgggcttcaaccggtaagttccctaaatcgaacttttcaattcattctatgtacccttagtggtcctcatttgcctttacgtgctttcaattaccatttctttacttttcataccccctttagacgtgcttta

SEQ ID NO: 23949 - DNA, 384 bp, Glycine max
agctatacgattcaatctatgcactctttgttgtccacatagagtttcgtgcacttatatactcgtcttgattacttattataccccctggtgacgagcttaagccattatacttataacattactcgcttaacttagaaaaaaaatcaatttccaccgcacgtttgaattgtatcatccggtaacttcggttaaaaagaataccgaccgttcgggcatgccgaaaccacgtgggaaatcaaaaagaggtaaaaaataatataataatcaaaaaaacatcttattattaaaaaaaagcggaaaatcaatcggacgttttctctttgggacgtctcattcttaatctaagagattaacacctatagggaaactaacgctaaaatc

SEQ ID NO: 23950 - DNA, 289 bp, Glycine max
  unsure (1)..(289): unsure at all n locations
tgtatgattatggngtacccatcacatgtggtactatgttgcgttctgtcgatggtgcacaacaagttttccacattcacaaatcgcacataaacccaccatcccctgttgcccacctccaactgagctcacgtactcccacatagaccatatcctctattctctcaacaacgggtccccatcatttctcccaagctttcccaacatcaaagcataacaacattcataccgtacaagctatctcatccaagcatatccgatcagatgcagacaactttgccaaaacacc

SEQ ID NO: 23951 - DNA, 373 bp, Glycine max
agcttgcctcagagagatctaggattgattaagcggctgtaggaaccagttagccaccgttttaggagcgctgagcaccagcagcgcttctaggccatcaagggatggtcatttctccaggagcgacgcgtccagctcagggatgatgagtataccgacttccaggaggagatagttcgccggcagtgggcatcacaagttaaccccatggcaaagttcgacccagacatagtcctcgaattttatgctaatgcttggcctacagaggagggcgtgcaagatatgcgatcctgggtgaggggtcagtggatcccgtttgatgccgatgctctcaaccaggttctgggataccctttagtgctggaagatggcc

SEQ ID NO: 23952 - DNA, 401 bp, Glycine max
tgtaggattatggggtacccatcacatgtggtactatgtggcggtctgtgcgatggtgtacaacaagttttccacatacacaatgcgcgcataaacccaccatcccctgttgcccacctccaactgagctcacgtactcccacgtaacccatatccttgtttctctcatcaccgggtccccatcaatactcccaagcttccacaacatccaagcaaaacaacattcaaacagcacaagctatcacagccaagcaaatcatagcaaaggcataaaactctgctcatcacattaacctaaatcacaggttttctcacttatagaccacagtaaaaattccttcgatccaattcgttaaccgttggattgactccaaaaatttactggaagtctatagtgcata

SEQ ID NO: 23953 - DNA, 341 bp, Glycine max
agcttattgttagctaaagtactgttgtatttaaccgagcaaccccctctaacatgtctatcattctatggctagacaaaaggaatctgccgattactcttgacaaagctgctttttcgaacaagggatctctctgccctctatgctcaaataacgctgagtcaaaaacccatgtattcttttcttgcaagaaattccttcaagttcgggttcacattcgcgatgtagctcctttgcgcacgtgtctcacttctttgcaacacattattgactatttaagtacgggcacatccacatcaagttgtcaagaaaaatatccgtggctgactataacaattaca

SEQ ID NO: 23954 - DNA, 306 bp, Glycine max
agaagagaaccagggagccgcctaatgcatgattatactgttatttacgtcaagcatattgttcctcgagataacgatcctgacaacttgaataaattacagcccaagaatcaaccagattactgcgaaccaatgagttctttaaataatcattcactgcggcaatatgatccacaaatagaggggtaaagtttatgcacaagtcaaatcaaagccagaccatttgaagtatatgcaacacattggatattattctccaaaaaatattaaactgaatgacatatatgtggcatatatcgctgtgaa

SEQ ID NO: 23955 - DNA, 360 bp, Glycine max
tctcccccaattttctatatataggggaagaagcgatttgttatatggttcagccccttaagcccttctctctctttctaatttgcttggaaaaattgtttccgtgaataaaattctaaccgaggcgcttccgaaacgattctgatacgtttccgagaggaatttcgcgatagttatgacccgctcttcgacgcttcattcattcggttcttcaccggccttcgatcgttaacgggtaagtaccgtaaaccatgcttttcgattcattctatgtaccacgggagggccacattgtgtttcgagtatgtgttattctcgtttcatttactttttatacccccctttgatgtgctttagaca

SEQ ID NO: 23956 - DNA, 360 bp, Glycine max
agcttaagtaaagtcagaaatacttttttaacaacatgaaatgaaaaataacatatccatgctgaaaatctggttcttgcaaaacaagttatcaatggtataatatactagtaaagagatttcattatagtggaaaaaactatgggcacaaggaacataaaaaagaaagctcatgcagatattttatatgcatgtaagcttgctctgataagaaaatcgcattttgcttcacttgcattataattaaaaaactttatgtaccacacctgggctaacacaattgttttctctttatccatgctttctatttttaccttaaaaaacagaaagaaagaatggcctgtagcacaatctttaata

SEQ ID NO: 23957 - DNA, 375 bp, Glycine max
ttatacaactgaaacatggtagagaagtagtgtacactttgcatcgtcattctctaaaacctcatcacccttacagatgattgaaaaaaactcttaattgaagtcaaagcacgaaactgcgccgataccggtgactagtgagtaggtcttccagtgggttgaacacctgaatactgtattcggaaagacccaaaagaaggataacagtaagacttgcatatggaagaagaggtccattttctttgatctttcgtattggtctgatctaaatgttagacattgtatcgatgttatgcatgtagagaaaaatgtatgtgacagtgtcattggggcgctccttaacatttaaggcaagatgaaagatggtctgaatac

SEQ ID NO: 23958 - DNA, 409 bp, Glycine max
  unsure (1)..(409): unsure at all n locations
ggtatatgatatgatgagagcacgaacaagtgatgttttactacgtgaggcgagcaacataaatcaaaagacaccaatgggctcgatggttnactaaaccctaaactacaccactgacataaaatntntgcgtccaaagaatccaggtgacaatggctacactagccatgaagatcagcatttgggcaatgaaacacaaacaaccgttaaagaattcgagagaagtgaataagaaaaatcctatcactaaagggaaaaaataattaagaaaatcacgagatgtacacataacagaagttccatacaagcatgagatggagaacactatataaaccaacaaaggaccaatatatatacacatagtgggaaacggagatgggagaaaaataacagcgtgaaggggccgccc

SEQ ID NO: 23959 - DNA, 55 bp, Glycine max
tctctcacattactcgatctctgcctagtttacttataagttaatatatcactct

SEQ ID NO: 23960 - DNA, 302 bp, Glycine max
ccctttgagcctatgttccccttactttgatatgaagctgattacaaaccttaaacgataaaccatgacatcaccttacccttaatgaaatctggagctatggaatcggtatgggaataagacggagaaaacagagggcgggctgttctatcggaagatataagtataggccatgcttaatgttctattctggccatgctggatggatatatataatgcctaggtcttgcctcaatcctccaacccatactacaagaaaaatagaaaaaaaatatcatcgttgcaaattctgcaaattcgta

SEQ ID NO: 23961 - DNA, 370 bp, Glycine max
agcttctagccaaaaggacttaccttgttataattcctttgatagcccttttgagccttgtttccctttccttgttttgaagctcactacaagccttaagtgaaaaaccatgatattaccatatccttaaggaattttggagctttggaattgttttgggaataagtgtggggggtttttgtttcattggacaacttgttttgttggctatgcttcatgatgtattttgggccatacttgatgtacattgtatattggttaaatgttggacatgctgaatgaaatgttgtttcttaaaggctaaagagtaaaaaaataaaaaaaaattcgaaaaaaataaaaaaaaaaaaattcgaaaaaaaattcgaaa

SEQ ID NO: 23962 - DNA, 372 bp, Glycine max
cttatctagccaagatcatacaagagtgttcaacagttctttcggtttctaattatatgggccatcaaatctatcatgtgttgatagttattgatcagcccatgaatttcctctggggctgaacacactttagcgatggcctttgctttggctagtagtcgtgggaggtcttgacttccatgtaaggtcaaggcgaacctatccatccacatggtcgcttcttgatgcagtgcgtaaatcaccctccatcttgcttccttctcggcgtacacttgtgcgaagttctctactatcttttgatcaagggtcaatgactagcttacacctcttttgtactgccctaatataacttgcatgctgtgctccctgggt

SEQ ID NO: 23963 - DNA, 536 bp, Glycine max
  unsure (1)..(536): unsure at all n locations
gcttcgaacccnncacngnagtgttatnacgtgctagctgagtgtaaatgcagaataatctcaataaagaantaagtagtagagatgatcctgatgccttcgcaatccggcgacactatannaaactgaagcgagaatgtgaaagccgacagcgcaaaaggacatacaccatattatatgaaggagaacatggtgtggcattgtaagagacatcctagaccaaaatgagaacgatcgggatgacactaaacacatgaccataggtgagatcgaaaacgcccgaaatgaatatagccatcgaagaacacgtataaatactactacacgcaagacaaagcggagaggactagaatagtgattaaatcctagacacatagaggacctagactgctgtcacacaagagcattcaaaccgagacgatagatggctcgtgtcccaagcaagagaggacaccgctacacaaccgaacgagcgacagataatgacgtgccacgcgtacacatccaagtcgaaccaaacgcatccggaagcaacc

SEQ ID NO: 23964 - DNA, 356 bp, Glycine max
tgcacactaggcactcaaaaatgtgtatggatattatttaactagtggttcacatactgaggacataggaaatacagttggagttgggaaggtcatgaaagcacaagctggcttcatttttcctttctttatgcaagacaagttatgtgttgtacaaataataatttaaatgatctactaatatattgatataaaaaattaacaccatatactccataattgtaaaatagaaaataactgattgcttaattttaaatatccttaattaaaattaggttgaaaaaaaataatttctgaactaattctgaaaaactaaaactctatatatatccacattaccatcatctatatattta

SEQ ID NO: 23965 - DNA, 387 bp, Glycine max
ccgggatctcaagtcccgcagcagcagctggtatctcttcttacttttcaagaaacaccgggatgagtcttctctatggctgtcttactggattagccccatcctctaaattgatacgatgcatacatatggaagggctaataccaggaaagttcgccagggaccatcctatagccttctcatgacttttgagaactgacaacaacttttcctcttgctcatcaacaagggaggcaaatataatcactggaaaactcttgctatcatccaagcaagcgtatattaaatttgatggcagaggcttcaattctggagtggtcggctggacagtggtataaagagatggtttctcaacctttacctcataaagataggcagaggggtgtg

SEQ ID NO: 23966 - DNA, 353 bp, Glycine max
acactcctcaatactcacgcttttatgtgaaaggatgcgactcttacttttgaatattttttcaatgttcaaaggcattggtgatcaattaccataacattgctatcgattacagctttctgaaatcaattggaacgttgtaaattcatttgaaaactttttcaaattcattttgctactgggtatcgattacaataatctggtgatcgagtaccagagagtaaaaactctgcggtaaacatgttttgagagaaaaccatgcgctactcagttttttgaaaaatcattttcatacttatcttgattaagtcttctcttgattcttgaaacttgagtcttgaatcttgatctta

SEQ ID NO: 23967 - DNA, 390 bp, Glycine max
  unsure (1)..(390): unsure at all n locations
agcntttttgagaaaacttccttgagaagctagagcttagctacacacacccctctaataactaagctcacctccttgagaagcttccttgaaaagattcctaaagaagctagagcttagctacacacacatctctaatagctaagctcacctccttgagatgagaagctagaacttaactacacacccactataatagctaagctcacccccatgacaaaatacatgaaaatacagaaaaaattccctactacaaagactactcaaaattccttgaaatataaggctaaaaccctatactactagaatgaccaaaattcaaggcctaaacgaaggaaaaaacctattctaatatttacaaagataagcgggctcatacttaccccatgg

SEQ ID NO: 23968 - DNA, 322 bp, Glycine max
tgatgtaagaaagcgtggaagagtcagtcttcctacttttgtttgttgaccacagagtggtaccttgagatatgtcgcgggggtcaggagaccttggggacgttaggtggggtgccattgcccaaaaccaagcttggctaatcccgccccaacctgggcatagtcagtcagtgagaacctgtgacgtacctaaacaggcgagctcctggcagtcaaccaataaaagaacaaagtccacgaagcaaggaggcttgtgtggcggctggccagctatgtatcttgggtggtatctaagaattaccctctgctaatcgattagcat

SEQ ID NO: 23969 - DNA, 368 bp, Glycine max
agcttgagatgaggaagtgttgaatgttgaaacttcctgcttttattgttgaccacagagtggtacctggagatatgtcgcgggggtcatgagaccttggggacgtcaggtggggtgctattgcccaaaaccaagcttgaccaatcccgacccaacccgggcatagtcggtcagtgagaacctgtgatgtacctaagcaggcgagctcctggcagtcaacagataaaaggaaaacaagaccacaaagcaaggaggcttgtggtggctggccagctgtgaatattgtgtaatatgtgagatatggcctctggtaatccattaccaagggtgggtaatcgattacaaagctttaaaatgagacagggggc

SEQ ID NO: 23970 - DNA, 408 bp, Glycine max
agaggatgcttcaatggaggagaagaaagagggatataaatagagaggggggagcacgaaattgaaggaataaaagagggagagaagtggaactttgaagtatgtctcataagactctcattcatcaaagttacaacaagtgttacacatgcttctatttatagactaggtagcttccttgagaagctttcttgagaaaacttccttgagaagcttctttgagaaaacttccttgagaagctagagcttagctacacacacccctctcataactaagctcacctgcttgagaagcttccttaagaagattcgtaaagaagctagagcttagctacacatacctctctaatagctaagctcaccttcttgagatgagaagctagagcttagctacacaccccctataat

SEQ ID NO: 23971 - DNA, 383 bp, Glycine max
agcttcaacattcaatttcgagcgtttctatatattacgggactcaataagacatccgagaaaaaagttattgtcgtttgaattggctcagagcttcaacattcaatttcgagcgtctcgatatattacgggactcaatcagacatccgagaaaaaagttattgtcgtttgaattggctcagagcttcaacattcaatttctagcgtctcgatatgttacgggactcaatcagacatccgagaaaaaagttattgtctgttgaattggctcagaacttcaacattcaatttcgagcgtctcgatatgttacgggactcaatcagacatccgagaaaaaagttattggtcgttgaattagcttagaggttcaacatttcaattc

SEQ ID NO: 23972 - DNA, 414 bp, Glycine max
tctggtgggacatcttgacttgctatccaatctgacattcaccacatattctgccttcttctattttcagattgggaatgcctctaacagcacttttgtcaaggattttcttcatgcctcttaagtgcagatgtccaaacctttgatgccatattctgacttcatcttctttggaggatagacatgtagaggagtagctggtttcttggggtgtccataggtaacaattgtcctttgatctgctgcccttcattagaacttcactcttctcatttgtcaccaagcattctgactttgtgaagtttacattgaatccttcatcacacagctgactgatgctaatcaagtttgcagtcagtcccttcaccagcagtactttgttcagactaggaagttcatcatgaactagctttc

SEQ ID NO: 23973 - DNA, 362 bp, Glycine max
agctttaacattcaatttcgagcgttgttttatattacgggactcaatcggacatccgagtaaaaagttattgtcgtttgaattggctcataggttcaacattcaatttcgagcgtctggatatattacgggactcaaccagacaaccgagttaaaagctattgtccgtagaattggctcaaaggttcaacattcaatcttcagcgtgttgttatattatgggactcaatcagacttccgagtaaaactgctattatcgtctgaattggctcataagctcaacattcatattctagcgtctcgatatattacgtgactcaatcacacatccgaataaaaagttattgtcgcttgaattggct

SEQ ID NO: 23974 - DNA, 330 bp, Glycine max
aacgacaataactggttacttggatgtctgtttgtatcccataatatagcgagtcgctcgaaattgaattttgaacctcaaagccaagttaaacgacaataactgtttactctgaggttcgatttagtgacgtaatatagggagactctcgaaatagaatgttgaagctttgtgccaacttaaacgacaataactttttacgtgggatgtctgagtgaggcccgtatttttaagagacggtcgaaagtgcgtgttgaacctattagccaatgtaagcggcatgtacttctcactcggatgtctgattgaagcctgtagatatcgagacgc

SEQ ID NO: 23975 - DNA, 337 bp, Glycine max
accggctggcttcttcacgcctgaatcatacatacacacacccacctcactaccaaaggtatttctggcaagggaatattttaatcttttatacaaagcagaagataacatgtgcgtttaagtttcatgataaaggaaatattcaagaaaaagctctaaaataaaaggcaatactcactatgtcttatgactttaattccaattgcccctttaagcatcctaggttttgaaccgtgatggtcatatatatgaaggcctgattcataacatcaataaaacaacacataacacttttagtgacttactgaacaactactagcataaaattaagaataat

SEQ ID NO: 23976 - DNA, 337 bp, Glycine max
tgagatgaggaagtgtagaaaggtgaaactttctgcttttattctttgaccacagagagggacctggagatatgtcgcgggggtcaagagaccttggggacgtcaggtggggtgctattgcccaaaaccaagcttgaccaatctcgacccaacccgggcatagtcagtcaatgagaacctgtgatgtacctaaacaggcgagctcctggcagtcaacagataaaaggtatttggaccactaagtcaggtggcttgtggtggctggccagctatgaacctgattgatgtgtgagagatggcctctggtaatcgattaccaagggtgggtattctatta

SEQ ID NO: 23977 - DNA, 276 bp, Glycine max
ctgacgcatgctagcttgaataggacattcgtttgtttatttatgaccatctgaatttcccaagagcttccgttggtcaatttctagcttgtttatatgtgatttgcccgaattggacatccgtgtgaaaagttatacttattgaatttctcaagaactctcggtggtcaaataagagcgtctttaactgagattcgcctgtattagacatttgagtgaaaagtaatatcacttgaaattcctaagagatttcgttgcttaaagactacttattaa

SEQ ID NO: 23978 - DNA, 384 bp, Glycine max
actaagcttaaccaagggagatggaccatttcaagttcttgatttaatcaatgacaatgcttacaaagttgagctgcccggtgagtataatgttagttccaccttcaatgtctctgatttatctctttttgatgcacatggagaatccgatttgaggacaaatccttctcaagagggagagaatgatgagggcatgaccaatagcaagggcaaggatccacttgaaggacttggaggacctattgatgaggacatgaccaacagcaagggcaaggatccacttgaaggacttggaggacctatgacaagggctagagcaaggaaagccaatgaagctcttaacaagtgctgtccatactatttgaatacagcccagtttcagga

SEQ ID NO: 23979 - DNA, 360 bp, Glycine max
taagagactgcagcaggatatgagaaggtttatcatatccctgagtaatctaaagcagaatctgatcaaagccagagaagatcttcaatctgctcaggaaaaccttataaacaataacatgaatggagatagaattgatagagtgaggcatctgacagaagaggttattaatcttattgaattggaggaaaagatgcttatgcagagagcaaaagtggattggataaggaaaggtgatgggaataactcctttttccatgatattataaaaagcagaaataattgaagaagtatatacatgctgtataaaactgatggaaccttgcttgaaaaccagtctgagatagaggatgagatcat

SEQ ID NO: 23980 - DNA, 404 bp, Glycine max
  unsure (1)..(404): unsure at all n locations
gggatnctctgagtcacctgcggctgcaacttaaaaaaaagcttttgttttcttatggtttggaggttatgaggggatgcctaaaaggacaacttgaatggtaaactcgtgccaaattgagaatgcccatttcatgttataaaatctttgcagaatggtgcttataggcttgaagacatggggcaagaaaggtcatctctaggacctgtaatacacccacttaaggctttattgcagataaaatcgaccagtggactctttttcctacttcagtatttttcccactcgtaaaagcgtaagggtttttgcttaaaaggtttaaatgaggcacactctagtatctatgtaaatggatggtccattatgaaattctttttaactctattcattgcccaattatatat

SEQ ID NO: 23981 - DNA, 403 bp, Glycine max
tggccaattagaaatcaatgtcaatattattgacaatttaaaacatcaacaatacaattattataactccgcaaatgttgatctacaaataatgtctcaccagtcaccatgttttaccatttgtcattctgtttataatctcacatggtacactagtcatgatgtagggattatttctcctgaacacgatcctgcatctctacttttacagtttagttaccaactcgtttatctctttaaatcaaaataaattgcactaagtcaaaacactataaaaaaattgcaacatgaaatacagaaatacccgataaactcatgcatattgaagaacatgctaaataagttctaggagtagcaagttaatgaagattcaaaattttatgtaatatattgaaaaacaact

SEQ ID NO: 23982 - DNA, 382 bp, Glycine max
agcttcatgatgatgaacctatcatttttgacgatgccaaaagaccaagtgattgattcaagacttcaagatcaagcatcaagaatctaatccaagattcaagattcaagagaagaaatcaagaagcaataagtcaagacttcatataggataagtattaaaagattttttcaaaaacaaaatagcacagttttgttatacaaaagaattttctcaaattttttaagttaccagagtgattactctctggtaatcgattacctgttatcagtaatcgattaccagttgtcataccctaatttcgtccggggacctttgctcgatgacgtgcgaccattctttggtcctcgtgaggtgcttggcacccatcattatgcaattt

SEQ ID NO: 23983 - DNA, 404 bp, Glycine max
agaggatgcttcaatggaggaaaagaatgagggatttatttagagaggggggagcacaaaattgaaagaagaaaaagagagagaagtcgaactctgagttgtgtctcacaagactctcattcatcaaagttacaacaagtgttacacattcttctatttatagactaggtagcttccttgagaagctttcttaagaaaactcccttgagaagcttctttgagaaatcctccttgagaagccagagcttagctacacacacccctctaataactaagctcacctccttgagaagcttccttgagaagattcctaaagaagctagagcttagctacacacacctctctaatagctaagcctcaccttcttgagatgagagactagagcttagctgcacacccccta

SEQ ID NO: 23984 - DNA, 409 bp, Glycine max
  unsure (1)..(409): unsure at all n locations
ntatccaacttaaacatggaaagaagacaatatatatctggctctgaagatttctaaaaccttatcacccgtatcgacgattaaagaaagcttttaatgagagtcaggaaaatgaaagtgccccaaaaccattagctagaaaagaagtgtatgatcgggtcaaggacatagtaactatcattgggaaaacccaaaaaaagccatcatctgagacaaacatatggaagaaaaggtcaatattctttgatcttccatactgttctaatcttgatgttagacattgtatagatgtgatgcatgtggagaaaaatgtttgtgatagtttaattgacacccttcttaacattaaagggaagacaaaagatggtttgaacagtcatcaatacttggtgaaatgggatccgacatc

SEQ ID NO: 23985 - DNA, 371 bp, Glycine max
  unsure (1)..(371): unsure at all n locations
agcttctgcctgaaaggattccgcttcacgcagctntgcctcagcctcagtagattttttctgcgcttcatctatcaattggtgtgcttcagaaactttactctcagctgaaacctttgtttcagcacattcagtacgcatctcatgcaaggccttttcaagctatagaaatacaaaaaatacccaagctatagtaaatacacaaacatttaggaagaaagggccaatttatacgaaatcaaaactgtatacaacaagcttacactagctatgcacgcttcattgattcctattgccatcttcaagctctcttcccgtttccttgcttcaattaatgcagaataaatcatggccgaatcatgcttatgcat

SEQ ID NO: 23986 - DNA, 390 bp, Glycine max
aaaacaataagtgagacggtgccggtgatcggcgatggttactcctataactcctgattccgcaacacttgcttcgagagatccatggaagcgtcttaaacaacctgccttcgatgataattccattcagcgcaaagataaggctgcgcttgttgccttcaagctcagatttatctatctgccttttatgttctcctcataatatgcccttagaatcttaggtgcatttaacgccaaatcttctttccgcggtggtgcagtatcggtctgtgcctgtcatatcagttctacttgttgattattataggtttaatggatggtcttcgtgccttgaaactagtagcaaatggaatagtgtttggaacgctgtgaaatgtgactggataaaat

SEQ ID NO: 23987 - DNA, 374 bp, Glycine max
agcttgagtttattgcatatttatattaagatataattaaagtttattagatttaaagacttgtttgaaaaaaaataacttcgataattttttgaataagttcttattatataaaagctcattataaaagtaattaaaattcaactagtaacctatttgtgtttggatatacatatatgttgataagaattggatatatacgtgttgataagagcttacataattttgaagtgtttgcatgcaatgtcaagtgaacttataaaaggttatctcattttaaaaattaaaaaaaaagtgaaccatgcataaaagtaaataagaaattaaaaactaactaaacatttaatatactaacatcatatgtattacaaaaa

SEQ ID NO: 23988 - DNA, 260 bp, Glycine max
acgaggcccgaaccctttgattacattcaaaagaataacttcccaagaactcgcgtcttggcgggaaaaaagatcatggttccattgcgaagagaagtactcacaaggtcacaaaagcgcacctttactcgtcttactttttgcagaagacgatcaattaacacctggagttgacttacgggcaccctcaccaacagatgagttatttgggaaccacctgccgcccaactgagtttccatgctctatcagggcattctgc

SEQ ID NO: 23989 - DNA, 389 bp, Glycine max
tgcaagcttataatcgcgggtatgggattataaagtcctttgttccaacatacgaacgataatgtccaaagttcattggatttggagcaacctagccctcttagtgatacaactggagaaatggtgagtggatgaacgcccctacattttcgcagcgggcataaggcactccttgtacggttttaaaagctgtatagttgggcctaggcttaaaagttcttactttggttaaggcttggcgtatttgctatttaaataatgaagcaaggatcttactgtatttgtgcctacgtctctgcctattatcaacctaattgcatgcttacttcttttctgaaaccgcagatccgaagacaagttccgctaaggagctattatctgtgacccac

SEQ ID NO: 23990 - DNA, 365 bp, Glycine max
ggccacccagctcgcccaggcgagctcagctagcccattcgagcatggttgcttcctccagaagtaacagccttctggagggcccaagtgggcctggttgctatttgcacccccatttttactaagtacaccccattgcctttttttttgtgattctttattcgtaatagtacggaaacttatgaatttcgtaacgatacttgtattctatccgcaatgttacggaaccttgcggattacataatcatcccctttttgacttacggaatgttacggaacctcactaatcatccactcttttgatttacggtgtggtacggaaccttacggattgtgcaataatattatcttttgttttccggcat

SEQ ID NO: 23991 - DNA, 388 bp, Glycine max
ttgatgtttgagttgaatgcattaaaggtaaacagactttatgttataaattatgtgcatatagagctacagacgtcttggaattgatacatacagacatttgtgggtcatttcatataccttcatggaatggttaacaatattttatatcattcatagatgattactccagatatgcacacctgtatcttatacatgaaaagacacaatccctggatgtgttcaaaacatttaaagttgttgttgaaaatcaactcatcaaaagaatcaatagagtcagatctgaccgtggtggtgaatactatgtgcgatatgaacggtcaagtgaacaacgtcctgtgccttttgccggaacctatagaatgtggaattttccatagttacacat

SEQ ID NO: 23992 - DNA, 360 bp, Glycine max
agcttcataacctcagcactctttgttagatgacccacaggacgagcaatcgctgcaaaaacaaccaaaggcatgaatgtatgtaaaatgcgagaaaaaatagagttaatagactaaaaccatgttacacagcggatacttgattatataaacaagtagtattgaatacacataagtagaagatattcgatttctctatatcagatatcaaagcctatcacatcattatacaataaattgctgattctgaacactcccctcaatctaaagctttggacaagaaaatctattcccaactaataaatagaaacataagattgaggcccaccagaaaacaatgtttgaaagacaactcaagga

SEQ ID NO: 23993 - DNA, 351 bp, Glycine max
ctaatggacttttattacgaggagataagttcatataattattatgtatgttcttataaagatatgagaacacaactaataatctgtacattcaccaaataacttcaactttgggaaataattattagttcatgacacatttttatttgttgatctgaatatcttctttgataggtgtaaattctctctctctctctctctctgtatatctctctctatatatatatatatatatatatatatacatatatatatatatcgatctttaggtctttttatccatttcattaaactatgttggtgtatgccgtcactcgtaaataataaaattctttttttagtactgtgcaa

SEQ ID NO: 23994 - DNA, 130 bp, Glycine max
agcttgtgattcaggttttatatatttaatatatatatgtatatagatagacaattatgtaaagaaaaatgccgttgtcataacatagggaatgtaaataccactttaatgaaaatttattatgctcctg

SEQ ID NO: 23995 - DNA, 174 bp, Glycine max
tgcaatccaagagccaagcatggcaaatggaaaccattattgactcttgtactggcatcactcaaagttaatcactttccaatatgcccccacatcccaaaccccttctagatattatttacttggcagttgatgggcgctgcactctgggttttctgtactaaggtctatgat

SEQ ID NO: 23996 - DNA, 361 bp, Glycine max
gagcctagctacttcgccgcccgttattttatttttcgcggaacccgacagactcctcattaacaccatttccggtcctaaaattatggagggctgcagcaacgcattcacacaacttattactcgcaaagaaatggatggtcgcatgtttgctaagtagtgtaagtaataggataaatttggaccctttggtacgatgtgctctattaacgctcactttgagagaaccgcagtgggttatataatcatgcggctttaatattcaaatgtattgaacttttttcaaatatgacagccatttatttgcaatagttgtttaagttgccatgtctattgacttgccattaacaatccctactga

SEQ ID NO: 23997 - DNA, 96 bp, Glycine max
ggagtgatttgctatatgcacgcattgatttttttacctattaatagttgttacaaggaaaacatgaaacattctttatattaatctatttgcttt

SEQ ID NO: 23998 - DNA, 314 bp, Glycine max
taaaggttgcaccttatcctcaccccacagttgctagttgtactcaagtcataagtgtggacaaagagcctcatacccgagccctgaccatttaccagataagcctggatgacaaattcaatataggtttgtgtgacgacacttctgatataggcccaaagcctattgaagagctcattaagttgttactggagcccaaacccaggcagtgtatgctgctcactatggacctcaccagccatgagcacaagcgcatcactaatgttctacacagaaacacagacctgctcgcttgatattcatctaacatgcca

SEQ ID NO: 23999 - DNA, 156 bp, Glycine max
  unsure (1)..(156): unsure at all n locations
aaaaaaaaaaagttgacggctcgagcgcccaaaaanaggcgaaagcagggaaagaaatcaaactccggcacacagggaaagggacagagcggcacccccagggcaaagaaagccggaggcagggccccacagcgaccgaacaacgaaagaaggggg

SEQ ID NO: 24000 - DNA, 271 bp, Glycine max
  unsure (1)..(271): unsure at all n locations
cntactaaaatgatatgcgaatgtcgggatttggtattttattaatgttctcaactaactgctgatctagcgttatcgattctatcaaacttgtatacccaaacgcctgtcatgggttctaacttagtttagcatgagaatcaactggaacggcttaaaatgttataagtgatgtgatggaaaaacaaaagagagtgcatactcttaatgttgtataaataaattgctaggtagagatcagaaaatatataatttatcctcaaaaaaattg

SEQ ID NO: 24001 - DNA, 261 bp, Glycine max
attgaacgggcaaaggaaccaacgttatgtttgaaaaggatcatagccttctataatgcaacccccgttatggacgagtttctaggctgatacagggtcaaaagctaattaaatgaggatggagctgtatcattacaacattaatggtaaacacactatatactgtctgaagggcattcttataggaaaggtggaatttatgggacacctgacttggaacaacaaggatattgaatagtgacggaaaatgcgttccgaacc

SEQ ID NO: 24002 - DNA, 329 bp, Glycine max
tctacacacacaatgatcctaccaagaccctttgcattatcatcagtggcagacattattggacttctgccactcttaaattcagccaagacccaatccctttcatcctggtttttatcaccatggatggatagtgctggccatccatacactctcatttgtctggtaacttgaacacatcccttttttgtctccataaatattaaaattcggctcccgtccatcacttcttttagcagcctgatttatctacattttcaagctaaagtgttaatttggaaagaaaaagcatcaaacactgtcggtctattattattgatgacgcaaac

SEQ ID NO: 24003 - DNA, 377 bp, Glycine max
  unsure (1)..(377): unsure at all n locations
agcttgtaagactatttcaatctgattaaaataattnggcgggaagaaaatttaatttaaccaaaatatgtaggcttttattattctaggtattgcaaaatatgggatacaagctttattttgtaacgccataaggccacttgtttggtcttccgctgaagaggagggtctattattcttaaaagtttcgtaaagaaaaactactattttttcaatttggttcaatctgggtttcaaaggagagaacctgttattgaataaccttatttccagaaatattttcctttttaaaatcaggaataacttattttgaaattgtttgtaagcaaggattgcataaattcttatgacaaaagctacaatgagctcttaatgat

SEQ ID NO: 24004 - DNA, 389 bp, Glycine max
  unsure (1)..(389): unsure at all n locations
tactntcttaaagtagcatatgcctcttctctttacatttggatatcccgaggaatagaaataagtatggatttgtacaaaaaggtcaaacagttcaacaatcttaaactccagtaaaagcaaatgttatcacatacattcaatacaatataataaatgttttactaatacatgttaatgaaacttctcacatacacaaaaaacattccatcatttgctcctcgtaaaaactccagtaaaatgaagtgtttagtttgttttcctttatatttttcattgatatgttttcagtaaaaattacaaaagtttcaccttgttgtcattcctatgtgtgttttcacaaatgtttgatcctatttcctatgttggatgcattttaataaaagcaa

SEQ ID NO: 24005 - DNA, 214 bp, Glycine max
tctctgactgagccggaccaacacgagcgcacaaaattttacttaaaaagactctatctacgaaagacctttaaggagacaaccattattaaacattactgccatacccaagagaaataggaacagctggaagagcatttttctaaaacgagcatcaactataacatataaactccaccaccaataggcaacaaaacaaacctcttctttctaa

SEQ ID NO: 24006 - DNA, 208 bp, Glycine max
  unsure (1)..(208): unsure at all n locations
tcgccgnttgaaacagtgcctcaaccatggcanaacattttanatattgncctacataaaaatggcacatttagggcctcgcactaactcgccattcataactcgctctttgaatatgggcttacaaacaaagaatgcttttccgaagcaaccaacagatggtctatggtataccgactcacaccagaagtgcatcatttactctctg

SEQ ID NO: 24007 - DNA, 385 bp, Glycine max
  unsure (1)..(385): unsure at all n locations
ntataagttttctagtntccaaaccttgttcttccatttattatttatgtgtgctatatcttttcattctcttctccctttgccaaagagaattgaacaaggactaattgcctgaattctttttgtgtctctcttctcccttttccaaaagaacaaaggactaaccgcctgaattcttttgtgtctcccttctcccttttctaagaattcaataagacacagtctgagaattcttttgattcttccctttcccttaaacaaaatatttcaaaggactaaccgcctaagatatattttgtatcccctctacaaaatttcaaaagagtaaccgcctgagaactttgtcttaacacattggagggtacatcctttgtggtacaagtag

SEQ ID NO: 24008 - DNA, 370 bp, Glycine max
  unsure (1)..(370): unsure at all n locations
agctagaataattatttaaggtgtttgatttcatgtttttacaagacantctctttgatgatctacataaaatcaatacggaaattctatgctttattttatttaattaattggctattttttagaatggttataaaattttacgctttcactaattctgaattcatctgttttcgtgaattagatgtggactttatatatgatactgttatataagccccgcaaattactactacataatataaacccttttaattccctgtgtaccttagacacaacatttaatgtaaccttttgcctatcttttgttcgtctctgcctcttccttgttaataataattaaccattttttgttactgcattagcccag

SEQ ID NO: 24009 - DNA, 337 bp, Glycine max
acaaatgggtgttggtcaatgtaccacatttaatagcacacactaaaagaacaagaaaaacagaccaatttctaggcgtctcagaaaaaaacttagacaagacagttcacctaataagtttttggaatagtagtaaacatatttgtgtaaatacataacctaccagagttcattggactccatcgctggaaccgaaaaggagatggtatgttgagaacagaagcaccacaaacactgttatgcctggagatgggaagatattgccctcggaaaaaccctggcgtccaattgccgatacatgatagagcacaaagaagaagaatataagaaagcaaca

SEQ ID NO: 24010 - DNA, 309 bp, Glycine max
agcttttgcagatgctacaacgaatttatttaaagggagaaaatccccaaagaggggtaaaatcttcttttccactctttttccattcatgatactataatacattcggaggagacaatatttttctatttttatgcaacctacaagctatatgaccaatccagaggtttatctttaaatatgctatggaaatgtgaatcttaaatgtgcttagtaaaatgttggagacattccatttggctgcttattgattccctgttatctctatcaaataatgtagtaatctaactttttggctttttaaacgcg

SEQ ID NO: 24011 - DNA, 402 bp, Glycine max
  unsure (1)..(402): unsure at all n locations
tcacatctttataaagacatactcgattgagagggatttacattttaaangnacggagaggatatgatgtatttaaggtatgaaaagtctttatacctaaaaaatgttttaaaaaaatatttcttaatttatcatgatatttgtgtaaaatatttattgataatgaattgttattaaataactagctgggactgttttttctctagttttacacaataactgataaaccaaaaggcctaatttgagaaatataagttatacaaacctaatgaacacttataatatattatgccaataaaatatatttaattgtatatatattagaaaatctccaaccaataaatccatcataggtttcttatttaaagagaattttatctaatacatcttagagtaaataac

SEQ ID NO: 24012 - DNA, 377 bp, Glycine max
agcttgatcaaaacaattatctaatttttctaatccattcaaatcatacaatggctcattcaaatcattctcaaacactcatttgatacaaaacaatccactgcatatcattttcaatcaattcactgttcaaacacgcgtgttttataagcaaacaactcaaagtgctaaaatttaaataactgaaacataaaagccagaattaaattgactgaacataaatgataaaataactgaaaataaactaaaatgttcaaaatgcacaaatttaaatgtcctactcctgtggttgctccaatgcatgctcatttagatccaacccctgaacggttggcaatcctgaaagataagctgctctacttatatctggcgcaata

SEQ ID NO: 24013 - DNA, 397 bp, Glycine max
tggagacccaaagccatgctccattggattgcttgtttttgtttcataccaaaagtcagtccctcatgaatctacattacaaaatcttcccaaccaaaactcctttttcatcccttaaacacatgccaaagccaatcttctgttgtaaattaaggaacacaacatttacattacattttagataagatgtgggtggaggttgccaagccactaaaatcatagtttctttgaagaacatttatgagaaattttgcaggaagtttcaatcacacctcacaactcaactaccatgattttaagaggctaaatatttatttgttatttctgtaagaattaaggattgacatatattttgtaagactaattacatatgagtacacattttaaaatacttatc

SEQ ID NO: 24014 - DNA, 369 bp, Glycine max
agcttcttttcgacctatggtttttttttaactcatctttcaagatcattgcttcgacccacgactgatccctttcagctctcttgagctcaagctcgtcgtcgctgccccataaagcctctcagaacttggttcaaccgtgctctttctttcgggccctcttgggttctcattccaaggcttcggtggcggccatatagacatctctaggttcactcagacattttccagacattgatggccattgacttgaacatttttttaaccgctcgggctcttcaagcttcacctttggtcctggactactgccctctttctggagttgtaccctttttcctttggatcggaggtttctgagcccctacactg

SEQ ID NO: 24015 - DNA, 386 bp, Glycine max
  unsure (1)..(386): unsure at all n locations
tctttgagaaaacttccttgagaagctagtttttancttcacacacccctctcataactaagctcacctccttgagaagcttccttaagaagattcctaaagaagctagagcttagctacacatacctctctaatagctaagctcacctccttgagatgagaagctagaacttagctacacgccccctatagtaactaagctcacccccatgactaaaaaacatgaaaatacaaaaaaaaaggccttactacaaagactactcaaaatgccccgaaatacaaggctaaaaccctatactacttgaatggcccatatacaaggccccaacgaagggaaagactattctaatattaacaaagataagcgggcttatactaggccatgg

SEQ ID NO: 24016 - DNA, 364 bp, Glycine max
  unsure (1)..(364): unsure at all n locations
agcttgtagcattcacagatttacttttcaatttaaacaacacncaaagaccacggccactgtacttgaaacgtcttttaggaaatacagtaacatacatggaaagacaaacaaatagctacttggtccacattttctaaagtagtagatcgaaaagacatacagcacaggaatagagaaaagtgaaagatccgcaaagtagcactgcctaatcaatcatagcgtggggtcaaagaaaaggcaatataaaaggggcgcactaaaaaagcgctcagatgaaatataactatttgaagcacagtaaaagagaacaaattcgaccattacacgctttgtggggcccgctccaagaacatattggggg

SEQ ID NO: 24017 - DNA, 225 bp, Glycine max
tctagaaggaaaaaatgactcaatagagactgttaatattgggaatatctgacaaatctaccatatccactatgggtaacagaaagagtgtgagaaagatataacccaactctatgtgggtggattatgtaaccaactaatagtgtgatttagaggggagataatgtttagtgagggggcggtggtgacgtgtgaacatttatctttatttgtggtgttctctct

SEQ ID NO: 24018 - DNA, 351 bp, Glycine max
agctacgtattatattatttgttattataaaaaaaaatcggccatacgcacgagataattctcactctctcaaaattagttattaattaaatatacgaaaagtaaaaacataaatgaaaaacataggcatgagagtagaaaacatcaaactaaaattaagatacacacatgagcaatacataataaggatagtcattatcctctatgaatgttaataagaaaaaaatattgaccacaagagaaatacgaacacttcaacgtgacaacatttaagttgtcaaaatgaaaattcatcccccatataagatgaaaaatgcaacaagaccatatacaaaaataacttaaaaatga

SEQ ID NO: 24019 - DNA, 560 bp, Glycine max
  unsure (1)..(560): unsure at all n locations
agatcagcgcgctcatcagtcacactgtcgactagtacgtgactttacaggcaaccgtatnantttgacngtatttatatacggggaaccgagnangnnngttgaaacccgattgacntccgatagagcnnccngngacacnananaatactcaagcaagtncaagaagagaaaagcgacaaatgatcgccatcttctgtgagagatagatgagagcttagatacaagatcggaccagaaccgaaacgcaaatgatggggaaacacaacttcaattaaacgacatggagaaaatgatgtaaacaaagccctagtatgtcaagctaaccacccaatctcagcatcctcagagggagacacaaaggggaagatccacctgtcaggcaatgcactagtggacttgccaaaataacaaggacccacctgctgagcgtgaccgcttgcaagcaaacttttcacagtcagaagcattatcaacaatgagcgtacgacgcaatgggagcgagacgttcgaaaacaacgagaactaaaaaggaagaaaagccaacgcacggttagacc

SEQ ID NO: 24020 - DNA, 212 bp, Glycine max
ctggacagagaattatatctctctgattctgatgtttttgttgtaaggagtagagggtcataccttctatagtccttatctgttggtttgctaacattaaatacatgatttcccaccgtctggtatttagtttgtattatattccagtgacttggctataatggtattctttgatctgaaaatcatatcacgactatggctggggaatgggg

SEQ ID NO: 24021 - DNA, 371 bp, Glycine max
  unsure (1)..(371): unsure at all n locations
agctatgatgtttgtgttgaatgctttataggnaaacaaaccaaaagcaagaaattaggtgcatatagagctacaaacgtcttggaattgatacatacaaacatttgtgggccatttcatacacctttatggaatggtcaacaatattttatatcattcatatattattactccagatatgcatacctatttcttatacatgaaaagtcacaatctctggatgtgttcaaaacatttaaagttgaagttgaaaatcaactcatcaaaagaatcaagtgttagatctgactgtggtggtgaatactatggcagatataacagttcaagtgaacaacggccgggaccttttgctatggtcctaaaagaatgtg

SEQ ID NO: 24022 - DNA, 272 bp, Glycine max
aaagccaacatcagctgatggggctaactcagcctagcgattcataattgttcatcaataaaatatcttggcccaatgccagactaaattaatggactccctaatatatgttttctggagttcgccaataaccccatgaatggaacaactccccataggagcctgtactttggcaatcggtagataccaaaaatgcctcttcactggcgaaataatcatgacaagtgatccaattggtagagaatcctcacgatttttaccttacggttaat

SEQ ID NO: 24023 - DNA, 237 bp, Glycine max
  unsure (1)..(237): unsure at all n locations
aatacatttnttttctaaaaagaataatgacttgaatatcttactgaattataaaatggattttatattcttgaataataaaatataatcacgtttcacagggaaaaatatgtaatttttatcatataagaactcacgtgattagttatatgatcaactgacaatattttttattaaacaatgtatctcatttaacttaatcatatcttactatttatttaaaaacaaaagatggga

SEQ ID NO: 24024 - DNA, 473 bp, Glycine max
  unsure (1)..(473): unsure at all n locations
acgacatctaacagaacgaaagagaagantatataacacaaatntaganaaagggaatgagacggactcgaaacngaananaaaagaaagagagagaanggagggaaggggattnaatttaaggaaaaaaaaggggggagaagaaaaaaaggaaaggaaaagaagaaaaaagaaagaagagggataggaagaagaagggaaggaggaaaaggaaaagagagaggagaaaaaaagggaagagaagagaaaggaaagagatggaataggagagaaaaggaagagaaaaaaagaagatggggaggagaaagaaagggaaggagagagaaaaaagggaagaaaaagaagaggaaagaggaggagaaagaaagggaacgaaggaaaagaaaggaaacgagagggaaagggaaaagaaggagaagggcggagaagaaaagaaaagaggaagagagaatagaaaatgaaagagaaaaagg

SEQ ID NO: 24025 - DNA, 341 bp, Glycine max
tgctccttaccaggaggaggaatggaaactcagcacatgtattttttcttgccgcagacgaaggctaaggagctcctttgctcatcaagtttggatatgaaaataaggaataagccccaggttgattccggccatataacttcatcaaacagtgttgtggagatcgaaaaaccaagctcagaagaacctatctttcttacggataatctaacaaggaaagccacgagaaggctgctagtggctattttgcaactatcacaatccgggcttcaagcatatgggaagattcctctcatatctcagcgtggtggaaagcactgagtgctgtcaccgatatatgc

SEQ ID NO: 24026 - DNA, 366 bp, Glycine max
cagctaagcagatttggtctttttattgataggatcaaagggggtcctaaaagaagcatatatgaacatcccactaggacgaccgataagactggggcgaaaaaatagggtgaggattaaggagaaacccatgctgtgaccgacattcctgtacggacaaggttcccaccaaccctacaaaatatatactgagcgcatgacaacacctttccttacccaccccccatatattcacaaaggggctctcttaatataccaccaagtatgtttaccctactttcaatgaacaacaccgcccttggcacaaaccaaaaacacctaccaagaagtgaattttgcttctcatagaacctgtacaactcaccc

SEQ ID NO: 24027 - DNA, 316 bp, Glycine max
  unsure (1)..(316): unsure at all n locations
nnttcattcattctatgcgcccgcggtggtccacatttgttttcgagtattatcattctcatttcatttattgtatataccctcttttgacgtgcttaatccattttatttaagtcatttgtcgcttaacctagaaataaaataaatttccaccgatcgctggaattgtattatccgttaacttcgggtaaaatgaattccgaccgttcggtcgtgccgtaaccacgttggaaatcaaaaaagaggtaaaataataatataataatagaaaaatgtcttttagtaaaataaagcggaaaatcaatcggacgttttt

SEQ ID NO: 24028 - DNA, 552 bp, Glycine max
  unsure (1)..(552): unsure at all n locations
accattatacccctctgcacacacgacgatacatgtatntacacgtacttttganttttantntgtnaanannaaaaacgaaanacagtngnnntactgancctgtagncgcttcgaanancngngacactatanaanacncaagcnggcacccagcacgcccaggcaagcaagggttttacctctataangcaccgcctataggaggaacctactggaaggcccaagcgagcctggatgctatatgcaccccttgctaactaaatacacccctgcctttttagctgatacatttatcagtacgaaacacatctcaacgaattccaaagccgatacacgtcatactatccgaatgtaacggaaccctactgaatacgaagtcatcccatatgaggaattcggacagcaaaagaacctcccgaattgtgcaacaatgcaaaccgttgcaattaacatgaatctgaactacacggaatgggccaaaaagcaatcttttaatatagatatgaaccggacacaacgaatatctaacaaagacatccgaatccaccc

SEQ ID NO: 24029 - DNA, 242 bp, Glycine max
ctataaaactcagctatgggagtcagcaggtcatagccgctcacatattggatccacaatatattgctgcagagcgactcaaaagtagtggctagtgctctaaaacgtactaaatttgggaacaagtcaaggagaactaaggttcaatctattcataagtagtaggattctctcatgagatttcggatagagaagggaataaaccttgctgacaacgtaggctgaatatgcttgattggggg

SEQ ID NO: 24030 - DNA, 244 bp, Glycine max
agaaaagaaaagaaggaggggagagaaagaagaaaggagagaagaataaaaagaaagaaaaaaggaagagagaaaaagaaagaaggaagagagaggaaaaggagagagaaaaagaagaagataagggagagaaagaaaggagggaaagaaagaaagagaggaaaagaagggaggaaaaaagagaggagaagaggaaggaagaaaggaaggaagaaaggaaaagagaaagaagggaaagagaaga

SEQ ID NO: 24031 - DNA, 182 bp, Glycine max
aagagaaagaagaaggaagaaaggaagaagaagaagagaaagagaaaagagaggagaaaaagaaaagagaaggaaaaagaaaaaagaaaaaaaaaaaaaaaggagagagaagggaaagagagaagaggagaaaaagaagagaaaaaaaagaaggaggaaaaaaaagaggaaggggaaaaaga

SEQ ID NO: 24032 - DNA, 330 bp, Glycine max
cgagctgcagcttgagagaagagagttttatgtttaaccttcctgctcgtatagaggaccacatagcggaaccaggagacacgacgcgggggtcaggagacctcggggacggcaggcggggtgctcatgccaaaaaccatactagacataattattacccagacccgagcattaggcaggcacggagaacctgtagagtacctaagcaagcaagctactggcagtctccagataatcgggaaacacgacccccaaactaagaggatggaggaggcaggccccgtacgaaatccagtgaagacacggattgtgggccccggcgaccataac

SEQ ID NO: 24033 - DNA, 545 bp, Glycine max
  unsure (1)..(545): unsure at all n locations
gtatatctacacactactgcactaattcgacacancggttaatcgcattttcagctatnnntattcattcnnnaaaggataaacgnaaaagnntttganccctgttgacgtcgttagnacagncacannaaanaaactcacgcatcgcttgaagacctcgggangaggacatgatctacatcttttttatagatacaccagcaggacttggaggacgtatgaaagggctacggccgggattgccaatgaatctctctcacatagtgctggccataatgtttgaatacaatccccatgttcattgagaaaatgcccaggcatggagtcgtaatctggcccaaatggatgaggactatatgaccccagtttgcttcatttgaaaaagtttatattgtcaaattatggcccactctttgttaattgctgaaccaaaatatgtccgtgcaatcaactaaaagggcttatttgggtgtgttcaactagcatgaaggcctatctgtgacctaggattcaccctttggatatcaaataggtgctgactttcg

SEQ ID NO: 24034 - DNA, 388 bp, Glycine max
agcttcacatgttcatctaactttttatgtcttgcaaaaacaagatggtcccacacaaagcagctttccgggccatagaaactttgtattgcaaatgcaatgcatattttgaacacatttggtgcagacaaaaggaaatacacaacttttataaatgttattgtcgaaataaaatctcaatatttgtacatttgtgtttgtaatgttcacaataaccatcaaattcatcatagtgcaatgtcttatatcatctacggctttctacatcgaatgttttgaacttttacaaaatatgctgctcatttcttgcacatagctgttattgtttccatgtctaatgacgtgccatcaacaaaccactacaaaatatcataaatagaaataatat

SEQ ID NO: 24035 - DNA, 311 bp, Glycine max
tggggctactaatctatgccgagatgcgttctacttttctgataaagacggaggttacttccctgggttcaaatagcaatacccagaccgaccaacaccctttgttgatggagcagccacaaacccataacggtcattatcatgtaattgacattacaaggaatggagaatctcttactacgacatctcgtaatgatcaatactctgaaatgcatgtaccacagaatgaagatcaagcagctggggatgctaaaaatttcaatcatcaaacaatatcatcttctgcacccagattaagctctagaaattca

SEQ ID NO: 24036 - DNA, 116 bp, Glycine max
gtctctgagctgaacccgggaccaagaactgagcagaagcaagattttttgattaacaaggaagggttatagggcggacgaacgaggaggaggaaaaaaacaggaggtggaaggaa

SEQ ID NO: 24037 - DNA, 343 bp, Glycine max
agcattagatcttgtatttttatcttaacatggaatttatggtcacccacataagttaacattatctccctcccactgcgaatttcatttaggcttctaaatgtaggctaccctttgtagaagagaatcgaatctttatcatattcaagccctttgaccattgataccctcccttgcttatcaatcaactcctactctataaaaactccattcttaaatgttttccaaaactttggacaaacacagagagagacctatcctcttgacattggaaagtatgttcaaaaatcgatatatcaaaaatgtcctttacatagtaatggattgtggatacgtttttgaa

SEQ ID NO: 24038 - DNA, 192 bp, Glycine max
acactatctcaactcttgatagggaatgctattttagggaccccattgggctccctaataatcgttttaaatagtttcttgtttagaagtgtgagagtgatattcctagaactgtcattttggaccatccttaactccttatagtaacacaagagatggagtgcctcatatgaatatgttacttctgggcat

SEQ ID NO: 24039 - DNA, 416 bp, Glycine max
  unsure (1)..(416): unsure at all n locations
agcttcaaaccacagcaacacaaaatctatgtgtccaaaacccctcaattcaatggtttttctaggtttgaaaggtggaatttagaatgaggtaaatttggagcaaactctcacctcacacaagtctataacatcaatctaaacttgctcaaactggatttacacctaaatttccaccgaatcaaaatttgactcctcaacacccaattntgccctagaaatggctcttggttcactttggtcatttgtttttctctctagctcagcctaacctttctcacatgtcctanatgacatttcaagctagtattaactcactttaacctccatttaccacagaattcagacttagccttcccactctcanagtctcgctcttttccactcataacatcacattctcactttctaaccct

SEQ ID NO: 24040 - DNA, 442 bp, Glycine max
  unsure (1)..(442): unsure at all n locations
tgtgtagcactatccactgcanaagcaaaatacattgttactggaagttgttgtgctcaaaatctctggatgaagcaacaactagaagactttggggtaactcttgattacattcctctaaaatatgataacaactgtataagaatcctgtcatgcattctagaactaaacatatagagattaagcatcatttctaagagatcatgtatctaaaggtgattgttgcattgaatttgttggtagtgaacatcaactagctaacatctttactaaacctcttgctagaaataggttcttctagtcaaggtgttctacacatgtggtagtgctgaccttgaaggtaatcttttctttactattaatggagtagacattgtcatagatgctgctgtgtgaaaggaagttattagtctggacattggtggagtccgcaagtttgatg

SEQ ID NO: 24041 - DNA, 365 bp, Glycine max
agcttgctctatccattcaaaactccatttttggttcaaagctatttatcaatgacgatagcattccagagatagagcattttaagaaaaggttaaatctcttgaaagcaccttcttttcaataatttttaaatgttttatatagacttttgattaaatattgttcccgctgccagtttgattgccagtaataccgataacatttctttaagtctaagattgagccaaaaatcttcaagttcccagctaacccatggaggaaaattaacgattaatgcaccagttaaatatttaaatgagcttggtcaagtggataaggtatagcaaattataaatcttgtaaacttacttattactaatattag

SEQ ID NO: 24042 - DNA, 340 bp, Glycine max
ctaagcttgtcagtttccacactctccggcacttctccggcttggttatttgccggagaggtcgagggtgcggagttttgtcaggagtcccacctccggtgggatttttccggcgagcgagttggagccgagtctgagagtttggagctgaagcagcccgccaagctcgctggggatctcgccggagagctggttgtcacagaggttgaggagagagagtgaagacagagaaaacagcgacggggagagtgttcctctgaggttgcggctgggaagagagagcgaggtgactcggccgagttggcacgtgacgccgagccagtctcagagcatcgtctgt

SEQ ID NO: 24043 - DNA, 85 bp, Glycine max
  unsure (1)..(85): unsure at all n locations
agcttcaaccaaggggagatggaccanttcatagtgtttgtaagaatcaatgacaatgcttccaaagttgagctgtccggagatt

SEQ ID NO: 24044 - DNA, 271 bp, Glycine max
  unsure (1)..(271): unsure at all n locations
cacacgcaggcncgacgactttatttatcagacacaccagagggagacgaaggaagccaagagaacatagagagaaggaacaccagcgcagacacaancgcggcggaagacaacaaacacggagaacgagctgcaccccacagagcatgggagcatgaaagccgaacaaccacccggacggaacacaacgaacacagacgcccatgacaaacgcacagaccgagatgagcgcgcggacgcagacgtggcacagaggaaccaggcacaaagg

SEQ ID NO: 24045 - DNA, 349 bp, Glycine max
agcttgcatacaagattctccttgcctggcacttcaaaaccttcttgttgggtcatatagatgtcttcctctaaatccccatgcaagaatgcagttttaacatctaactgctccaagtgaagattctctgcagctactatgctcagaataactctgatggtagtcatctttacaactggagagaagatctctgtgaaatcaattccttgtttctgctgaaaccctttcaccacaagtctcgccttgtatcttcttctaccgtcagaattcttctttagcctatagacccacctattctgtaatgccttctttccttctggcaatttagttaaaagaccacgtcttattc

SEQ ID NO: 24046 - DNA, 431 bp, Glycine max
  unsure (1)..(431): unsure at all n locations
agctgtgggaaacccgctgagttctttgttagcaccgaatctctaggaggaggccaagaaactactgtgtaagattttctttttttccttgttagtgttcttgatttgtgaatctcacttaaattttgagcttaatatgtggcatgcattgtgaatcacatttttaatctttatcagctaagttgagttgtttatgtatgttgtagggcctttcaaggagaaacgaagcaatgagcttaaattctaatagctcaaaatcacatataattttcacatttgtcattgagtctttgtgtaaggtactgtcaaattttgtaattctacctaacattaccagcagttgtgtatggaaattgttgttttcctaagattcaagccaggtttatattntctcttgtagttctattgctaaacatgaattttttaaactg

SEQ ID NO: 24047 - DNA, 505 bp, Glycine max
  unsure (1)..(505): unsure at all n locations
aacaaccccgcaaattaattaacggctttnacncccccnnacccgcggtgtctcgaagcggcgcaagaacnaccagcggccgagcacgcaagcgaaccgttctggaagaggggctaagatcagggagacgcacaacacaaaccgacgggaacaccgatgacagacgcgcaacacgaaacaacaggacaagaaaccaggagcgcaacctacaacaaaacccacggagacgaagcatcaagacgaagcagaccatggaggaaaaggagaaggcagcaaagaaacaggggggagcgaacatacagcagctaacaacaggacgaaacctcacgcgcgaaacaggtcgcacaagacacagtggcctacaaatggggtagagcggacccagactggaaacgcaagaccacgacgcatggaggacacaccgtcaccacaagcagctgcgagacaagaagctattacacagcacaccggaggaagccagacgacagacgacacccgcgacggg

SEQ ID NO: 24048 - DNA, 112 bp, Glycine max
agcttgcacaagaagtatctaaatttgttttttacaaaataaagtaactaactaactaactaatttccactaatatatacagtgaatacttagaaggaagggatgcttcttt

SEQ ID NO: 24049 - DNA, 507 bp, Glycine max
  unsure (1)..(507): unsure at all n locations
aggcacctgggggttgtatgcttcgctgactaaccgtgcagtacnnngaaactacgctnagccaaattnagatcnaattgaagttagcttatctcttccttggcttttcttaactgacaaaatcagctatagatgcattggtagggcacctgacgctcgatactcatgacttatcacatgaacagagatgtcgctagcgcaaggcttgcgcttagtgaaaggactattatgcctatgaaaaacaaattactgcgttattcttcactggctattccaagatactgaaacccttgtgtgaaacattcgatgataagctgatttactcctatggacagatcacacagcatgttccacatgatttaattgtttgataacagtaaataaaaagtggtacctcccaagaagctgtgacttaccggatatctctaatcctattcttctttcgtctaggggtgccgacagtcatataaaaacatcggctatggtgctctttccttttctgaaacg

SEQ ID NO: 24050 - DNA, 266 bp, Glycine max
ctgcagcttaaacgggatttgtggatcgtatctgctccaactcctatgactgccaattactctccagacgaaatacaatctgattcagctctggttccagcatctttctcacagggtactgaagatgataagcctctaccagttatttctgagaactccgaggaagcaatatccaacattataacccctggtgagatccatagtgacggatgtaatgctcctgatgcacatgatcaaattgtttaaccagttgcagaggttagatt

SEQ ID NO: 24051 - DNA, 344 bp, Glycine max
acacatagaaactcaagctagacctcaatgggtggcgcttctgaagcattggtattcttgatctgcttttatggatattaagcaaaataaggagccatctatatcccgttcatttcatcaaaggacagcttaacaagacatcaatctcgagggataaaatgatcacacttctcatggtgttgatgtatctgatggtatatcagacattaaatctgatgaccgttgttgtaaatctgtacacacatgccatgatgagcactgaaggatatgatgattttcatattccacatgctctcaaagagaatgcgaatggtagcatgggtgatgatgaagaacaagcagac

SEQ ID NO: 24052 - DNA, 342 bp, Glycine max
agcttgtattttgtttattttaatccctgtaacatactccattggcagaatctgcattggaaacatagataatagataaataagctcagacataaaatggaaaatatgtgcattactacatttggcataataagagccatgaaggttaaacctgtggtgtggtataatcccagtagattgtaggaactttcacataatccatgttcttaaagttacttgcaaacaattctgcattagcagcctccttggtgtaatcaatctcctgaaaattattaatccatgttgcagtaacaggatccgagaatgtattcgctgagaacacgtgcatacatcataccataa

SEQ ID NO: 24053 - DNA, 291 bp, Glycine max
  unsure (1)..(291): unsure at all n locations
atagtcctgcatttttttctcttcccttctcttttggcattatatatgngagcctccggtaaatcaggccccctaatgagccctctcatcttattcttacatgatccgtgatacacagtcccacttgaagaaggcccttaccacgacacatgcttagactttgatttctgcattacaaacgcgcatgaactctcttcagccgaccagcttttctccaacggtcagatccttctcactccgatcaaccgctgactagttgcattcccaattccataatgtcccacgacatca

SEQ ID NO: 24054 - DNA, 373 bp, Glycine max
attttactcggctaaagtcgctaccatataagctaacagagagatatatgtttttcatgaagactatgccttgcaacttggacgagcttaaagaagtgttatctttgtacaggcccaactgtatgagcggtatatctatttattggtgcattagtggcgttgttcagccggattcctgcatagcgagatgatcttactgatttgccaagctttatctcatcttttcttccgcactcttttatcgctgtatttatatccatttgtttttacatttagccgagcatctgttttatctctacattgcatacttcttcttattctcaatgtaccttcagacattatccgcttaatcctgtcgctatgatactccccc

SEQ ID NO: 24055 - DNA, 488 bp, Glycine max
  unsure (1)..(488): unsure at all n locations
ggccctgactgcttgtgctcaatgacnacttgaannacggacctcagatactcaacttgatgcctgttgagcactcagtatttcctagtttttattactcggtgcctcatatatctgtggctttattagtccacgtaccgacaactcataaatttgcatatagcgaaaacgcttatgatccctgcttacaaggtttgtaataaataatgctttaagggtcttggactcaacatattaggcatatacttatatgctttaacatctatctgagagacatttgtgaacatgtgaccataaaaggagatagtctcatatgaaccagtcaaactgattcggtccacatattggtgtcataagggactatacgctaatatgctaacttctaatacctggttaaatacctgctaccacattacattatggtgttcattgtgcactgccattctaaacattcttatcttatgaggggtcatggggtactctgcgcg

SEQ ID NO: 24056 - DNA, 350 bp, Glycine max
agcttctatataagctgaaccattttatcaataaacacaagttgagttttattcagaaaattagagtttatctcttttatcttagtgagagtgattctcctaaattcttgagtgattcaagaacaccctgactgtatcaaaggactttcacaacctttgtgtgttgctctcgctggaaagagtgattctttccttcctttcatcttcacccttgttctttcaaaccacaattccagaaaatccacctctgcccagaattatctcgtggccataactcccattttacgcactcaaatgaagtgattcttgagcctaaattgacttttaaaacgagacctttcaccttcttt

SEQ ID NO: 24057 - DNA, 413 bp, Glycine max
aatctaagctttacttatgtggcgggcgggcttccttcactttcttttctccaacgcgagctttgaccactgttcttccttcccgcgatgcttcttttcatgtccgcctgagtgggctcatagcctaaaccatacttaccacgatttccttgggtatttatcaggctagttatgccgccgttgtcttgtctaaacccatcccgggttcataaccgttcctcaacataactcgggccatcattactgctgcatcggatagacaaggctgcccagagagggagtccactgaggaaatgctgaccacctcaaaagactggaaagcggtttctaacgattcttctgtggctttcacataaggcatagacgatgggcagcttaccaagatgtcttcctccctgacacgaagaccagtg

SEQ ID NO: 24058 - DNA, 131 bp, Glycine max
agctctgcatgtgtcggtcaagtgcaagtaccatatagtagccaaggtgctcattgacaatggctcttctcttaatgtcatgcccacgacaacgttagataagttgccatttaatgcatcatgtttgatgt

SEQ ID NO: 24059 - DNA, 399 bp, Glycine max
agcttatatgtacaaaacgtgtggaaattggaaaacattttgatccataattatttaattgataaactctaggcagccatacagtggagaccaaaattgtaaatcataagataactttatcttcaatttcattaattgataaaaattacacgtctagaagttaggcaatgaatagaatgtttcaagtttctttaatgcaaagctgtagtggtgttagcaagtaagggtatttcttattaagcagtagtgcttgagttatccatctctaaaaataaattataaatatctacagaattctacttggatccatcttagcttgatggtttcatccttgccagactagatatagggttacacacccacctgtgtgtttatatatatatatatatatgtttatat

SEQ ID NO: 24060 - DNA, 343 bp, Glycine max
  unsure (1)..(343): unsure at all n locations
ntgatctacctccaccgccgccaccatcatcttagttttctattatttntaatattactagtacttcgttttctagccgtgtatttggctatagtatgacatttggataatttagtatttctttatttgcatggtttcattgaacaattatgaattatgttatatgactatgtggctcttatatatttgatctattcatgtctcttgcttcatgattggtttatattcttcaatgtatgtcttgtgaatgattaatagtatatgattgatctttacttgttgcgtactttggatacaaatcagtattaaatcaagaactcgcattagtgatctacttaattta

SEQ ID NO: 24061 - DNA, 405 bp, Glycine max
agcttgcttctacaatgccttgtatttcattcaaatcgtagccttacaaagcaatatcatccacataaactaacagagcaatgatagtgttgaatccatgcttgagaaacaaagaatgatatgaagcacattgcttgtacccatgtgagattagaaagaaagacagcctggcataccactgcctgctggcttgtttcagtccatatagctaataacattcttatgctgaggcatataagttaaaaccttaatctttgcattcattgcctctatccatataggatccttagaagcttcattataggattgaggttcaagactttgtgtaatggataaaatgatattgtgataagaaggagacaatttgctatatgaaagaacaatattataggatagagacaagta

SEQ ID NO: 24062 - DNA, 394 bp, Glycine max
  unsure (1)..(394): unsure at all n locations
tactatgtaaacattatttgagttattagaatacatattctatcaaacatctattgtttgtgaaagctaggagtgacttcgtgacaaaaaatacttggctcttattctcaagaggagattaagggtagtgccagaagtggcctagagagtacttgttgtagccagaagtggcataaagaatacttgttgtaatcaaagttttgattagtgaaacccttcaagttttgaaagagaattggacgtaacccaagagttagggtgaactagtataaaacctctgtgttttctttattgcttttatataactagtttctttctatagnttacttctacgttattgtgtccaagtcttgtgagctggtttttaaacacaaagtaattttgaacccttgga

SEQ ID NO: 24063 - DNA, 247 bp, Glycine max
  unsure (1)..(247): unsure at all n locations
agcttgttcgcacatcgttcgcgtgtattatatccactttacaaggtttgaagtaaaggagaccttcaatcctataacgcaacgtggcggacaaaaatgggcagttaacttgaatggccattattgtcaatgcggaaggtattctgcgcttcactatccatgttcacacattattgcagctagtggntacgtgagcatgaactactaccaatatatagatgttgctgtcaccaaccaatacttctta

SEQ ID NO: 24064 - DNA, 331 bp, Glycine max
attatggtgtgtaagaatgataaatggatgccctaacttatattggcgccattttcagactgcagtggtgatggcatggagctctcggatatatgtggaggcgtgatgtaaccgggggcagaaaaacttgctaaaataagccaagggatggccctgttgcatgagaacaacccccatcgcgatacctgaagcatcagtcttaagtgtgaatggtaatgaaaaatcatggatggccaagactggggcctgggtcatggctcgcttgagtccctctaaagccgattgagcaccctcgtcccaatggaagttatccttttgtaacactgcggtt

SEQ ID NO: 24065 - DNA, 209 bp, Glycine max
tggtgaattgaagagggttgacgagggaatgtctgtttttgttgaaatgaatcaaaagggtgtgccaatgggtcataagttgaacaagttttatgaaatgaatgctggaaatgaaaatggtgcaagggttgattgatggtggagttttacgaggagggaatggagtgtactgtggatgtggatgtggggataatgtccatccatgatta

SEQ ID NO: 24066 - DNA, 388 bp, Glycine max
agcttctgtacctgagttactggatcttttaagacaacagggagtgaagattgctgaaaaccctatccttgcaacaagtcctagggaagtagacacggagatggacaagaaaatccgcagtattgtgagtagcattttgaaagacgcctctgttcctgatgctgagaaagatgttccaacatcctccaccccagatgttgctgtccctgaagctgatgaagatgtcccaacatctttcaccccgaatgtttctgtgcctgatgttgagaaagatgttccaacatctttctggccaaatgctgaagaactctcttcccccagcaaagagagatcatcagaggaagatgatcaagcctcagaggagaatcctgcaccacgggcaccaaaa

SEQ ID NO: 24067 - DNA, 141 bp, Glycine max
agctttacataagaagtgttcactaaccatctttgaaatgcttaagagtggcagaggtagtatatgtgatggtcgaaatacatgaaggatgatatgatcaacattcttgccacataactctaccaagaaagatattgagag

SEQ ID NO: 24068 - DNA, 388 bp, Glycine max
ctaagcttaacattggttctaatattgatgttgaaaactacttttatacattttttttggtttcaattgaagtaaaaagtattttacaacattggtcttcattggaactggtgtaaaaagtactttacaacatcaatttttaatataaccgatgctgggaaggttatttatacatcggctggtgccacaaccgatgtaggttctacatattatttttaaaaaaatatattgtttcacaagcaccaattgatacaacttatcttttagtccacaatatttcttttgtcctcgacaatctcgtataaatttgcgcatatctcttaccatttaagagaatcacacttgtaatattgtaacatcaatcatgtagccaaacccacctaatggg

SEQ ID NO: 24069 - DNA, 268 bp, Glycine max
  unsure (1)..(268): unsure at all n locations
agcttccattacattttgnggactccttatttccaatatggcttggcatttatccaagttggcgtgtatcccataatgagtcaacatgaaccccaaaaaatttccatgaaggttcgtaatggttccttcttttcctaccagatgttgacaagggctacagatgttaagtggtgaggtcgactagtggtaaattgtgtgccgaagtgggtggtcagggtatcaaaccagtcctcggagttggggggaggtgtgtgatccaaagaaaggc

SEQ ID NO: 24070 - DNA, 363 bp, Glycine max
tcatatgtagagacaggaagataactcaactaaacatatgagcgcaaactcattatagcaatcaaacaagacaaacaaattaaattttgttagtcatcatataaacaagttaaataaaagagaaatttcaacccacttaattttaaaacataatggttttgatgttacctttttcatgattcaagtgcttagatatttaaagatggaagtcagacttttgtttttcttacttaaacttctggagagatgttctcatcactttcatagtccttggatagaaggatgatctccttctccgaaccatcagatgagtcattgtcatcgccagcaatatacgccttctaggatctactatcttatagc

SEQ ID NO: 24071 - DNA, 406 bp, Glycine max
agctttccaaagttttctagttttccatttcttgaaaacttgtgctattcattcttttcatcccttcttcctttgccaaaaagaatttgccaaggactaaccgcctgaattctttttgtgtccatcttctcccttttccaaaagaacaaaggactaaccatctgaattcttttgtgtctcccttctcccttgtcaaagaattcaaaacaacacagtctgagaattcttttgattcttccctttcccatataaaaaagatttcaaagggctaaccgcctgagaattcttttgtatccccattgacaaagtttaaaggtttaaccgcctgagaactttgcttaacacattggagttacatcctttatggacaagtagagggtacatctacttgtgtttgattgagaac

SEQ ID NO: 24072 - DNA, 395 bp, Glycine max
tgccgctggagctgccccattaactgccctaactcttttagactggttattcctaggctcttgaccttgacttgatagaacctttttttaagcgaaggcgttcgacttggtcccatgttttactaaagtgaaacaaaatcggtgcaaatcagaactctgacatctatcatgggtggaatggatgaatgcatgaagaaatgcatatgatacatatgcaatttatgaacacgggagcccgagaaattgtctctttcttagatacaatgtcttggggtagcaaagttctcgacgtatgtatttaagaagatgacatggacccttctttgctttgccaaaaagaggcgcaacatgtggcgtccctaaattaatgactggcttaatagttattaatttat

SEQ ID NO: 24073 - DNA, 290 bp, Glycine max
aaggaaagaacggcgccccagtccaacccccatatagaagaaaaaggaccccggaacacgcaaataaaaaaaacggcacacacatccaagcaacaagaatcgccgcaacatggcaatcgacgaacacaaacacaaacgacacaaacgccaccccaaaaacgaactgcaacaacccgcgatgaaagatgccaaggaaagtggcaaagcccgacggccgcgcgaccagaggaaccgccggtccccaacgacaaatccagacaaacaaaaacgggcacggggaacaaagcaaa

SEQ ID NO: 24074 - DNA, 323 bp, Glycine max
agcttgttcacctcctttttcaccacatctagaatgatggggttgagtcgttgctgtggctgcctcactggcttagctccatcctctaaaagtatcctatgcatgcaggtagatgggctaatgccaggaatgttttctaaagtccatccaatggatttcttgtgcttcttgagcactagcagcaacttctcctcttgctcagtagcaagggaggcaaagatgatcactgtaaatttttccttgtcctcaaagtaagcatacttgaggtttactggtaaggacttcaactctggtgtgggtggtggctgaacagtgggaggaac

SEQ ID NO: 24075 - DNA, 405 bp, Glycine max
  unsure (1)..(405): unsure at all n locations
ggcacatgtacagacccatgattgtctttaccagttgagcctcagcctgcagagccatggttttacttctttttcgtgccctactccggaccagttcanggcagaggtcgcatagcctggagattggcctgaggcccgggcaggagaggcaccagcagaggctcccgacgaggcagatgatgcccgcgaggacgaagagatggtcgatttacttgatttcttacgagggagcggagccacatgattgggagatccctgtgtccatatttctttttgtttccatttttcttgttatatatcatcttatttctgcttgactaacggactaacgtttgttttcttgatgtgttgattgacttttgtttttgacatacatatcatttgagttggtacgtccgtatatgt

SEQ ID NO: 24076 - DNA, 238 bp, Glycine max
  unsure (1)..(238): unsure at all n locations
agcttctatatacctatttctatcctatttgtncttataaagaagcgtccagtcacgaatgacaaactgagcaaaaattgccactattacactcatcggccaaagcacagtccacaaactcgtgtacactatagcaatcccaatattggcacactagctcctttgtggttctgattcatttagactaatgacttaactaacatgtttatacatgcaccaaagcaccgtcagccatacc

SEQ ID NO: 24077 - DNA, 568 bp, Glycine max
  unsure (1)..(568): unsure at all n locations
tcgcaccaccgcgcgcttttttcaaaatatagtattnntantatatanatantntnaannannnaaaggcnccgcggnnccccagggacgcggatggagcacgctcgaanacccgngacacgagagaagacncaagccgcacagagaagaagaagcgcccaacagaacnnagggatacacccaaccaaagcaaagacggagagggacgaaacacgacngaagcgcgcgcgcccgagccgccaacgccggacccaaccagcaccggacgcggagagcagacaacgcacagcgcancgaccaacacaaaccagagcaaccggacacagaaggacgcggngcccggcagcaaagaaaaagcagacgagacccaccaagacgatagcgcagacaccggcgaacgaaacaacacgaccactaccacagaaacgaccgagaccaagaaaagaccaccgcagaccgccaccgaccagaccgcgccgatggaagcgacacgaggaacaccaatcgagccaacgcaaaaaacacccgaccaagcccgcaaggagacccaacccacagcgagccagcg

SEQ ID NO: 24078 - DNA, 105 bp, Glycine max
agcttcatgtaaataagcgtataaggattgatatcatgttccaacccatatccaaccctcctatgataatccactagatcaaattccccgacaagaaaactctca

SEQ ID NO: 24079 - DNA, 241 bp, Glycine max
agtgtgtgttggctatgtctcccaaattattactagctagtttaagttcgtggtgttcagagtgtcacgtgccttcttctgaggactcatcgactcttcctctactcacattatcatttatgtttgagccatcctaattagcatcactattgatatttgtattcgtggaaccctgattaccgcctaatgatatttgaaaatcaggcgagttttcgtctgaaaataatctattagcagctat

SEQ ID NO: 24080 - DNA, 280 bp, Glycine max
  unsure (1)..(280): unsure at all n locations
agcttccttttagtgcgtcacgtttaatatcgagctctatggtggtgtgggccttngatggtactcggcgagaagtaatgggggaaatcgacattcccattcagataggtccccacacttgcaatgtggtgtttcaagtaatggatataaatcctgcctatagctgcctcttgggaagaccgtggattcatgccctgggagtggtcccttcaacgcttcaccagaaattgaagttcgcagtgggtggacttttattgatagtgtccggtgaagaggatat

SEQ ID NO: 24081 - DNA, 542 bp, Glycine max
  unsure (1)..(542): unsure at all n locations
ttccactctcatatattatacgacattagatttctaatcanntttannaagccgcggcngttagatctcattncgtcaccttagaaacgcaagcatatgagagactaaagatcaactgagaggagacatttaatctttgctaaacaagccaacaaagggagaaagaatgtcgattattaaccctgacatagggatagtgtgctcataacaaaagataaggaattcgatcaaatgaaatcaaagctacaacctcagggagatggatcatttaactgcttgaatgaatcaatcgcgtcgcttacaatgatgagctgctcggtgagtttaatgtatcttcactcacaatgtctctgatacaatacttctggaagctgagggtgaatcctattcgaggacaaatccttctcaagatagagagaatgttgaggacatgttcaggagcaaaggtatagtcctctcgatgactttggtgatcttcgacacggatataaccatggaatgtaggtaactcgtacactaagtctgtcatactaaataatacc

SEQ ID NO: 24082 - DNA, 421 bp, Glycine max
  unsure (1)..(421): unsure at all n locations
agctntgacttgagacatcaaaagattataaatatgtgaccatggcatgaattttaagatgagatcaatcatctatctttcaatcttgtctcaaacatcattcaatatctttcaactctttctacagaaatttctaattttttttctttccatctttctaaaagtttttgttcaaaactttctcttcaaagaaaagttctttgttcaaaaacttgtgttattcatctttttcattctctgctccctttgctaaaagaacaaaggactaaccgcctgaattcttttgtgtctctcttctcccttacaaaagagtcaaaggactaaccgcctgagaattcttttggtcttccctttctcttaagcaaaagaattcaaaagactaaccgcctgagatatcttttgtttctcttacaagattcaa

SEQ ID NO: 24083 - DNA, 434 bp, Glycine max
taagctccttcaactgcacaaggctcttaatgttcgaatagtatccttgtgtaaccttcacccgacgaagacactgacaaaaacttatcttctcctttttggacaaggtatggcaagctaggggcaagtaaattttcttcccattagaccttggatgcaactgtgatcgtatgcccatatcagctagatcttgacaggtattgaagccatccttcatcttgccttgaatgttaaggagagtcccaatcacactatcacaaacatttttctccacatgcataacatcaatacaatgtctaacatcaagatcagatcagtacgaaagatcaaagaaaatggacctcttcttccatatgcaactcttacttatatccttcttttgggtctttccaaatacattattcacgtgttcaacccgctgatatacttgctca

SEQ ID NO: 24084 - DNA, 216 bp, Glycine max
agcttgtcacacctgccgtaaaacaagatttaattggttttcaagagtagatattatctacaatgtcaatgggggaaataatcaatacatgaagccaaacaatacgcaggcaggcacactgtaagctattaaggcgttatcaaatgtgcttttcttcttattctaatcgtaaagtagtaaattcagtcatcaatattttatcatgccccctttttt

SEQ ID NO: 24085 - DNA, 378 bp, Glycine max
  unsure (1)..(378): unsure at all n locations
ntgtgtaatcgattataaagatttggttatcgattactagttacaagttttgaacaaaaatcaaaagatgtaactcttgcaatggttttcttgaccagacttgaagagtctataaaagcaagaccttgatttgcatttaaacaatacttacaacctttacaaaacacttttccacgtattctttttcaaccttagaatctgtgtgaacatcttcttgaacttcttcttcttcttcttcctttgcaaaagctgtctaaagttttatggggttccaaaccttgaaaacagaagtgtgctatatcttgtattctcttcttccttagccaaaaagaagtcaccaaggactaatcgcctgaatactttttgtgtatctcttct

SEQ ID NO: 24086 - DNA, 329 bp, Glycine max
agcttgttatcgtgagacatcatgggcttttattttaattgatgtgggtaggaaaaattcaccaaattgatagagaaaaacctaaaatcatacatcataggcagataaggcaggctaggtcccaacattatcacattcttgattgtatttcttttatcttttatttttatcttttattttttatcttatcttttcttatctttatcttaatcttttatttttcttatcttttacttttattttcttattttctttatcttctatctttatgaccttttaatttaaatctcttattttcatcttttaatcattatcttatctactatatt

SEQ ID NO: 24087 - DNA, 445 bp, Glycine max
tgtaatcgattacacacatactgtaatcgattaccagatgatattttcagataatattctcaacagtcacatcttttcatttggttcttgaatggccatcaaaggcctatatatatgtgacttgagacacgaatttgctaagagttttcataacaaaaaggtcttatcctcttaaaaagtaaaatcgttttattctcttacaaattccttggccaaaacacttgtgattaaataaggaattatttgagtgctcaaattgttcaatctatctctttcaagatttcttcttctcttctttattctgaaaagggattaagagaccgatgatctcttgttgtaaagaaatctatacacaaaggaagggttgtccttgtgtgattcagatattgtaataaacctttacaagatagtggaactctcaacgagggtgcttggggactggacg

SEQ ID NO: 24088 - DNA, 395 bp, Glycine max
gatccacggccagtacagggccgtatgacaaactgacccagatcgtaccccgcgcaaaaaatgggtcgtaaagaaaaccaaagccgccgcactacagacgcctcaaggctggccaacacgaccactcacaagcgtcataacttttaaagaaacgtaaaaccacctcgaaaaagtccaaaacctctcgacgagccacatctctggagccatacaccaacagacactgggaaccgaccaccccaacagtgttatgcgcatacacacaagctctatagtgaaagcgatgtggacatccgcaccacatgaatctcgaaacagaattccaacgccccaaggcgcctgaaaatccacaaccacaccattgtgagcgaagaccacgtgacgaaatgaaacgg

SEQ ID NO: 24089 - DNA, 314 bp, Glycine max
agctcgagacaggcgctttattcaaggtttcttacgcacgcgaagcacgatggtggtggctaactccctagtggaatgtgcctcctctacctcgtctcctttgtcttccgctgaatctccatggtggaaaatcaccattacaggatatcatagaagctcatagatccatcctccatagaatccccacaagcaagcttccatcaagtggttatcagagcacaataacatcatgttcgtgctccataaaccttcactaatttttgcattacctacccttcattggtgatgtttcactttagtccatgtatctcctc

SEQ ID NO: 24090 - DNA, 388 bp, Glycine max
aaactaagcttgcttctacagaaagaattcaaaataggattgaatacatctaaatgtttagatcataaaataattaagtctttctttctttgctcaaatcatgatgaagaatgaatgaatcttgatcatcatgaattgattgttgaaaatgcattgttcttctcctatataactctcagaaagtatttctaaaagataagatacaaatcagagtccataatgagaatgatcaagagaaagtatatatagtttttaatagaaaaatagattgaatcaattatcataaggggtaatcgatgaattcatcaaaattcctctttatctacatttctagaatcttggtagttgattgtagaaatggagcaatcgactatcttgttttttatgc

SEQ ID NO: 24091 - DNA, 402 bp, Glycine max
  unsure (1)..(402): unsure at all n locations
agcttccctccgttttattcgagtacctaacgggtgtgattctcaaacgttaaaaaccagaatacacaatacccttaagctaaccgacaagcaattnttggatgaaatttactaccgacagcctttcacatatgcaggtaatcaattccggtttcaatgtatgcaactgaaagatgatgctgatgttaacacaatgttaatgtgtaatcatgaattttcgtttgttggtccgattgagttattatgtagcattgctaaaaccccagatggtattttaaacttacttcaagctactatgacccctacttatgatgccctactatattacaatgggaggtggaacatgttacgcccaaatgagtttgttgttactcgtcacaggaaaaatctcaaaagttgaca

SEQ ID NO: 24092 - DNA, 437 bp, Glycine max
  unsure (1)..(437): unsure at all n locations
tattgtatgcatgtttgtggtttgatcacccattggtgtgtgctgttaggaactttaacattgacaaatgtactgtttccttggaacctgatagaacagggctagataactatagtgctagacatagtgtgcagggttctagtctttattatgatgttcttataatgttgtttaaattaggctaagttcaacaagagacatctgcgaacgaagcttagtttaaattagtccaaactcacgagacatcggtgttggtatnttttgtcctcagcatataacacatgaataatttcaaatagagaaaaaccctaattgcatcaagtatctcggtgggaggacccaacgcttttccttatttgttttcacattcaatagttcatgtttactgtatgcttgattacaatagaatataccttcgtgttcaattatgatactta

SEQ ID NO: 24093 - DNA, 365 bp, Glycine max
agcttctatagaggtttttgcggactgcttgtcttatcataccagcaataccttcacctacaatattgaaaagcaagggaactaggggatccccttgtctcaaaccccttgtaaggataaattccttagaaaggctaccattaatcaaaatagatatagttgctgagcggaggcaagctgatatccatgatctccattttgggcagaaacccaacctaaacagcatgtaatccaaaaaagaccaagacactgaatcataggctctttcaaaatccaccttgaagatcatcactggtttcttatttctccttgcttcctcaaccacctcattgaggatcaagataccatggagaatatgcctttct

SEQ ID NO: 24094 - DNA, 428 bp, Glycine max
tattaagaatagaatcgaaagtttgcaagcaatatgttcaaaagcttgtgttttggaatatcattgttggaactaaagacaatatatattccatttccagaatatagcctaattacctttgcaactgactttgaagggtactctccctttagtctaacatcaacacactgcttcaccttatcttcactaagctttggtgttgcctgataaaatccaatgaacaaaatcagaatgtgtaaaatcaaaaaattgaaaggggaagaaaacacaaaaataattatcaacagaacagcatcaagtaaatattggtacccaagtcacaaagctttgctgtcctctgggtagtgtatgatcaaccggtttacgttcagttaagagtttcactaatataacttcgaagctatagacatcactctttgaagtgagtt

SEQ ID NO: 24095 - DNA, 383 bp, Glycine max
  unsure (1)..(383): unsure at all n locations
nttctttctcaatcaatctgtctactgactaacaattctaattgcaagttctcattcttgttctttctttgtctaacatacacacttgctgaaactcatgaaaagaaacataaacttcatcacaatcatgcattcaattcaaaaccaaatgatacaccaattttcacaaaaagataaaagtagtttactgccatatcatcaaaatcaagtcaaactgttccatatgcttctaaatgagcaaaccaattatcgataaataaaactagcagtgtattaaaacatataagaaatactatactaaaaccataatcataataataataaaccaaaaagcataaacatcattaggaatttagaattcctgtgaactggtcctgggtgtc

SEQ ID NO: 24096 - DNA, 246 bp, Glycine max
agctttacgttgttagttaaaaccttttcaacgttccaccagggatgctaagaagtgaaaacccattactaaagtgactaatatttacagctttaaattagaatagatttactcgctattattggtatcaatatatggtttacttatatcctatttggataaatttctctataaatacttatatgagcataaaaaaaaagcgaaacgaattaaatttctcctatagattaagatcacttatgcact

SEQ ID NO: 24097 - DNA, 386 bp, Glycine max
ctcagcttttgattcattttatgtcccgtagtgatccacattttgattcgtgcatttttattctcgatttgtttacttattataccccctcttgacgtgcttaagccattttacttaagtcatttctcgcttaacttaaaaataaaataaatttccaccgaacgtttgaattgtattattcgttaacttcggttaagatgaattccgaccgttcggtcgtgccgtaaccacgttggaaatcaaaaagaggtaaaaaaataataatataataacaaaaacatcccttttagtaaaataaagtgggaaatcaatcggacggttatctctctgggatttctcattcttaattgaattgactaataactaaggtgaaactaatgctaaaa

SEQ ID NO: 24098 - DNA, 422 bp, Glycine max
agcttctcacacgacctatatgctccctcttcgaattctgccgcgaatttaaatatgcctggccgctgtaagcacatgtcactaggaaagaaaaagattgaccagtctacctcgttctcatttttttttttccaggtcatgcatttgttatctcagttattttctcgtaaacatatttaataattttaagaattaaatatatttttatttctaataaatattttatttttatatttattttttaataattttttgttttgtgatgtgttcttaataaaatacataatttactttttattttttatacttatttttattgtatgataaattagtaaattttatatctattccatgataaatattttttatttgttattaatacaaattaaaatataattcactaatttattaaaatgtaacat

SEQ ID NO: 24099 - DNA, 430 bp, Glycine max
tggggatgaacgtggacagggatgctagtctactattcattatctggacttcctggatgttagtaggactatgcatctccaatatagttgtgcatttgtcgggaatgtgtgagcataaagcctaggaacttgcctccaccaaccccaaaaatacatttttccgggttaaggcgcatgccgtatttgcagatctctccgaagacctcttccagttctatcatgtgttgggctatgctatgagacttgacaaccatgtcgtcgatgtagacctcaatgtttcattcgatctgctgtttgaaaattcgatccatcaatctctagtatgtagcgcctacatatttaaggccaaacggcatgaccctatagctaacagtgtcatcttcagtgatgaatgtctgtttcttcctatctatagtatgcatccaaatct

SEQ ID NO: 24100 - DNA, 398 bp, Glycine max
  unsure (1)..(398): unsure at all n locations
agctnttagagttttagaacaatgctgctcgctgtaacactttttttcaggagaaacgtgtttgcttgagtgtgtaagatcatacaacacaaattgtgttacaatagagttgtcaaacactccaccttctaatttcgagcatgaattagaggaaaccagcatctgtgctaccattgatgagtcttcgtcacaataatgggatcccaagtcagaggcagtacttttctttctattatccattgaatgaaaggtatatacccaattgaaagcattgcctgatttccatgtcttggccacaaagacatcttcagggcactttaccttaaactcaaaaaatggaagtccttgtttgtttttcaacttgagaatgccatgaagatgaacaggagaacatgata

SEQ ID NO: 24101 - DNA, 412 bp, Glycine max
  unsure (1)..(412): unsure at all n locations
tccactccaattcaatatataaataaatataaatatatgtcatcatctgtttcttaaaagccgntgctgcgaacagaacagagacgacgacaacagaggagcaacgaagcacaacatcagatccacctgactctgtttgcttccaattttcatcacccacatcattttgcttccttccacgttctctctgtttcgctttgatcaatgagttgaaccacattgaaggaatccacgtgccgtggagtgagtgagtgaacaacatgtttcgttctgcaagatggagaagcgacaagaacagggtcaaagctgttttcaagctgcactttcatgccacccaggtgaggtcactctcatattcctctgaatttcaattatcctccttcttcttcttcttctttccccctctggattt

SEQ ID NO: 24102 - DNA, 344 bp, Glycine max
  unsure (1)..(344): unsure at all n locations
agcttccttgagaagctagagggggctattcacacccctccaatagctaagttcacccctatgccaaaatacatgaaaatacaatgggaagcttccctaagaagcaaggaaggtagcttccttgggaagcaaggaagaaagattccttgagaagctaaagggggggttactgttagttgtcttactcgactaacttttgtatagaaaacattttccaaaacttgtatagtttccccaattatagttattttgtagggatatgtaaataaatcttgttttattgttatagttgtntctatagtatctcccatgtgatttaatgaaaaaatttgcacaatttcttg

SEQ ID NO: 24103 - DNA, 442 bp, Glycine max
ctaagcttaagataaagatggcctcagcaaattccttatttccataatggaattctatcaatagacctccaatctttaatggagagggttaccactactggaaaacccgaatgcaaatttttatcgaggcaatagatctaaatatatgggaagccatagaaatagggccttatatacccaccacagtagaaagagtctcaatagatggtagttcatcaagtgaaagcataaccatagaaaaacctagagatagatggtctgaagaggatagaaaacgagtacaatacaacctaaaagccaaaaacataataacatctgccctaggaatggatgagtattccagagtttcaaatcgtaagagtgctaaagaaatgtgggacactcttcgatcaacacatgagagaactacagatgtctaaagacctatgagtaatgcactcac

SEQ ID NO: 24104 - DNA, 323 bp, Glycine max
  unsure (1)..(323): unsure at all n locations
agcttataacctctcatatgtaagctatttgtttaaaaatccctttcatgtcttgtaccgnagattcattattgggacatggaagcatgggcgcacaccatatggctataaacaaaatccttagcaatcccaaggataatcttagcattattatcatttatgggtaattaatgcataaaccatagcaaccacatataccaaagctatgccattgccaatctgcaaatgctaaccctaataataaaatttctttctctttttatccgccagccctaataaagattcaagatccatactttttaggtcaacaagaaccacatttt

SEQ ID NO: 24105 - DNA, 376 bp, Glycine max
agctctgagggtgcgtttcccaccatcttttcatagtagagtatcgataatgtgtctaccatcacgatcatcgtctccctttccatcattgggggtaccacctgtgccgccagatccctccaccttttgggcgtgttctttgaaagatccgtccccctttttgcaaatgttctgtagttgcatcctatccggaaccatatcaaaattgtactgatactgcctaacaaaggcaaccattatgtccttccaagaatggactcgggaagattccaagttagtgtaccaggtaacagctaccccagtaagactttcttggaaggaatgtattagcaattcctcatctttgcgtattccccatcttctgacaaacatcttt

SEQ ID NO: 24106 - DNA, 382 bp, Glycine max
tatccttatggcctgcctccggacttcaccctctctgctcaccccagaagatttaagccaagcccctacttttgaggggcaactcccaccttatgaagactatcccgggcaagacgaagaggaaggagatacccatcttggccccctgctccacctcaaagatccatccccgcatgaaccaccccagccgaacatagtccgccatatcccggcctcacccacacccgtaaaagaatttgtttccttcgcggaagataagggaaagattgaagcgcttgaaaagaggttaagagcagtcgaaggcctcggcaattacccattctcggatttggcagatttatgtcttgtgcccaacatcgtcattcctcccaagttcaaagta

SEQ ID NO: 24107 - DNA, 246 bp, Glycine max
agcttgagacgacaggctactgagttattacaacaagtgactctggctattagagatctaacggcttaagacattgccaatcgatatacgtgaacacgagctacgaacagctttgcaaatcacttcgaaaagactgttggctactagataatctatgactgccttctggtaatagtgatcttgagagtgaatctttcgctaatacatgttcccctcctatccatcataaggcataagacatggatt

SEQ ID NO: 24108 - DNA, 98 bp, Glycine max
atgcatgtagtgggacacaatgtctaactgaccatgcaatgaaacaagcgctacttaagagcctggatatcatgatgatccatttatgatgacatcat

SEQ ID NO: 24109 - DNA, 296 bp, Glycine max
agctttggagaaccaatcctatcaaaatgctagacgaaatatagatgggaattgaggtaacaatggcggtaatgacggaccgatgcagaaccgggttgagggagtaaagctcaatgttcctcccttaaaaggtagaattgatccagatgcctacctggactgggaaatgaagactgagcacgtatttgcctgcaatgactacactgatgcgcagaaagtcatactatcatcagctgaattctccgactatgctcttgtttggtggcataaataccaaagataaatgttgagagagg

SEQ ID NO: 24110 - DNA, 469 bp, Glycine max
ctggcatgtgctctgcagcgcgaccataaaactcagctataaacggaccacaagatgccaagctttattgtgtgcagccatgacaacacctgaaaagaatgtttaattactctataacggtagtacactttgatataacatgaataatgaactgattaatagtaactcactgtactacgtgcgcattaatcctccacacgggaattaatttcttctgtattatattccttggatgagactcactatatgcatagccttgtacactgtctttcatcatactaatgagggcataacctgctttttcgcgggatccaggtttcagatcacccacgaatatttgactcttcatctctaggcctcaactctgcgatgggtcaacgaacgttgcgtttttatttttctcgcgttcataatatatccctggaatttttccgtcaattatttatacccccattgattccattttagc

SEQ ID NO: 24111 - DNA, 370 bp, Glycine max
  unsure (1)..(370): unsure at all n locations
agcttgtagaatggctttacatgatacatgtcagggcttggnttgtttcaagggtaaaaagggatgccccacattatttccatgacacaaatgcaaaaatgatgatttggaaactttatgcaaaactggtcatgcatgcatctatgcggacactcaaatgtcaaatttttatggtcatgtgatgctagggcccaggattcatttcctctattttatatcaacccaatgtttccaaaatatgttcttttatccatttgtgcattcatccaagtccatttcgggcgtccgggaaaatttcacagcattcaccctttaggtttacacacaattttcttataactggtttatatcaatgaattttttttttttt

SEQ ID NO: 24112 - DNA, 366 bp, Glycine max
  unsure (1)..(366): unsure at all n locations
cttgaaattattatctccattttctagactcatcttcttcttgaagtgtgcatctactctctctcttccttctccattccgctaccattcatcttccaagaagagaaggaatccattgatgaagaagatcctaggcctacaagctccaatggagcttacatcaccattgtatatacaagccacttgaccaaaagcttacctatttattaacgatgatatcatatgcacccatctttgagttgaattataattgtcaaattgaaccctaagctntgaaattattatctctatttaccttgcttaggttttacgagagcacattggtttaagacaatttttccccaaatttgggggagtttattggat

SEQ ID NO: 24113 - DNA, 216 bp, Glycine max
  unsure (1)..(216): unsure at all n locations
agcttcgtactccttggtcttggaacatgttacgtgtacccaacaatgntgctggtgcacccaacaattttatgaaatggcaaaattacccttaagttaaaatttaaaaagaaaacgcgctggccctttgttttcttccccacctttttgccttctttcttcttgccttcgtttctcatccttcgagcctgtcatttgccattgttgcgttgttgc

SEQ ID NO: 24114 - DNA, 90 bp, Glycine max
tgaaagtgtgtaacccaccattattccataaaaagtgttgtcgttggttgccaaaaagatgccactgcaaattgttatgcatggatatac

SEQ ID NO: 24115 - DNA, 233 bp, Glycine max
agctattttgaaggacttattctcattatacaaagcttgcaggaactagttcagcaaaggccaattatgagtgtagagcagttcattgagaaagtggcctggcctggagcccgaccttcttttgtgggggatactgaaagttttacaaccaaggctcctcaacagtatgagccataaccagaaaatgatcactaatttgaagccaccatccctagagctgttgattttgatta

SEQ ID NO: 24116 - DNA, 428 bp, Glycine max
  unsure (1)..(428): unsure at all n locations
tgttcttgatctttcctcagttctttaacaaactntgtacaatatacttgtccttcatttaactgtctttgggcttggcggccacactcaacaaagtactttcgacacctattgtacgttgatttgaccaatgctgttatgggaatgttgcgacaatcctttaaaaccttattgatacattctgagaggttggttgtcatgtggccatatcgacgtccttctctgtcataagccatcgtccatttttcctttgaaatgcgatcaatccatgttgctatggctgaactcagttgacaaaattttttctaaattttgattaaaaatgtgcttgcaaggagtgtatgctgcataaaattagttatgaataacaattttaagttatatgacagttaaataaatgtgaccattcaatatgaaatcttacgcaa

SEQ ID NO: 24117 - DNA, 255 bp, Glycine max
  unsure (1)..(255): unsure at all n locations
agcttctcctccaattntctataaatatggggagaagtgaagtgaaaaagggttcagccccttaggcacttctctctctttcgaatttgcttggaaaaattgtttccgtgaagaaaatccaagccgaggcactttcgaaacatttccgtgaggaatttcgcgaaggtttcgaccgttcttcgacgttcttacttcgttcttcatcgctcttcgatcttcaacgggtaagtacctcgaaccaatcattttgattat

SEQ ID NO: 24118 - DNA, 365 bp, Glycine max
tgaatgcaaactggatgcattgtttaatttggtgacttatctggccttgaatcagaaatctgtaccatgcgcaagggttagtggattgagctcctatactgaccaccatacagacctttgcgcttacatgcagcaacctggagcaatagaacagactgatacttatgctgtagatattcacaatagaccttctcaatctcaacagcaaaattaatcacagctgaacaattatgacctctccagcaacagatataaccctggatggaggaatcaccctaacctcagattgtgcatgccttagcaacaacaacagctacctgctccttcgttcctaaatgctgctggcccaagcagaccatacattc

SEQ ID NO: 24119 - DNA, 335 bp, Glycine max
agcttcaagttgcttggacaacaacttattttgggccaacaaggcatcttgagatgaaagctctaataaactctttttggtaggaatatgaactctatcatgcaaaattgcatggtcactggcaaccatattttcaattaagtccatggcttcttcaagtgtcttcacggccataacccattaatgaagatgttcaactatataggctctgaaaaagctacagtgggagttttctgtagcaagctatagaatctttcttatgcctcactcaaagattcatcgagaaactgatggaatgaagaaattacaacttttccctctacaattatagactc

SEQ ID NO: 24120 - DNA, 349 bp, Glycine max
tggacgaataaggtgatgcatctaggaaacacaacatctaataagtatgattattgtaaatatatattggttttagggtttacacacgaatggataaaaataattgtttgtgttttacaaatgcagggttaagtttgcacattgggccttaaagagactactaccgaatagccttggagacctatgtagtgtttgagaagccatgaacaatatgatcactctacaacatattgaaattaatgcatcggttgagacaactacacatgtggttgggcatgtatttaaagctactctatacaagaaactatctggcttggttcaaggtttgtgtaaaccttattgttgctga

SEQ ID NO: 24121 - DNA, 172 bp, Glycine max
gtcctctggccttctattgtttctttacttgtgcaattaatatagacacatgccattcattcgaaattactatatattttggccgtacatactatgtctttatgataactattatcttcttcaactatttatttccgtattcgtaatagatacatactgttttagctctacc

SEQ ID NO: 24122 - DNA, 361 bp, Glycine max
agcttgcacttgaggagggaaggatatttgcagctaatgaacaactttcttaactattggagaaaagggtggtggatgatgaaactgacgacaaacatcagctggatgaagtcctaaggatactatctaaaacaaaaaaccgatgcctcaatcagagaaaaatgtagttgtcacttacttgctttggtgacctctgtctctgcagaaaattacattagacgatgttaatcaattctccttcatcatgatcatttcgattagcatgaacgtcgtcagcttcttcgtctccgacaacgctacgagtggattgagcggtcaaaggactaacataggtgtccatgtatgaatcatattttctacc

SEQ ID NO: 24123 - DNA, 452 bp, Glycine max
  unsure (1)..(452): unsure at all n locations
tgtgtgtggagtgtaacaaatagttgctcactaaatacttattcaaggttataaaaagaagtaaaaataattagtttatactagttcactcaatttcaattaagtccaatcctccttcactcaacaataaatggttctactaatcaacttgtgattacaaataagtattctttcatatcatttctaactacacttagtataatctaggtcactaatagcacactcttaggcttctcgtgaatttaagaatgtccaagtattatttatcattaagtcatttttaactttcacaaacaaagtttgttttgaatacaagattcaataactctcaaagagtggataaaacaaattaagctcaactcgcaagaatgctntctctttcttagaatatacaagtttatcatccactgagaatttctatntctttctttcagaatgcttttcaatagttt

SEQ ID NO: 24124 - DNA, 149 bp, Glycine max
agctctgagggtgcgtagcccaccatctttttatagtatattatcgataatgtgtctaccatcacgatcatcgtctccctttccatcattgggggtaccacctgggccgccagatccctccaccttttgggctgtgttttagtaagatt

SEQ ID NO: 24125 - DNA, 220 bp, Glycine max
gagggtgtacgatatgttctctatactgtactaatacacctactgcgagagtttcatggattagctggtgaagatcctcatcagcatgtaaaggagaaccctagtcgtttgctccactctaatagcctcctgatcatcaccaagatcatatctggctaaaggctgtagatgattcgtctagagggagcggtccaacattggctgaactaccttggtcaca

SEQ ID NO: 24126 - DNA, 244 bp, Glycine max
taactacacttagtacacttgtatctacttttactaatcatacggagtggatgggctctgattatgcccaactcatacttctatgtgagaaaattacaccaaagaagagccccaaatgccatagcccatagttcaacggcagaggttctgacttccaagcttataatgaccctcaaaatcacatataccttatttctaacaaaattgtctctcttgtacgtatatatctagggactactcatac

SEQ ID NO: 24127 - DNA, 555 bp, Glycine max
  unsure (1)..(555): unsure at all n locations
atattctccgtctngtccaagaactagtntaaggnataaattaattnncnnnnaggacgcgcgggttgatgctcaatgcgacacctaagaagcgcaagcgttatacaatgcataagcaactataggtggcaacatatgagctttgccgtagtatcgacaaaagaagcaatacaaatttcattagcgatatccacagcaacaagacatgactaaatagtctctaacgaatacagtaataataaagacaacataaacctgggtagaccgtaataacgttgatgatcaacttagtcaatacaccgggtaagaaatacatcaatagaacggcacgctataagcaacggagatcagaataaagcacactatagagaagaagtggagattggaaagaacaaagggcccagagaaactcataaacggaaaagaaagcaacagctattaaaagcgggacgaacacatacactgtgaacctagaacccgcatcacatatcgtgtggcgacacgagagagcgtcgagatacccgcgacacagatccaccgccaaaaaaagatgcg

SEQ ID NO: 24128 - DNA, 344 bp, Glycine max
gcttaagccgagtttttacactgtatgcttgttgagcataacaatgcattaatacgagaattgattgaaagcatgaaatttacagtaaatgatagtcaagatgaaggcgaagagtctgaccgtgaatatgaagacgaggagtcaccaagtgaaccatagtgactaggggtgaaaatgagccgagcaattcggttcggcttgtttactataaaggtcaagttcaaacttttttaaaagccttttaaaataaaaaggtcaagtccaaactattaaaaaagtttgttaagcttgacaagcttggtctgtttaactaacaataattttaataatactatcattttatc

SEQ ID NO: 24129 - DNA, 327 bp, Glycine max
  unsure (1)..(327): unsure at all n locations
cttctagagagtgttagactactgtagagctctctttgtttttctanaaaattntacactattccaataagctccagaatcttctagaacctcttcaattaaggaaggatcccaacaaaagatggatgatggctgctaatggaaactatttcgtatttacacagcgatcaagaaaaaagataacagaaggatagaaataaacaaaatgtgtgaatattaatgaggcgactaaaatattgtgatgtccaaatatcaatgctctttccgtattatcttatgaaaagctggatgaataatgagtattctttctcgtgcaacaagctagct

SEQ ID NO: 24130 - DNA, 186 bp, Glycine max
agctgtataaactctgtttaagccatagttctatggtgatgtgactcatgtaagactaaacacacccccttgagactgcaattaagacagcccccaggaggggtgaccaaaactaagatggcttcctaatagcaaccttgtgtgattgaatgtgtgctatgacgcttgtgctccttttatcatttt

SEQ ID NO: 24131 - DNA, 381 bp, Glycine max
ctatagaattaagggcttgctatctattaccaacatatggaaaaacataatttctactctcccattagaaatgaacaacctgctatatgtcgcctaccatatggttattctatacactaattgctatttttaataataaatcatatgtcaacgagactttatcggggctttttctctattgtcactcacaatggatgactcctatgccaactatctcaaaccaaccagttgtaatcatatgttgactacttggcttggtatttctgagcgctagtatttctccattagacctcaatctcctcattataaatagattgtaaaccaaccactcacaatttatagtgctaagctactaatatctctgtgcagtcatgtaatatc

SEQ ID NO: 24132 - DNA, 173 bp, Glycine max
agcttctaagctttattctttaatgaatctctgataccactcgatggacaagcggcctcatatatcttaccaaggggggtgggctgaattcctatattcacccactatttccccaactacaactttattctcctttctatacgaaatacaaattccctttaccatcaacttct

SEQ ID NO: 24133 - DNA, 381 bp, Glycine max
tagcgccactacttgcgctaagcacactaccattgattttaaaacatatcgatggtggcgcttagcgcatactttcccgctaagcccagctgatcaaggccgtacccgaatcaaataaacattaaaaatgcactatctaggaagtgatcctatgacgtctgccaacgagcaatggtcaaccaaacatttatatatattgtgataaaatagttacaaactatgggggttgcgagtttctgtaaattaaacaaccagcaattttgaattagaaaataacagaattaacacatgttgcttccccttgattcacaagagatatatatgtatacgtactttctgcaacatggatagtgcatactgactctcaaaatatcacatcaa

SEQ ID NO: 24134 - DNA, 301 bp, Glycine max
agcttgatcaaaacaattatctaatcatttcaatccactcaaatcatacaattgctcattcaaatcattctcaaacactcattacatgcaaaacaatccactacatatcattttcaatcaattcattggtcaaacacgcttttggtacaaacaaacaactcatagcgctgaaatttatataatcgaaatttaaaaaaattgaaatataaaatctgaaattaaaatgactgaacataaatcatataataattgaaaataaactaaaatgttcgagatgcacaaatttaaatgtcctgctcct

SEQ ID NO: 24135 - DNA, 302 bp, Glycine max
  unsure (1)..(302): unsure at all n locations
tgcctcanagaggtccaggaaggacaaggcgttcgtttgtaactagtttcgctctggagtacgacagtcaccgcttcaggagcgttgtacaccagcagcgcttcgaagccatcaatggatggtcgtttctccgggagcgacgcgtccagctcagggactacgagtatactgattttcaggaggaaatatggcgccggtggcgggcaccactggttactctcatggccaagtttgatccagaaatatgtcttgtagtttacgcctatgcttggccaacaaaggatggtgcgcgtgacatgaga

SEQ ID NO: 24136 - DNA, 324 bp, Glycine max
agcttgtctcaaagaggtccaggaaagacaaggcggccgaaggaactagttccgccccggagtacgacagtcaccgctttaggagcgttgtacaccagcagcgtttcgaagccatcaagggatggtcgtttctccgagagcgacgcgtccagctcagggaggacgagtatactgatttccaggaggaaatagggcgccggcggtgggcaccactggttacacccatggccaagtttgatccagaaatagtccttgagttttacgccaatgcttggccaacggaggaaggcgtgcgtgacatgagatcctgggttaggggtcagt

SEQ ID NO: 24137 - DNA, 416 bp, Glycine max
  unsure (1)..(416): unsure at all n locations
tatagaatactgacgctatncgatacattctatgtgcccgcggtggcccacattgtgtttagcgcattaatattctcgtagcgttcactgtttatacccccgggtgacgtgcttaagccatcctacttaagacatttctcgcttaacttaagaataaaataaatttccaacgaacgtctgaattgaattatccactaacttcggttaaaataaattccgaccgatcggtcgtgccgtaatcacattggaaatcaaaaagaggtagcaaataatgtaataatcaaaaagacatcttttagtaaaataaagcggaaaatcaatcggacgtattctcttcgggatttctcattcttaaatcgaatggactgataactaaagtgaaactaaggctaaaatcaactcacctagtcaagctc

SEQ ID NO: 24138 - DNA, 269 bp, Glycine max
  unsure (1)..(269): unsure at all n locations
agctttgatntttcatcttattaaaccttaatttctacaaattaatacaagctcattggtggtgcaaatccaaagagaattgacaattacttaaacacaaattttgacctttattataactaacaaaattattaaatcactcataaaaggtggcgccctttactcttcttggaacatgatgcaattgacaatctgaagattcgccacttgtaacttatgcctaaattataatacatggttaacacttgttgaagatcttctttgccttc

SEQ ID NO: 24139 - DNA, 356 bp, Glycine max
tcatggatttctcataagcttaatatcttataggattcttattcatgagtcaattctagcacgagcttttcaagttgtatgggactaagctgcgtatgatcactgcttaccatcctcaaagtgatggacaaactacagtgcttgattgagtcttggaacaatatttgtgggtgttagtgcatcataagccatcctatcgggaaagtttctgcatcttgctgaatggcgctacaaccccactacttatttatccactaatttaacactcgatgaaattgcttatggtaagcctactctaagtctttacattatcaagctggaacctttgcctgggaacaattgatttttctgacttg

SEQ ID NO: 24140 - DNA, 160 bp, Glycine max
agcttattgtgtaaacactctttgagtgattagaatacattttctatcaaacatctattgtttgtgaaagccaagagtggcttagtgataaaaaatacttgggtcttaatcttaggggggggattaagagtagtgctaggagtgacttatagagtactcg

SEQ ID NO: 24141 - DNA, 418 bp, Glycine max
tagaacactcaacgcttgtgacataacaaaactgtggcaaatggacctactcttaattatggggataaaagatctaagtagctggagttcctagattaaccaaggtttgatgtcttgggattatattaaaagatgtctgaaagttttaagtgtggagaggttaggtaagacaagaaaggaatttaatttctgtagtgattgctgtcacaatttgacagcaaaggagccgtcttctatcagctcttgtataaaggtctggaagaattaagagccgccattttaggatcttttagttttgaaagtcctatttctacccccagtgattattaagaatacacacgatatctgcggaatatatatatatatatatgcctaacatgattaaaggactattattgagaatattaatgtggttctg

SEQ ID NO: 24142 - DNA, 407 bp, Glycine max
agcttataatatatcgataggctcgaaattaacatctttactctcgcgaaattcaaatgggcataaattttcacacggatgtccgattcgggcgcataatatgtcaagagtctcgaaattgaacaacggaagctcttgagaaattcaaatggttataaaatttcacacggatgaccgattcaggcaaatctcatatcgagacgatcagaattgaacaacggaagctcttgagaaattcaaatggtcataacatttatctcgaatgtgcaatttaggcgcatcacatatagtgatattcgaaattgaacaacagaagctcttgtgaaattcaaatggtcataacttttcacactgagggccgaatcacggctttaatatatcgatacgcctcaaattaacatcggaaa

SEQ ID NO: 24143 - DNA, 284 bp, Glycine max
cgtatctcttcaaagcctgagagaccatacaagtagcctaacgatttctaattatgtgggccattacatctatcgatatgcatgacatgtcgctgagaatcccatgaaacccttcgggggcggagtaagagcctgccaacaccttaggcgcggcaaacaatcaggggagtgcttggctctcgcccaaagaatgagcaaacagatccatccacatagttgccaccatgtgtaaatagttgaacaccctatctgtcgctctctgtgtaaggtacacattcatcata

SEQ ID NO: 24144 - DNA, 227 bp, Glycine max
  unsure (1)..(227): unsure at all n locations
agcttcttgtatttagaaacaaaccacatanaagcgcttgtcgncncnaaaccccggtcttctttgagagcttctgtatgaatacacgccatttggtgcattaaatgcacgtcttctccatgttgcaacacctttcctttaatcttcccgatccacacttcataaaaggttagagcgctttcgtcataaaagatatcgtccactacaaaatcatattttaagaaaat

SEQ ID NO: 24145 - DNA, 88 bp, Glycine max
agcttgaagcgcaaactggatgcattgtgtaacttggtattccaactggccttgaaccagaaatctgtacctgtctcaagggtctgtg

SEQ ID NO: 24146 - DNA, 404 bp, Glycine max
cgcttgcacatgggtaaaaggctcaaatgcactgtcttcttcatttattcaaacttgtccaaataaataataaagtcatctcgactcaaagaaagtcatataagtctcatacaattaatatagaacatatatcctaatgtcacatcctatcagagcgtggtgttcccgtgtcctctaacatgagggtcttcatagtcatccacctattcatctgcttgcccgaacacaaagttcaagatcatcacatgatccaaacacaaacagcataccgggagtgagttatcacatggctaactactagagagaaacaacacgccatatagtagcgcaatacagatgacttagcatatctcacattatcttatcactttggcattcatcaatcacaccttgcaatcatctat

SEQ ID NO: 24147 - DNA, 194 bp, Glycine max
agcttggatgaccccatgttaggggtattataatctaattctatcggcattgcaataactgtacgggtttggtttcacaaggagaattgcatagctgcatgggggccctataccgacataaaatggtttcgctggtgatccaaattccaaagtgaaagcgcgagcgaggtttaccgcttacctctatatgtgtt

SEQ ID NO: 24148 - DNA, 318 bp, Glycine max
actaagctcgtatagtaaatacattctaatatccacattctctatttatttaatctccgtctaaactaggtttatcaatgatttttctgtgttcataatatgcatgtacagtttgaaggtgcggcaaaagaatatggtataggaccaagtatgtgggatactgtcatcaatcaacatccaggtattttgcgttctctctctctctgatatataacatgttatatatatataacatgctatcaagtatagaggaagataagacactatccttgttttgatctctccgttcaatgattctaataaaaaatgagaaaatct

SEQ ID NO: 24149 - DNA, 291 bp, Glycine max
agcttgcccagagaatgagtccacggatttaaatgcttaccacctcaaaagactggaaagcggtttctaatgactcctctgcggcctccacataaggcatagaggatgggcagctcaccaagatgtcttcttcgcctgatacgatgaccagatgcccttccactacgaatttcaacttttggtggagtgtagagggaacaacccccactgagtggatccatgggcaccccaacagacagctgtagggggggttgatttccattatgagaagtgacttgataagtgtgaggg

SEQ ID NO: 24150 - DNA, 260 bp, Glycine max
  unsure (1)..(260): unsure at all n locations
tgacggaacaacgaatncgttgtggctagaaattaattatcaaatntcctgctatcgacgaggtcggcctttacatggctagttaattagcctatataattgttgccgctaatcttattaaataatcataatctcgcatagctcatagatctaatatgcgtttgaaggtctgttgatatgtttctgtttctctgaggctgtaagaatgcatgctttgcataattcagatttactcaaacatttatctaattaataattga

SEQ ID NO: 24151 - DNA, 383 bp, Glycine max
  unsure (1)..(383): unsure at all n locations
agctttagcctgatcgctaagcgacaacttatccctggctaagcgtgacctattgtcgccaagtgcaattccttacagccataattgaggtccatgaagctatgcgccagtcatggtagctaagcgagattcattgcggcaatatgagcgctaagcgagtccctctcagctaagcgcatgctcctctgtacttaagatgcatcattttagctaagttggccagagcctcgcttagcgatagttgcagcttttctaatctacagacctcgctaagcagacttacccttgcgctaagccaagtctctgttcaaaaaaaaaaaactgattntgaaattgaaacgtcggctaaccgcacgggtccactaagcgagccttgttgagaa

SEQ ID NO: 24152 - DNA, 410 bp, Glycine max
  unsure (1)..(410): unsure at all n locations
tcgggaggaacctagacagggatgctagcctaccatttagttcntgaacttcttagtcggtgatcgagttgtgcatctccaatatggcagtgtatttatgggggttagcttcaatcccctggtaagtgatcatgaagccaaggaacttgcctccgcttaccccgaaagtacatttttcatggtggaggcgcatgtcatatttgtggagttccccaaagacttcttccagatccattatgtgttaggctatgctttgagacttgatgaccatgccgtccatatataactcgacgtttcatccaatctgtcgtctaaatacttggtccatcacccgtgggtatgtagcgcatgcatttttaggccaaatggcatgaccctgtatacacatggcaagtttgtggtagataatg

SEQ ID NO: 24153 - DNA, 261 bp, Glycine max
  unsure (1)..(261): unsure at all n locations
taagcaccgcagcatgcagcggaagagccnttttatggctttttataaaaaaagaacaccgcagtaaaaatgaacaagtggcgtaatgacgtcagcccactggacgaatgaaactcgacaagattgagtgaatcttgtggaagcaatgcctttaaaggttattatgatgatgccaaagaaccatgagtctagcaaattgcaaagagttaagaatgaagttttcagaatcatgtttctagaaccaccatttcacaataatca

SEQ ID NO: 24154 - DNA, 287 bp, Glycine max
gagacgctagagtttatttctcacacctctctcataactgagctcacctgcttgagaagcttccttgagaagattccttaagaagctagagcttagctacacatacctatatgatagctaatctcacctccttgagatgagaagctagagcttatctacactccccctataatagctctgctcacccccatgacagagaacatgataataacataaaaatgttctgattaccaagacgactcatcatgcccggtaatacaatgctaagaccctatactactataatg

SEQ ID NO: 24155 - DNA, 371 bp, Glycine max
  unsure (1)..(371): unsure at all n locations
agcttgaataacggcttgcaggtagccttgagctgngatatgaacctggtgatgtagttcaagcgccccaagaaaccccagactttctttttagtgcatggcttctgcatttcgaggatggctttaactttttcggggtcaacctctatccctttttggcttacgatgaaacccaacagttttcccgatttgacctcgaaagtgcacttggctgggttcaaccttagctggtactttcgcaacctctcgaacaacttccgtaagttgattagatgctcttctttggttttggacttagaaatcatatcgtccacatacacttcgatttcttggtgcatcatatcggggaacaaagctaccatcgcttgctg

SEQ ID NO: 24156 - DNA, 447 bp, Glycine max
  unsure (1)..(447): unsure at all n locations
ngaagaggatgctttaatggaggaaaagaaagttagtatgggggagctctaaattgaaggaataaaagagggagagaagtggaactttgaagtatgtctcacaagactctcattcatcaaaggtacaacaagtgttacacatgcttctatttatagactaggtagcttccttgagaagcttccttgagaaaacttccttgagaagcttctttgagaaaacttccttgagaagctagagcttagctacacacacacctctcataactaagctcacctgcttgagaaactctcttaagaagattcctaaagaagctagagcttagctacacatacctttctaatagctaagctcacctccttgagatgagaagctagagcttagctatacacaccctataatagctaagctcaaccacatggacaaaaacatgtaacatcacaaaaaag

SEQ ID NO: 24157 - DNA, 148 bp, Glycine max
agcttctaaactttattctataatgaagttctgataccacttgttagacaactggcctcatatatcttaaaaaggtcggcggttgccttaatctatttctctactattcactcctcttaacaatccttcactctttctacctcatctt

SEQ ID NO: 24158 - DNA, 274 bp, Glycine max
  unsure (1)..(274): unsure at all n locations
aactcaagcttctcccttattttggctataaaaggggcatggtatgtttatggaatgtgttcancaccccgggcaagcatatttcacttaaaattagtgaatagaaggagaaagaatacgaaaatcattgttgatgcacttccgtaactctttcgtgatcaattccgcgaacgttcatcgtcgttcttctttcattcttcattctttggcaatcttcaatctgctagccattctattttgaagctttgaactcattctatgcacctctatgggt

SEQ ID NO: 24159 - DNA, 172 bp, Glycine max
agcttgtgtacaatttatgttacttaacttgaattagtgtatatttattcatacattaccctcttccaaattatctttaatcctgattttgtttcctttcagtatgttgtcaaaatcaacgcatgaaaaattagaagttcttaaactattatataggacacgtaaatttttt

SEQ ID NO: 24160 - DNA, 186 bp, Glycine max
ccatggtatggtaaacatctcttcttccttccatggatctcatttttggttagctcatagagcattcattggagcttatgaaaaagttttgtttttggatattagtattccgcttgcggtcgctttcaggtttacggtgatgatgttgtgatgggcttgcctttgcattcatggaaatctctcatc

SEQ ID NO: 24161 - DNA, 360 bp, Glycine max
agcttgaaactatcatgtatcaattcctcttgaaactgtatgaaagacaagtattaaggttaaaattaaatcccaacagtaatccccacatgaacattatccttccttaaaatggagaacacaatttgaatccctcaatatgatatgacaaatgaaaactcctgatatatatatatttcatagcagaacaatctccacaaactcattcttaaacatccgaattggtgcacttgtttgagaagcaagtaatcccaatttctcactgtgataagcaagaccaacctcctttccctctctatccatgtcatgcaaataaaaattcatatcatgaacataaccaacttccttagttcttctacc

SEQ ID NO: 24162 - DNA, 297 bp, Glycine max
ccttatcctttcttttgctaacttttgaatggctgctcagcttcttcttagaatctgttaggccatgattcagtgtctcaaaagccaagcatgctactaataaatatgtttctaaaaaaacatactaaatccttttctcctctttggttccaattattcctaatcctgctgagcagttctttagttaaaggaaatgatcagaaggcatctgatttcttctccctagctactccttattatctatagatctattagatttgtatcatagtaaagctactaccctctagcatgcatgtt

SEQ ID NO: 24163 - DNA, 386 bp, Glycine max
agcttccttaagaagattcctcaagaagtctaagcttatctacacatacctctctaatagctaagctcacctccttgagatgagaagctagagcttagctacacaccccctataatagctaagctcacccccatgagaaaaaacatgaaaataacaaaaaaaagtccttattacaaagacaactcaaaatgccccgaaatacaaggctaaaaccctatactattagaatggccaaaatacaaggcctagacgaaggaaaaacctattctaatatttacaaagataagcgggctcatacttagcccatgggctcgaaatctaccctaggctcatgagaacacagggcctttccttgatctctagcccaatctactggaggcttctag

SEQ ID NO: 24164 - DNA, 359 bp, Glycine max
tgagatgaggaagtgtcgaatggtgaaactccctgcttttattgttgaccacagagtggtacctggagatatgtctcgggggtctggagaccttgctgacgtcaagtggggtgctattgcccaaaaccaagcttgaccaatcccgacccaacccgggcatagtcggtcagtgagaacctgtgatgtacctaaacaggcgagctcctggcagtcaacagataaaaggaacaaagaccacatagcatggaggcttgtggtggctggccagctatgaactctgattgatatgtgggttatggcctctggtaatcgattaccaagggtggggtatcgattctaggcttaaaaatgaagacagg

SEQ ID NO: 24165 - DNA, 426 bp, Glycine max
agcttagtaaagctaggcactaacaatctccccctttggcaaattttgtttaaaacatacttagacacttcctgagcaggtacgagcagttatgcaagtgggatcagcaactttcattatcagagtaatcaagcacagcggaaattctgcaagttgcaagtcgtttccaggatgtcaagacatctcacatgacatcagctttctgcttctgctccccctgtctccatgctcttactgcagcatcttctatcagctactagtcttttccaggatgtcaagacatctcatgtgacatcagctttcccttgtctccatgctcttactgcagcatcttctatcagctactagtagcttacatcagtcatcatcagcagcagcagtctccccctcaaaatcatgtacatacaactccccctcaaaatcatg

SEQ ID NO: 24166 - DNA, 369 bp, Glycine max
gagccaattaagacgacaatatctttttactcggatgactgattgagtctcgtcatatatcgagacgctcgaaattgaatgttgatgctctgagcaaattcaaacgacaataactttttactcggatgtctgattgagtcccgtcacatatcgagatgctcgaaattgaatgttgaagctctgagccaattgaaacgacaacaacattttactcggatgtctgattgagtcccgtaacatatcgagacgctcgaaattgaatgttgaagctctcagccaattcaagcgacaataactttttactcggatgtctgattgagtcccgtcatatatcgagacgctcgaaattgaatgttgaagctctgagcc

SEQ ID NO: 24167 - DNA, 190 bp, Glycine max
atgatcagctgagcatggtgggttatcctaatggttgacacgatgatacgtgattatccttatgtaacttcgtatttctgctttgcttctaattatagtttttggcttagtcttcctggtatcatcatattgttcagcttcgtctatatgtcagtcatagtatcatttaatatatgtctcgttactatcg

SEQ ID NO: 24168 - DNA, 325 bp, Glycine max
agcttacacttatggctagcctccggatttaccccccttgtccccccggaagattaaagccaagcccctactttcgaggggcaactgccaccttatgaagactatcccgggcaagacaatgaggaaggagatacccatcttagccccctgctccacctcaaagatccgtccccccatgaactaccccaaccaaacatagtccgccatatcccgacttcacccacacccgtaaaagaatctgttcccttcgtggaagataagggaaagattgaggtgcttgaagagagggtgagagcattcgagggccttggcattacccattctc

SEQ ID NO: 24169 - DNA, 429 bp, Glycine max
tgtgtaacccaccattttctataatagaactttatttaaaagtctactatcattgttattatttctttcttcatcattaagggaaacacttgggctgccagatccttccacctttggatgtattctttaaaagatccgcgcccccttttttacatgttttgtagttgcatcctatccgaagacattatactgacactgcctaacgaaggctaccattaggtccttccaagaatggactcgggatggttccaagttagtgtaccaggttacacctaccccagtaagactttcttggaaggaatgtatcagcaattcctcatcttgtgcgtatgccctcatctcttacaatacatctcttgattgctctcggtgcaaatagtctccttgttcttgttatagtccatcgccttgaacttgggaatgaccatg

SEQ ID NO: 24170 - DNA, 124 bp, Glycine max
catgcatgcaagctttacatagacgtttctcacgccatgatctgctccttcataacgacgctatgcgcgagaatacgggccctgaatgtactatctaacatgccaaccgctaagcttaatctat

SEQ ID NO: 24171 - DNA, 209 bp, Glycine max
gacagagtacgcccacctctatagacacattgggaatgacgctcacacgcacctacgctcaggatcgtctacatgcacataaactgcagatgtgcgaacacgtgtagccttactatgacttcgtcttctaaagatgataccacgagcgacgagtaactggcttctaggggtatccatatgtgacaattgacctcttgacatgatggccc

SEQ ID NO: 24172 - DNA, 87 bp, Glycine max
agctatgcggtggtctgtgtcggctaatgatgtacgcatatggtgtttgttcgtcacggacgtacggatgactttcggactactttt

SEQ ID NO: 24173 - DNA, 443 bp, Glycine max
tgtataaaattcccaattgtgaagaaattaattattttattttttgactctttaaactcaatcgataacatgtcgcatctaaatattcctactgctctgaaaatcattcattaatatatataatttcatacaaggctagtcgtgagacttagaggaacattggttggtcaagtgacatcccatgtaaaattctatataatctgcgtgtgtgtgaattctaatttaccaattaaaactgaaataacatataaacagcagtctggaaaatcgaagtcatacataacatgagaatttttctttattcttgtatactcatatatatatatatatatatatttgtatacttatgtatatatatgcatgtaacactcttacacagctcacatatacttgttacatatactgcagattgaggtaatggaaaattgcgcacaaataactga

SEQ ID NO: 24174 - DNA, 336 bp, Glycine max
tctatccaggcaattctaggaggtgaagctttttctctatggcttattccttaatggatggagcctcccctatcctcttctcctttgccttccgctgcatctccatggtgaaaaatcaccattgtaggacctcattgaagctcaaagatccagcctccatagaagctccacaagcaagcttccatcatattgtttctttaagatgtggtgctctcgcgaatgatttattgttctttgctaaaaaaaacatgtctgccttttagggggaaatatccggtggaccgtgtggtactgccaacaaaccttgatttctgagccgcttgaatgttatagact

SEQ ID NO: 24175 - DNA, 337 bp, Glycine max
  unsure (1)..(337): unsure at all n locations
agcttcaacattcaattntgagcgtctctatatattacgggactcaatcagacatccgactaaaaagttatcatcgtttgaattacgtcagagcttcaacattgaatttcgagcgtctcgatttattacgggactcaatcagacatccgagtaaaaagttatcatcgtttgaatttggttacagcttcaacattgaatttagagcgtcttgatatattactggacacaatcagacatccgagttaatagttattgtcgtttgaaaatactcagagctttggtattcaatttctagcgtctcgatatattacggaactcattcaggcatccgagtaaa

SEQ ID NO: 24176 - DNA, 178 bp, Glycine max
  unsure (1)..(178): unsure at all n locations
actaagcttgagctattaaacgacaagatgccctgctctgatgtttgantgttacccgtaatacatcgagacgctcgaaattgaatgttgaagctctcagccaagtctaacgacaataactttttactcggatgtctgactgagctccactatacattttgacgctctgaattgaatg

SEQ ID NO: 24177 - DNA, 208 bp, Glycine max
agcttgtgaacaaggatgacatagaggatgtgagaagagaggttcaaatcatgcaccatctctcgggtcaacctaacattgtggaacttaagggtgcatatgaggacaaacaatcggtgcatttggtcatggaactttgtgcgggtggtgagctttttgatcgtataattgctaagggacattacactgaacgtgccgcgggtttttt

SEQ ID NO: 24178 - DNA, 370 bp, Glycine max
tgtgcaaatcaaatcactcccgtatcttatctctagcatgcattctttctttctttacccactcctcacgtttggtttttagggaaaaacaccataactaaactcgccacaaggcatccctatcgcaccagattcaaatctagaacgatgggtgatcaagaggagacacaggaacagatgaaagccgacatgtcggctctgaaataacaaatggcttccatgatggaagccatgttatgaatgaggcatctcatggagaaaaatgtggccaccgctgccgctgtcagtatggctgtcgaagcagacccaactttcttggtaactgcgcaccatcctccctaaacatagtatgactgggaatggacacact

SEQ ID NO: 24179 - DNA, 489 bp, Glycine max
  unsure (1)..(489): unsure at all n locations
attccatagaagagcttaatgaacgttatatccctttcttgagaacgcacaacacgtatcctcatacgggtgcttaactatcacatacgtgcttcagacgaatatataattccgatcatacaaactctcctttacaggcggtagtgcgttgagacgactntgagagcatcaacctaagccattccgagaatacctatgtctgaagatgcctaaagatactcgcaagtggtgcagaccgccttatctcgaactgtgggcaactcatgctgtccttctaatgcagagtgacgtggtacacaacacggtctggacctcatcaagtgaagatgatcacaacaccacagcgtacaatacttattcctatcaaatggagacattgtataccatccgatcaactatacttccgattcgttcttctccgggaacatatgcttgtccctctacgccacaatgaggctatgttactctgtgacatataactacgacact

SEQ ID NO: 24180 - DNA, 283 bp, Glycine max
agcttatcaagtggaattataccaaagtttctatggcaggatagatcactttaattaattctgttttgacagccttgcctctgttttacctgtctttcttcaaagctccttcagcagtgtcaaagaggcttatttcgatccaaatgaattttctatggggtggaggcgctgaatggaaaaagactgcttgggtggcctgggatcatatctgtgctcctaaaaaacaaggagggttacgaatcatagccttcaaggactttaatagatccccttcttattaaat

SEQ ID NO: 24181 - DNA, 426 bp, Glycine max
  unsure (1)..(426): unsure at all n locations
ntcataggtgaaatcaggtgcagccatttcccttagatttctctcacgaggtggaggttgttccatgttctcagaatgtgcaaaatcagaatgctcagaatcagaatgctcaaaattataatgctcaagatcaggatgttcaaaatcaccaataacagaatgcacagattcaccagttatggaatgctcagaatgatcaaaaggtataaaatgatgcctaactaatctatgaaatgtcctatctatctcacgatcaaagggtttgtagtcagatggattgcctctagtcatacacttcattcagcatgctcacaactagttgccttgtcatgtaaataaagggtatggttgactacagtaccctcaatgattcctacgaactgaaatttgtgagcaacttataaatgatagagatgcacaaaaatt

SEQ ID NO: 24182 - DNA, 214 bp, Glycine max
agcttactctaccaccattgttgaaagtctcaataccgtacctcaaaatgcttctttcttctctttgacaaaagctccttctttactgttcctaccagctacatattaaagtcccatcaaaagaagtaaaataagtgatctatatctataaaaccagaatttcagaataaggaaagagtgatctctaccgaatatcttcttcaaagaagaacta

SEQ ID NO: 24183 - DNA, 556 bp, Glycine max
  unsure (1)..(556): unsure at all n locations
ctgtcctgacactcaccgtcattcngancattcantgattntnngtgtttggnnnnctgannnnnnnnnnnnnnnaacgcccacgcgcncgtgaatgcttcgaattgacgncactctatagaacacncaagcttggaatagtgagtcatgactaaggtctgtcatgacaattgctatatcnctgttcgtatgacaaaagagcatacttgatggtgccatactatgttatgagaggacatggagcaaagcacctacgcgacgcttttaagatggctgccttcagtgaacatgatcctgttttagacgcgcggaaatactatgtgaaaatcatgtaaataccaatgctcatctgaaaaactcagacggtgacatcaagtatcgaacgttgaactgtgacaatctacgggtggaacccttcgagtacatctagctatagctcagtagtacctatgcttggagatatgcaacgggtcatactacgcaccgaaattctagaaaaatcattgcgaaagcgctatcgtcgaaagattgaagtactgcctcagttactcacccg

SEQ ID NO: 24184 - DNA, 402 bp, Glycine max
  unsure (1)..(402): unsure at all n locations
agcttcctctttgagatggacttccattctatactaaattccagntgaattattagtgcagagataagtcaccccaaattggggctttgaatttactataagtaggagcttcatgccagctttatctattatggctgctacaagacctgtgatgacaatctgcaaaagaaaaattcatgaccagtcggtatggagaaaacaaacattagattttacaagaactagtcatttagttgaaattaacaacctagtattaaggctgcttcatgaagtttattcaacttttgaacatacttcaagggtaagcgtggttgtgaggtatangttatatggaaatggtgatgtggcgaacactattgatgctatcatagaccttatatgccgaccttaaactaaactact

SEQ ID NO: 24185 - DNA, 351 bp, Glycine max
caggcactggtattcatgtcttatctaggcctatagagtatgtgcatcttgaaatatagggaccatctagagtgaaaattcatggtggaagctcatactttctcaccatcatagatgatttctcaagaagagcatgtctgtatgtttcgaagaataaatcagaagctgttcaaatattcatagagtggaaaacacttattggaaatcaactttggtcaaaactaaaaatattaaggactgacaatggcctgtagttgtttcagagcaattcaatgagtgtcgcctgaaattaggtattaaaaggcacaaaacaatccgtcacacaccactacagaatggattatcagaaag

SEQ ID NO: 24186 - DNA, 402 bp, Glycine max
agcttcgggctgctcaattgctccaggttgctgcatggaagggcaaaggtctgtatggtggtcagcagaggagcacaaaccacagacccttgcgacaggtacaaatttctggttcaaggctagctgggttaccaagttaaccaatgcatccagtttgccttcaagcttcttagtttcagatgatgcagctaagtttgtagctaccttatgcactcctctaatgactatagcatcatttttggcactaaactgttgggagttggaagccatcttctcaattaaatttctggcttcagtaggagtcatgtctccaagggctccactactggcggcatctatcatacttctctccgaattactgagtccttcataaaaatactggagaagcagctgctctgaaaa

SEQ ID NO: 24187 - DNA, 377 bp, Glycine max
  unsure (1)..(377): unsure at all n locations
cagatgccactctactctaaattgttaaaggatattttaacaaggtatcacaagtgtattcactgggaaaacattgtcgtggaaggaaattgtactgctgtgattcaaaagatccttccacccaagcataaagaccctgggagtgtaaccattccttgttcaattggagaagtcactgtgggaaaggatcttattgacctgngagccagtattaacttaatgccactctccatgtgcagaaggttgggagagttggagatcatgcgcactatgatgactctacaacttgctgaccgctccatcatcagaccatattgagtaattgaagatgtgttggtcagagtaaatattttatcttccacgcaactttgcggtaa

SEQ ID NO: 24188 - DNA, 395 bp, Glycine max
  unsure (1)..(395): unsure at all n locations
agcttataccttcatgactgtgttctttggcaaactaaactgggcaaggatataatcagattcatctgctcttacccttattttttgttttaatatattaatttgaattgtaatcagatttctaataaacttttcctatttatcatactttataacttgaactaactaatgcaataagaattatcgtttcttctcttaagctgcatggtattagagctgctatgactagacttatcattgcttctccctagcaaatgttgaagcagaacctgagttcaaacaaactcaagcataccatgaaggtgttatgactacactaaanaagactgttataacacactccccctcaagctaaagctttagcttgttagaatacaataacttgacccaaaatg

SEQ ID NO: 24189 - DNA, 233 bp, Glycine max
cagctttgttctatgttttttcttcttttatgtaggtgaattgatgggtgctggtgtcactaatttggaggagtgatcaagatttatttgctggacagtttaagttgtttctttttttattatgtaatttgaaggaatggaacctgtttaagttttctctttttgctaaatcattgggttagtattttataaccctagcggggatcagtttcaaagttgggagggggtgggaa

SEQ ID NO: 24190 - DNA, 333 bp, Glycine max
agctatgttgggcaacattggtggaggatgaaaagaagaagaaggctgcgtgagagagagggagagcttcagaatttcttttggctgagtgaggagagagaacagcttttggttttaaaaagggttttctctttttctattattctattcaagctatgccacatgtctccatttgagtggagcgaaaagggcccactttctcttttgattgtgactcatactcagccacaaaaagtgagaaaatctgacctttgaaacgctaaaatcctgcctcgggttgcgtgtcatttctctggttccagatccctcgtgtttttctgcgtccgtcggggc

SEQ ID NO: 24191 - DNA, 422 bp, Glycine max
  unsure (1)..(422): unsure at all n locations
tnttatagaagtgtatctatctctattgagagggttttatcatcaatggcatatttctcacacagagaactaggcttgagtttctgtcacttggaaggctttaaattgacttcatcatgctcttggataaccttttaaagctgcaaagaagactgttgaagtggggtccactcaattgacaaggttttagaggaagttaatatagatgtcagctgtcagaaaatgacagctagtagagttattcttaggtggtcattttgaggattccattatgaggagccttttttatgatcatattagagatacggggagcaacatgagcaacatgttgaacaacctaaatgctaaagtttgaagctcaacgataagcctgacgaagttctggctcttacatgcttcaattctcttgagtgggaatatat

SEQ ID NO: 24192 - DNA, 383 bp, Glycine max
agctagccacccagctcacccaggcgagttaggttgcttcctcgcaaccaccttctggaggaatattctgaaaggcccaagtgggcctggttgctttttgcatccccatttttactaaatacacccccttgctcttttttggtgattcttttttcgtaacgttacgaaattttacgaatttcgtaacgatgcttgttttctttccgtaatgttacgaaaccttacggattacataatcatcccttttttgccttccggaatgttacggaactttacggattgcgcactaacacttccttttaatttccagcatgtcatggaacttcacggattgtgctacattgccttcttttgacttttggcattgtacggaactttacaaa

SEQ ID NO: 24193 - DNA, 63 bp, Glycine max
tgatagggtttcgccagttccactggcgaaatatgttcttgtacagaaaattaatcttgctca

SEQ ID NO: 24194 - DNA, 326 bp, Glycine max
agctatggaaagagtattttttcaccttctcgctaagccactggcttagcgagcgtccgctaagcgcaacactcctgggctaagtgcgaggaagactttggaagaaaatgagatgtacaggttcgctaagcgcaccgcttcatctcactaagcgcaccgctttagttcatccactaagcgagaaaggcacgctaaaccaaaaatcacaaatgtgcgctaagcgatccatacgtgcgctaagcacacgagcacgaacaaggccacctatttaagcctgaaatcagatgttagaaagagagatcggactaagattcagagatttgcat

SEQ ID NO: 24195 - DNA, 275 bp, Glycine max
tcaagctctcggccatttctgcgagagcaacatttgtttgtagcttaccagtgggacactactcttaaaacaaaaatgacatacaaccttcttccataatatcaaacatcaatgttaatttagagcgagcttatgcgcatatgtgccgtcgaacgttcacttgcacaagacattctattaactaaaaagaatgcacccatatgctatcaaggtagcttcattacctatattatttacatgtactctccaggtgtgtttgatatttacatcacaca

SEQ ID NO: 24196 - DNA, 379 bp, Glycine max
  unsure (1)..(379): unsure at all n locations
agcttctatataagctgttccattntatcaataaacacaagttgagttttattcagaaaattagagtttatctcttttatcttagtgagagtgattctcctaaattcttgagtgattcaagaacaccttggctgtatcaaaggactttcacaacctttgtgtgttgccctcgctggaaagagtgattctttccttcctttcatcatcacccttgttctttcaaaccacaattccagaaaatccacctctgcccagaattatctcgtggccataactcccattttacgcactcaaattaagtgattcttgagcctaaatngaatttcaaaacgagacccttcacctcgttttggaataccctcattggacccctgagctt

SEQ ID NO: 24197 - DNA, 461 bp, Glycine max
  unsure (1)..(461): unsure at all n locations
acactatcagaaactcaagctntacaacagattctagttatgacccactaacctagaattaaaataacttaatgccattaacctagggaattaaaaaaaacttaatggctgagtgttactgaaattgtggcaaccaaaagtcaccccaacagccaacaagtcagccaccatttggtctcccaaaaggctgatgcctaggttgccaattaggcccttattacaacttgaactaaacctaactaaagcccttttagttgattaacccaaaacatatttttggtcagccaaatgtacaaggattgggccattatttagacaaactaaacactctaaaattgagacaaagtggtgccatttagtcctcctccatttgggccatgatacaactcacaaccttggacttttctcctgaaacttgtgcttgtattcnattatatggacacacttgttgaaagcttctt

SEQ ID NO: 24198 - DNA, 151 bp, Glycine max
agcttacatgcccaacaatcacaagatgtatatggttcccccaaagagggtgcgagggtgaggggcagcaaggacaacatgtggagtattgacaatgagcttgccaaggcgtcttcttctcagaaggagaaaaggatgaggcagagaggga

SEQ ID NO: 24199 - DNA, 440 bp, Glycine max
taataggaggtctgataaattctatatgacaatctatataacttttatctctaatcgataatatgaatagtcttctaaatgctgatttgtcccatcaaaactgcagatctgtataataaatttgagattcgaagtgcttgccggaactttgagctcataaacatagaaacaatttacatgtgctactcatggatactcctgcacatgttctattgttctgcctaaattacctatcttactacaaacttgaggatagatatacgtgtaggtctttagcaattttaatagaggtgatcaggtgatagcgtacagaataaaatagtggataggcagctcgcttaaagtgaactctccttcatagattctcctcttaaagtaagaatcttgttctagagatcctctaatgtaatattgtccctccactatttaaggtcccttca

SEQ ID NO: 24200 - DNA, 387 bp, Glycine max
ccacctggccacaaaaccattgtctgttactgaatacatcaaaagacgtgactctctcaaaacgcctcgactctctcacaatggtgtaaagcctttctaaacattataactcttctaaataaccctcttgaccagacatgaagagtctataaaagcaaggcgtttgtttgcatatagaaaacacacatcctttcaaccatgaataccatcccaatcagactctaataaacctcacaagccttgaatctgttcgaacctcttcctcatctgtgtaaccaaagctacgtgaagatttctgggattccaaacctccaaaacctgtggctaatcaccatttcatcctcttatccctttgcgcaaaagaaatggcccaggactaaccgcccc

SEQ ID NO: 24201 - DNA, 262 bp, Glycine max
agcttatttacgggtcattgtcttctagtactatatttagtttgttgccatgtcattgcacgtagacttgctactgttgcactgaaagtgttaatttgttatgttaaagcataatgggtattgcttctatctattatactagtaatataatatacattgacaagggcgtttaagggcttttacaacatcatctaatttttgcggacttctatataatgcctactttctatgccatgtttatgtaatatacactatcgactca

SEQ ID NO: 24202 - DNA, 383 bp, Glycine max
  unsure (1)..(383): unsure at all n locations
agctntagccttccatggcaagttatcacctttcagttacaataggagattttggaagcaaaattcagattacacagtggtagggatgtctcctccacctctaagaacctaaaaatcactctaaaacctagaatcctcttgaaagctgaggttttttggtgctcccttgctctattatgtcgctctattgcataggctctcaagcattctacctatttttttgccaacttcagcttttaagggctttctgacctcgaaggctcacttagcgccatttttgcgctaagcgcgagtaagtgattttccattgagcgagctgggagcgcttatcgtgagagaagacaaatgactcgctgagcaagctaatgacgtgctgagcgtgc

SEQ ID NO: 24203 - DNA, 375 bp, Glycine max
tgtgtagcccaccatcttttcatagtagaatactgataatgtgtctactattattgtcatcatttttttctccgtcattgaggtgccacttgagctgccaggtctctccacctttgggagtattcttttgaaggattcgtgccccctttttgcacatgtttcgcacttgcatcctatccgaagccattatactgacactgtctaacgaaggcaaccattaggtccttccaagaatggactccggaaggttccaagtgagtgtaccaagtaacagctaccccagtaagactttcttggaaggaatgtatcagcaattcctcatcttttgcatatgcccccatcttctgataatacatctttagatgggtctcgggg

SEQ ID NO: 24204 - DNA, 378 bp, Glycine max
agcttaaacattcaatttcgagcgtctctatgtattacgggactcaatcaaacatacgagaaaaaagttattgtcgtttgaatttgctctgagcttcaacattcaattttgagcgtctggatatattacgggactcaatcaaacatccgagtaaaaggttattgtcgtttgaattggctcataggttcaatattcaatttcgagcgtctcgatatattatgggactcaatcagacttccgagtaaaaagttattgacgtttgagttggcacagagcttcaacattcaatttcgagcgtctcgatatatgacggaactcaatcagacatccgagtaaaacgttactgtcgtttgaatttgctcagaggttcaaaattca

SEQ ID NO: 24205 - DNA, 402 bp, Glycine max
ttgagccaaaatcctgactcaccataaccttgacccattgtgagaatgccaatccttaccctcggaagcaaaaaaaaagaagagaaggaaaatttccaatcaaaggaaaaaggagaaggaaaatttccaatcaaaggaacggaaattcccaatcaaagagtgggagaaagcataaagtacacattgaaaattcccaatcaaagaatgggagaaagaaaaatagagaagttaaaaagaataaagctcctggtcaaagaaaccagaagaaatgtgcccagaggtccttggactagacgatatctgaacaatacagaattgtcaccaaatgaacaaaagaaagaaaaggaaaccatgacctaaaagtggtcttctccctttgattaccaaccaaaatcctgtgcg

SEQ ID NO: 24206 - DNA, 379 bp, Glycine max
  unsure (1)..(379): unsure at all n locations
agctttggtgagacccatccactggttttctcccagagatgacttcaagcaagaatacgccaaaggcaaatacatcagtcttctcatccacaactccatgcaagtagtactcaggggctaaatgccttcaaaaaaacatgaaaaaagttcaatggacatccgagaccccttgaaacaccaaagagagtgaaatatataagtatggtagggtatatcatgtgataagaagagagagacaaagataaatgagagatgatagtggagtggttaaaataatgaaatatttgtgtatcatgacccanaaaatataacacttttcctttaaaaacgaagtttatactccaatatactactactaatgtgtttggaaactcggtga

SEQ ID NO: 24207 - DNA, 409 bp, Glycine max
  unsure (1)..(409): unsure at all n locations
cttgatctgcctctatattntaacaatcccatcctccctccagataatgagtttctggtggagagtagatggcacagccccaactccatggatccattcccttcctaatagcaagttaaaattggccttggactgtatcaccaggaatagagttggtcgaactatactgcctacagcaacatctacttgaatggctcccaaagaatagccagttttgccctcataattagagagcacaatgttgtgagcagatagatcagtgtcatgtctcccgatcttgtagagcatagatcgaggcattaagttaacagccgctcctccatctatgagcactttgttgattccaacattgtcaacttctgccctgatgaacagagggttgagatgactcttcatctgaaaatctggc

SEQ ID NO: 24208 - DNA, 375 bp, Glycine max
agcttttgtcggctatcgcttcaatgcattggacacccgtatcatgcgtcttaaagacgacatgatcttcatccgacgttgttttgatcctcctacggattcttagacgttttcttctattataagttcctaattttctagacattttactattttttccttgcatttggctttagttatttagcactttggttaattttgtgttttgctttggatatttagcatttggtttatgctttgctttggatatttagcatttggttggtttatgttttgctttggatattttagattctgttttgcaatggatgattagttattgttattgattgtgatgcttgctctagctattttgtggttctttatacacctctg

SEQ ID NO: 24209 - DNA, 65 bp, Glycine max
aactctcggggaactagtgtaacttgtgtaaactacttcagtgaatatgtgtctagtctgaaaaa

SEQ ID NO: 24210 - DNA, 384 bp, Glycine max
agcttttatcttaatattctcatcctgtttcaaatctattttattaagaagcattttgaacatgttggtaaattattaatgggtttgtatggtcaacaagtttttgttccatatcagtaattaatatcattaagagagtgttgggtaaacaacttaattaagcatttattaacgagcttattctgattaacaatgaaactgattggaatgagttaaaatgagcttattttaaagagcttgtggaagtcataagctattttcataagctcaattccatacaagctccctgtgaactcttccaaacaccccttaagccaaccccgcctggtggaaaaaagcttagtattagctggttttgttggtgttgtcatcagtatttaataa

SEQ ID NO: 24211 - DNA, 362 bp, Glycine max
  unsure (1)..(362): unsure at all n locations
tttatcaatttaaccaaagttgacaagttgaagaaagccttgtgcacaatgataactgttttatcatgtgaagcttttgctaatcttctgccgtggtgcaaaagctgattgccatgtcctgtaaacagtcttgcattctgcatgatatattttgcaaattccaactctctctcagtgccaccattcccattaatacgacatgcttaaggttcgatgagatgcatttatgaacacatagtggattttgccaatctcttctccttccatccctaaaggtggattcngctaatgagaaatgggctgaatattgctgttaacaacgcacatgaaatataattagttaatattaaaaaggaaacata

SEQ ID NO: 24212 - DNA, 383 bp, Glycine max
  unsure (1)..(383): unsure at all n locations
agcttttaaccttgacttggtagatcctcttgccggtttgatttgttcccatgcttgctaaagtgagacaaaagctggtgcaaatcaaaactccgatatctcatgggtggaatggatgaatgcatgaaggaatgcatataacacagatgtaatctangaatgcgggggtccggggaattcgtccccttcttagacacaatgtctaggggtagcaaagtgccccaacgtacgtttttaagaaggcgacacggaccctccgttggtttgtatacagaagggatcaagacagaacccatatgcgatgcctatgcaaaagacacaatgcgggaatgtacacagtatgataatattcactgaacataagcaaaagggtatatgatact

SEQ ID NO: 24213 - DNA, 341 bp, Glycine max
gactcaccataaacgttgacccagagtgcaagcgccaattcttaccctcagtagcagatagactgaagataatgcttttctttaatcggaggaatgaggagattgatactatccaatcagtggatacgaagtacccactcaaagagcgggagaactcctttataattgactgagaattcttattcccatattggcacacctactaatggagaggttaatctgattaatgcttttgctcatagaaactgtagcacatgtgcttgcatgtgctattgctagaccatctctgcatcattcggattagtacctgacgtcctaaacaaacaaatggaacctatcac

SEQ ID NO: 24214 - DNA, 374 bp, Glycine max
agcttgtcaaattctgtgtgaaacaacactttcttcatgttgttatttcctgattgctttctacttctagttccacaatcagtatcatcattgtcaggttttcccatattcaccttcaaattggtgtttgtcaacctcaatcacttgactatggaacaagcaccattggaaggccaccacttattattaattgatattcttgtatccacatgtaccaccactttctcgcttcttcttatttgatagtaaaacgggaatttttattcttgatcatgctttctgttatgctataataatcaccacatgtagatattaatgtaaggttctcttctcctcccaaataaataaaggtaacacacacacattcaactcat

SEQ ID NO: 24215 - DNA, 346 bp, Glycine max
tatatgtcatacatctggagatcgattagcagaatatcgaacgtctgcttgtgagaaccattcgtatgagtgcatcatatactattaaatgcctctggtactccattctgtatctacactacccttgctcagctaaataactagctgtatcactatggagagagcaaagcagagtgtgatagttgacttgcctgccgcatgatgcaccactggtattggacttgaggcacaaccatagggttgtgagcaaactcatatcactctagtgtgagtacactcttggcgcacatgccggctctacactgagttcatactctggagctgggagagaggtggcctgttatat

SEQ ID NO: 24216 - DNA, 375 bp, Glycine max
  unsure (1)..(375): unsure at all n locations
agctntacagcagattttagtaatgtcccactaacctagaattaaaataacttaatgccattaacctagggaattaaaaaaacttaatggctgagtgtaactgaaattgtggcaaccaaaagtcacccccaacagccaacaagtcagccaccatttggtctcccaaaaggctgatgcctaggttgccaattgggcccttattacaacttgaactaaacctaactaaagcccttttagttgattaacccaaaacatatttttggtcagccaactttacaaggattgggccattatttagacaaactaaacactctaaaattgaaacaaagtggtgtcatttagtcctcctccatttgggccatgatacaactcaca

SEQ ID NO: 24217 - DNA, 384 bp, Glycine max
tcttataagctgaaccattttatcaataaacacaagttgagttttattcagaaaattagagtttatctcttttatcttagtgagagtgattctcctaaattcttgagtgattcaagaacaccctggctgtattaaaggactttcacaacctttgtgtgttgccctcgctggaaagagagaatctttccttcctatcatctccacccttggtctttcaaaccacaattccagaaaatccacctctgcccaaaattatctcgtgaccataactcccatttcacacactcaaattaagtgattcttgagcctaaattgaatttcaaaacgagacctttcacctctgtttggaatcacctcatttggagccctgtagcttccgctatt

SEQ ID NO: 24218 - DNA, 378 bp, Glycine max
agcttgcggtgtgctgggagtatctaaaactgaagtgatttcaacattaattcacaaaatgggagtatctactgtataaaatcaaactaaacatgaaaatatgtacaattcctacaaaaagaaccataaattggaggaaagatgctaatttcatgaaactattcaatacaaaagttagtcgtaaataacgactagcattggctcatgtgagaagctttgttgcagaagaaggcaatggtggacaagcgacgatgcggtggcaacaagagagtagcgatgcatagtaaagggttcgagagagagagagtttcaagtaagctcgaggcgttccagagtaagggatcatttggaattattatcaaagtgttaacattgatt

SEQ ID NO: 24219 - DNA, 412 bp, Glycine max
tagacatcaagagatcattaattccaaaacatagggggagtatggaatgagtgaatgtaacattatatcttgcatatattctatcttgtatcttgattttagaaattaaattgtcatcatcaaaaagggggagattgtagaagcaaagactttgactttgatgttttgatgatgtcatatgatcatgcacttctcaagtttaattcaagacaaaaatccaagaaattcaagatacatcatcaagaagatctctagtgatttaggaagggattccaagttgaaacaacaagaggtttggccaatgaattcaagcaagaatgtttttacaagagatttactctctggtaatcgattaccagaggatgtaatcgattaccagtgaccaaaacactttctaaaacgtttttaaaat

SEQ ID NO: 24220 - DNA, 362 bp, Glycine max
agcttcatcctccgatccctcttgctggaatagacttagcttaaatagcttacgaaagtttagactaatttagcccaagctttgtactcagatccctcttgttggactagacttagaccaaacagcattattgtaacatcatatttaaaaccaaaacttaatccgcagatccctcttgtaagactaagtttcaattttgcttcactcaagttctatgcaacaatacatttcccaatgctaaagtaacctaactatgcacacaaatgggtgatcagaccaagagcatgcggaatttaagcactgaaagaagcattgaacacaagagacacaatcaattagatattaaaataattacatcagtt

SEQ ID NO: 24221 - DNA, 523 bp, Glycine max
  unsure (1)..(523): unsure at all n locations
ngcagtagaaaaatgacatttgatgacctctaactagttggaaaatagcattcaatctttggttggatggttgcactggatttaccttccaatgtgacatatttgagcccattatagggaatcattcccctggcaaaattatatttacccgtattctttgtgcctgagtgtgaacctgacacacttgtgctctctataaaccgcgttggacaccgtgtgaggggctatacatttttgtttatgtgaatgagcatgatcaaggccttaagcattttgtttttcaaaatctagagttagaactcgtttgacccatagtttcctcttttgagtcgcacattgtattcctcctttgtaccccacactcttattttttatatttgttggtaccatacaaaatcttgtgctaaagttgggtacccctagtgaatttgaggcttggaaattccatacgccacaacgaagacacaacttttcaagtcgccagaaatacgcgtaagccattaaaatcaaattataattccct

SEQ ID NO: 24222 - DNA, 380 bp, Glycine max
  unsure (1)..(380): unsure at all n locations
agcttgtgtagatcctcagcaacctagattggatatatgcaaacatttatccctagaaccacaacagcgcccaatgcaatgagaaaaatctatcaacagctgtttcaacaaactctcctgtatgataccctgataaataatatagcaataggtgatcaagaacacacgaaaaccatattcacaagctttcattgttggatattgttttgcatatgtggcacaaaatcctaccactcacacgtcataatcctgtcagagaacaaggtatgagcaaaaaaacaaaatataaatgtcaaataaatctttgtcaacatgataagaaatagaagtgattcaaaatcctgacctgcagtgaanatgctaacaactataatggtttc

SEQ ID NO: 24223 - DNA, 361 bp, Glycine max
gtcctaaatgacatttaaagctggtattaactcagtgtaacctccatttatcacagaaggcatacttgaccttccaactctgaaagcctcactctttttacactcataacatcacattcccactttctaaccctaggttagttctacccttcatctctaacagttgtgcatcagcaatttcagtatatgaacatcacaaacatcatcacaaaaaccctaaaacagaatgggtatgtttaactcatccaaacatggcaatttcaacaagctttcaacaagagtcttcacaaataaccatcatgaagcagaaaactaacagaactacccatcatatctcccaaaaccccatacccacgaaaat

SEQ ID NO: 24224 - DNA, 304 bp, Glycine max
gttgaagatcgaagaacgatggaaaacgaatgaagaacgtctaagaacggttgatacctttgcgaaattcttcacggagaacgttacggaaacgttttggaagcgcctcggcttagactttctctacggaaacaatttttccaagcaaattcgaaagagagagaagtacctaaggggctgaacccttttcttcttcacttcctcccctatttatagcaaaataggggagatgcttgccgcccagctcgcccaggcgagccaggttgcttcctccagaagcaacagccttctggaggaatcttct

SEQ ID NO: 24225 - DNA, 432 bp, Glycine max
ttatatagacttcaatgctctgatccattgagagatcccaattagttgctggctaatagcttggtgctttacaagaggcaaattactgtgcagagagagtgtggggacaacaaacacattttatcaagcattgtatggagagggcattattgactcatttaaaagataaaacactaaaatgaatcttttataagataaaggatgctaacacattttattaaaaagataagccaccaaaaatatattttagcccaaatgtttttccccaagtacaacaatttttcgccaatatgtatggccgcttcaatgtcttttcttcattagttctttgcaaaaaagtttacttacttaaatgaattgatttgataatcgattccaaattcaacctatctgacaagctagttcagatcgattatgataacacatattaac

SEQ ID NO: 24226 - DNA, 389 bp, Glycine max
agcttgtagaatggctagacataatacatggcggggtttggtttggttcaaggataaaagggatgccccacattatttccatgacacaaatgcaaagatgatgatttggaaattttatgcaaaactggtcatgcatgcacctatgcggacactcaagtgtcaaatttttatggtcatgtgatgctagggctcaggattcatttcctctattttaaatcaacccaatgtttccaaaatatgttcttttatcaatttgtgcattcatcctagtccattttgggtactcgggaaaatttcacagcattcacccttcaggtgtacacacattttttcaaaaactagttatgatcagtgaattttttcaaagacaagttggaagtcatctcttt

SEQ ID NO: 24227 - DNA, 531 bp, Glycine max
  unsure (1)..(531): unsure at all n locations
agtcaaaataatattttttttcagaagacttacactgatgtttacaaatagctctcattttataagaacttacagaataaatgcttagttaacttgtttacaatttagattattttttaattatagcttctaacactattaacacacacacacacacacacactatatatatatatgtatatatatatatatatatatatatatatatatatatatatatgtgtatatatatatatatatatgagtatgttgaattgaattgtgctatatagataatataaatattttntatatgatcaatcaactaaaaattatgttaaaaggtaactctaaaatgatttttattaaaataataattcctaattatatggaaattaatgaatagagaattgtcaataaaaccttcgcaacgaggggtcttaattaaattctctgagagctaatatagtgtggagaatcatcaatgtgccataaatgtatgtttgggcagaacgttgatttgtcatggaccatattattataaaacaagat

SEQ ID NO: 24228 - DNA, 358 bp, Glycine max
tttctttccatttgcacacataacaccactaatgaagaaaaataaccaacccgtatgtcatctctccttcttcatatgtacaacactacgaactaaatcaataatgcatggtacagcccaatgaacctctttaccatttccgtatgacatctgttatggttggataacgcagctacattgttcgcgccagccatctttgaagtgtccaatatggaggccttattcttacgaatggaccaaaagaaacaccccgcggatttataaagacttacacgctaacccatttcacattatctgtaaaatcactctctccatttggcagaccatagacacatctcatgtatttctctatgctttg

SEQ ID NO: 24229 - DNA, 542 bp, Glycine max
  unsure (1)..(542): unsure at all n locations
gttgacttacggaactataaaactccgctaagataagaaacgctgttggtgaactactgcttcttgtgcaacgaacatatcaggagatatattaaggctgtctagataacttggtgaactcacgtgaggtgataatgcttaacacctatcttgaccaattccgacccaacccgggcttagancgtctattggagaacatgtgagagcaccttacgaaggtcaactgactggcacccatcagataaaaggaaaacaagaccactgagcactgacgctcgtggaggctgatcatcaccgaattatgcgaatatgtagatagtggtctttggtaatccgataccaaggatgggttaccccttactatgctcaacaatgtaaacatggcgctaacatagaatctcgaaatctgcacgaaatgacgtagacgttctgcncctgaaacacgtctgaaactcngaaccttctggtattgataaccaagtgagacattcacactcgcgttacacgaaaccgagaatgcggagtcttcgctcatatctccc

SEQ ID NO: 24230 - DNA, 351 bp, Glycine max
  unsure (1)..(351): unsure at all n locations
agctntggaagattttcagaataagatcacagctatagatcaaattgcagatggagcgagaaccaaggcagaagaaagccggaggaatgaagaacaaaaagcaaaagagaaggcaaatgcaattcaaacaacaggcgagatgccaggcatttgcttctgcttctgcttctgagatcaccaattatgtagcatcactgggattggggaacttaatgaaatatatgtttcatagttctatccatattagctcttagtcttcattcctagtaaaaacaagtcatcttcctatataaattggaaaaagaaaaactgaaaaggtgaacagatacacgagctacttgtgtaaattag

SEQ ID NO: 24231 - DNA, 390 bp, Glycine max
tagaccttgaatgaaaggttgagttcttaccaagatgaataacactctaactatccacaaatagtagatatttatcttgaacaaaaccaagctcctgcaagaatttcttcacccatagcaactccttgcatgcttcagtaatgacaatgaattttgcatctgtagtagacaaagctacacacctttgcagctcggactgccaagtcacagctccccctacaaatttaatcaaattgctcaaagtggacttcatagaatcaatgtctccagccatatctgagtctaagtaccccaccaaagtatgcttatcaccaccaaaacaaagcctcatatcaacagtaccatgaagatacctcaaaatccatttcacaacattccaatgctctctac

SEQ ID NO: 24232 - DNA, 379 bp, Glycine max
agctttttattatcttgtacttttttcgaaataggatgcaggtgctgacttccacgaattcctgtacgtgtttgcttaaatcacgaaagttaaaagagaaatgatttctttacaacaaatttatatacgatgataagaaaagaagaaagggaagtgtaagaaaatcgttgtggtgttaataataataataataatataataggtctcatcctctgacatgaaatctgttacatgaatcacataaaattatgaaggtttttttttttacggcatctttatcgagttaatagtaacacgtacagggtttttttttttataagatagtaaacaggtatttttaacatcttgattaataaaaatatgaaaaaattcatgtagt

SEQ ID NO: 24233 - DNA, 241 bp, Glycine max
gcaagagaattccaaatacccaatgcagtctagagaaaagaaaaaatacatcttcctgtaaagcaggacgacgtactactctgtctgggagctgggcgtctatcacataggtgaacctatatttgccgacaaatgccaactatatcagcactgattattgcatttgattcaagggcgtaactctttattatggatgtaaaaagatctctataaacatatctcatgagttctgctggatttg

SEQ ID NO: 24234 - DNA, 348 bp, Glycine max
gctttataagcgcgggtctgggagacaaatgtcaagtggtcgcgatatatgaagatgatgttccgagtacattagatttggtacgaccatgccctcctgatttccagctgggaaattggcaagtggaggaacgccccggcatttacgcaacgagcataatgtaaacctttatggttttaaaagctctatagttgggcctaggctttagagtttttccttttgttaaagctttgtgtcctttgttgttgattttataatacaaggatctttcttcatctgttcctacgtctctacccattctcattcatttgcatgtttacttctttttctgaaacggcagatccgatg

SEQ ID NO: 24235 - DNA, 428 bp, Glycine max
tctctcttttcttgattattatcatttgttttaagccttgtatttggctatattattatgatatttgaacatttagtatttctttttctatttgcttagtatgattgaacaattaggaattatgttatatgaccatgtggtttttatatatttgaactattcatgtttcttgcttcatgattggtttggatttttcaatgaatgtcttgcgtatgattagtcatttgtgtatgttttatatttgttacgcactttggctttttgttgatgccaaagggggagagaaaataatgattaaattaagaaactcacataataaaataacttaatttcaagtaaagcttaaactcaaaaacaaagggggagaatatggagaattaagtgagtgatcgacaaggaaaaactatgtgtatgtgtttcttaatttc

SEQ ID NO: 24236 - DNA, 367 bp, Glycine max
agcttggaggatcaatatacatgttcatcttccttgtatttaagcaaataatttttttattaaagatctttgaatgttgtcagaatttatcactatgagtgtaagtttttggtacctgtcaattcaagtcttcgagttagaaatttattgatttccacttgcttggtgtgttaggtttagttatatttgaaggccttcgtatgacattctactataatttattaatgtattttctaggtagagctgctgggtcttaagtttgaacaacccatgcatgactcattcatttcactttgaagcatttgtgcacattcaatgattaaaaaccttattgtcataaattgtgccaggtggctttgataaacgg

SEQ ID NO: 24237 - DNA, 282 bp, Glycine max
gaacgaatgaattatgctcgttgttggaccattcaggccccgggcgctcatactgttcttcccacttatcattgattcgtggcgttcttgccggtggagagcttaaatgaggcgtctcaagagcactgatggagcccctgtggaagtagaggtggtgaaacttgtgagaagatgctttagactaagcaatggagaggttcttgagccatggaatgaagtgagtgccatcacgattgggaaatttggtgttattacgggatgatgacccaacgcttgtattgt

SEQ ID NO: 24238 - DNA, 383 bp, Glycine max
agcttcctcggagccatttcctgttattgcttacattcggaaagttagttctaccagtgggacactactcttaaaacaaaaatgacatacaacctcctcccataaatacaaacatcaatgtaaatttagagcaagcttatgcgcatatttccctacgaacgttcacttgcacaagacatcctattaactaagaaaaatgcacccatatacaatcaaggtagcttcattacctagattatttacatgtacttccaaggtgtatttgttatttacatcacacacgccttcttgggtaaatttacatacatgcatactcaaagcatttctgggtaccaaacattgcacatgcgctcatcttggcatttctaatacctatacatata

SEQ ID NO: 24239 - DNA, 363 bp, Glycine max
  unsure (1)..(363): unsure at all n locations
ngagatgaggaagtgttgaagggtgaaacttcctgcttttattgttgaccacagagtggtacctggagatatgtcgcgggggtcaggagaccttggggacgtcaggtggggtgctattgcccaaaaccaagcttgaccaatcccgacccaacccgggcatagtcggtcagtgagaacatgtgacgtacctaagcaggcgagctcctggcagtcaacagataaaaggaaaacaagaccacagagcaaggaggcttgtggtggctggccagctgtgaattttgtgtaatatgtggattgtggcctctggtaatcgattaccaagggtgggtaatcgattacaaggcttaaaattgaagacagggg

SEQ ID NO: 24240 - DNA, 362 bp, Glycine max
agcttgtccacaaaaaatcattatataaggatttgaaagtttattatctcaatttttcttacaaagtaaatggatcatttttaaggtccaacgccttaaaatgatcaccttccaagtaaaaagaatcgcttgattcacccttaaagaagaactacgtaggtctgatttcctcttcgatggagggcacgtaggagcaagagccccacttttgtcgacctcaaaaaataaatagaaataaaagttaaggtaacacaatttccacaattctaaaaaataaggctgttgtcctttgagacaaacgtgagaggtgctaataccttcctcaaacgtaaatacaactcccgaacttggaattttctttt

SEQ ID NO: 24241 - DNA, 459 bp, Glycine max
tatatacaatataggatatatattgaattggtgttatcaatcacatgtacatattgactattgtttaagagaaaggtcagaaaaaaataacatagttgaatcaacatcattatcaatgtgattagaatgataaaaaaacctaacaaatgaaatccaagacatcacatgataattagaaaaatacaataacaataaagaatagtaatattaaaaattagatatacataaataaatattatgtacagagaaaaaaatgttcaaacaacaacatttttgttgatccggaaaataccgtaatttgtgcctaaatcgagaccaatctagatccaattgtgatttaaaaatcacaattcttaagaagaataaattattctgcattctaaaacatatttaatgatctagcatgaaaatacattgcaaccataaataaatattggtagctatcaacaataaaagctc

SEQ ID NO: 24242 - DNA, 259 bp, Glycine max
  unsure (1)..(259): unsure at all n locations
agcttcaatggaggaaaaaagagagagaatggggggagggggaaggaattgaangggaaaaaagacgaagagaactggaactttgaagtgtttctcacataactctcattcatcaaagctacaactagtgccacactagcttccttgagaaactttcctgagaagcttacttgaaagctagagctgagctgcacacacccttctcatagctaagctcacctccctgagaagcgttcttgagaaactttcttgtgaagct

SEQ ID NO: 24243 - DNA, 497 bp, Glycine max
  unsure (1)..(497): unsure at all n locations
ntccatagccaccaagaatagatcaattgcatttctgttactctagatacattttccaaaatgaactcatcctgttgatgaaattccattttgagtgtgttgtaacaatgttgttcttcatgtcatgttcattgtttagatcttcatgtctgcaacattcttcttttcctttagttgttgattattttttatggcttgaattttttctcttcatctagtgagcatgttgacttcttcattacaatagacaaccaaggacactttaagtcttcttttgtgctttcaagtttatcatcctttatgagtgattcatggcatccctgagtttacttcaattgttgttattttcaaaaattgtctattctaaacacacttaagcaaactcatcaatatgcataaaatcataaggcttatgaaatgttctcagaacgtttgtcataattaaaacatcaacggttttggactcaacaattagcccctataatattagtaccttt

SEQ ID NO: 24244 - DNA, 366 bp, Glycine max
agcttgacttgtgagttgattttatccttagtttcactttggttattagtcaattcattcaaggaaacttccaaagaaaaacgtctgattgattttttttgattattttattcaaatatatttagattattttattattattttttcaacatattttgattattttattattattttgcctttttttggtttaaccgtggttacggtgtgaacgatcggttagattttactttaacagtgactaaacgagattacaacacaaatgattggttgaaattcattttatcatttactaggtgagaaacgacttatataaacggttaaaagctcgttaaaagggggtacgaaaaataaacgtaatgaaaa

SEQ ID NO: 24245 - DNA, 457 bp, Glycine max
tgaccggatgtgagatacatcttcttcaaccttagtcattcttgactccatttcattgaaccgcatatccacttgcaattccaaggtatcaaacctttctccaacaaaggtttgaagaccgtcaaacctttccataatcttcgacagaagagatgaatcttctccttcatgtccttcttcaccaacatttctagcacccttcttcacccaagagtcatcatgctcctttatataaccaaaggatgctatgactgaagtgcctataaggaatgatctcttgattggaacataaggttcagaatcaagagggatgttgaagtgttgaaggaaaagggtgacaagatgaggatatggcaatggggcattcaatcgcaatgccttatgcatgcgatatctaacaaggtgtgcccaatcaatttgtaaacctttatgaaaggcccacataacaatgagatct

SEQ ID NO: 24246 - DNA, 343 bp, Glycine max
  unsure (1)..(343): unsure at all n locations
agcttcttatccaagacactctcttggtggtgaagctccttcttccatggcttattccctagtggatgacgcctcctctcacctcttctcctttatcttctgttgcacctccatggtggaaaatcaccattgaaggacctcattgaagctcaaagatctagcctccatagaagcctcacaagcaatctcacatcagagattttaaaaagagaacttaattgtcaaatgctctccaaacaactattgaccaaacacatgcaaatcaatttagtattcttctaagatcttcaatttgtattatcatctctaanagagagaaattcttttgtacattctaaaaaca

SEQ ID NO: 24247 - DNA, 430 bp, Glycine max
  unsure (1)..(430): unsure at all n locations
tctgtccctgaganactggttcccagaagacaactgggagtgaagattgctgaaaaccctagccttgcaacaagtcctagggaagtagacacggagatggacaagaaaatccgcggtattgtgagtagcattctgaaagatgcttctgtgcctgatgctgagaaagatgttccaacatcttccaccccaaatgtttctgtgcctgatgttgagaaagatgttccaacatcttccaccccaaatgtttctgtgcctgatgtcaacaaagatgttccaacatcttccggcccaaatgatgaagtactctcttcccccagcacagagagatcaacagaggaagatgatcaagccgcagaggagacccctgcaccaagggcaccagaacctgctccaggtgacctcattgacttagaagaagtcgaatctgatg

SEQ ID NO: 24248 - DNA, 347 bp, Glycine max
cagcttgatttgctatgccagttattttttccacttagaaggcgtggaaataataaagcgacttttgaccatttgaagaaaaattgtaatgactttttattattttaaggaaaacccatattttacccaagtagtgtatcagttcctgttttctccactactctattttcactgtgacattgttttttatatcgctgatgcctaatagaagggaactcattattcattgtttgccccgtttcttcagatttgcagagagaggtaagatattaacaaaacaagaggtacgagcaattcagatagggcctaacggcatattcttcacgggtgacggtacgggtgaagta

SEQ ID NO: 24249 - DNA, 184 bp, Glycine max
  unsure (1)..(184): unsure at all n locations
gtcccttgaatgtgacaaacgntcacaaagacctccctgacacataaagtcctactgtagtatctgatagtgaaaaaagcgcgaccaaatccataacttatgtgccttaccgacaatgataagagcctacgtggcacattcatgaacgaatttgtgacacgtctaccattctgggacaaaactg

SEQ ID NO: 24250 - DNA, 374 bp, Glycine max
  unsure (1)..(374): unsure at all n locations
agcttataatcccagaaacagaggaagcaccagcaataaaggtgcaaagagaagaagggaccaagagaagagtggtgaagccagtgtaccttgatgattacgtctaaggggcagaattagaagaatgaattagtagaatcagcaccaaatcctgcttgtggtgtttgcttcttcataggcagacatgcataacaaaatctgttattagaatattccttttggataaaattgacacaaatctgttatttgaattcctctatatataaccatgtaaataaacaagcaagatataagaaatagaatttccttcttaccttgagtttattttcttcttcttcctctntggtctggaggtgctgaccctcgaagtcagt

SEQ ID NO: 24251 - DNA, 448 bp, Glycine max
cttgatggtgtcgagaagaaatcacatgtttgtcatcatctaaaagggggagaatgtgaatgtatgtatacatgattttgatgatgtcaaagaagaatctaacaaggctgcttcaaatgataagcatttgcttcaagaataattcaagattgcttcaacaaacaaagccttgtttcaagattcactaaagaccaagtcttgccttaaaacaatgtgctttcaagacatgcaaggctctggtaatcgattaccaggaagtgttatcgattaccagaagacagggttgagaaatagctgttgaaaaaggttttgaatttgaattttcaacatgtaatcgattaccatatgtctgtgatcgattaccagcaacgaaactttggaaattcaaattcaaaagtcgtaacccttcaaattataactgtgtaatcgattacacaaacattgttat

SEQ ID NO: 24252 - DNA, 386 bp, Glycine max
gcttatcaaatcagacaatggatatgagtttattacgaaacagttctatgatgatattggcattacacatcaatgttcttgtgttgaaactcccaacagaatgggattgttgaatgaaaacatcaaatatctattaaatgtcacttgatccttgttatttcagtctaatttaccatctatttttggtcttatgccttgattcattatgttttccttgttaattgtatgcctacttttttccttggtaatcaaactccttatgaaaaactatatgaaattgtatatgatattgagtctttaaggggtattcggtgtctatgttttctagtactttgacagctaacagaaagaaccttgacccaagagctgttacttcagtctttttg

SEQ ID NO: 24253 - DNA, 298 bp, Glycine max
tgtgctcatgccacaattgttagtcgcggctataccagacatcttgccaaacaaagtcagggtgatgataactcgcctgagctttttcttccatgctatatgtagcaaaactattgatccagttatgtctgatgaaatggaaaatgaggccgcaattatactatgccaattggagatgtattttccccctactttctttgacatcatgattcacttgaatgtgcatctagtctgagaaatccaatggtgtggtcctgtttatctaccgcggatgtacccggttgagcgatacatgaag

SEQ ID NO: 24254 - DNA, 381 bp, Glycine max
agcttgtactcttgttggaggaacccttactcaagctatcctaaaatgaatacaacaaaccataaaaatttcatcacactcatagcaaatcagaaataaatggcgtgaatggtttatcattacagttacaacaaatcaaacacaagtggtgcacaaatcaaacatgaatggtgcgaatggtttttctttgcaactactatccacaaagtgagatagaggttagggattaaacaaatcaaagcacaaaagtaataatgttatttgtagtgtgagaaaataacaattgaagattgctaaggcgcggaaaaaattcaattacacttctccaaaaattgagataaagcttcaagattaagaaaatacaagtgaaaaattaaaagt

SEQ ID NO: 24255 - DNA, 204 bp, Glycine max
tgtttaatttgataatattcaatttcatagtatattagagtaattgagaaaattttaacctttcacttttttcttgttattacatcgtatctagtagttttcaagtacattaatttatacttgtgatgtttcttttgctcatgaacagtatggcttgcagaagacaatgttgctaaaagatcatatgttataaaccaggtaagt

SEQ ID NO: 24256 - DNA, 362 bp, Glycine max
  unsure (1)..(362): unsure at all n locations
agcttctnccaaatggacttaccttgtattaattcccttgatagcccttttgagccttgtatccctttccttgttttgaagctcactacaagccttaagtgaaaaaccatgatattaccatatccttaaggaattttggagctttggaattgttttgggaataagtgtggggggtttttgtttaattggacaacttgtctttgttggctatgcttcatgatgtattttgggccatacttgatgtacattgcatatcggttaaatgttggacatgctgaatgaaatgtcgattctcataggctatagattcatgaaaagcaacaaaaatctgcatatctgggacatagacaagcttcttagtt

SEQ ID NO: 24257 - DNA, 446 bp, Glycine max
  unsure (1)..(446): unsure at all n locations
tatctaatcgattcacaatacttgtgatcgattaccctagattctaaacattttaattttcaaaatttaaaatgaagagtcacatctgttgatgtgtaatcgattacaccttaatggtaatcgattaccggtgactaattttgaaaaataaatttccaaaagtcacaattcttcaagtgacttgtttctgaaatttttttttaaaagtcacaactttttaagtgactagttttttaaagagtcacaatttttgaagggtgactagttttaaaaaaatttccaagagtcacaaactttaacttgagtcatcaagagattataaacatgtgaccatggcatgaatntcagaacatcatctctcaacatctttcaaacaatcttttcaacgctttctacagaactttctaaatcatttctcaacaatctttctacacagtttataacat

SEQ ID NO: 24258 - DNA, 445 bp, Glycine max
  unsure (1)..(445): unsure at all n locations
gcacggcnnnnttgtgaccctgtatcactcgagatcctctgagtccaccagcagcatgccagctctcatggaagaagagaatgacctgtgaatttaatgacaatctacatagaagcttcactctggagtgtggctcactcttcctcattcattatagttgtgaccagatctatacatgtgtataattatagcctaggcactcactgaatgagatacacttttcatttcatgtgaatctaaaaggaatattccaagaatatgctcaatgcatcttaacctattccctttagacgcctcaagcatggaaagtgtgactctatcacatgggaagcctccttgggaaacaaggaagaaagcttccttgagaagctaggaggaggtgagtgtcggacacaagagcttgaaaagctcacacaacgcacggctggtataaaagctagattcg

SEQ ID NO: 24259 - DNA, 340 bp, Glycine max
ggatagaagccggatggctgactgttaagaggacgggcctatcataaaaacaaactcgcttgccaatcaaggagggggggcggacaatgccatcgacgtgagtaggtcacacgggcccaaacttttgaaggacgtaacgacctccagaaggtttatctaccaagccttacaaaaggcgggcatgattccccgctacaggcacagagaggattcatgctgaatgcatccaggtgtactgcgtgacatggaaacaagttcattggtctgagatctattacaaccaatgatagaccactgtcgtcttgacgtctgctgtgagggggcggacgaacaacatgta

SEQ ID NO: 24260 - DNA, 435 bp, Glycine max
  unsure (1)..(435): unsure at all n locations
gcncatattnnnnttgttacntcctcgacgacccgctcatttttaagaacccctcgcggctgcatcttgaccagaataactatttttgttttttacaaatacagtaactaacttactaactaaattccacctatatatagagtgatacttaaaagaaaggattgnccttgatttagcccattaatctacctaattaaacctattacaccaaacaaaagcccaaatcatacccaattattcaagtcaaaagttctatttacagaccaatttgacctaaaatggcagaacttgcccaagcttatttataaaaaaattggatacctttttcttagctttttaaggactactcacaccatttggagttctgtactattctactggcccttgcaaatgtagatagatcaagttaacacaaaaatccaacataagcctaat

SEQ ID NO: 24261 - DNA, 536 bp, Glycine max
tatcatgtccgcgcactattactaactctcgcctggcccaagtcagatgcgagtggagtgcgcttacctcaatcttggccagcgtatctgacagaaacaactttagatgccaggggtgggcactgaacgcctgagactctcgacttaacgcctgaacagagatgcgcttatcgcccagcttgtgccttatgaaaggactatttttgccaagaatatacaatttctaaggtatatgtcaatcctttttccaagaaattgaaacccttatgtttaacattcgcagataggctgatatactcctatgtgcagatcagaccgcaagctgcgaatgatctaatgcctgacgaacaagaataacactggggtccctccagaagcgcttcttaacgtcttagctaacgcaaggttactatttcaaggggatgaaagtccacagaacaccatttctgaagttcgcttttactcgaatctctgacctatataattggaggacgtccaatctttcaaaagtgtagtttaagaagatgccctacgtt

SEQ ID NO: 24262 - DNA, 383 bp, Glycine max
  unsure (1)..(383): unsure at all n locations
agcttatgctgcaaacatctacaatagacctcctcaacctcagcagcaaaattagccacaatagaacaattatgacctctccagcaacaggtacaatcccgggtggaggaatcatcccaaccttagatggttgaatccttcacaacagcagcaacaacaacaacaaccttattttcagaatgctgctggcccaagcagaccatacgttcctccaccaatccagcagcaacaacaataacagcaacagccccagaaataacaaacagttgaggctcctccgcaaccttcccttgaagaacttgtgaggcaaatgactatgcaaaacatgcagtttcaacaagagaccatagcctncattcagagcttaactaatcaaatgggac

SEQ ID NO: 24263 - DNA, 465 bp, Glycine max
ctgcgaaaagcttgtcgctggagctgacccatcaactgtcctagctcttttagactggtgattcctacgctcttgaccttgacttgatagaacctctttttaagcgaaggcgtttgacttgatcccatgtttactaaagtgaaacaaaatctagtgcgaatcaaaactccgacatctatcataggtggaatggatgaattccttaaaaaatgcatatgatacagatgcaatttatgaatacgggagcccgagaaattgtctccttcttagatacaacgtcttggggtagcaaagtgcccaacgtatgtatttaagaacgtgacacggacccttcgttggtttgataaagagaggggatcaagacagaacccgtgcgtgatgcatatgtgaaaggcgtgacacgggaatgtcatatgatgacaatatttgagaatataagcaaacaggtcatgacacttatgcatg

SEQ ID NO: 24264 - DNA, 377 bp, Glycine max
agcttgaaactgtcatgtatcaatttcccttgaaattgtatcaaagacaagtattaagattaaaattaaatcctaacattaatccccacatgaacattatccttccttaaaatggagaaaacaatttgaatccctcaatatgatatgacaaatgaaaactcctgatacatatttcatagcagaacaatctccacaaactcattctttaacattcgaattggtgcacctgtttgagaagcaagtaatcccaaagcaacatccgatttcttactgtgataagcaagaccaacctcttttccctctgtatccatgtcatgcaacaaaaaattcatatctggaacataaccaacttccttagttcttcttacgatttcatc

SEQ ID NO: 24265 - DNA, 488 bp, Glycine max
  unsure (1)..(488): unsure at all n locations
ctattacgtgacactatgaaactcagcttatgcctctntgataaccctttttacttttgggatctttccaatatcttctagcatcaagtcaagacaatgtgcagcacatggagtccaaaatatttttggtctcgtgacttgtaaaattttacctaagaagatcaaaatcaataaacttgtatgagtagtgtaacaattaaaagttataactataaaaaaaaaacttcattaagcatgattgaattctcatccgccaacacataattacttccattgtccgtcaccacttgaataacattcttttctccaatctcctcaacaaagctatccataagctcaaagatcttccgaccagtcttcatgtattcaaaagcatccacactcctcacaaactgtgttcccaatgaacaatctaccacaaagttaatcaaagttttatactctctatctgttcaaccatctgacataagccctttgtgtattccaac

SEQ ID NO: 24266 - DNA, 379 bp, Glycine max
agcttgtaaccaaaacttagtactgtatattcaatgaaggaagaaaagaaaaggtaaaatcaaacaagcataactcaaacaaaacaaaacaaaatcacataggacaacaaaaacatagcagacacataatgcattggccggaagaaccaacatgctctgataccactaaatgtggcacccatttatcacttatctaataattaaataaaaataataataattttagttacgaaataaagtagtaaatttaaaactttcataattttacaataaaggctatcacatacgtaactcaaataattcaaactcaaataaaagctctaattgccaataaaatatattggcccacgcacttttggctttgcaagtccttaaaaaa

SEQ ID NO: 24267 - DNA, 451 bp, Glycine max
ctcagcttgctttcaatctcccccttgttgatgatgacaacccttatatcaagaaacacatacacatactttttcctagtcgattattcacttaattctccatattctccccctttgtttttgagtttaagcttcactttaaattaagttatttaattatatgagttcttgatttaatccctattttctctccccctttggcatcaacaaaaagccaaagtgcataagaaatataaaacatacataaatgattataatatcactagacatatatcatcaaaataattaagtttaaaactcataacaattaagagtaagtaaatataatcatgttcagttatactaatcaaatattaaaagaaatactaagtattcaaatgtcataaaaatataaatcatttgggtaagtcactagcatcttgcagtcctaattctcttctaatggcgtaga

SEQ ID NO: 24268 - DNA, 382 bp, Glycine max
agcttcttatccaaagctcatcttggtggtgaagctccttcttccatggcttattccctagtggatggtgcctcctctcacctcttctcctttgtcttccgctgcatctccatggtggaaaatcaccattaaaggatatcattgaagctcaaagatccatcctccatagaagccccacaagcaagcttccatcaagtggtaatcagagcacaagaacatcaagtaggtgctccttaaacctccattaattttttgctttaccttctcttctattgctggttcttcattgttctccatgtatctcctcacatgtcttgtgctaaatgttgttaacatgattctttagagtttccaccgattaaacttgttatagaagctagat

SEQ ID NO: 24269 - DNA, 452 bp, Glycine max
  unsure (1)..(452): unsure at all n locations
actcagctttctttctaatcaatctgtctactgactaacaattctaattgcaagttctcattcttgttctttctttgtctaacatacacacttgctgaaactcatgaaaagaaacataaacttcatcacaatcatgcattcaattcaaaaccaaatgatacaccaattttcacaaaaagataaaagtgttttactgccatatcatcaaaatcaagtcaaactgttccatatgcttctaaatgagcaaaccaattatcgataaataaaactagcagtgtataaaaacataaaagaaatactatactaaaaccataatcataataataataaaccaaaaagcaaaaacatcattaggaatntagaattcctgtgactggtcctgcgtgtcctgtgtctgaacatcctcctcatctgtcagatgaagtactanagtagctggaagagaagtgtca

SEQ ID NO: 24270 - DNA, 378 bp, Glycine max
  unsure (1)..(378): unsure at all n locations
agcttggtatcgattaaaccaatatgaaaatttccctgcaagctacaaacacatgtgtaatcgattatgatcagcttgtaatcaattaaaatagagttttaagcacaaaagaaattttctaactttagaacctttctttttactcctacatgatgatgcatgatgcacatatggaaagatagagactaagatgcaacacataatacaacaattaatacaaatgccactcaagagagttaggcatgtaaaagacaaaacttcttcaatcttcttcaagcttcaaggctaagtcttcatgttgctcctcctatctctaataggtagntggctgccgatccaaatctcgagtattagagatntagtatgatataagagagt

SEQ ID NO: 24271 - DNA, 197 bp, Glycine max
ctcagctaattgtgagttgagtttagccttagtttcactttggttattaattaattcattcaaggaaacttccaaagaaaaacgtccgattgatttttttgattattttattcaaagatattttgattattttattattaattcttcaagatatttggattattttattattactttgctttttatgggttaaatcg

SEQ ID NO: 24272 - DNA, 344 bp, Glycine max
  unsure (1)..(344): unsure at all n locations
acctgaggctgcagcttgcnggacctttttttatattgactaatacttggggggacgggtattggaactgtgagtaaaacctatctccaactgcatgttcacattactgtatcattatgggctattctagcatgctttgcccacttgatcttctaatgatagaggcattattctgcaggaaggagcaacctaattagcagaatcattgctcaaaggaactgaagagtttgtgaaacttgacctatcatattgtggtctaacatttaactttgttttaaacaccagtgtcaatttattttgttctgtcatagagctgaacctggaaagaaatcctatcatgcctg

SEQ ID NO: 24273 - DNA, 431 bp, Glycine max
ggaactatgaaactaagctttaatctccaaatcaaattctcttacacttgagagttttgtatgtacaaacatttatgtacagaaggaaaaaaatacgaacaaatttgctaaccacaaactgttttacttacatttattacaaccattgcattactcaaacaaagacattattttttgcatttgtaagaatatttagccattctactgaatcattctcaaaatcatgtgatatgaaaaggatcaacaggtaattgattcaagtcacatgctaaacctccttttacatatttagatcttaaagatggatcccatataacagttggcctgatattcgtgttataaaccaatgtctaataactatgcacccaaaattctaccctgtaaatactagaaaacaagacacaactttatttgtatgtatatgagctaca

SEQ ID NO: 24274 - DNA, 386 bp, Glycine max
  unsure (1)..(386): unsure at all n locations
agcttgtaatggggccaaggacaaggtatggaaaaatatggaataagtggctgaatcccaaaggaatagagaagcaatggggaataagtgcaaattaagaaaacataagaaaataaaaaagaagtaaagataaaatttaaacataaagagtagaaccaagagtctcatcattcttttcttattcactcaactttactgtctttctttttctttttcgatttttttttttgctctgtagccttttgagaaacagcatcatattcagcatgtccaacatttaaccaatatgcaatgtatatcaagtatggctcanaatatatcatgaagcatggccaacaaaacatgttatccaatgaaacaaaaacccccacacttattcctaaaac

SEQ ID NO: 24275 - DNA, 289 bp, Glycine max
gagacaatgatttgtttcttttaggagtctctactttaatcgattaataggtgatataatcaattgcttctcttttaaaagtgtttcagaagtgaccatgaacactttaatcgattacatcaagaatctaagttgattatattattcttgaaagttttacaggtcttgggacgaacactctagtcgcttgaagatggaatatgatctatcactgattcaaagtaatcgattccattgtgtatttaagagattactgacggctattactgtgcgctatattggttgtcac

SEQ ID NO: 24276 - DNA, 383 bp, Glycine max
agcttgaagtgaggaagtgtggaagggtgagacttcctacttttattcgttgaccatagagtggtacctggagatatgtcgcgggggtcaggagaccttggggacgtcaggtggggtgctattgcccaaaaccaagcttgaccaatcctgacccaacccgggcatagtcagtcagtgagaacctgtgatgtacctaaacaggcgagctcctggcagtcaaccgataaaagaacaaagaccacaaagcaaggaggtttgtgtggtggctggccagctatggatcttgagtgatatttgggatatggcctctggtaatcgattaccaagggtgggtaatcaattacaaggcttaaaagtgaagacagaaagttaagatggtctct

SEQ ID NO: 24277 - DNA, 455 bp, Glycine max
aaaagtttgaagaagctgtataatatgttttggcttttacatgcctaactcatttgagtggcatttgtattggttgctaactttgattgttgcatcttaacacatttgatatttgtttcgcattgtgcatcatcatagtgtgtgtgaaggaaattttctaagttagaaaactttcttcaaaggcaaaaactctttgtattaatcgattatagagttgtcgtaatcaattacaacacgctgtctgaagcttgtagagttaagtctcgtactggtttaatctattacggtagtaatttaatcgattacattgttggttgagacaatgattgattctctcaagagtctctactttaattgattaccaagtagattaatcgattacttctctcttggtaagttgttcagaagtgaacaaaacattttaatctgatacctgagtcatctaatcaattaca

SEQ ID NO: 24278 - DNA, 360 bp, Glycine max
agcttgtatttttctcagattctctgttttctcttctttcattcggagcttcagttcttggagctcgttccccagtttctcattctcagcctccagttgttccatcttcttggcattgctttcaatttgcgagttctttatggaaatctcgttctcgagaacgggaacaatggcgagtgtttccttgaggagtttgtgttcgagaagctctgttttgaggcgagactctctctcgcggaggtcctcgacgagacggaggaggtcgaggacttcggaggggcggggttgaacctgagaggaggagcgtgagaagtatgcaccgaaagagcgcgtgaaggaggaccttccggtggttgaatg

SEQ ID NO: 24279 - DNA, 411 bp, Glycine max
  unsure (1)..(411): unsure at all n locations
tatcctgtcatgttcattagttcaaaaattatccagaagatggagctaggttaggaacaggtacgattggatagagaaaatttccacctttcaggctttcaccttgctactacgcaattgttttgctccaccaccaccactaccacaattgttgctacgatgtaccagcattgttgccaccacaaccattgctactgttgccatcactactattgctgctgccatcactagcatgtatcatgattgcttctataattgttacctctactgacacaaccactatcactacatttgccaggatccgatggtctcaaaaatgataattgcttccagtcaacttgngtgttcagaggagataatcaccatcgctgctgttctttccgtccaggtgaatcttttgctgtagtcatg

SEQ ID NO: 24280 - DNA, 355 bp, Glycine max
  unsure (1)..(355): unsure at all n locations
ttatatgaagccagtaaacaaacatctaatccatggatatttgaacccgagtatccaggaaaaagcaaaatctttgatggaagaacagggaattcttttaaacagcctgctataatgggaaaaccttatattttgaaattaattcatcaagttgatgataaaatacatggacgttccagtggacattatgcacttgttacacaacaaccacttagaggaagggccaagcagggaggacaacgggtaggcgaaatggaggtttgggccttggaaggatttggtgttgctcatattttacaagagatgcttacttataaatctgatcatattaaaactcgccaagaagtactcgggn

SEQ ID NO: 24281 - DNA, 355 bp, Glycine max
tcttacaaagcatacggctttctggatgtagatgatgatatctatacagatggatcttatatatctatatatctatagatagatatatagatatagatatatagatatagatcatacaatgaagtaccgcacgagtgggtatataggaatccaaatctgccgaatcactcatgttatgatcttctacatcctaagtcttcccgttccttcatctggcttatgttcttcatgtagcattcacactgaatgactctatgaaattacgtcgctacttccacatggtacgggtaacgtatgagacatctctatttttcccggggggaatacttagaattaccacagcttagctttcaat

SEQ ID NO: 24282 - DNA, 359 bp, Glycine max
agcttacccttatggcttgcctccagacttcactccccgtgccgctccggaagatgtgagccaagcccctaccttcgaggggcaacttcctccttatgccgattatgccctaaaagaagacaacgaaggagatgcccatctaggccctctgcttcccctcaaggatccagccccatgaattaccccaaccaaacatagtccgccatgtcccgtcttcaccttcacccgtaaaagaatccgttcccttcgcgggagataagggaaagattgattcacttgaggagaggctgagagcggtagagggcctcgacaattacccgttcttggatttagcagacctatgtttggtgcctgacatc

SEQ ID NO: 24283 - DNA, 480 bp, Glycine max
tctaaggaggtgagcttagttatgagaggggtgtgtgtaactaagctctagcttctcaaggaagttttctcaaagaagcttctcaaggaagttttctcaagaaagcttctcaaggaagctacctagtctataaatagaagcatgtgtaacacttgttgtaactttgatgaatgaaagtcttatgagatacacttcaaagttccacttctttccttcttttattccttcaatttcctgctccccccttctctctttcttttcctccattaaagcatcttcttcaagcttcttatccaaggcaattcttggtggtgaagctccttcttccttggcttattccctagtggatggtgccttccctatcctcttctcctttgccttccactgcatctccatggtgaaaaatcaccattgaaggacctcattgaagctcaaagatccagcctccatagaagctccacaagcaagcttccatcaagt

SEQ ID NO: 24284 - DNA, 342 bp, Glycine max
agctttttgtacaagcaatcaactctaagtactgaaatttaaagaactgaaacataaacgctaaaatttaaatgactgaacataaatcataaaataactgaaataaactaaaatgttcaaatgcacaaaattaaatgtcctactcctgtgattgctcttatgcatgctcattgagatccaacacctaagcagctagtgaatcctaagagataggttgttctaactcagatgttggtgcagatggcatggaatcatcaagtatgggtgctagagatggctctggaatctagtttgtggaaatctcctcctcctaagccatatgtacacctgcatcaaaataaa

SEQ ID NO: 24285 - DNA, 345 bp, Glycine max
tttctctagaaattatgaccccatcggggattgtgccaccaccattctatgaaatacgaagtttttcaagatctttgccaaaaaatcattgaaaagaagtttcaactaaatgatgcccacatgccatggtgattgttagaaactacacatctattcaaataaggattctagaaggaatggtcaagtttccccctcttcttttttaaactttacataagtcctattcagcactaattggctctttaatttatatttttcagtcaattaactcgatctctaaaatgctcaataacattagatgtcaactcctttgtcatatacaagaacatgatacaagtcaaatga

SEQ ID NO: 24286 - DNA, 364 bp, Glycine max
agcttcgtggcaagccagtggttgagggacaaggctgggtgaagttgatttgtgggattcataatcatgaattggccaagtcattagttggacatccatatgtctggcgattgagtaaagctgaaaagacacttattggtgatatgacaaagtcaatggtcaaaccaagaaacattctgctgactctgaaggagcacaatgtcaatagttgtacgaccatcaaacaaatatacaatgcaagaagtgcataccattcttccataagaggaagtgatactgaaatgcaacacctaatgaagcttcttgaacaggatcaatatattcattggcataaattaaaggatgaagacgtggtacgtgatat

SEQ ID NO: 24287 - DNA, 414 bp, Glycine max
cttatgtaggggttaaattcgaattaagtatgatgggaaagtttaatttattccttggacttcaaatcaagcaagaatatgaaggcatatacatacatcaaaccaagtacttgaaagaacttttgaagaagtttaagatggatgatgcaaagcatatgaaaatgcctatgcatccaaccactatactttgactagatgaagaatcaaataatgttgaagaaaagacacatagaggaataatacaatctcttttgtatgtaactgcatccagacttgacattatgttcagcgtatgtctttgtgcacaattcctaaaggaaccaaaggaagttcatctatctgttgtcatgcatatatcgatgactaataggaactccgaaccttgggttatgctataagagagaaaagaaatac

SEQ ID NO: 24288 - DNA, 378 bp, Glycine max
agctttggagaaccaagccaatcattatgctagacgaaatatagatgggaatagaggtaacaatggcggtaatgacggaccgaggcagaaccgggttgagggagtaaagctcaatgttcctcccttcaaaggtagaagtgatccagatgcctacctggactgggaaatgaagactgagcacgtatttgcctgcaatgactacactgatgcgcagaaagtcaagctagcagcagctgaattctccgactatgcccttgtttggtggcataaataccaaagagaaatgttgagagaggaacggcgagaggtagatacatggactgagatgaaaagggtgatgagaaaaaggtatgtgcccactagctataacagaaccat

SEQ ID NO: 24289 - DNA, 226 bp, Glycine max
ggaaaatacatctctaaatctctgcaataatggctgaacactacgagaaacataaatacctactgattcgaattatcactctctctcttgtgtgtatcactcttttcctcgcgtgtatcacttcttgtttttcatattcctttgcggagccacactcattccgttgccttgatccctcttttctctcattctgatttggccatcacatgcttctctacgggataga

SEQ ID NO: 24290 - DNA, 370 bp, Glycine max
agcttgcatcttcatcataggataatctactacttcccatggtgcttgtagtgggaaaatcattgttattactatgatgatgattatatgacatggtataagtgtggtggtggtggtggtcactttgatgaaatgagaaatctggtggctctaggtcaatcccagtgaggagcttatcccgatccagtgagttagtgtgagattgaccattggaattgttgtcttcacccatttcctataacaacacaatgggaaaacaccaaatagaaagagttaaagaagaaaaaaaaaattatctatgtattgtagaaaaatcaatgatcatcacattcatagaataaaaaaataaaaagagattatttttttaatt

SEQ ID NO: 24291 - DNA, 418 bp, Glycine max
  unsure (1)..(418): unsure at all n locations
ntctttcgacgagcgaatttgcactatttatgtatgtcttgtgtgtttgcctttgtttgttcaacactctatacttgtggtagtttgaataggttgtcttaatgataagtatggaatctttgatagcgcatgaagtaagaccttgtcgaagtagaggtagaactgtggtggtcttgtaaaaagaggatgacataaagtcatctcatgtttgatttcaacctgattaaaagtcttgtcacccatctggtagggcttctttttgctttgcgaagcttctgtaacatcctttttttttgtaaaataaactaaaaggattctatttaaaaataaatagagttttaaaaaataataaaaattttgtaatttattaaataaagagaaatagttctaacggtaataagataaatatatgtttata

SEQ ID NO: 24292 - DNA, 324 bp, Glycine max
agcttgtgaaaactaagtcccttctttacttattacacctacaattttcatttcacacaccaacgtgccatcatggattcaggtttctacttggtgtcatcactgaaccaccaagaagtagtccaaagccgtttcttcgatccctcttggctacaaatgcaaccccacgttcccatgagctttgtttggcccaaagagtgcttagtggacgcgaacgaggagttccacgctccaatggtggaccttggagggttcctaaggggtgatgatgacgaggccacaagccgagccgttaggctcgtgcgcaaggcgtgctcgagccac

SEQ ID NO: 24293 - DNA, 462 bp, Glycine max
tatttagatcagattctatcattttaaatttattgaacgtgtcaccatactcttccttgttccatctcttcaccctcatttttagattcttaaatttttccttgagcacaaaacctccccatcctggttgcaattgagagttccagcattggtggacaactttcttaaaggatacatccgagagccagcagtccaaaactataaaaggttgagggccccaatcaacaacctttgatcgaagaagaataggacaatgatctgaaaagttcctggcaagtgtcatttggacacttgcaggccatctattcagccattccggggaaaccaagcacctgtccagcctactcctagaagccccattaggtatgatccatgtaaacttcctgcccagccaaggaacctcaagcaactccagttcgtgaatcctattattgaatttcaatatactgctgtcactaatac

SEQ ID NO: 24294 - DNA, 314 bp, Glycine max
gcaagcttccacttattagtgcacagctttttgatgcatccttcctaggaagggaccaatcactaaaaccatgagcaagaggctccaagaagattgggctagagcttgtgaaaaaagccctaaggttctcatgaaccttaaggtagatttctgagcccatgggccaaggttgggtccaattatctttgtacatattaaactaggatgtcattatatttggtccttgtatatagggctccatattgtagggagggtaccctagaaatataggatatttcagcccttgtattttttgggcacctagactagttttt

SEQ ID NO: 24295 - DNA, 444 bp, Glycine max
  unsure (1)..(444): unsure at all n locations
ngccgcccagctcgcccaggcgagcaaggttgctttcttcataagcaacatccttctggaggaatcttctggagggcccaagtgggcctggttgctatttgcacccccatttttactaaatacacccccttcaatttttttggtgattctttttccgtaatgttacgaatccttacggattatgtatttaatcttttttagctttcgaagaagttacagaaacttacggattgtgcaaaaacaccttttttcgacttccgccacattacggaatttcacggatcgcgcaagcctgcttcctttagatttctgagacgtcttgggacttcatttattgtgcaacaaaggatgccaagtatctcaaagtggctaaccaaaggttgcatgtcatcaagtaataatccccggacgaaattanggtatgacagttgcccctctttactt

SEQ ID NO: 24296 - DNA, 372 bp, Glycine max
  unsure (1)..(372): unsure at all n locations
agctttagatgtgacatctttattgttttagaatgaagngaggattttgcgattcgaaacccaacaaacataatgctcaaatttaacgtgtacttaagcatcaagaatgctcagtccctacaatgttactaaactccaccggttctgtcttcatctcccaagtgacttgtgtctggataacatgcaagcattaaatctgatggttccaagagaatacaatatggagtctccaacgttttagaccatggtaagtagaaattaagaactacggatagatgtggtctcctcaagtgatgtttctttcttgaacttcttatgacttttctatgtttgaaaaatataattataattataccacatcatactaacata

SEQ ID NO: 24297 - DNA, 312 bp, Glycine max
ttatttctatactcggataaatttaaaatttaaaatctataaatactgtttatattgcctacttaaccaatattgttaagcattgaacatttttgtgttatttataataagattgtactgtcaaagtaaaagtgattctatctattcatctaccaatccatctatatataatctgatttttgattttcaagtacaacaagcatttaatcctttcctcataggacagtgcttaattcatatcatacacacaactaagacttatatattttcaatgcttatgctttctgtttttttccggatagagtggcgggg

SEQ ID NO: 24298 - DNA, 287 bp, Glycine max
atgcaatcctccctaggaagggaccaatcactagaaccatgagcaagaggctccaagaagattgggctatagctgctgaagaaggccctacggttctcatgaaccttaaggtagatttctgagcccatgggccaaggttgggtccaattatctttgtacatattagactaggatgtcattatatttggtccttgtatatagggctccatattgtacgtagggtaccctacacatataggatttttcagcccttgtattttttgggcacctagactagtttttgtatt

SEQ ID NO: 24299 - DNA, 203 bp, Glycine max
tcgccttttctatattacatgggaagcctcttcacaccttgtaataattcttatgcctcttaaagccaagtgtaaactttgtgcctaatttgattatttctttggggatagactgggaggataactggttcttgggggatctagggacaaaagccttgatctggtgccttattaaacttcctcctctatttgcacccagcatt

SEQ ID NO: 24300 - DNA, 367 bp, Glycine max
  unsure (1)..(367): unsure at all n locations
agctttacagcagatgcccctttactccatgttcttgaaggatatgttaacaaggaaacataagtatattcaccaggaaaaaattgtagtggaaggaaattgtagtgttgtgattcaaaagatccttccacccaagcataaagaccttgggagtgtaactattccttgttcaattagagaagtcactgtgggaaaagctctgattgacttgggagccagcattaatttaatgtcattctccatgtgcagaaggttgggagagttggagaccatgcccactaagatgactntacaactggttgaccgctccattaccagaccatatggagtaattaaagatgtgctggtcagagtgaaacattttatc

SEQ ID NO: 24301 - DNA, 371 bp, Glycine max
tactcaagcttctaactgagattgcaatgttccaattgatttcaaaatggtgtaatcgattatcagatattggtaatcgattaccagtgcatctaaatgttgaaattcaaaataaattgtgaagagtcatatattttcataaaatgctttgtgtaatcgattacatggttttggtaatcgattaccagagataagtcttgaataaaaatcaaaagatgtaactctgtcaatggttttcagattatctcaaggtcataactcttccaatggttttcttgaccagacatgaagaatctataaaagcaagaccttgacttgcttttcaattaaatttttcaactaacttttgaacatctctctgaacttctact

SEQ ID NO: 24302 - DNA, 374 bp, Glycine max
  unsure (1)..(374): unsure at all n locations
agctntgacttgagacatcaaaagattataaatatgtgaccatggcatgaattttaagatgagatcaatcatctatctttcagtcttgtctcaaacatcattcaatatctttcaactctttctacagaaatgtctaattttttttctttccatctttctaaaagtttttgttcaaaactttctcttcaaagaaaagttctttgttcaaaaacttgtgttattcatctttttcattctctgctccctttgctaaaagaacaaaggactaaccgcctgaattcttttgtgtctctcttctcccttacaaaagagtcaaaggactaaccgcctgagaattcttttggttcttccctttcccttaagcaaaagatttc

SEQ ID NO: 24303 - DNA, 427 bp, Glycine max
tcagctccttcaactgcacaaggctcttaatgtttgaagagtatccttgtggaaccttcacccgacgaagacactgacaaaaacttatcttctcctttttggacaaggtatggcaagctaggggcaagtaaattttcttcccattagaccttggatgcaactgcgatcgtatgcccatatcatctagatcttgacaggtattgaagccatccttcatcttgccttgaatgttaatgagagtcccaatcacactattacaaacatttttctgcacatgcataacatcaatacaatgtctaacatcaagatcagatcagttcgaaagatcaaagaatatggacctcttcttccatatgcaactcttactcttatccttcttttgggtctttccaaatacattattcaggtgttcaacccgctgatatac

SEQ ID NO: 24304 - DNA, 346 bp, Glycine max
agcttgttcgcacatcgttcgcgtgtatgatatccactcgacaaggtttgaagtaaaggagaccttcaatcctataacgcaacgtggcggacaaaaatgggcagttaacttgaatggccattattgtcaatgcggaaggtattctgcgcttcactatccatgttcacacattattgcagctagtggttacgtgagcatgaactactaccaatatatagatgttgtttacaccaatgagtacatcttaaaagcatactccgcacagtggtggcctcttgggaatgaagcggcaattcctccttctgatgaggcatggacactaatccctgacccaactacaattcgt

SEQ ID NO: 24305 - DNA, 418 bp, Glycine max
cctatggtttgtaagaatgataaatggatgccctaacatatattggcgccattttcagactgcagtggtgatggcatggagctctcggatatatgtggaggcgtgatgtaaccgggggcagaaaagcttgctaaaataagccaagggatggccctgttgcatgagaacaacccccatctcgatacctgaagcatcagtcttaagtgtgaatggttatgaaaaatcacggagggccaagacgggggcctgggtcatggcttgcttgagtccctcgaaagccgattgagcaccctcgtcccaatggaagttatccttttgtaacagtgtggttaaaggggaggcaatggaagcatagcctcttgataacttccgataaaaccctgttagacccaaaaatccacgtagagaatgggtattg

SEQ ID NO: 24306 - DNA, 380 bp, Glycine max
agctttattcaaatagaataatccataaatgtcaaagaattgggtgttgaaaaagcataaaagactatttgtgattggtttaaagatacaatctttgcaaatgaaaatgcttcaaaaacattaagaaagctagcagatgggcctaaaagaaatgttataacttggcaaggatacaacttaaacaagtattcattttacacaaaagcacacgacgacaaaagtacaatgcagaacagtgaggtcaccctaagggctgaatctcaacacttcgcaggtgtgcatgacaccaatccctgtgtagcttccatcccttactttgggttcattgatgaaatttgggagcttaactatgtgaaatttactgtttgtgttttaaatgt

SEQ ID NO: 24307 - DNA, 556 bp, Glycine max
  unsure (1)..(556): unsure at all n locations
tatgtacgtacacttcgatactcagctattacttcctgatgacaactccctagctctcatctatcttatatcaccggataaatgagccgatttgggaatcgatctactatgacacacacagtgtcatgtccacgactagtcttgggttaactaaatacaaaatccatagatatgcctcttccaattccattccggaatttccatggcttcaactctcctgatgggtcggtggtgctcaaccttaacccttttgacatgtcaaacatcttgctacatattcagctacatctttctttatgccatgccaccaaaaacttctcttaaatcttggtacatcttagtcattccccgatggaaactaagacgacttttatgcgcctctttcaagaacttatactctcaaatcatctacagaatgcgacgcatatcctcccccttgatctaattaacccggntgtgttcttctcaaacctcaactccttataccccgttactnctacacncttgcttggaaaaacggtgacactcttgagcctcccgatgtgaactacaatcg

SEQ ID NO: 24308 - DNA, 261 bp, Glycine max
agcttcttttggaccttgaacaagcaatcaactcctctttcagaaccatgctatgtgctcgcgactggtccctttcttcccttcgcaacttgagttcattattgctaccccatagagctccgcgaaatttgttccggccatactcttgcttgcgagccctcttggtctcttgttcaagggctcttgcggtaattgcattctcttcccgtaacccggcgcactccttccgaacgtgtgtagcagccaacttgaacttctcct

SEQ ID NO: 24309 - DNA, 212 bp, Glycine max
aatgcagaggttcgaaccatcgatgccatggtttgggttctctatctctcggagatagacatgtggaagagtcactggatgcttcgggtgcacagaagtaacaattgtcccttggtcagctggccttcaatggaactctacgtcctacatgaggaacctatcattgcgacaccttgacgtgcacatcgaatacatcatccacacaactgact

SEQ ID NO: 24310 - DNA, 373 bp, Glycine max
cagcttccattgttgaaaagtatgttgttgattaagctgttgattttttttacgatacattgaaacaattcaatctgtgggggttcctgaaactcgtcatgatcggacacgaggaggtaagggtacacgacgatacaatgttgtaaccatgactcaacaagatgtctcacaagcgcatttgtatatcttgaataacacacatgaggtcgttccctacatacgtactcacaaagaatatctaacatctatgcacccaaaaatgaacatgatgaagttgctacaatagcataatagaactttcataaactggtttaaagaaataatcttcagtgatgacaatgcttgcaaaacattaagacttttggctattggt

SEQ ID NO: 24311 - DNA, 471 bp, Glycine max
gggttacctccttcttcactacatcaagaatcaccgggttaagtcttctctgtggcagccttactagtttagcccaatcttctaaatttattcgatgcatacatgtggatgggctaataccaggaatgtccgccagggtccagcctatagccttcttatgcttcttgagaatagataacagcttctcctcttgctcatcagcaagggaggcagatataattactggaaaaattttgctatcatccaagtaagcatattttaaatttgatggtagaggcttcaattctggtgtgggcggctagatagtggtagaaagagatggtttctcagcctgtacctcataaagaaattcagaggtatgtgtacttcctgaaacatggttagttctatctgactctagaaaatcaatctcaagaggtaaaacatcactaggaatgtaatcaatataaatttcagattcactctcagcat

SEQ ID NO: 24312 - DNA, 367 bp, Glycine max
gcttatacttatggcctgcctccgtacttctcccaccgtgccaccccggaagatttaagccaagcccctactttcgaggggcagctcccaccttatgaagactatcccgggcaagatgatggggaaggagatacccatcttggccccctgctccacctcagagatctgtccccacatgaactaccccaaccgaacatagtccgccataccccggcctaacccacacctttaaaagaatctgttcccttcgcggaagataagggaaagatcgatgcgctcgaagagaggctaagagcagtcgagggccttggcgatcacccattctcggatgtagcggatttatgtctcgtgcccaatatcgacattc

SEQ ID NO: 24313 - DNA, 418 bp, Glycine max
cgcttgtagtgaagctaggctacaacaatagatgggtgtttctatgattcaaatgtctacattttgagagagcacaaatcatacacttatcccaatgatcttgtataatacaagtagctttctcactatcttttactcttaagatgctgttgaccttatggttacaacacaatttattcttttattgtgacatacaacttatatgttgagtgtgctgatgcttaacctttttgttttcattctaatcgactttcctgccccaaatttagagtaactttgccttgaaccatatgctctcctaaaatataaacagggtattatgagagaattattcaagcttagggtgcaattcatgacaaagatatttagctcatacacggagcaaaggatgcaattatcattcaatgcaagctttttg

SEQ ID NO: 24314 - DNA, 359 bp, Glycine max
gagcttacaggcccaacaatcacaataggaatggttcccccaaagagggtgcgagggtgaggggcagcaacgacaacatgtggagtattgacaatgagcttgccaaggcgtcttcttctcagaaggagaaaaggaggaggcagagagggaggagtgtggtgaggaggaatggcccaaagggtggaagggttattgtctctggggctatgctgctggaggttgagactgttcttcagactctggtacacttttcctcacttgggtcaatttgaatttacaatattgatgcacagatgttggcttttgctttgtctggggaagagaactaatgtgggtgtctggcgttctgtttgtttatg

SEQ ID NO: 24315 - DNA, 385 bp, Glycine max
ttctacacgacaatgtagagaactcttatctctaatagatgatatgaatagtcttctaaattctgatttgtcccatcagagctgcagatctgtgtaataaattggagattctaagtgctagcaggaactttgagctcagatacatagaaacaatttacatgtgctactgagggatactcctgcacatgttgtattgatctgcctagattacctatcttactacaaacttgaggatagatttacgtgtagttttttcagcaatgataatagacgtgatcatgtgatagcgtacagaataaaaaagtggataggcagctcgcttaaagtgaactctccttcatagattctcctgttacagtaagtatctgattctagagatccttta

SEQ ID NO: 24316 - DNA, 289 bp, Glycine max
agcttgagatattgtaacatgaattttcctgtctctcctataatgaattaagctggtgctgtgtacggatagtaacatccctcgagttaccaaaattccttaacgatttgagttgacctacatggacaatgtgatattttctattatctagtcgagattcgagcgcgaccgacgagagtacaagacgtggatcctctactcaattagagatgtatcaatatcaatatttgtaagttacaagcacatgtcatatgcagatatattgcgcatctgcggtgatatatatagt

SEQ ID NO: 24317 - DNA, 519 bp, Glycine max
  unsure (1)..(519): unsure at all n locations
ctcgtgtagtgccttataatactaagctttttgggccatctgtggaaaggagcagtaggatttgtttttttcaccaaaaaaaacctcccttaaaacaaaaatggcgtacgcaccccatcaataagaacaaatattatagggaaattttagaaagcttatgagcaaaattctttaccaacgagtacttgttctaaagattnatttcactatgaagaatgggcacttcttcgatccaggggcgtcgcgtatctacaatattggcatgtgattgcagggagatttggtacctgcatcacacccatttccatttgtaaattgaaggagattccttaattgaacgctttgtgtgtaaaaatttgttcctggcaattttggttttgtagagctatacaagtcaaccgcagaagattttgcgttctcagaaaaagagttctttgtgtttttttttaccgtgtaacccgaagcgcgaggcatcactgtttttctgctcttagtgaacaattgaggtattgtctggtt

SEQ ID NO: 24318 - DNA, 405 bp, Glycine max
  unsure (1)..(405): unsure at all n locations
acgccccgggatcctctgagtcacctgaggatgcagcttatcatttagtaaactttattaaaactttaaacattatggcatataagatgatttttgaatatcgttaatggaatacaatcttacttaaaatggataaaattattatagaagatatttataaattaatagggtattgggattcatgactaactatcagtattatttaggacgtatttcactctatggagtgaaaaaaattatgtaaaatgagaagtaattatggatgtgtctattattaatataaataaaatatcctataaacagaatccaattaaattaaaaaaaataaaataaatgcacctttcttttcactctgtacgcgcttctcaccttntacagcaaaatagaaaatctaaaattaattta

SEQ ID NO: 24319 - DNA, 475 bp, Glycine max
actcaagctgccaataatattagtttgagtttgagtacttcttattaaaaaaattagctctgatcctttgatcaaatatattatatatttaacaaactaacttatcatatgtataacgtatgcacttataccttatcaaaatcaaaataaaccattaactcacattattaattttcaaccctgtccatgtgcagatcaatttaacttattttctttaaataataattcatcttttagtttaattcttatatatttttaaggttctcactgctatatgttatttttaaaataatcattaaaaaatcaataattgtcaattatatgaaaattcataattaacataataacgttataccttaattaaatcgcttatttctattaatcatcttgaatatctttttttataataactaaacaattccatgtcgatacgagttattcgatttactctcacttcttttattatatctatact

SEQ ID NO: 24320 - DNA, 428 bp, Glycine max
  unsure (1)..(428): unsure at all n locations
ntgttgctttgttcccctggtgggtccctgcgcttctatagcacactcctccatgcctgccatctgtgttacgaacatttgcggatggcatactcagcacggcttgtatgtgcgtatgatcccccttttgggatactagagatactcaggtgtcatatattttttatttgcccttcgagcatgattcttaacaatgcctcgccttaagtttgtttgaatcaaccaaagactaatcttgccgtggtctaagaggggcgttacacagcaccttggatggctatactaaccgagagtgcacctgcgtatgggcaacgcgacgaatatgctgcacaactctcggtctggctttcagagatgcgagcctatcgtcctgcgtgatactgtaaagacgacatgacgatttatacgcgttaacaggtagtctacac

SEQ ID NO: 24321 - DNA, 244 bp, Glycine max
aactctacatactttgacataactgtacccatcacaccatgaactatttcgacttaatacacacaacccatatcccgcaagttgagaacatcacaaagtgttttccgaacacaaacaaaaacatgtggtggactaaacatgcaactccaaatgcaaattaagaatgcccaactcactaaggattatcaagtcactcacatcactgcacttgtggatcaagatagaataccaccgaactgaccat

SEQ ID NO: 24322 - DNA, 358 bp, Glycine max
agcttcaatgatgagatcgtcgtcaaagtccggcatattttgtaccttttcaaccacttcctccaagcacacggtcttgttattttcactcaatgcatcggcgattcgactgatatctgcagccataacactcatcatttctagcataacatcactggtgcgtcttctttttgatggttgctttgaatgtgattgtgatgatgaaggccttgcccttgtctgctcagatgaaccctgcacttcatcacttgcattagcatcagggcttatctgtacatcagccaacaccagtgcaggagcttctgcatgctcttcatagttaggtgtaagatttacatcaaacctctcaaagttttca

SEQ ID NO: 24323 - DNA, 484 bp, Glycine max
  unsure (1)..(484): unsure at all n locations
nggtggagttcattgagaatcatggaaggttcgggttgtgtaacgatcctacgcgtgccaacaagaggaggaccgccttagaaaggaaagagagaagcctggcccatctacaaggacgtggactacaagtggaaagggtccctatttgtcacatcagcaaaagttttgtcagtgcaggatggatgcacgaggaccaagtcgtggtgatagacgaaggaacccttcaagaccgaccaaattgggtgcagccatgtcctccgggctttgaattggggaattggcaaattgtcgaacaactcgagatttccatgacaaattcaatgtaatccaatagttccaaccctattgctaggcctangctttagggtctgcttcctgttggtcatacctttntctttaatgttctcacaattataaatacacaaccttctccatctaatgtngttcctctcacactttcgtctattttcatacttctacatat

SEQ ID NO: 24324 - DNA, 386 bp, Glycine max
agcttactctaccaccattgttgaaagtccaataccgtacctcaaaatgcttctttcttctctttgacaaaagctccttctttactgttcctaccagctacatattaaagtcccatcaaaagaagtaaaataagtgatctatatctataaaaccagaatttcagaataaggaaagagtgaactttaccgaataacttctcaaagaagaactattgctggagttataaaagaggaagaaagttgtttgtgagtgaaaagggaggatacagtgatatttataggcaagtaactgctggagagttataaaaaaagaaagaaagttgtttgtgagtgaaaagggagtatccagtgatatttataggaaagtaaaaaatttctttaaaaaa

SEQ ID NO: 24325 - DNA, 431 bp, Glycine max
tggaattgtgagttatgactaagttctgttatgtttattgcaatatttttgtaggtatgacaaaggagcatacttgtttttgccatcgtatgttatgagagtacatggagcaaagcagcaacgtgaagcagttaagagggctcccaagagtcaacttgatcctgtttttgaggttgggatattcttttctaaaatgtatgtgcatttgtaagtctgtctgtggtctgcagttaatagttgttgaaattaattctggtattattgtgtaactaggcccttaatacccttggcaataccaaatggagggtaaacaaaagggtgctctgtgtgatagatcacatatgggctaatggaggacgccttgctgatttggtggatcgtgaaatgtgagtactaaacaaactttttgctaaatctatctgttgactcct

SEQ ID NO: 24326 - DNA, 376 bp, Glycine max
agcttgttgcactagcataaacaaggagttgagcaactgcttctggtcttgggtgtcatggcaatcctttggcaggaaaaattctaaaacaaaatcagcggaggcactccggagtggaatgcccagagcagcatgcaagccaaacatgttagcatgatgtgccagaggatactccgccttgctgaaggaagtaatgtcatttgcaaaacaaggtttggtggttgtgaaagctgtcccaactactccttgcccccccaaaaggtggcactcagagcaggcttccaggaaacccattagctctacatccgccacaaaactagcagcatacacagtcgacacataattcatctcatcgtttgaatgcccacatccactc

SEQ ID NO: 24327 - DNA, 491 bp, Glycine max
aagcaagactgtggtgttgaaagtgctttgcctatcaaacatcatgaagttgataaaaacaaaagaattttttcaagcagaatcaggtgtcgagcaatgaaaacacaaccaacaacaaaattaaaggcaagggaagaaagaaaaactttccaccttgtcaacattgtggcagaaaaagtcatccacctttcagatgttggaggagaccaaatgccaaatgcaacaagtgcaaccagacgggggcatgaagttgtgatctaccccaacaaaaatcaccatgataagggaactcaaattgcttatcaagaggaagaagaccatcttgtcgtggccacgtgctttttaagtagtgaatcaaatgaaagttggctgattggtaatggttgtaccaatcacatgacctttgacagggcactcttcaaagatttgatgcccacaaatgtcacccagtcagaattgtaatggtaatatatctcatcaaagaaagggac

SEQ ID NO: 24328 - DNA, 373 bp, Glycine max
agcttatcaattagaggaactaggtaactgtatgttttaccactcccagtctccgcagcaataataacatccttccctaacagcacagacggtacagaagaagcctgaacacacataaataatgctcacaacataagacccagcaccccaaaaaatgaaaaggactgaacttagaattgtacttttcatgatattctccattcagaatcacagttttaccttgccaacctaactgacctttaatataaacctgattggatgatagtatcaaaagcacttaaagacctacatctaggacctatctggaaaaacttttccataaacacctataggagaagaaaataagaagggtaaatgaattgagttttcccat

SEQ ID NO: 24329 - DNA, 523 bp, Glycine max
  unsure (1)..(523): unsure at all n locations
attactgcactatgaatctcagctggaggatttggggccccttacatgtggactaggtggcggccggccgatggtgcacaacaagttttcccaatccacattgcgcccataaacccaccatccctggtggccaacctccaactgagcttacgtacttccaacgtagtccatatcctcgtttctctcaacacncgggtccccatcaatccttttaagctttcacaacaatccngccaaacaacatttcaaacagcacaagctatcaccagcaagcaaaacagaccgaggcagaaactctgctcaacaccaacccaaatacagctttttcattaaagaccacagaacaattcttcgatcaattcgttaaccgtggatcgactccaaattttactggaagctatagtgataagctacatgtgaccgtggattactacaacatcagactcatctgtctactttcacaccaacaacacaacatttctgaccagctaaatctgctgaccatttgacacaaatctgctag

SEQ ID NO: 24330 - DNA, 387 bp, Glycine max
agctttgttgggcaacaatggtggaggaataaaagaagaagaaggctgcgtgagagagagggagagcttcagaatttcttttggctgagtgaggagagagaacagcttttggttttaaaaagggttttctctttttctattattctattcaagctatgccacatgtctccatttgagtggagcgaaaagggcccactttctcttttgattgtgactcatactcagccacaaaaagtgagaaaatctgacctttgaaacgctaaaatcctgcctcggtttgcgtgtcatttctctggttccagttcctcgtgtttctctgcgtccgtcggggccagttttcgaaagtaggcaatatatatatatcaaaacgctcaaaataaaaccccg

SEQ ID NO: 24331 - DNA, 493 bp, Glycine max
ctaagctcttatagaagtgtatctatctctattgagagggcttaagcatcaatggcatatttctcacacagagaacttggcttgagtttctgtcacttggaaggctttaaattgacttcatcatgctcttggataaccttttaaagctgcaaagaagactgttgaagtggggtccactcaattgacaaggttttagaggaagtaaatagagatgtcagctgtaagaaaatgacagctagtagagatattcttaggtggtcattttgaggattccattatgaggagccttttttatgatcatattagagatagggggagcaacatgagcaacatgttgaacaacctataggctaaagtttgaagctcaaggaaaagcttgaagaagtgttggctcttacatgctcaactcccttgagtggaatatatattggttgctatcttgagtggcgcatcttagtacatttgatatatgtattgcatcatgcatcatcat

SEQ ID NO: 24332 - DNA, 359 bp, Glycine max
agcttctgtccctgagaaactggttcccagaagacaacagggagtgaagattgctgaaaaccctagccttgcaacaagtcctagggaagtagacacggagatggacaagaaaatccgcagtattgtgagtagcattttgaaagacgcctctgttcctgatgctgagaaagatgttccaacatcctccaccccagatgttgctgtccctgaagctgatgaagatgtcccaacatcttccaccccgaatgtttctgtgcctgatgttgagaaagatgttccaacatcttccggcccaaatgctgaagtactctcttcccccagcaaagagagatcaacagaggaagatgatcaagccacag

SEQ ID NO: 24333 - DNA, 271 bp, Glycine max
atcctacgcgtaccagcaagaggaggacacaggttcccaaggcctgagagaagcctgtcccatctacgacgacttgggcatctactctgtaacagggcctactgcgagcatactagatcctattattcagggaacaatattcttcaattaaatgtatctgcatttgtatgcatgagcgtggtaagaggtaataatagctgaaattaattctggtattattgtgtaactaggcacttaatacccttggcaatactcgatggatggccaacaa

SEQ ID NO: 24334 - DNA, 353 bp, Glycine max
agcttgagctcattgttgttgccccacaaagctcctcggaacttatctcagctaggctcttccttgcgagccctcttggtttctggttcaagggctcttgcggtagctgcattttcttctcgtaactcgacacactctttccggacgtctgtagcgactaacttgaatttttctttggcgagtcttgcctttcctagctctagtattagagcgcggtacgcccactacgttgattcgagttttctttacacgatccaactctctcgccgaatccctgaccacaactgcaatcttgctcaaggagggaagaaacccggagaaaagatacggttttcttcccccaagaggacatc

SEQ ID NO: 24335 - DNA, 303 bp, Glycine max
ttaatttactatattctccccctatgatctcgacttcaagctctacttgaaatcaaccatctaattatatgagttcttgatttaatccctatcttctcttcccctttggcaccaactgaaagccaatatgcgtgaaaattactaccccatacataaatgactaatcatacaagagaatagaacacaagaaaacaagatagcttaaccattcattatactacacatataatacttcctagaacgtcatataattcagaaagtcattcttaataaccacttagaaactacttatgcagaaataaa

SEQ ID NO: 24336 - DNA, 359 bp, Glycine max
agcttccaacgtaagaaaatatacctgttggttgatattttatttattcttagatggaaacttcacttcacatggactaaaaactttcgaatcttgaacactatcagattcaggagatgcccctaatattattccatattctttggttaaaaaagctgcatggtttttcttttctttcgagaacgttttctagtacagacttagttcgttcaatcaaaggaaaatggaatttgcatgggacttgactctgtaaaacaataattgtatttcaaaagataaagagcggaattgcaatcattaattaaaaaatatacatatatatactatttgtaaaggaatttttaattaatatataatat

SEQ ID NO: 24337 - DNA, 562 bp, Glycine max
  unsure (1)..(562): unsure at all n locations
gtagtcggcggattataatactccgctgacacgctgccactctactgcttatcacgttttgtactcgcagactcctcatcaaagtgatccattctccctgtatctgcaaaactgccgcggcttgtttaccatgatcatcaggtcttatctttcgtccgcttaggcgcaaaaggagaatgtacacacggctcggataacgcctcgattcgattcccttcgctgacaaacacctaattattaaccattaacatttgcccatatactatgatcaaaataagctacgttattaaataggttaacatctatcacagctaaacttactgacttatgaacttaaatctttcacatcctattcactacaattcgatccatgggacagacgtgtttgctctctataanccaaatactcattgttgtatggaatacttaatatttctaacagatctttatgtagctgttctccatcactctgaactttcatcctataagttatgacacttctagttcaatctactgttctgatttcataccctcgtactctctcttccgccattccgcaccg

SEQ ID NO: 24338 - DNA, 342 bp, Glycine max
agcttgccacccagctcgcccagtctagctatgttgtgccttctggaggaacttcctggaaggcccaagagggcctgattgctatttgtaccccctgtttactaaatacacccctgccttttttttctgattcttttttcgcaacattatggaactttatgaatttcgcaacgatacttgttttcttttcgtaatgttacggaaccttatggattacataatcatcccttttttggcttctggaatgttacggaactatacgaattgtgcaacaatgcttccttttgacttgcggcatgttacggaacttcacggattgcctaacgatgggtgccaagtacc

SEQ ID NO: 24339 - DNA, 181 bp, Glycine max
gagaaactagaacttaagttccccccccctattattagttagcttacccccatggccaaattcctggaaactccaaaaaaggtcctaattacaagacttcctcaaatggcttggaataccagggttaaaccctattcttctataatgggccaaattaaagggcccaaaggagggaaaacct

SEQ ID NO: 24340 - DNA, 381 bp, Glycine max
  unsure (1)..(381): unsure at all n locations
agcttgcattgtgttggagtgtacatccaccttttaagtatttgacgaagagaaatattttcaaatagaaacaaacttatacaaataattgattcccagatttctaaagatgtagaaaaaagtattaaaaaaaacaaaaaacattgtttagattttttaacgtgtacattattttatatatcatttgtttaaaaaattttatacttgtattatttgggtcatttttttgtattaaataggtaaaaaaattctactcatgtaaaacacaaacttttgtaagttttgttatttgaaataaaaaaatttattgggtcccatatctcatttaatgtttgtctcttgatattgtagttntaaaaaaaaatcatcggtttttgataa

SEQ ID NO: 24341 - DNA, 430 bp, Glycine max
  unsure (1)..(430): unsure at all n locations
tatgaatgatctgagtcgaactcattcgctatattgaatttctatttataataattatccatactttatttatttatttattttatacaaaaacatttaatgcgaatttaattaattaaaacacatcacttaataaatcattaaaatttataccttaattatatttttgtattaaattaaataatataataatgaaggaaaaatccctcttgaaaaacataatttgtagaaatgaaccactcctctcacattaaagttctaccacacacatgtatggggcgtgtacagatattgtttttatcaagcgtatgagaatgggtctatagcaccctcttgagatcctatccattgttatccatattgatgatccatacttgtgttcaagagctactcatatttnttatactagtaatacgtataattttatttg

SEQ ID NO: 24342 - DNA, 354 bp, Glycine max
  unsure (1)..(354): unsure at all n locations
agctttgaacaatatacttgtccttcattaattgattttgggcttggcggccacgctcaacaaagtactttcgacacctactgtatgttgatttgaccaatgctgttatgggaatgttgcgacaatccttcaaaaccttattgatacattctgagaggttggttgtcatgtggccatatcgatgtccttctctatcataagtcatcgtccattattcctttgaaatgcgatcaatccatgttgctatggctggactcagttgacgaaattnttctaaattttgatcaaaaatgtgcttgcaaggagtgtacgctgcataaaattagttatgaataacaattttaagtgtatatg

SEQ ID NO: 24343 - DNA, 575 bp, Glycine max
tacactgtacttcgtgacattaaacttgtctgctcctacagcttgcactgactgtcggccgcttatttttgtacctgatgttgcgaccctcactactgtgactctctggtattgctatatgccgcgcgagtcctttaatctcatgatctgattataccgggatgccacacaatggtctaagacctattgatgcgacctataatgctgatgtccgagggttatctactactaatagattgactgacgcaccgatggcttttaataactatcgcagccgaatgcatatctgcagattgaacccctacttctgctgtggtaaacaggctgtcgtactttgtccaggtagaataagctcagatgccttgtgcccatgttatattggcttcaggcgtagatgacagatttgtacatccatctatttgaagggcttgtgctccttccgaacacttaccgctgctttgtcttttcttgcatgacattgctctgactccggtatgtgttccacgtatatctcatccactatcatttcgattcactcgtgcggtctatcctccgcttcataattcaagtctccg

SEQ ID NO: 24344 - DNA, 365 bp, Glycine max
  unsure (1)..(365): unsure at all n locations
agcttagaacaataaacttggccttctcttaattgtctttgggcttggcgaccacgatcaacaaagtactttcgacacctactatatgttgacttgaccaacgctgttattggaatgctgcgacaatctctcaacaccttattcacacattctgataggttggttgtcctgtgaccatatcgtcatccagatgtatcgtaagccatgctccatttttcctttgaaatgcgatcaatccatcttgctatggctggactcagttgacgaaatatttctaagttttgatcaaacacatgcttgcaaggagtgtacgttgcatcaaatntgttatcatcaaaatttgtacgtagacatcaaactcaaat

SEQ ID NO: 24345 - DNA, 439 bp, Glycine max
  unsure (1)..(439): unsure at all n locations
gcatagtataacccttcagtttcaattcagagtctccataaatgaggaattgttctttagatcttcttaagtacttaattatggtcttaaccactttccaatattcctcaccagggtttgcttgatatcgactagttacacctagtgcataagcgacatcaggatgtgtacaagtcatggtgtacatgatagctcctactacactagcatatggtactctactcatgcgttctctttcttcaggagttattgaacaattctccctactaagagtaattccaacacctataggcaaacagcctcgtttggaattattcatgttatatctctntaagatagtatcaatgtacatagattgggagagtccaagcaaccttntagatttatctctataaatctttatacctagaatatagactgtttctccaatccttcatgg

SEQ ID NO: 24346 - DNA, 371 bp, Glycine max
  unsure (1)..(371): unsure at all n locations
agcttgtagtgattcactctgatgtgtatggcccatttgaaatcaaatatcatggaggtaacttgtattttgtctcttttatagatgactttacaaagaaaatttgggtttacctgttacaaagaaagagtgaagtatttgtaacatttaaatcattcaagttactagttgaaaagcagtctgattgttcaattaagatgcttagaactaatggtggaggaaagtacacttcacttgaatttgataatttttgcaaggaagaaggaataattcatgatgtaatggctccatacactcctcaacacaatggaactgctgggagaaggaananaacaatgctaaatatggttagatgcatgctgagagagaag

SEQ ID NO: 24347 - DNA, 450 bp, Glycine max
cgacatcgaccaacaacgtagactgacatgtgtatcactcgtctatttgatcttgatttcactttccccgtgatatcctattgtcaatattctggaagtgttatacatattttaagaggtcaaagattaaacttgtcaaagactcaaaaataaaataaaagtccattcaaagaaataaaatgatgttttagttatgcatactaattttttattattaatattcaaattagatattttttaccacaagtgcctttttatatttttcattttaattacttacatatcagtgcatcaccatgccgcgtttcatgttatggaaaaaataatttttaaacaatcttgagttgataaatgatgtaatataataagaaaaaagattaaaaaagattattaactgaatgcttattgtttttataaaatataatcactcttatatgttttaatccttca

SEQ ID NO: 24348 - DNA, 317 bp, Glycine max
gcttcctcggggccattcttgttggtgatgaacaaaagcgcaaaacggaatcaaaaaatgcgaaaaaggatgaccctatggctgcaaactcgtcaatcccatgggtatggcttttgaaaggggggaaaagaagtttttgaatgcaaaaacgtcctccctttcgtcattcttataatttggtgcaggggtggctcgcccaggcgagctaacctgcacattttttttttttttggcgacttgcttaacttgaacttacttaagttagagttaggcattgattacttatttttaaaacaaacaaaaagtaaaagaaaact

SEQ ID NO: 24349 - DNA, 405 bp, Glycine max
  unsure (1)..(405): unsure at all n locations
ntcgagagattcaaatggtcataacttttaactcggacgtctgattgaggcgcattttatatcaagacgctcgaaattgaacaatggaacctcgtgagcaatttaaatggtcataacttttcactcggaggtccgattcacgcgcataatatatcgagacgctcgaaattgaacaatggaagctcttgagcaattcaaatggtcataacttttcactcggaggtccgattcaggcgcataatatatcgagacgctcgaaattgaacaatggaagctctcgagcaattcaaatggtcataacttttcactccgaggtccgattgaggcgcattatatatcgagacgctcgaaattgaataatggaagctcttgagcaatttaaatggtcataacttttcactccga

SEQ ID NO: 24350 - DNA, 347 bp, Glycine max
agctttcacaagaaccaagatttactctttcaagtttttctgtatttgataagtctaggatctcaaattaagtcttggaagcaataaagatcaattgccattcaacatggaaggttttgtaacagaaaaaatacatcagaatactaaaaaatcattaaattcttactcgttacttttcttgaaaagagaaacctaagcatacaaaaagcacatcatcctagccactaggtgtggattttgtgaatgagctaccagctaccacttagaactctctgtcgtactttagacaccaaaataaaaatgtattatgtatagcccctttatattaaacaaaaataccgcaccac

SEQ ID NO: 24351 - DNA, 441 bp, Glycine max
agcccttaaccttggaatgagctatagaaatagccaaaacaactccctctagttcagttgttagagaaagaaagatacccacatataaaacatatcctcctaagaaagcaccagagtaataatgaaataacctaccatagcgaagggaaccatgaaatgattttaccagccttgggtgcatgaatattgatgttaaaagctttgatgacctaaaactcactcagagaggatctcatacagcttgaagtaagataaccggcccacaagcaaaatatgagcaaacataaggatcattgcttgctgctatgagacaaaaagattatgaaagcagacttgattgtggcaacttaagatcgccccaaccacaaagataaaactagcaagaacaacatctttagcttgcatgtgaacaacttatttggcaacaaccaggataagatc

SEQ ID NO: 24352 - DNA, 378 bp, Glycine max
  unsure (1)..(378): unsure at all n locations
agctttataaaattgagtatgcagtatataagataaatatttagaggagaagttttgtcattcgtatcaatttaattaatttgagtagaattgtcttttatggaaaatacaggtgatttggtataaaaaaatataattgactctaaatatattatttttagaaaattaatataattactatatatattttataaatattctttaagactctcattcctaaaaacctaatttagttttcaacaaaaaaaataataatttagtgagaataaaaaaaatcctaatattaagtgtcaccttaaataaaaataccatttaacctttttatttaattttaaatgattntaaaaaatcatgagaagatttaatattattttattg

SEQ ID NO: 24353 - DNA, 291 bp, Glycine max
tgggctcatgcttgctacatgctatgtttctagaggaatcagcaagtccgtcaacctatgtttatcagacttcaaagccttgggagaccattttgtacctctccaaccaatataatcaagtgtaagcttcaagtattgttgtttgagttataaaagggaagaagaaattacgattatatggaagtttcctgaagctgggtggtttaaacttaattctgatggttcagtgcatggcaaccatgggccatcaagttgtggagtcattaaagatgatagggggagatggtgttg

SEQ ID NO: 24354 - DNA, 380 bp, Glycine max
agctttgaatgctctattcaatggagttgacaagaatatcttcagactaatcaacacttgcacagtggccaaggatgcgtgggagatcctgaaaaccactcatgaaggaacctccaaggtaaagatgtccagactacaactattggctacaaagttcgaaaatctgaagatgaaggaggaagagtgtattcatgacttccacatgaacattcttgaaattgccaatgcttgcactgccttgggagagaagatgacagatgaaaagctggtgagaaagatcctcagatccttgcctaagagatttgacatgaaagtcactgcaatagaggaggcccaagacatttgcaacatgagagtagatgaactcattggttcccttc

SEQ ID NO: 24355 - DNA, 437 bp, Glycine max
tctaaactttgtacaagaatgaagctctgataccacttgatagacaagtggcctcagatatcttaagaaggggggggttgaattaagatattccaaacttttctcctaattaaaaatctatcttactttttacttaagttatgaattcccttaatgacaatcttcttaaatattaattcaaatgaagcaacttgaatatgaatataacgcaataataaataaaggagattaagggaagagaaaatgcaaactcagttttatactggttcggccacacccttgtgcctacgtccagtccccaagcaacccgcttgagagttccactaacttgtaaattccttttacaagttctaaacacacaaggacaacccttcctttgtgtttagagattctttacaacaagagactcacagtctcttaatcccttagagaatgag

SEQ ID NO: 24356 - DNA, 344 bp, Glycine max
  unsure (1)..(344): unsure at all n locations
gctttcttttccattgtttaatactaaacacttgccaccaaaaacatgaagatgcgagatgtttggtttcctaccattgaatagttcatatggagttttctttaaaattggtattattaaagccctattcatgatatagcatgcagtattagcggcttcagcccaaaaatattttggaagaggagtatcatttaataaggatctagcaatttcttctaaagacctatttttcctttcaacaactccattttgttgaggggttctaggtgcagaaaagttatgttcaatgtcatgcttatcacaaaataaatcaaattctttattttcaaactcacccncatgat

SEQ ID NO: 24357 - DNA, 163 bp, Glycine max
cattttggtttggtggttgtgtggttttttttttaattttagaaatggggttatgatcccaacatgggtggcttatggtacctaacacatgccactaagaatgcatcatgaattttcatgcctccctttttttttggttttggtttggagaggaaaataaaaa

SEQ ID NO: 24358 - DNA, 376 bp, Glycine max
  unsure (1)..(376): unsure at all n locations
gcttttttttgcgcaattagtgatttacatttggccttcacattcttgtttatgtgaaagctgcacaacaaatttgtgcattcaaggaatacatccttcactgcattcatcaatgtttggtctctatcagtgacaataacaccagggagggcatcacgctttaaaaaaaggcctcggaagcattgtaaatcccataccaaattattaacgcgttcaccctccacatatgcaaaaccggcagagaatgtcatcccagtcggtgtcaccccaacaaaatcgagcagtgggagtctgtaccgatttgttntgtaggtgttggttatcaaaaacaccaaattacatgcgttgactaacttaattgaatcagggtgacacc

SEQ ID NO: 24359 - DNA, 455 bp, Glycine max
  unsure (1)..(455): unsure at all n locations
ntccaagccatataaattatgtggaatttaaggaagattattagtagaaaagatgtaccatatggagctgatgcatcatacccaattagggtatattgactcattagtagtcccaggagaaatatgtagggtttgctcttgattccatcatcgtttttagtattgaaatgagtgaaatcaaacttgagaccagctctttccgttgcaacaattgaaatgagtatgataagaacaaaaacacctaaaagtttccccattcaaattagttgcataaacaattgctgatttcgatatttgtttgtaattgaaatttaccttttgtatgttcttttatgtcatgaatgtaattttctatataaacaattgttattcatgctgagtgaaccttagattcccgtttgagattgaatgcaatgattcttgcggatagtttgcattagtcattgtatttagtc

SEQ ID NO: 24360 - DNA, 364 bp, Glycine max
  unsure (1)..(364): unsure at all n locations
agctnttattaaccaaatcatcacacattatattttaacaacaattacgaaaagtctttccattctataaacacacacaaaaaaaaaaaaaaaatacaacatgaaattgaaacatcattttagcattaacaacaatgataatgattctctctcacaataccaagttgtctgaatcgattgttatggacccacatagacacttgagctttacagtgtcctaagccattgatctgtgtcttatctatctagttttgtgtacagggttgttttcttttgtgttgtctcaaactcaattattcaaagtcaatacaacggttcaggatcaagtaaacgtgcaccccaatttaagtctctgatttgtctc

SEQ ID NO: 24361 - DNA, 457 bp, Glycine max
ttgcatctttttcatggcaagatttgccaagttagcttcatctctttccttggctgcatcaactggtgccatggatgatatcagctcaataagtacaaccccaaagctatacacatcactcttgtccttgagcctgtacaattggaaatattgagggtcaagataccctagagacccttgtggagctgtggagacatggcttacatcattggggagcaatcttgaaaacccaaaacctggtaccttaatcgaaacactaatgtcaagtaaaatgttgttggttttgacatcacggtagatgatattagaagtatggagataaagaacaaaactaatgatttgtgctccaaaactaacaaatctccgccaattgtttctacactcctactatttatgcaaatattttatggaaaagcatagataataaatagtgacattaaccatacatgagaagcat

SEQ ID NO: 24362 - DNA, 345 bp, Glycine max
gagcttctaaactttatacaagaatgaagctctgataccacttgttagacaagtggcctcagatatcttaaaaaggggggggggtgaattaagatattccgaactatttcccctaattaaaaatctatttcactttttactcaaggtatgaattcccttaatgacaatcttcttaaatattaattcaaatgaaacaatttgaatatgaatataaagaaatcataaactaaggagattaagggaagagaaaatgcaaactcagttgtatactggttcggtcacacccttgtgcctacgtacagtccccaagcaacccgcttgagagttccactatcttggatattc

SEQ ID NO: 24363 - DNA, 426 bp, Glycine max
  unsure (1)..(426): unsure at all n locations
atatttcacttaaaattagtgaaaagaaggagaaagaagaggaaaatcaaggtcgaggcacttccgtaacgctttcgtgatcaattccgtgaacgttcatcgtcgttcttcgttcattcttcatcgtttgtcaatcttcaatcggctaagttttttattntgaagctttgaattcattctatgcacctttaggggtcccttcttgctttgtatgttttcctcttcattcttttgctttcggtattcttttctttcgttttaagcgagtttcgatcgaacttttaagccgtaatctcacgtaatcaatgtttaaatgaatntcaactgatcgtttgtattggaatctcatttaatcgcctttaaaataaaattgaaccgatcatttgtgttgaatctcgtttatcactattaaatgaaatcaccgat

SEQ ID NO: 24364 - DNA, 274 bp, Glycine max
tagctcgcgttcaactaattaatgtgtcctcaacctcattgtatatcttaaaggtatccctaacactgctatctattacaccttttcaaccttgacttccatctctttaatttttcttttagacacaaatccgccccatccaatttgctggcgtgactgccacacaattcttcactgatgacttataagatttatccgactaccaacaatcaacgattcgaaatggcttagggccccagtcagcgaacttatatcggagtgacacaggacagtg

SEQ ID NO: 24365 - DNA, 183 bp, Glycine max
gtttggcatgaatattatccaatattttccctccttaaaatgccaggattaccttaaatgggaccccttttaattgaattattcaaggtcaacaccaattaaaattaaattaatttcttaatccatattaataaattttatttattccaattggattacctattttttaccttatctccattt

SEQ ID NO: 24366 - DNA, 362 bp, Glycine max
agcttagattttccaccttattaaaccttaatttcttcaaattaaaacaagctcattggtggtgcaaatccaaagagaattgacaatcactttaacacaagttttgacctttatttcaactaacaaaattataaaatcactcaacaaaggtggcgccctctactcttcttggaacatgatgcaattgacaatctgaagtttcgccacttgtaacttaagcctaaattcaaatagcatggttaacacttgttgaagatcttcctttgccttctttgttctagctcttgccataggtcctccaagtctttctaaaggttccttacccttagtccttgtcatgccctcatcagaagtgatatagt

SEQ ID NO: 24367 - DNA, 457 bp, Glycine max
  unsure (1)..(457): unsure at all n locations
tcatggatttctcataagcttaatatcagaaagggacccaatattcatgagtcaattctagcacgagcttttcaagttgtatgggactaagctgcgtatgagcactgcttaccatcctcaaagtgatggacaaactaaagtgcttgattgagttttggaacaatatttgtgggtgttagtgcatcataagccatcctaatgggataagtttttgtatcttgctgaatggtgctacaaccccactactcatttagccactaatttaacctcgtatgaaattgtttatggtaagcctcctcctagtatttccaattatcaagctggaacctttgccgtggaagcaattgaattttttctgactttgcgccaagaaacctttcacctacttatgaagaagcttgaaaggcctangaacatatgaaaaagaatgttgatactcatcgtcgagatgtcaatt

SEQ ID NO: 24368 - DNA, 361 bp, Glycine max
agcttgtctcaataagtgtactcgatttgatcaattgacattattggtctttatcaataataaaattttcagtaataccatcaacagattgcttgagcatcaagtgttgtaagaataaaatggtataataaacatacttgctgagtctttgagctgcactctatataatatgtagctcctaccagtttacgcaattcctcaccctgattatggacaaaacccaaaagtttcaataaacactgcttattgaactctttaggtggctaataaagtaaggcatagtacttgctcagaagtcacaagcgccagaccaggattatcagtcaaataaaaataaagttatttttatgatatgaattta

SEQ ID NO: 24369 - DNA, 268 bp, Glycine max
acctaaataataaccttttccttagaacttaaacccttaatcatgatattttcaatggtccaatgcctattttactttaaacttttacgaattaaaaccttaccaaaatgggtggttaaacttcctattaaaaaaaccaatgcttttatttcagaaaaaaaactggggaatacatttgatactggtcttcagaccatggaaaaccaagaacctcccccttccgctgatgaatgggacctgccaagtgatgtaagacccccaatttttc

SEQ ID NO: 24370 - DNA, 379 bp, Glycine max
  unsure (1)..(379): unsure at all n locations
agcttgaataataagaggattgattttttcaaaacatggtccagtaaactagggggacacatatcagttatgagtggaaaggtacatacagaaagtgcagaagatgataacagcttatgcaacactaataagcctttacctgttgatttgttcttcaaaacattggagggtccacagttacaaactcctaaggtatgtgtttaccatctacaagtttaagtgtactcatgttcatcttgtgtaacaaataatccacttcctagataactttcaatgcagtttatgctaatccaactagttaagtttgagtcttatgttgaaataagttaatcattggttcctaatgatcctttatctntnttgacactcactatgacat

SEQ ID NO: 24371 - DNA, 291 bp, Glycine max
tgaggatgttattgaagggtttgcatctacctctggcagtaacagtggcaaagatgttcataagtacgtttacaactggacatcaaattttacttaagatttcatagtttctgatacttgattcacttggacataacagtggggagctattgatggaagatgaatctcttctggctccaaggagaaggaagaaacttgttcttgatggtgatttggaaagacgaatcattgatctctatgagaagtacgtttgaccagatcaaacatttgtctgctcattggagcatgatt

SEQ ID NO: 24372 - DNA, 342 bp, Glycine max
  unsure (1)..(342): unsure at all n locations
agcttnctcaacttcctcaactatctcttttggtccagatggtattcttacaagccatcccaatcccaaggcgatactaatgccaatgaaagcattaatctgtttggccacagctctaaaaactactctggagatgacaatattccgtagcaagttgttaatcatatatactctacattaattaattaattaattagtcttgtattaaaattaaagtataaagtacgttatataagacatctgcacttatctctttccgatcgggctagctatagattctgttaagttaatttgcaacacaccttactctgtatttatattattcttgaaactttaatgaac

SEQ ID NO: 24373 - DNA, 371 bp, Glycine max
ggaaccatgggaggagatgagcgaaaggttgtatgattaagtctttggggaagaagggatagggttagagagggggtgggctgctgcacaaaaaaaaaatggaagtttctggaaagggggagaaaggtcttgggattcttaaaactgcaggggagtggcttgtgttattataacttttgttatttaatattatattattatttaagtgaaacagtgcgtgtcaatcaatcgctcatgaagattaatcttcacttgggaactctatcgctatattctttttatcagttcaacttttcttttggctctttcaaataataccaccttccatgcctggaatcagatctaccaccctcattaattacttccatctc

SEQ ID NO: 24374 - DNA, 385 bp, Glycine max
agcttctccaaacctgtaaaccagattgtctgaaatgaatacccagttaatgtatactgacgataacagaacaacatagtacataaagcaaaccatgttatgaactcattccatatactaaaactctactttgatgatagtaagagaatgatattttcattcgagagtggacattgacaaatgacgactaagatatgctcatgagcacaaaatagtggcagcagcagctatagtcatcttaatacacttgtaagggatggtaaacattgtgaaaaaatacctctgaaataggtaatcccaatatcactaatactgctgttggaaatatgtaactccttcaaatttataagctctgatacattatatggcaacgatcagctaaaaa

SEQ ID NO: 24375 - DNA, 154 bp, Glycine max
aataaaaaaaactacctgtactggtgctcataaggctggaatacttcattatgctacagtagtagaactgactgtttattttaaggattttcttactctctccgaagctaatatcatactctagactttaaagtattcttgttatttctttctg

SEQ ID NO: 24376 - DNA, 337 bp, Glycine max
agcttggatagaaatagatctttcgggttgaaagggggcattgtaattttggctttattaacagagcaagaagttttcagatttttgcagctattcctcatagttgtgggggactgtggggaagtgggcatgggtacacacaaatatgcagccatcatggttccgcctatcatagttgtggtgtacaaactcttcaactaggttctcccttgaacgcaaatatgtttaaggttgtagtagatggcggagaggacgtggaggctcatggcgacattttgtaatgttgcaaaacacatactttattgtaatgcgtaaaagtgactaaaaatgttttctc

SEQ ID NO: 24377 - DNA, 354 bp, Glycine max
agcttctcaaggaagttacctagtctataaataaaagcatgtgtaacacttgttataactttgatgaatgagagtcttgtaagacacaactcaaagttcaacttctctccctttttcttcctgtaatttcgtgctccctcctctctttcttttagcagatgctcacccccccctctaaaatttaattggagtgggcttctcccaattcaattaaatttattttcaaccacacacatcaaatattcacttaatgcgtgccaaattagaaaactacccctaatacaaaaaactagtctaggtgccctaaaatacaagagatgaaaaatcttacatttctagggtaccttaactata

SEQ ID NO: 24378 - DNA, 446 bp, Glycine max
  unsure (1)..(446): unsure at all n locations
tgtagaatggctagacatgatacatgtcagggtttggtttggttcaaggataaaaagggatgccccacattatttccatgacacaaatgcaaaaatgacgatttggaaattttatgcaaaactggttatgcatgcacctatgcggacactcaagtgtcaaatttttatggtcatgtgatgctagggctcaggattcattttctctattttagtcaacccaacgtttccaaaatatgttcttttatcaatttgtgcattcatccgagtccattttgggcgtctgggaaaatcttcacagcattcacccttcaggtgtatacacattttttcaaaaactagttatgatcagtgaattnttccaaagaaaagttggaagtcatctcttttcaaaagcatgttggtttttcagcttgacaacatatttnttcttttttctccttcttttt

SEQ ID NO: 24379 - DNA, 342 bp, Glycine max
agcttataagtgatgaaggaagaatgcaagaataaggcagaagaaaaagattctcatttcgaatcccaaattgacatttttaataaaattaataaattaatatttattgataaaaaatatttttttagattaaaaataaattctaactaaaaatagaaattttaaaagtactaaaaaataataaacctatatatatatatataatgatgaaaggatgcatatatatctttggcattgattatattttatatattatatcaagataaatgcatatctgacttaaatgtttttatttttgataaatttacgcacacaaattatttagcatatttgcccaacttt

SEQ ID NO: 24380 - DNA, 258 bp, Glycine max
  unsure (1)..(258): unsure at all n locations
tggtatctctcagntcaacatcaacatgttctttctctctggataagaaaaataattcttaagaacgaaaaaagtaatgcttatctaaagggtaattttttttaaaaaaataatactcaatttattttgaagaaaaatattttaaattacctaataataatttccatttcttcctgtggctttaggttttatttggtttgacttaaaaaaataattctcctatatttaataaaaaaattacattagattttatttttg

SEQ ID NO: 24381 - DNA, 378 bp, Glycine max
  unsure (1)..(378): unsure at all n locations
agcttcaaaccaaggcaactcaaaatctaggtatctaaaacccctcaatttagtggattttcaaggtttgagaagtgaaaatgagaatggggtaaatttagagcaaactctcacctcacacaagcctataaccttaatctaaacttgctcaaactagttttacgcctaaaattccaccaaatcaaaatttgactcctcaacacccaattttaccctagaaatggctcttgccttcactttggtcttttgtttttctctcttccacagcccaagctttctcataagtcctaaatgacatttcaaactaggactaactcactntaacctccaatttctactgaatccagatttagcctttcaaaccctcagagcatcaca

SEQ ID NO: 24382 - DNA, 387 bp, Glycine max
ggctctctggacaatcaatgtatacctttcacggccaggctggggttcgactgcaccaataacatggctgaatacgaagcatgcgctctgagcgtccaggcagcaattgacttcaacgtcaagctactcaaggtgtgcagagactcgacgctggtgattcaccagctgagaggagaatgggagactatggatcacaaactgataccctaccaggcctatatcaaggaattggctaagttctttgatgagatctccttccatcacgttcccctccccgaggggaaaatcaaatggcggatgcgcttgccactttagcatccatgttccagttgacaccgcacggagacctagcgtacattgagttcaggtgtcgcgacagacccgcac

SEQ ID NO: 24383 - DNA, 280 bp, Glycine max
  unsure (1)..(280): unsure at all n locations
agctntntgtataagcagacaaacatttacactactgaaatttaaatgctgaaatttaaagaactgaaacataaaagctgaaatttaaatgacataaatcataaaataactgaaaataaactaaagtgttcagagtgcaaacatttaaacgtcctgctcctcctagggttggtcttcattgagatccagtgctggagctactaatgaatcctgtataggctgctctggctccgcaactggtgtagatggctgggtctcctcaagagtagtctcctcctct

SEQ ID NO: 24384 - DNA, 343 bp, Glycine max
agcttcaacattcaattttgagcgtctcgtatattacgggactcaatcagacatccgagtaaaaatttattgtcgtttggattggctcagagattcaacattcaatttcgagcgtctcaatatattacgggactcattcagacatccgagtaaaaagttattgtcgtttgaattagcttagagcttcaacaatcaatttcgagcgtctcgatatatcacgggactcaatcagacatccgagtaaaaagttattgtcgtttgaattggctcagagcttccacattcaatttcgagcgtctcgatatattacgggcctcaatcagacatccgagtaaaaaagtat

SEQ ID NO: 24385 - DNA, 514 bp, Glycine max
ttgtttggccttaatcccacctgagcattcaacacaatcctttattgattcttttgagcccccatatattgagacgctcgaaattgaatgttgaaactctgaggcaaatcacgcgaacatatctttttacctggatggttgaatggggtccttgatataatcacacgctcgaaattggatgttgaaactctgagccaatttaaacgacaataacttttttctcggatgtctgattgaattccggtatatatcgagacgctcgaaaattgatggtgaagctttgaaccatttaaacgacaataactttttactcgatgtctgaatgaggcgccgtatataatcagacctctgaattgatgttgaaactctgagcctattcaaccaccatactttcactcgatagctgatgaagccggcaattcgagacctctaaatgaatgtgagctctggccattcaaccacataaattttactcgatgctgatgaggccccattatcagacctcaaatttcct

SEQ ID NO: 24386 - DNA, 376 bp, Glycine max
agcttgttggagttcactgagagcttctttaggtttatgagctcaaaccctattgtgtctggcagcttgctcagcttgttgaagtttgcattcagctcttctaaagctctgctaggtcaaaattcatcacagcatgcaacatgcatgcatgttaagataatgaaccaagtaataatcaacatgaataaattctgatacacacaatcacaaacacaattaatcacccctatattaattacaatcaattaatcttatttgtttcttgcacgcttctgatcatgtcatgtcattttgatttgcaaggaataacaatgttgattttgtgatgtaagagctagaaatgctcaattaatgcatggcatgttgaaattagaat

SEQ ID NO: 24387 - DNA, 390 bp, Glycine max
  unsure (1)..(390): unsure at all n locations
gctgaactntaacatctaccttgttggtttcaccctacagaaaacattttttagtgtatcagttggatttcgatccacataggacaaatctattagtcattaatatgcataataccttatgatcagatgtctctacaaataacttacatattttcctaggaaatacattctgaacaggtggtctcatttgcttcctggtttttggtgcttctccaaaaatggttgatgatggtggttgaagcttgttggggattggtgttgatgaagatacaaatggtgatggtgctaagttagttgatggtattgagttagcctttctattggttggtgcaattgngtttctttggacaaaagtaaggttttttggatagtagatgtcatttgcttcct

SEQ ID NO: 24388 - DNA, 354 bp, Glycine max
agcttccacttattagtgcacagctcctgatgcaatcctccctaggaagggaccaatcactagaaccatgagcaagaggctccaagaagattgggctagagctgctgaagaaagccctatggttctcatgaaccttagggtagatttctgagcccatgggccaaggttgggtccaattatctttgtacatattagactaggatgtcattatatttggtccttgtatatagggctccatattgtaggtagggtaccctagaaatataggatttttcagcccttgtattttttgggcacctagactagtttttgtattaggggtagttttgtaatttcacatgcactaagtggata

SEQ ID NO: 24389 - DNA, 319 bp, Glycine max
  unsure (1)..(319): unsure at all n locations
ngccgcccagctcgcccaggcgagcaaggttgcttcctccagaagcaacatccttctggaggaatcttctggagggcccaagtgggcctggttgctatttgcacccccatttttactaaatacacccccttcaatttttttggtgattctttttccgtaatgttacgaatccttacggattatgtatttaatcttttttagctttcgaagaagttacagaaacttacggattgtgcaaaaacaccttttttcgacttccgccacattacggaatttcacggatcgcgcaagcctgcttcctttagaattctgagacgtc

SEQ ID NO: 24390 - DNA, 248 bp, Glycine max
agctaaacgctgtgaccgcaatttttactctaagcattttggtctcaggtgcaaataggaagcataccctgtctgatactagcaatcaggctacagtaaaccatactggggggaatcaatacaaccttcgatgatagtgatattgcacaaagggtacctaatacagttcgactttttcgatcagagatggcacgtcttcagctttcctcacttggcttaaaatacgactgcgagagttacacggatgg

SEQ ID NO: 24391 - DNA, 364 bp, Glycine max
tgtctctcaatactatgaatctgttcatcttcaagccttttgtgagaatatccgcaagttgcatttcaggactgcagtacttcaagtcaagttgttttttgctcaccttttcacgaagaaagtgaaatctcgtctctatgtgttttgatcttccgtgtactattggattcatggccaagctgatactggaattgctgtccacatacaattcgactggcctctaaatttctattttctattcttccagtaaagagtctagccatagtgcttggcatgcagcatagcatgctgcaatgtactcaacctcgcaagaagataatgctactacatgttggttctttgaacaccagcttattggtgcacc

SEQ ID NO: 24392 - DNA, 428 bp, Glycine max
tcatacactcgtactcaacacaatcatcaccatcgtaaattggttgatgataaaaaatatcacgtaaaattctgcaacctccgatggcgtcaataattgttttccttaatgcatcaagcgacatgtggtcacttattgtgacgacttgaagaacattaggacattcaaacaatatcccttcaggtgatggaatcatgtcaccatcgcaatacactaaagcatatacactctccatgttttaaacaatatggtgaatatcaaacaaaggtgttgagttgcatcaaatccctactgctatttatattagatgatctactgttctctcgtgactcataccatatcaccgattgaggtgataccaaaaacataaatggtttagaatgcatctatatttaatcggctggtatgggtattatgaaaaataattg

SEQ ID NO: 24393 - DNA, 430 bp, Glycine max
tggaaggtagtcatacctcacaaaatatatatatgtatgtttaggtaggaagataccatagatatgcatgtatgtaaacaaaaaaatacttcacaaaatatatatatatgtatgtttaggtagtgaaaataccttagatatgcatgtatgtaaacaaaaaaatacttcacaaaatatatatatgtatgtttaggtagtgaaaataccttagatatgcatgtatgtaaacaaaaaaatacttcacaaaatatatatatgtatgtttaggtagtgaaaataccttagatatgcatgtatgtaaacaaaaaatatacttcacaaaatatatatatatgtatctttaagtaggaagataccttatatatgcatgtatgtaaacacaaaaaatacttcacaaaatatatatatatatatatatatatatatatat

SEQ ID NO: 24394 - DNA, 446 bp, Glycine max
  unsure (1)..(446): unsure at all n locations
tgtaggattatggggtacccatcacatgtggtactaggtggcagtcgggcgatggtgcacaacaagttttccacatccacaaagcgcgcataaacccaccatcccctgttgcccacctccaactgagctcacgtactcccacgtagcccataacctcgtttctctcaacaccgggtccccatcaatcctcccaagcttccccaacatcaaagtaaatcaacattcaaacagcacaaattaccacagccaagaaaacagggcaaaggcagaaaactctgcccaaaacaccaaccaaaatcacagcttttctcacttaaagaccccagtaacaattccttcgatccaattcgttaaccgttggatcgactccaaaattttactggaagtctatagtacataagcctacattntgaccgttgggatctactagtaaacatccagaactc

SEQ ID NO: 24395 - DNA, 429 bp, Glycine max
  unsure (1)..(429): unsure at all n locations
tgttcttgattnttcctcagttctttaacaagctttgaacaatatacttgtccttcatttaactgtctttgggcttggcggccacgctcaacaaagtacttttgacacctactgtacgttgatttgaccaatgctgttatgggaatgttgtgacaatcctttaaaaccttattgatacattctgagaggttggttgtcatgtggccatatcgatgtccttctctatcataagccatcatccattttttctttgaaatgcgatcaatccatgttgctatggctggactcagttgacgaaatttttctaaattttgatcaaaaatgtgcttgcaaggagtgtaggctgcataaaattagttatgaataacacatttaagtatatatgaaagttaaataaacgtgaccatcacatacgaaatcttacccaat

SEQ ID NO: 24396 - DNA, 422 bp, Glycine max
tgcaagcaactccttagtcttatagcttaataatggactagaaagaaaggaagctggatacaaagtgatcaattttttttatatttgcaaaagagtcgcggcaagtctaagatgaaaataaggagttattatgttggtttaatggtaaaaggagaagggagacaaggagggaaaagtcttgattagattcccttctctaacaaacaactaataattaatcattaacatttgcccataaactaagatcaaaataagctacattattaaataggttaacagctatcagagctaaacttactgactaatgaatttaaacgctttaatcatatacagagcagatgtaacacggaagacttgtttgcttttataagcaaaaactcattgttgatggaagactaatattttaagagatctaatgtact

SEQ ID NO: 24397 - DNA, 390 bp, Glycine max
tatttgtaaagaaaccctgaaccctactttgtcaaatacccattaaaactcaatcaatcaagtaatcctaaaccattatctttgaaatacccctaaaccataactagcaaagtaaccctaaagtctaatttgtcaaataaccataaatacccctaaaccataactagcaaagtaaccctaaagtctaatttgtcaaataaccataaaccctaattagttaagtaacacaaaaccctaattagtcaagtacacataaatctgaaatagtcaaacacacataaaccccaatttctcaagtaaccctaaacatctaattgttcaaatacccctaaatcctacttagtcaagtaacctaattagtcaagtacccctaaaccctatagtcaaata

SEQ ID NO: 24398 - DNA, 416 bp, Glycine max
tgtggaaacaaaaaagtgcaacacatttgatatagtttataggcttctgaagttggctttagtcttgccggtagcagctgcaagcgtggaatatgtttttttagctatgaagtttgtgaagagtatctatgtaacaaaataaatgattaatggttaaatgattctcttgtaacttttatagaaagagatgttctttgaacaatcaacaatgatgtgattttagctcatttttaaaaaatgggtaataaacgatttttattgtaaatacatatcattaaacaacattatttcttatttttaatatattttagtctataatttcttttatattttattcacactgatatttatttattgttagattcgtccctgcttgcctgccatattcaaattaaagctgtttaaatgatagaatt

SEQ ID NO: 24399 - DNA, 411 bp, Glycine max
  unsure (1)..(411): unsure at all n locations
ctgatttttatctcaagagaagcagcgattnttatcacaacaagtgcgttttctttgtagttctttcaaagcttaatttttttggttaattgtttgggtgttcctgatccttctcctacattgtttcgcatagaagcccaaagaacactaaagctttgatttttatctcaagaaaagcagcgatttttatcacaacaggtgcgttttctttgtagttctttcaaagcttaatttttttggttaattgtttcggtgttcctgatccttctcctactttgttttgcatagaagcctgaagaacactaaagctttgattnttatctcaacaagaaaagcagagaattttatgacaacaggtgtgatnttttgggtgttcctgatccttcttctaccttgatggtgctttctttg

SEQ ID NO: 24400 - DNA, 404 bp, Glycine max
cttcaaggaggtgaacttagttattagaggggtgtgtgtagctaagctctagcttctcaaggaagcttctcaaggaagtttctcaaggaagctacctaggctataaatagaagtatgtgtaacacttgtggtaactttgatgaatgaaagtcttgtgagacacaactcaaagttcaacttctctccctcttttactccttcaatttcgtgctccccctatctctttctctctttcttttccttcattgaagcatcctctccaagcttcttatccaagacacattcttggtggtgaagctccttcttccaaggcttattccttagtggttggcgcctcctctcacctcttctcctttgtcttccgctgcacctccatggtggaaaatcaccattgcaggacctca

SEQ ID NO: 24401 - DNA, 391 bp, Glycine max
tgaaagagcccgggtagtcaaagagaagttcaagtccatagccatcaaagtctgaagagagtatgatgaactaagggacgtcaatatggccacagctgaagccttggaacgagaaaccaagaaggcccgaaaggaagaacacgaccaaagcaaagttttgaggggctttatagggcagcaatagtgagctcaagctctgaataggtgaaaggaatcatcacgggtcaaaggcatgatcttgaaggacgagctaaaggtttgccttatgtcgaaaagaaatttgtcccaacagttaagcgagactgaagggaatatgtgggccatcatcgataagtgcaaagagaagctaaatctagcggcgactcacgagcaaaggctagaggatgagtac

SEQ ID NO: 24402 - DNA, 438 bp, Glycine max
tattaacaacatacaaacaggaagataaggaggactcattaagacattatcaatcaatatcaagactacctgcatcacctaacggcttgccataatgtccaaccgcacttcacaaattatagagatggtcggtctcataactcgtgactcaacagtggatttatgatataataaacattaatgatgcaaggtatatcacaagcatcatttagtctcatttaatcatgcagaagaaaatacaaataaaaattcaagaatgctcaacaaaagtactcataattaatcacacagagcgcacaccagaatatgctaagcacataacacactggccgaaaagttcgacctgctctaataccactaaatgtgacgctctttacttcaacatacatattaataagttaaacatacaaaaatatggaatttaattaaatcaatttt

SEQ ID NO: 24403 - DNA, 435 bp, Glycine max
  unsure (1)..(435): unsure at all n locations
taaaattcattatggatgcatacactaagagcattctaatggcttctaatctagcaactagagcatatgtttcttcataatctataccttcttcttgattatatccttttgcaactaatctagccttatttctaatgattatgccatgttcatctaacttattcccaaatacccattttgttcctatgatgggatagtttttaggtttctcaacaagttcccacacattgtttctttcaaattgatttagttcttcttgcatagcaattatccaattatcatctattatggcttcttttatatttttaggttcaatcatagatacaaaagccatattattgcataattctttaagagaatgtctagttgttaccccttttgagatatcaccaataatgttgtcgacgggatgatctnttgaggctttccattctt

SEQ ID NO: 24404 - DNA, 401 bp, Glycine max
tataagaacaaaattgccttaatcatttccaaatatgcatgtgaattatgacgcatcaacaagaatcaagccaaggctattgtgcaagcaatcaatggggcaaaacacaccaaatgattataatgatggatggctcaaattctcacaaaggtaaaatcatcactttcaaattgagctttcaaaactatcatgacatgtagagaagaatcaaggatttcaagtcacaaaatgtcaagaacttttattttcaaaacaattacccatttcttgaacatatcctataattcaaagaaaaacatgcaaagtcgtacgtgcacacgaaattgacccaaaatattaaactgaaaatccgacgaaactaacaacattaacaaattaacacaactaacaaattaacaaaa

SEQ ID NO: 24405 - DNA, 348 bp, Glycine max
tatttaaaatgagaggaattcacagtacaatgtttactctaacatagctgaatgctaagaaaataaggataaaatgtgtgaattaacctcttttcttgtaatgaagcaataagtaaaactgatcttcatctgagggtgtgttgcaaatagtagctttcttcgttccataaattttcacatttccaagaactttctggaggatggtgtattcagtgatgagaattctatgcttgttgcattttctgttaacttggtatctgtcaatctctgcttgtgggttctgagtcccaggaacaaactatactacttgctatcatacaagagctcagagtttctgcatggaatgcc

SEQ ID NO: 24406 - DNA, 440 bp, Glycine max
  unsure (1)..(440): unsure at all n locations
nttcgattcattctatgcacccgtagtggtccacattgtgtttcgtgcattttgattctcatttagattactttttatacaccctgttgacgtgcttaagccattttacttaagtcgtttctcgcttaacttaaaaatataataaatttccaccgaacgtttgaattgtattatccattaacttcgggttaaataaattccgaccgttcgtgcatgccgtaaccacgttggaaatcaataagaggtaaaaaataatatattaatcttaaagacatcttttagtaaaataaagcggaaaatctatcggacgtcttctctttgggatttctcattcttaaccgaattgattaataactaacgtgaaactaaggctaaaatcaattctcctagtctagctcgttcacaaaaattagctttcgaaaagttcgtcatttcacttc

SEQ ID NO: 24407 - DNA, 395 bp, Glycine max
  unsure (1)..(395): unsure at all n locations
gcttttgttataataacacacatatgcaatacgaatatcctaattntgtatccaaggagcaaccttcaattctctttgatctataactaaccttatatttataaatcatgctgactgaaacatgcttgtgatatgcactcccatctgtaaagctataggcaattatatatagctaagactcactttgaacacgataaatgatgcttactgtcacactccaacaggttaaggaaaaatatgttaattcttgtgaagggagagatatgttcaaggggaagacatgtaactatcagtgcctctggttatgatcacaagtatttcctaatgtaaattaagatcaccctccactgatatactcatgtattaatgagatataatcatgtatttaagataaa

SEQ ID NO: 24408 - DNA, 428 bp, Glycine max
tgatggcgtgtccctctcaaagagtacattgcattaaatctccactacagtgacattagaatgaaaatgttataatacacaaattagtacaattagatgtcaatttgtaatggtagattgaaataaaacataatgtcaccttagatcttttatagtaatgacaattctgttaggatctcgatttaagtcatcaaaattgatagcatgcaaagcaccaatcacatctatggacagatccaaattttttgaaacatatgaaaattgaaaacaaactaataacacattaaaattcaagtatgaaatataaaacattaccaattaacatatccccttgataatttcactactagaaataggaatttaacatcggttattaattgatggtgaaagtaccaacgttgaaagtaatatcgttaacatcgattttt

SEQ ID NO: 24409 - DNA, 401 bp, Glycine max
  unsure (1)..(401): unsure at all n locations
tgtgttcctacaaatgctgaagaacaacccatttagtggtgctgctcatgaagatcctatacagcacctgagtgggactggttgtactcactacctgagaacaacattactacatggaaccagtgcataagtgccttcttaaggatatatttttctctcatgaagatggatcagtacatcaaggacattggaaacttcgtgcagaaggaacaagagactttacttgaagccttggaaaggctgcaagagataattagaagtttctcacatcatggcttttcacctcaaaggctagttcacattttctatggtggagtgtcctcacacaattggacaagtttggatgctacttgtgagggtaatctcattttanaaccccttactaatgacctcaagtgtag

SEQ ID NO: 24410 - DNA, 429 bp, Glycine max
tgtaggattatggggtacccatcacatgtggtactaggtggcggtcgggcaatggtgcacaacaagttttccacatccacaaatcgcgcataaacccaccatcccctgttgcccacctccaactgagctcacgtactcccacgtagcccatatcctcgtttctctcaacaccgggtccccatcaatcctcccaatctttccccaacatccaagtaactcaacattcaaacaacacaaaccatcacagccaagaaaacagggcaaaggcagaaaattctgcccaaaacaccaaccaaaatcacagcttttctcacttaaaggccccagtaacaattccttcgttccaattctttaaccgttggatcgactccaaacttttactggaagtctctagtacataagcctacatattgaccgatgggatctact

SEQ ID NO: 24411 - DNA, 410 bp, Glycine max
tatcgaatcattctatgcacccatggcggtccactttttgtttcgtgcctactattctctttctggtaactttctataccccctgttgacttgcttaaaccattcttcttaagtcatgtctaccttaactcaaaaacaaaatcatttttcaccgaacgtttgaattgtattatcctgtaactatcgtaaaaatgaattcccaccgttctgtcgggccgttaccacgttggaaattcaaaagaggtattaaataattttattatcaaaacaacatctttttgtacaataaagcggagaatcaatcggacgtctttttctctttgggaattctcattcttaatctgattgattaataactaaatggatactatagctaaaatcaacttgcttagtcaagctcgtccataaaa

SEQ ID NO: 24412 - DNA, 390 bp, Glycine max
  unsure (1)..(390): unsure at all n locations
ntgaatgagatnttgagagtttgtgagatttctagaggtggaggagacatccccactacttgtatagcttctatctttcatcttctcttttcattgttgtaaaggaagcttccctgctctggagagataaatcctcagttggttcttcctatggggtacttgatgtaaatactttcatatctatctaatgatgttttatgtgttcactgtgctatcagtacttaattctagtgtgcctttgccttgatcaggtaactgcatgcttagttagggtcactcaacattgggaaatggtttgatccttataacctgataagacagggctagcttatcgtattttcatgagacatcggcgtatggtaacctagcttttgtatgttatgtcttaat

SEQ ID NO: 24413 - DNA, 435 bp, Glycine max
  unsure (1)..(435): unsure at all n locations
tgtagaatggctagacatgatacatgtcagggtttggtttggttcaaggataaaagggataccccacattatttccatgacacaaatgcaaaaatgatgatttggaaattttatgcaaaactggtcatgcatgcacctacgtggtcgctcaagtgtcaaatttttatggtcatgtgatgctagggctcangattcatttcctctattttaaatcaacccaatgtttccaaaatatgttcttttatcaatttgtgcattcatcctagtccatttcgggcgtccggggaaatttcacagcattcacccttcaggtgtagacacacttttcaaaaattggttatgatcaatgaaattttttttttcaaagaatagttggaaatcatctcttttcaaaagcatgtcggtttttagctagacaacttattttctcttttt

SEQ ID NO: 24414 - DNA, 438 bp, Glycine max
tgtaaattgtaatctccatctaccttttcttaagttgtaggagagcatcacagttcaaggcaaatttgtccaaaatttgggggaaattattaggtgacaacaagtatggtaagacaaatagcaacacacacaataatatcaaaaaacaacaagtaaaagctactaaaaaaagagaaatttcaagaataaaagctgagtgtgtattgttattgaagctaagtgaaacaaagtgctgtaaatattgaaaggcaagtaatagaactggaataaaagagaaaagagttgatctaaggatgaatgctctcctagaatctaagttttgcatcctagaaaaaccatgatttgtttgcagcccagcctcattacaagccaagaaaagtcctttggatttaatttgtgtgtttgtgactgtatggcatgagatgaaatacaaaagtt

SEQ ID NO: 24415 - DNA, 421 bp, Glycine max
tgcatgatttacatctccctctttctaagcaaattcttcttgatatcatcaaaatcttcgtgatttacattctccccctttttgatgatgacaaccacctgtaggttaggagcaacaacaaagaaaatatctatttgcatatagtttactcccccttggttttacaatgattgcttatatgagacaattgaagatttcatatttttcatatataaaaagttgtctcataaaacaatagataatttttcttactattttatcttttatctttctctccccctttgtcaacatcaaaaacaaatcatgaatagaaaggagaaagatgttaccacttgttgcaatgtatgagaataagtgataccaaaaggcattaaaacaatcattcaatattaatcaagccaaaacagtacaataacacatc

SEQ ID NO: 24416 - DNA, 439 bp, Glycine max
tttctttcacaatcagtctgtctagtgactaaccattctattataagttcacactcttgttctttctttgttcaacatacacatttgctcaaattcatgaaaggaaacacacatctcatcttaagcatgcattcaatttaaaacaaggcatacaaccattttcacaaaataaataaactacttcactgccataccatcaaaagttaagttaaactgttcacgatgcttcaagatgagcaactatactactcatgcacaagactaacaaaaagtaactaatgtactaacatcaaagttatactaataattcaaaaagcacaaaaaataatcaataggaatttaaaagtcctgtgactggtcctgggtgtcctgtgtctgaacctcctcctcgtcaatcaaatgtagtacaggagtagatacaagagaggcgtttggagac

SEQ ID NO: 24417 - DNA, 426 bp, Glycine max
  unsure (1)..(426): unsure at all n locations
tggttcaaccncataacccagagaatggcaatnttgatcgccaatacttcaacaacatttcatagggatgaaagactcgagaatacgcatgctatgcatggaaaatgtaattatgagattgagatgcccgaagagacatcctttcttaattaaccacgcattaggtaccatgctcaatcattttgttttgttgtttgtgtgtttttttttttaattttagaaatgggtttatgatcccaacatggttggctcatggtacctaacacatgcaactaagaatgcatcatgaattttcatgcttccttttttttgtgtttttgttttgtagaggaaaataaaaacatgtagaacaaaaagtatgttgaacgcatatgcatgatgatgcaatgactcatgcaaaatgggaatgtgataacggacaaatgc

SEQ ID NO: 24418 - DNA, 432 bp, Glycine max
tatcaaactctacaatttatgcacactgataagaatgtcatatttttgcatttaattcgtagaggagttatttcgtataaaaataataacaaaatatttataaataatatatcatttaaataattcaataatataataaagtaaaatagtaaataataaatttcacaatagttaaataatcaattttaataatacatcacacttttagataataacttaccgatattatagtggtagtatgttattagagaataatggtttgatgttattagatgtgataattttttatttgggaacaacacattaaattgaagtatgttgaatattagatagacaaaaaacaatccaaaatgatttatcttttagtctaattatttctaacttgctgactagttgactcgatagtaaactcgagagtctacttaagttact

SEQ ID NO: 24419 - DNA, 431 bp, Glycine max
  unsure (1)..(431): unsure at all n locations
cttaaagtgagtcattaagtgtttttatgaattatgtgacataaatgaattacatattgtcctaaactagctaccccaaaagcttaagttttggatgttggtacatttatagttgtcaaaacggattgatccgatccattgggccaaacccaccctgtaagggtcaacccaatccaactcacttaaggttgagtcttggagaaatggcctggcctggcccaccaccaacccacctaaaataaaaaataaaaaaatcatttttattaaaaaataaattagaagagtattagttaaatcaaatcttctactacccacaccacacctacaacaagacattatcacaagctagaactataattataaaaatttagaaaatagtatggaataaagacactaaaaaacacaattgaagtctagaactcntaaacttg

SEQ ID NO: 24420 - DNA, 349 bp, Glycine max
tgtatagttccccaatctatggttatttcggagttaattttgtacataaatcttttttatggttaacgctgtctctagaacattttcattggatacaatgatgaattctgtgcatttttaggtgaaaaaaaggctaagttttgaattgtaaaaagcatcagttgggctaagtgcatattcactgctaagcgtatcttcagcgtgcttagcgcaaaagagaatctggcagagcatcagcatcaaagtcgttcgctaagcgcaacaagtgcctttagccatgctaagctcgagactagcgctaagcccaatatcatttacttgtgctaagcgcgagggtggcgctaagcgc

SEQ ID NO: 24421 - DNA, 411 bp, Glycine max
ttggctcttgaaattaggtgttatctcgtccttcatattttatttcttcttgtgtgtttcctttttttttgttctttcccttttgtttaactctatattattgtttcaccttcctttgttctatttctttgagtctatctttcttttcttaattctatctagtatcaatatctttttgtcttctcttttatatatgttataaaaaaaatcatgaaaaaagaaaaggaaagaaagaaggaagtgaaaaaaaacgtgagaaaaaagaagaagaaaaatctggatagtttttacatttgtttacaatttgaaaaaaaaaatccaacacaaaaacaaagtgtgaatattgatattatttctctcttgctctatccatcatctcttggttttattctctttagaaaaaaacacttt

SEQ ID NO: 24422 - DNA, 393 bp, Glycine max
cgagatgaggaagtgttgaagggtgaaacttcctgcttttattgttgaccacagagtggtacctggagatatgtcgcgggggtcatgagaccttggggacgtcaggtggggtgctattgcccaaaaccaagcttgaccaatcccgacccaacccgggcatagtcggtcagtgagaacctgtgatgtacctaagcaggcgagctcctggcagtcaacagataaaaggaaaacaagaccacaaagtaaggaggcttgtggtggctggccacctgtgaattttgtgtaatatgtggatggtggcctctggtaatcgattactaagggtgggtaatcgattacaaggcttaaaaatgaagacaggaggctaagatggtctctggtaatcgattacca

SEQ ID NO: 24423 - DNA, 361 bp, Glycine max
  unsure (1)..(361): unsure at all n locations
tcagaaagaaattntggcactacagactgagaaagagtttgtaaggagcttgtatgaaaattcctatgaaaagcactgggaaattgaagaccagattacacaaatgcagaaaagggtttgcagcttgcaagatgagtttggaattaatacattcatagaagataacgatgcacgagctctgatggctgcaacagctctgaagtcatgcaaagagaccctggctaagttgcaagaggcacaggcacaatcatctgaagaggctaaagaatcataccaaatggttaaggaagctcacagcaagtttgaaacccttagagacctattcatttctaaacataagagtccacaagaccaagtaaca

SEQ ID NO: 24424 - DNA, 270 bp, Glycine max
tctattactcgctcatccattggcggctcccctttaagatgctcttctgcgtgtcagattataatctgaccatactagagatgatcgaatcgacaaaacattatctttttcttttgcactaatcatatggtgtacattctattcgtatacacatattttcacttattctaatatcactatttgtctaacatatatggtatagaaaacccacgagagaggacgtgtcctattatacttgaggataaaatttaatgaaaaagtctaatcaat

SEQ ID NO: 24425 - DNA, 430 bp, Glycine max
cttatgtgaaaggatgtgactcttcacatttgaattttaatttcaatgttcaaaggaactggtaatcgattaccaaataagtgtaatcgattacacaaagcttttatgtgaaaggatgtgactcttcacatttgaatttgaatttcaatgttcaaaggaactagtaatcgattaccaaaacattgtaatcgattacaacattttgaaattaattggaacgttgtaaattcaatttgaaaactttttttaaaacaattttgccactggtaatcgattacaacaatctggtaatcgattaccacagagtaaaaactctttggtaaacatgttttgagagaaatcatgtgctactcaatctttgagacaaacctttcatacttatcttgattaagccttctcttgattcttgaatcttgatcttgattcttga

SEQ ID NO: 24426 - DNA, 362 bp, Glycine max
taaccatcagtttggacttgagctcaaactaatgcacctgatagatcccagattcagtgtctgctttgacacagttactatcactcgatctttctcataatatgctttatggcagaatcgaagggttggggtctctgaatcgactcgctcctctcaaaaactactactataccgattcacgtgctgtgatagggactccattgttgacaactctgtcttgtatctcatatcttcacaacccccaactttgtccttcaatggatgggacatcatgttcttcaaacctgagtcaaaacaatggtttgaaatccgcaaaaacgatatcttgggtcacagttattctagcctcagctactataatt

SEQ ID NO: 24427 - DNA, 429 bp, Glycine max
  unsure (1)..(429): unsure at all n locations
tgaggatgtttgtcacaaagttgtcaaatcactagagaatcattagactcacaacgaataaagtgctatagcgctgtcagtttatatttgacgaaagaaacttgagcgaattgagtaaaccttagctctgccaagttagcaagtttcattgtattcaagcttattgtgtacacattctttgagttattagaatacattttttgtcaaacatctatggtttgtgaaagccaggagtgggttcgtgacaaaagatacttgggtcttaatctcagggagagattaagagcagtgccaagagtggcctagagagtactcattgtagccaaaagtggcataaagaatacttggtcataatcaaagacttgattaatggaacccttcaagtnttgaaggagaactggacgtagcccaagagtatgggtgaacaag

SEQ ID NO: 24428 - DNA, 435 bp, Glycine max
  unsure (1)..(435): unsure at all n locations
ttcatcgagtagttaatttcggggacgaaattcctaaaagggtgggagtattgtaacatcctagaaatttctacccggagttttcggaaacgatgtattttgaatgattatatatatatatatatatatatatatatatatatatatatatatataagttttattcagtgtatatgcatatgtgttcttggtagaagtaggagtagtgggggcaagatacgcgggttaggctaattaaggaagagaaatccataactgggaggttatgggttaattcttaattaattagtttaaaaatcatcgctttgcgtgcgacttaaaatttaacgaaaccaacccctgaaccacgctcggggtttattatgagcgtttngatatatatatattgcttactctcgaaaactggcctcgactgacgcagagaaacgtgagaag

SEQ ID NO: 24429 - DNA, 422 bp, Glycine max
tgtactatacacatatatgattcttcactcattctctttaagtgatgcttatagtgctttttaattgtatctgtagaccattttcttcttcgtattagcattattatcattaattctcaaaaaggttttttatgtggcaactttagtgatgcgtttcccattgaacgaagcaattttgtgtgtcatatgccaagaatataattgtttggcttagctctgagactccaccacaaaaggaaagaccttttccacatagttcaacacttaccacgttttggtaggccacaaaatgtaaacatgtatggaactttagatccatcccttgaagttcaaaactgcacactacaccggaggtaacaacataattggatgtaggtgattttttaacaaggttttcatatttactttttacttttactcat

SEQ ID NO: 24430 - DNA, 292 bp, Glycine max
  unsure (1)..(292): unsure at all n locations
ntaccactctgacaaaattaaaaaactaaattatgtatacaaatttagaaagaaaaagagaaatttacggtatgttaccggattgggggattccaaagtagaagcgtcaaccacgacgtcgtttccgggcaaggaaagaggcatgttgagaagaccagagtctctgaggagttggtgttggagcatgagagccgccgccgcggcgtttttgggcgccgtgttattggagctgatctggtgggtgcggaacttggaggctaaggtggagtgctcatccaacgaggaaaaagat

SEQ ID NO: 24431 - DNA, 399 bp, Glycine max
  unsure (1)..(399): unsure at all n locations
tgcctcanagaggtccaggaaggataaggcggccgaatggactagttccgctcctgagtatgacagtcaccgctttatgagcgttgtacatcagcagcgcttcgaggccatcaagggatggtcgtttctccgggaacgacgtgtccagctcagagacgacgagtatacggatttccaggaggagatagggcatcggcggtggacatcactggttactcccatggccaagttcgatccaaaaatagtccttgagttttatgccaatgcttggccaacagaggagggcgtgcgcgacatgaggtcctgngtaaggggtcagtggatcccgtttgatgccgacgctatcggccagctcctgggatatccgttggtgttggaagagggccaggaatgcgagta

SEQ ID NO: 24432 - DNA, 425 bp, Glycine max
acactataaaactcagcgtccagatttggtcttcaccggcgaaaggatcatagtgggtctgaagagaggcaaatatgatcatcctgctctgacgaatgataaaactggggcaaatgaagagggtgagaatgagagagaaacccatgctctgactgccattcctatatggccaagtttcccaccgacccaacactgtgattactcaaccaataacaacccttctccttaaccaccacccaagtatctacataggccatccctaaatcaaccacatagcccacctacctgacaaccaatgttaaacaccacctttagcacagaccagaacaccaaccaatatgtaaattttgcagcacaaaagcctgtacgatacaccccaaatatcggcgtcatatgctaacttgctccatatctacttgataatg

SEQ ID NO: 24433 - DNA, 67 bp, Glycine max
tcattagtgaatcatctcgggtggtgagatcctacgatcgagagatccacggtacacaagttccatg

SEQ ID NO: 24434 - DNA, 432 bp, Glycine max
tcctcggggccattcctgcgaaggcaaacatttggaaagttagtttttaccaagaaatgctacccttaaaacaaaaatggcatacaaccccctccaataaatacaaacatcaatgtaaatttagagcaagcttatgcgcatacttcttcacgaacgttcacttgcacaagacattcttattactaagaaaaatgcacccatatacaatcaaggcaccttcgttacctagattatttacatgtacttccaaggtgtatttgttacctacatcacacacattttctttgctaaattcacatacatgcatactctaagcactttggctatcaaaaattgcatacgtgcacatcttggtatttctaatacctatacatacacaaacttcatgatgaatgttgactatctacacaataaggtgctacatttcatgct

SEQ ID NO: 24435 - DNA, 403 bp, Glycine max
tgagttgtagagttagaagaggtcatgacaaaatacttgtaactttgagaagttattggaaattggtggttttccaagaactggacatagtctcgttggttaagatgaaccaatataactctctatgtcttgtatatgtttgatttctcttctgtgctttaaaataactcaagattcgaattcattttgtgaaaatcttatatatgcttttacgtttttatcattagacgttaacattttctttcaagaaaaaggttttaaaatttctaaaatcacaattcaaccctgcttcttgtgatatttgcctctaaattttggtatcagagctcacctctaatagttaagcacctaatagtgtctagaggaaaagatcctaatgatagataacaacaacaaccacgac

SEQ ID NO: 24436 - DNA, 312 bp, Glycine max
tttgagggagtttgctatttttcttgagaagcctcttcatgcatgatagtctggccttggcttgaagcttttgcatgtgttggaagttctagaaaaagaaaggtccaaattccatagagttctaagagaatttgctatgtgaagatctacagagaccagagctcgaagcggatgccattctgagagcttgagatgagtttgtgagtgattgtgagatcctagaggtgaaagagacatcctcaccacttgtatttttgcaatctttcatcttgatcttctctgtgttgtaaatgagggtttcggactatggaa

SEQ ID NO: 24437 - DNA, 428 bp, Glycine max
  unsure (1)..(428): unsure at all n locations
tgtataatttgggtctctctatttcctcttgaatctctctatttccccttgattcctactctttagttttcattttaacacctcaattgactatttattctatgttctaaacttccatatttccattctctcatggttagttgaggttaagggaaggagaagccaaaaggaggtcatttccaccatttgcttgttgctagtttgagttggctaaggagaaacccgtaaggaaagttactttgtgtgtgttatgcatgctttgtggtgtgtttttatgcatatggcgtttatttcgcgagataaggtttgattgaagatgaagcatgtgaaatagcatgatgtgcttgaagataacatgaacctgtcggagtttntgtctatacatcgtaactatcttttatatattgagttttggctatatttttatc

SEQ ID NO: 24438 - DNA, 432 bp, Glycine max
ccagttacggtggctctacgtccattttcggagtcccatatctcaggtatcacttgtttctcacttgaattatgggtgttctcagcatcatcagaattatgatactcatgcaattcctttagagctgtcaccacagcaacgtatgcctcctctcccaaatcattttttaaagataataatttaggatcattttcatcaatttcttcctgaaaaaataaaatgagagagacatcaaattttgctcatttaattgtccatgctagtgtacatttgtgacacataattgaatcccctaccctgctgataacatgccatgttttacagattatgccagtttggttgtaacaaactctaaattggagatatacataaaattttcttacatgatcatgtgtttatgggatctataataaagtaacattattacatttg

SEQ ID NO: 24439 - DNA, 415 bp, Glycine max
tgtaggattatggggtacccatcacatgtggtactatgtggcggtcgggcgatggtgcacaacaagttttccacatccacaatgcgcgcataaacccaccatcccctgttgcccacctccaactgagctcacgtactcccacgtagtccatatcctcgtttctctcaacaccgggttcccatcaatcctctcaagcttccacaacatccaagcaaaacaacattcaaacagcacaagctatcacagccaagcaaaaacagagcaaaggcagaaaactctgctcaaacaccaaccaaaatcacagcttttctcacttaaagaccacagtaacaattccttcgatccaattcgttaaccgttggatcgactccaaaattttactggaaggctatagtgcataagcctaaattgtgac

SEQ ID NO: 24440 - DNA, 184 bp, Glycine max
tttgaagagagatcttaaaccaagtgatcgaggtcgtactcgaatcaaataaacattaaaatgcagtaactatgaattgaccataggtcgtttcccaacgagcaataataaaccaaatgttcataatatacttgcagtaacagtaacaattgagggggggggggttgtttttatctctaatata

SEQ ID NO: 24441 - DNA, 413 bp, Glycine max
atgcgcctcgagcattcaccatactaaaagtcatgccttacttcacaaatacacttgaaacaagcttgtcttgttacacccattttgctaagacatttgaaaatctacagtattatgcttacagaacaaaccacaagcatagatatctattgtataaacttacgtaccaatataccatgggaagttcagcataattatacataataattaacattaattaaacataccatggataacgttataccctccaatgcctgactttgaagaaaaacatcacggaaatttaatgggtctcccccaacatcagaatcgtattaaagaacctgaaaagaaacagtagaataacaaacacaaatatcaaaggtaaaaaggatgcgattatgattactaactcaatgactacaatagcaact

SEQ ID NO: 24442 - DNA, 416 bp, Glycine max
tggaatcaaataaaaaaccacaattagtctcatattgtaaaaattgttcaaatcgtgtctcaatagaattaattgattgatctaatatgtataaaaaatactcattatgaaaagattcttcaggtgaatgtgtgatctcattactaatattttttttatcaaaatgaggctgtttatgaattttacgtttttcatgaaattttggctctatatccatttcgatagtcattttttctgtggattctaaagccaatgcaaacccgttttccctataatgttttaaataagtgataacaccttttaaatgatctatagcaacatctatatgcatatcttttgattgtagaatcttgctaacagaattgacagcaaacacaatatcataccaaatattattcctaataaatatcaaaatc

SEQ ID NO: 24443 - DNA, 353 bp, Glycine max
gatcgaacatgttgaagttacggtcgttattgttaaagatgatcattaattgatatggaccttatgtaatcttgctgacactgtgagctaaattatgatatgttgctgattacttgttctctatacatgcatgcatgtgtgtgctagagtaatgtttgcaggttttgccttgaacgaagacattatgtatgacgagttatgttatgctaacatacgtgctgtatatggagaacactaatttgtcgaacatggaaaggactatgtggattacattatgtacaaccgccgtgactatgataggctcgtattattaatcatgaaggtatgatgtacccaatgtatggaatatgtta

SEQ ID NO: 24444 - DNA, 367 bp, Glycine max
  unsure (1)..(367): unsure at all n locations
ttctagctnttcattggtgtattttgatctccttttggtgctctaaattgtgggagtatgctcaaatatatagggcaattttggcttgttttcttgcttgattaggttgaattaggggtgtgtatgggatggccctaagcctataatgcatttttgaacaatgggacatgccacattgtccccgttcttttgctattgacgcctaaacgcgcgcccaccaagtgttcggcgaaatgccttaatggcattagcgcgtgacttttgtaaggaaacaacacatggggcattttggtctgtacacattttcttttttggaatatgtattcattcctgaaaaaggctagagtaattgtcccgcatatatcct

SEQ ID NO: 24445 - DNA, 422 bp, Glycine max
  unsure (1)..(422): unsure at all n locations
tgtaatcgattacacatatactgtaatcgagtaccagatcatattttcagaaaatattctcaacagtcacatctttctatgtggctcttgaatggctatcaaaggcctatatatatgtgacttgagacacgaatttgctaagagatctttggatcaaaaaggtcttatcctcttaaaaagcaaaatcgttttatcctcttacaaattccttggccaaattacttgtgattcaataaggaattatttgagtgctcaaattgttcaatctatctctttcaagagagatttcttcttttcttcttcttcattctgaanagggattaatagaccgacggtctcttgttgtgaaagaattctaaacacaaaggaagggttgtccttgtgtgttagaacctgaaaaagaattacacgatagtggaact

SEQ ID NO: 24446 - DNA, 414 bp, Glycine max
tgatatccttagcccctttcgatataccattgcagttagagccgacctaacatgcatacccaagatgtccaccccaagataccactgcctagtagtaaaggtctccacaagctttgccacaaagaatacccctgcaaggacatacccctcatgtgggaaaatctctttgccaaccaagtaatcaacaaagtaacttatcatgtacggaccgacatactagacaagagtagtgacaccagcaaatacggcattacaagctgcctccttccagaacgacttgagaagtgcccaagccaatgaaggctgctcggattggttttcagccttcaacctctcccaattagaattcaaaaccttataatttgtcttggatcggtctttcgccgcaacaaggggaatgttcttaagctcaag

SEQ ID NO: 24447 - DNA, 422 bp, Glycine max
  unsure (1)..(422): unsure at all n locations
nttaataatggtgatgtcttatttatttgtctttatgtggatgaccttatctttaccggcaataacccaaatttgtttgaagacttcaaggattccatgtctcatgaatttgagatgacagatatgggactcatgtcatattacttgggaatggaaatgaagcacatggagaatggtatctttgtctcacaagaaagctacacaaaagaagtgttgaagaaatttaatatgcttgattgcaatcccgtgaacacacctatggaaggtggcttgaagttatcaaagtttgatgaaggagagaaggtagaccccacggtcttcaagagtcatgtggggagtttgatgtatctaaccaatacaaggcccgatattctatatgcggtgggagttgtgtgttgctntatggaggctcctacctctac

SEQ ID NO: 24448 - DNA, 386 bp, Glycine max
tgtgcctcttcatgtctggaatatgaatgtagcatatatatccaaagacccttaagtgctttgctgatggcttcttcccgttccaagcttcaattggagtcttgtcttttacagacttagttggacatctgttgagtatgtaaacaacagtgtagactgcttcagcccagaatatgttaggtagtcccttttccttgagcatcgatctagccatctccataactgtgcgattctttctctcggacactccattttgttgaggagaatatgcgactgtaaggtgtctctcaatgccttcatcctcacaaaatctttcaaactcgcgagaggtgtactccttgctgcgatcacttcttagtacttttatcccgttttcactttgattt

SEQ ID NO: 24449 - DNA, 407 bp, Glycine max
taccatgcaattctttcatgatgacaggttagtggagcttataggtgaccccgacgctcacagagaactcttatcttatccacaattccggcgtgtctgccgccatcaaccacagagcctctactttcacatcacagtgcttcctgaggatttcgaacatccgttgaccaagcctgttgaccctcaggttcaacatcttctccatcaattcgccattctcttccaagaccccaccactcttccgccggcaagagacacggaccatcaaattcaccttcttccacatgcgacacccgtgaatgtcaggccatactagtatccatattaccagaaacgcgaaatcgaagctcaggtggagaccatgcttcaacggggcattattcaacccaacaagagtcccttctcgt

SEQ ID NO: 24450 - DNA, 356 bp, Glycine max
tccgttgttcaatttcgtgcgtctcaatatgtgatgtgcctgtgtctgacctccgtgtgaaaagctatgaccatttgaatttctcgagatcttccgtggttaaatttcgggcgtctccatatgtgatatgcttgaatcggacctccgtgtgaaaagctatgaccatttgaatttctcgagagattgcgttgtttaattttgagcgtctcgatatctgatatgcctgaatcggacattccatttaaaagttatgactattttaatttctcgagaactttctttgttcaatttcgagcgtctctatatatgatgctcctgaatcggacttccgagtgaaaatttattatcatttaaat

SEQ ID NO: 24451 - DNA, 390 bp, Glycine max
atgaagaagcgttaaagcaggaagtatgggtcaaggctatggtataagagatacagatgatcgagaaaaacaacacatgggagttagtaaatcgtccccatcaaaaagatatcattggggctaagtgggtctataagacaaagctcaaccctgatggcaccatacagaaacacaaggcgaggctagtagctaagggttactcacagcaatccagaattgactacaatgagacatttgcaccagtagctcgtcttgataccatatgagctctaataactcttgcatcacaaaaaggatggagtatccatcaactagatgtcaaatccgcctttcttaacgccgtacttgaagaagagatctatgtggagcagccacaaggattcgtgtctg

SEQ ID NO: 24452 - DNA, 206 bp, Glycine max
tgtcatcagaatcaccatgatttacgttgtcccactgtttgacgatgagaaccgcctgtgcgatatgagcctcatcggataacatctctatgtgcctatgatacactcccgcttgggtgaacgttgattgctcatatgaggcactaggagatttcatattcttcatttatataaagatgtctcagtactgcaataccaagttgatg

SEQ ID NO: 24453 - DNA, 441 bp, Glycine max
tcccgtggcaatgatggagcataacggatgaagtagttaaccgttgtttagtccaaagtattagaagtatcagatttggtatcaagttggtagatccgctttgatttcttattgtagttttagttcaaggttttagagggtaactagttcagtatccatgcagctgtaaaattaaatgtgtatacatttagttgtaattatgtagaacttaataaatgagaatcaaaattaatataaaattatcaaggaatgttaaaactaaaacatgtaattatacatgacacagctcagcatcagttgtaaaaaaccccaacaaataaaacataagcatttctcactaccctctcaggtttcatcacacacccaacttatgatttttttttttttataaataaataacaagcataaaatttttccaatcgactttcacattcaaccaaa

SEQ ID NO: 24454 - DNA, 192 bp, Glycine max
tcgtgttttcgacaaggttgttattatcttcacaaggccagtatgtttgacaccagcttgatgacatcttctgaacttacccttaactgggttagctgagatatataattcggtgtactaagcctatcgaatggactgttctgactgatgctgatctattacccgctctgtagtatgaagcttgtcactcac

SEQ ID NO: 24455 - DNA, 403 bp, Glycine max
tgttggatgcaacccagagagttgctgctttcaaacatactagccatgatatgattgcacatgtaggtaaagctcgagcggaagtggaagagctgaaaaggtttcttgtggctgattcgttggaggaagtaaataggaagctgaacaagttttacatggttcttattttgagaagtttacactcagattttgatcatgtgcgtgatcatgttcttgctggtgaccaagttccgtcaatggactctctcattactagactccttcgtgtgccccatgtgttgaaagatgaaaacttagctgaagtcgtggaaatatcagccatggctccatctcgtggaagaggaggaggtcgcaacaatatatgacgccgtggtggaaggagtgaatgttctcaatgcaccta

SEQ ID NO: 24456 - DNA, 428 bp, Glycine max
  unsure (1)..(428): unsure at all n locations
tgaaatcaaattttggccattttctcgaagagcttctgcatgtgagagattcaagagagagaagggtctgagtccagagagttttgagagatttagttgtgcgaagacctgcagagaatggagttagaagaggaagtcgtcctgagagcttgagatgagtttgtgggtgattgtgaggttctagaggtggagaagacatcctcaccgcttgtatttctccaatccttcatttttctcttctctttgttgtaaaagaagcttcccaattatggagagctaaatcctctgttggttctttcttgtaggtacttgatttaaatacctgtatatctatttaatgatgctntatgtgttctctgtgctatcagtacgtcatttcagtgtggttttgccttgatcacgtagatgcatgctttgttatgatcatt

SEQ ID NO: 24457 - DNA, 436 bp, Glycine max
  unsure (1)..(436): unsure at all n locations
taaatgtctttntagtccttgtaatttaacattttttttattttatccttgatttttttcgctttagtccttgcaaaatgcacttgttttctttttcgtctttatatcattttagataacgttttttcactattcaaaatacttttctttactattcaaaatactattaaaaagcactttaaggacaaaaacaaaacaaacacattttgtaaagactaaacaaaaaaaataattgtagggatgaaaatgagaaaaatgttaaattgcaggaataaaaaatatatttaaatctttatttaatgttatgtatcaagttccaatagtttgatgtgggggtttactctaatagntgtctattntgttgatagttaattgtgagtgtacaaatatatatatatatatatatatatatatatatatatatatatatatatcg

SEQ ID NO: 24458 - DNA, 438 bp, Glycine max
  unsure (1)..(438): unsure at all n locations
tcagtgagttatcaacctgtaaataccagcccctgtctgaaggtcacgttagcaccaaatgattgataatcttcattaaaatatttagtctagttctgtatcaattatcaaacagtcaaaccttataggcacacaaagtcagaggacaagtttaattgctaatttgctatgtactatcatttaagaattttctatgtacataaaaattaacaaacttatcatatatgacaatctctggatggtagttgtttaaaccatgtgcaaattgagaaactatcaactatcagcaaaatccatttagggtcatgtaagtaactgatgattcaaagcanaggagtgcaagataaagcacatccaaacttgttgctattcactatcaaaacattattattccacccagatgttgtaaatcattccctcttcttagttatgttaaca

SEQ ID NO: 24459 - DNA, 333 bp, Glycine max
ctgcatccggatacacctatagacaaattcatagtctcctttattgaagaatagtactttagaacctattaaatagtcatatatggtgttatcctctctaaatcatcctcaacatagtttgcatgatatcgacaagaccacctagtgcgtatgcgacctcaggatgaggacaaatcatggtgaacatgatagcttctactcctctaacatatggtactctactaatgcgatctctttcttcatgagtaattgaacaagtttacctactaacagtatatgctacacatgtaatgccatctcactcgatgtggaattattcgatgttatattctc

SEQ ID NO: 24460 - DNA, 429 bp, Glycine max
  unsure (1)..(429): unsure at all n locations
ttagttaatttaattctactttntccaaaaataatataaatttttttatgttaaatgatataagtaaaatatctaaatctttacatttttcttataatacaaaattctaaaatattatcatatgatgtctttagatgataaattattagaaataaattcaaatgataaaaatattaaatgtgttatttcatgtaattntacatttatcaactagttttttggttaatcttaccaaactctttcaactagctttcgagtttttttaactcctaacttgtagcttataatctcccctttagtttgttagctttcatctatcttataagctaggtttatcaaacatagtctcaattattatactgtctacacatttatggattaaattcaaagttatgttttcagagattaaactgtcacccatatacacat

SEQ ID NO: 24461 - DNA, 391 bp, Glycine max
tctttaatactccctccggattcatatataaacaaaataatagtctcatatattaaatttaaatataagtaaatctaattaattgtcatatttaatgttatcattccgaaaacatcctttatatactttttattctattttcaatgacttttttttttgtatgatatcaagttttaatgaagaataattttaaaataattttattttttacttaaaattaataaaattaaatgatgtcaattatttttttaatcaatataaaattagttaattttacttacatataagtttaagagggaataacatgtcacaaaagtaaaattaaggattaagtatcaagttaattttaagagaacaaaaactcattaaccattacaccacccgactacac

SEQ ID NO: 24462 - DNA, 387 bp, Glycine max
tgtcactctctggtaatcgatgaccagaacgctgtaatcgattgccagaagcccaacatttttgaaaagggatcttcagatgtgtaatagattaccatgactttgtgatcaattacgaaagcttatcaagttcaaaaatagatcgaaaaaccttgtaatggattacacaagacatgttatcgagcactactggctctgaatgtaggaaattcatattctaaatgaagagtcacaacttttcaagaaagataactgtgttatcgagtacaccaagattgtcatcgattgctagtgtcaagttatgagaaaatctggcaacagtcacatattttcattcgattgttaaatggtcatcacaggcctataaataaatgacttgatcacgaa

SEQ ID NO: 24463 - DNA, 409 bp, Glycine max
  unsure (1)..(409): unsure at all n locations
tgtgcattcaatatcctgatgaggatgttccatatgttctcaagactggactaatacatttgctgcccaagtttcatggtcttgtaggtgaagatcctcataagcatcttaaggagtttcatattgtttgttccaccatgaagcccccggatgtccaagaagatcatatatttctaaaggcttttcctcattctctggagggagtggcaaaagattggctatactatcttactcccaggtccattttcagctgggatgaccttaagagggtgttcttggagaaattcttccctgcatctaggaccactgccatcagaaaagacatttcaggcatcatgcaacttantggagaaaacttgtatgagtactgggaaagattcaagaaattgtgtgcaagtttccctcacca

SEQ ID NO: 24464 - DNA, 441 bp, Glycine max
tgtcagcaaaactatacaagtatccatccactttatatctaccaatggaatggaatgcaacttcctacacaaataaggtcccaactaatcctcaacaatgccaaacctaagctatggaacaaagtaaagaaaaagagaacatcaccaatacagttaaaggatcataaaaaagttaatgagttcactacatagcatgacataagagattttaaaaatttaaattcattttcatttaatcttttgtttcatgatattgtttgttcaagattaataatagagattctttatatgtcaaaaaataggaagcttagcaagacgacaacattcatccaacacacaatcaagagattccaccgaggccaaatgccaaaatctgaaccaaggggagaattgctattgatgttacatgtacttgtgtgttatcaaatgagtcattctaag

SEQ ID NO: 24465 - DNA, 444 bp, Glycine max
tcttattccatacccaatgatgctctttgactgagagttagaatgacatcttttgactggacagatcaccaattcaagtcttatagagatttccttgtatcttagcaaagaagagtgaagagttgtccttattctagatgatacacatatccttattaaaggtgacattgtatccactgtcacataatttatttatactcaatatgcttcaatcctttaaccagtaaaacattatctatagtacgatagggagaaatgcatactttacctacaccagttatcaaacctttcttattccctcaaaaagtgaccaccccactagacatagggcttagggattggaacgcagacttttcacctgtcatgtgtcatgaacaaccactaatcaagtaccatgattggtgttctttcttgctataaaaaagatgtacaataggaattatt

SEQ ID NO: 24466 - DNA, 415 bp, Glycine max
aagctgaaccattttatcaataaacacaagttgagttctattcagaaaattagagatcatctcttttatcttagtgagagtgattctcctaaattcttgagtgattcacgaacaccttggctgtatcaaaggactttcacaacctttgtgtgttgccctcgctggaaaaagtgattctttccttcctttcatcatcacccttgttctttcaaaccacaattccagaaaatccacctctgcccagaattatctcgtggccataactcccattttacgcactcaaattaagtgactcttgagcctaaattgaatatcataacgagacctttcacctcgttttggaatcacctcatttggagccctgtagcttcagctattgccatttctatatttctgtccagccaccacttaacct

SEQ ID NO: 24467 - DNA, 374 bp, Glycine max
tctatacaagctagagtaagaggacatctgattattatcgatgcagacagactgaatgaatttcttcagactccagtggtgttagaggagggggaatctttacccacctactctagattttgcaggttgaggactaaccaccaggagattaaagttaggctctgtattccccgcaaggggtttgttttgaatgctaagggctagccatggaaacttctcagaaaagatctgatgacactggcctaaacatggagtgtcttctcttactccaacctagctcccacatcccacacctcagatttgaatatggatagagctacgttggtctatggcttattgactaacatggacatgaacatcgtagcccttatctt

SEQ ID NO: 24468 - DNA, 387 bp, Glycine max
tcttctaaaggacatataggctttgtgcttgaccaaccctgcaaagaggcatttgaggagttgaggaaaaggcttaccacctctcctatcatgcaaccaccagattggaagcttccctttgagctcatgtgttgatggaagcttacttgtggggcttctatggaggctggatcttcgagcttcaatgaggtcctttaatggtgattttccaccatggagatgcaccggaagacaaaggagaagaggtgagaggaggcaccatccactatggaataagccatggaagaaggagcttcaccaccaagatgagccttggataagaagcttggagaggatgcttcaatggaggaaaagaaagaaggagagaaagagagaggggggagcacg

SEQ ID NO: 24469 - DNA, 429 bp, Glycine max
tgtgtattgttgcattctactaatatatggaattgcctactgctttgcctgagaataacaattgcttgaccacaacagcgctggaggcggcaacggacaatggtctttcaaataaacctgttgtacatgaacaaacattatatcatgcgctgaccgtgccaaacgaaccagcgaagtcattgcataattgttacactaactatattcaatgtacttgaacaaaatgatttccaaacacgtgatcgacacatatgatgcggtggccagaagagtcaagtggtggttgacttctaagagggaaaaatgtcatgctttgttgttgggacaacgatacaaggattacgttataccgtgaagcaatcacatatcccatgtctgttatatccatccacttgtgcacactaacctgaatgaaccaaacatacacat

SEQ ID NO: 24470 - DNA, 395 bp, Glycine max
tgcctaataccttgatcatagcctcataggtgattatgtgttactaataataatacatgcgtgtgtgcgtatatatgtatgcatgtatgttctccagctatgaaggaaaaagaaattttaataacacacttttttattttttattaattgaaatttgttgaaaattataaaattgtgagacttgctccttattttatttttatccatatcatgtttcattgaagtggcggaaggtgctcccaaaatgattgatactattggtggttcaattaaccatcaaacaaaaatagaatcaacatctttattacgaggtatatttccatattctggttaccaaattcgttgtgttcttttccacgtttccttctcttcacacatgtacgtgcttttatttt

SEQ ID NO: 24471 - DNA, 278 bp, Glycine max
ctgaacgtgtgcagctcaccagtttttcatattacaataccggtaacgtgtcctctatcattgtcattatttttatttacgtcattgaggggccacttgaactctcacgattctacacctttgggcgtattcttctgaaagaattgcgccccctttttgcacatgttctgtagttgcatgctatccgaagacattatactgacactgcctaacgaaggcaatcactaagtcctttctagaatagacttgagaaggttccaagttaatgtaccaggtaa

SEQ ID NO: 24472 - DNA, 415 bp, Glycine max
  unsure (1)..(415): unsure at all n locations
tgtgtgtatgattaatctgagactttgttttcttatattatatgagagccacactaaagggtgtagcacgacattnttccacagcaatcgtgaccggaagggagcatagctagaagatttattattattattatatgatttttacctacagttgaagatgatatgtacatattaaagacttttacctacagttaggagatgtaagtagaagttaatgacttttacctacacactatacatagtaggtaaaacctatagtgacaaacaattagccgtcattatatgccccctcaaagttgacagaagaaacgtctgttggacaaagtctatcatacatttacctatggattttttatttatagtgacagcttttgtccgcacgtatatgtcatttttcttgtagtgtgagcagata

SEQ ID NO: 24473 - DNA, 432 bp, Glycine max
tgcacaacaatttactaaatttgtttttggtacaaaaattaactaactaactaacttccactaatatatacagttactacacaacataaagcgatgggccttgattaggcctatctaatttacctaattaaactaattacacaaagcaaagcccaaattcgtagtccaattattcaagtgcagaggttctgactttcgagcccattttgaccctcaaaatggcagaattggcccaaacttatttatgacaaaagtgaagatctttttcctagatttccatgaactactcacacgctctatttggagttctctagtgtcctataggctctgcacaaggcagataggtcaagtaagcacaaaaatatgaaaataacccacaattatcaattaagctcaatcattttcctaagaccaaaactaagttaaagtgag

SEQ ID NO: 24474 - DNA, 433 bp, Glycine max
tgttcttgactcatcttctccttgaagtggcatctccaatcatctttcttccatctccattttgctctcattgatcttcaagaagcaaaggactccattgatgaagaacattcaaggcctacaagctccacatggagctacattattttctctagtaacacaccttaagtatgtttttactcctctattgaccacctcaatttgcccatccgtttgagggttatatgttgaactaaatttcaatttaattccagcagatttgaataattccctccaaaattgactcagaaaatttttatccagataaaaaatgatggtgtttggaaacccatgtaatttcacaacctcccgaacaaatagatcaggtatgtcatttgcagtgaaggggtgactaatggggataaaatgagcatacttaagtcaatctgtctac

SEQ ID NO: 24475 - DNA, 430 bp, Glycine max
  unsure (1)..(430): unsure at all n locations
taaccatggaacggtatgagataattaaagatattgtgtcagggaactttggtgtggcaaagctggtcaaggaaaaatggagtggtgaattgtatgctatcaagttcattgagagaggcttcaaggttccattttcaaactccatgtatcttttctgttgtcataccttagtcttgtacatatgtactttggattgtcctttgttaatggggttctattgggttttgcagattgatgaacacgtgcaaagagagattataaatcataggtccttgaagcatcccaatatcattagatttaaagaggtaaggaattggagacatttttggtttcaatgagtatagtctcaaagtgtaattatttgccttctcggaagaaaatcattcccttcctttagctacttcttaccaactntgtgaaaatatatatg

SEQ ID NO: 24476 - DNA, 442 bp, Glycine max
tgcagctcttaatctctcaatagtttgctgcaatgttttgccgtttgcaaattccgctctgaacattacttgcattgctcaggtatacaccaatattgtagtgtgtttggtatttatattttcgctcaaacgtgatcaaggtcattatactttctagtgatgaattttttttcaaaattaagaaaacatgcatgtgaatgcagggacagatctatgttcctttttaatatatactatatttaaaaattataataattctttttatttaaaaatttgactgtaggaataaagatatttaagtactttatttttatttttcataaaatggtaattatctttttctagtttgatggtaaggataaatatttgtaaccctatgaatatgtaaacctttgatttcttcgtgatgcgctctctctctctctttcaccggattaatcta

SEQ ID NO: 24477 - DNA, 419 bp, Glycine max
  unsure (1)..(419): unsure at all n locations
cttccttcctaccatcttttcattatatccaggttatatttatgatagcttataagaatagctcgacttttttatattctaagtgacttttgcttatgactgtgacatatgtaaatagttttgtaaagattccttgaactgtctaattgctttagacgatattggtagcctcctcatttgtgggtaatgtttgaagaaggaatcaaatgtgccctaatattgttatgaatctgtatgcttttaacctgaaagaaagatttcaaatgatatctttgtaaaatcctgattttattggaggagttttgaaaaaagttgaggtagatttctcaattaagttataaatgaacaacaacagtagactattaagttctttgacttggtttttgtttggtattaggaactngcatatcagtcgcctg

SEQ ID NO: 24478 - DNA, 427 bp, Glycine max
tatgatagctgaccctttgacaaagggattaccacccaagacatttatagaacatgttgaaattatgggcattattgttattgatgatcattaagtgtaatttaccttatgtaattttgctgacactctgagctcaattatgatatgtttctgattacctgttctctatgcttgcatgcatgtttgtgttagagtaatgttaacaggttttgtcttgaatgaagacattatgttggaccaattatgtactcctaactaatggtcatattaaggagaagactaatttgtagtacatggaagggactatgtcgattagatgatgtacaaccgccatgactcgaattggttcctattcttaatcatgaaattatgatgtacccaatgtatagaataggttagtcaattcttaatgcgcattatgttagtt

SEQ ID NO: 24479 - DNA, 426 bp, Glycine max
tcttatctaaagtcgtatggattttcttgggtaatatcttaaaccaatcattgtttaatttgaactttgacgttgcccattatagtttcaagggaatgagtctaccaagagtatgtcttgggttcatgtagagataaagcttggtagcagagaggctcaccaagggtgaaccttgggtttgtcgagccattataggtccgacgagactcaccaagggcagaccttgggtttggcaagtctttggagattcgacaagactcaccaagggaggacttcgggtttgacgagcctttgttgattcgaccaggaacgcattcgccctgggtttggtgagtctctggcgacaaacctcgggtttgacaagcctttgtgaagtcgacgcatacacgaggagaattatcaaactgaagggagagataattttat

SEQ ID NO: 24480 - DNA, 357 bp, Glycine max
gcttacttcatattatccaatcatcgagaatctttgttgtaatcagccaattgttcagaggttgctcttgactctgacgtcttgaacgagtacagttgttgcttcaagcatagacgatctgcaaaggactatgacatatacaatgacttcaatttcaaccacattgatgctgatgtataaactctcgcaacttctcttaaagctttatcttcaaggcatagaatgattgcccttcaggctctatcaatcatctctgatttctccttagagcttagagattcagacatcttttcttctcctttaagagcatctgcacagacatggtgaatcaagattgcttccatcatgattctgcat

SEQ ID NO: 24481 - DNA, 405 bp, Glycine max
tagcttgtgtcacaattcactgtgacagtcaaagtgtcattcacttatcaaatcaccaaatgtaccatgagaggacaaagcacatagatgtgaaactacacttcatcagagatgtgattcaatttgagaaggtgaaggtggagaaggttttaacagaagaaaacacgactgatatgttcacaaagtccctctctagtgtcaagttcaagcactgcctggacttgataaattttgaagatgcctaaagcaaattggtagaagtgcagccctgaatcgcaagatagacactcgttgatttggagtcaaggtggagatttgtggtgtatgactcaaaataaaaaatggcacaagtgagaaggctttaagaggtgctgtcataactgaattcagatataataactgaat

SEQ ID NO: 24482 - DNA, 378 bp, Glycine max
tcatagggagctacatcagaagtagtggtggagggtgaagatgaggctgaggggcaggttaatggaaaacctttggctaaggtttaagttgatgaacaaggtttggtggaggtttatgtgcacgattatgaaattttgacttcaactcaacaaccattatggttaggatgtaaaaatacatcaaagttgtttgttgttgttcagatgttgagcaaaaaatttacacataacatgtcacaggcctgcgtcaatgatgtgatgattttttttaaagagtcaaaccaaattgagaatgtcattccttctagtttcaagaaagcaaagacacttgtagttgggctagcgttatcgagtattaaaatagattgttgcattgat

SEQ ID NO: 24483 - DNA, 242 bp, Glycine max
aatggaaatgacagtctatatacaagcacagatgccgttttctatttgagactaccgtgatgaagatatatgtgatatcactcctatggaagtacaacgcattttgttgggtagaccatggcgatttgacaagaaagtaatgcacaatggtctcaccactgaaataaccctcacccatggaagcgaaaagctcacacttgctcccttgacatctttataagtggtaggggatccagtataaa

SEQ ID NO: 24484 - DNA, 398 bp, Glycine max
tggtagcatcagagaaattgtctattgcggcaactatggagctaagttcaaagaatggtgattctaaatttttttaatgttaaattcttgtcgaccacttgagtcgtccaacgtaagacaaatggaatacttgcgatcccttcttattcctaccatcaaacaaggaaacaaatacatttgaccatgttattagaattaagaccgtaaaaaaaatgttattagaattaagaacactaagtttgataaaaaaaataattccacttacattgtctccttgctttaataaaccaatacacgagagtgatcgccaacaacaaaaacaagaaaatagcaacggttaaaactgctaccatccccttcttgcctagagaaccatactgatgttttgcatatttaac

SEQ ID NO: 24485 - DNA, 414 bp, Glycine max
agcttgttatataaataagttatcaacatattggctaataatgataaagtcatatgcgtgccttgattaatttaggatatgaagagaaggttagctatgagttatttgaaagagtaaattacattttagtccctaaaaatataaagtaccatcataatagtttctgctagaaaatgtcaaatatattcttgaaattaaaatttgttagccatattagtccatgttgctagttttgttagagtctacaatgatagtaagttataaaatttaaggactataatgataagttgtacatgtcaagaggtaaaatgagtaaatgagaataggttgaatttcagtttttcttttgttgacattcttctaatttggaggactcttatggcaatgcctcacaattttaagaaatgaaacaat

SEQ ID NO: 24486 - DNA, 351 bp, Glycine max
agcttttccatgattagaggtgctcttgtcattcttgtcagggaatccatgcttacagtaacaagtgcttttagtatgaccagttcgtccacaaaaattgcacgtagaattcatgatggtagcattaacttcagctaaggaatcaggaacagaatactgtcgttcttgttgtgcaacgtatgataaaattttgttgatagggggtaagggatccattaacaaaacatgagatctaacatttgcatattgatcattaagccctctaagaaactacatggctcaatccttcaatttcctttgagcgagaatagatgaaactttgcatacatatttcacagtgcatacacaaat

SEQ ID NO: 24487 - DNA, 307 bp, Glycine max
tatttccaacacatccacatgcccacaaagatactactaatgatttgcacacacaagatagaggaatgaagatcgagacatacttcggaaacttaacatagagatggagacaatgaagcaccctgagctgaatatcattaggaatctaatctagctatggattctattattctatggcatggtagattttgatgttcaccaaaagtaagagatgagcaaattgtgattccattacttatccttacagggaagcaaagaatgacccaacatgactgattgtttataagctcctggataacatccacaa

SEQ ID NO: 24488 - DNA, 391 bp, Glycine max
  unsure (1)..(391): unsure at all n locations
agctttttccaatatagaatctctaaaataaagctttctaaagcttctcttgctttgtacctaaacaaactctttatctttgaagatgcatctgttgtgttttagaagtgtcatctagtggcctaaatgcccttggatagtcaacataacacgatcatggcccaaggatgaaagaattcaactctgaactctagcattttgttaacagtttggcaagtgaaccaaatgtccaagtagtaaagtactcagaagtctgagtgtcaattttcacagggactttgttttgtacttgtgttggataatttccaatttataagagaaagagataagatgaggtataaaagatcaatttanaagaacagggtataaaataataactattaatagaaaa

SEQ ID NO: 24489 - DNA, 421 bp, Glycine max
  unsure (1)..(421): unsure at all n locations
tctcagcttccaaatcacaacacattgagtgttatattaatcgtcttacatactgaatttttacatgtttcataagacaattaatcttattttattcaattttaggtgatgttttactcattttttcttagttttataaatattaaatgtttagtttagatgtttaatttcttaggttgtatcttatatttttatctactttaatgtagaagtgtcgtagaaaatggaaaacctttagagccattttgaagaaaagacaaatttcagtgcaactaagctaagaaatggagcttaagctaaattttggcacgaagcaaaaagatctctgcatgcttgagctaaatttgagagccaagctaggttctatttttgcacttacgttattntgcactttagctaagtaaaaattccgagtttaaac

SEQ ID NO: 24490 - DNA, 364 bp, Glycine max
agcttgatcacaacaaagtctatacattctagtccactcaattcatacaactctcattcatttcaaacacaaccattcatttcaaacaaaacacaccactgaatgtcaaattcaaccagttcactgttcaaacaagctttttgtgcaagcaaacaacactaaaataactggaatttaaatgactaaaatttaaatactaaaatttaaataactgaaacataaagcataaactaaataaactgatcaaaataaactgttcaaaatgcaagacaagaagataaagatattgtcagtcctcctgcgggtgatcctctgcatgctcattaagatccaacatcggagcagctggtggatcctgcacagt

SEQ ID NO: 24491 - DNA, 440 bp, Glycine max
cgcttgacttgagtcatcaagagattataaatatgtgaccatggcatgagtttcaatattcatcaatcatcaatcatctttgaatcatctatcttttaatcttacaacatcatctctcaacatctttcaatcaatctttcaatatctttctacagaattttctgattcatttctcttcatatttctaaaagtttttgatcaacattttctctttcaagaaaagttctttgttcaaaaacttgtgctattcatctttttcgttctcttcttcctttgccaaaagaacgaaggacaaaccgcctgaattcttttgtgtctcttctcccttacaaaagattcaaaggactaaccgcctaagaattcgtttgattcttcccttccctttaagcaaaaggtttcaaaggactaaccgcctgagatatcttttgtttcccctttac

SEQ ID NO: 24492 - DNA, 413 bp, Glycine max
  unsure (1)..(413): unsure at all n locations
agcttcaacattcaaattcgagcgtctcgttatattataggactcattcagacatccgagtaaaaagttattgacgtttgaatttgctcagagcttcaacattcaatttcgagcgtgtcgctatattacgggactatatcagacatccgagtaaaaagttattgtcgtttgaatttgctcagagcttcaacattcaatttcgagcgtctccatatattacgggactcaatcagacatccgagtaaaaagttattgtcgtttgaatttgctcaaagcttcaacattcaaattcgagcgtctcgttatattataggactcagtcagacatccgaganaaaagttattgacgtttgaatttgctcagagcttcaacattcaatttcgagcgtgtcgctatattacnggactatatc

SEQ ID NO: 24493 - DNA, 358 bp, Glycine max
gagcaaattcaaacaacaataactttttactcagatgtctgattgcgtcctgtaatatatctagacgctcgaaattgaatgttgaagctctgagccaatcacacgacaataactttttactcggatgattgattgagtcccgtaatataacaagacgctcaaaattgaatgttgaagctatgagccaattcaaatgacaataactttttactcggatgtctgattgagtcccgaaatatatcgagacgctcgaaattgaatgttgaacctctgagccaattcaaacgacaataactttttactcggatgtctgattgagtcccgtaatatatcgagactgctcgaaatgaatgttgaa

SEQ ID NO: 24494 - DNA, 239 bp, Glycine max
agcttgaaattgaacaacggatgtctctctagaaattccaatgctcataacttttcacatggatgtccgattaaagagcataatatatcgagacgctcgaaatttaacaacggaagctctcgagaaatgcaaatggtcataactttttacacggaagtccgattcgggcgcataatatatcacgacgctcgaaattgaacaatggaacctttcgagaaattcaaatgagataacttttc

SEQ ID NO: 24495 - DNA, 83 bp, Glycine max
gtataatactcatgctgcttgaatagaatgtgccagaatggatcattcgagtgtaaagttctgaccatttcaatgtctcgaaa

SEQ ID NO: 24496 - DNA, 350 bp, Glycine max
  unsure (1)..(350): unsure at all n locations
agcttgcctcanagaggtccaggaaggacaaggcagccgaaggaactagttccgccccggagtacgacagtcaccgctttaggagcgttgtacaccagcagcgcttcgaagccatcaagggatggtcgtttctccgggagcgacgcgtccagctcagggacgacgagtatactgattttcaggaggaaatagggcgccggcggtgggcaccactggttactcctatggccaagtttgatccagaaatagtccttgaattttatgccaatgcttggccaacagaggagggcgtgcgtgacatgagatcctgngttaggggtcagtggatcccgttcgatgccgacgctatc

SEQ ID NO: 24497 - DNA, 373 bp, Glycine max
  unsure (1)..(373): unsure at all n locations
cacttcaatactcagcttctcaagaagtgagcttagttatgagaggggtgtgtgtatctaanctctatcttctcaaagaagttttctcacagaagcttctcaggaagttttctcaagaaagcttctcaaggaagctacctagtctataaatagaagcatgtgtaacacttgttagaactttgatgaatgagagtcttgtgagacacaactcaaagatcaacttctctccctttatcttccttcaatttcgtgctcccccctctctctttctctccctctttcttttcctccattgaagcattctctccaagcttcttatccaaagctcatcttggtggtgaagctccttcttccatggcttattccttaatgg

SEQ ID NO: 24498 - DNA, 259 bp, Glycine max
agcttgtgcctcttcacgtttggaatatgaatgtagcatatagatccaaagacccttaggtgctttgttgatggtttcttcccgttccaagcttcaattggagtcttgtcttttacagacttagttggacatctattgagtatgtaaatagcagtgtagactgcttcagcccaaaatgtgttaggtagtcccttctccttgagcatcgatctagccatttccataattgtgcgattctttctctcggacactccatttt

SEQ ID NO: 24499 - DNA, 430 bp, Glycine max
tatgagagcaacattgccttaatcatttccaaatatgcatgtgaattaggacgcatcaacaagaatcaagccaatgctattgtgaagcaatcaatggggcaaaacacaccaaatgattataatgatggatggctcacatactcacaaaggtaaaatcatcactttcaaattgagctttcaaaactatcatgacatgtagagaagaatcaaggatttcaagtcacaaaatgtcacaaacttttattttcaaaacaattacccatttcttgaacatatcctgtaattcaaagaaaaacatgcaaagacgtacgtgcacatgagattgacccaaaatattaaactgaagatccgacgaaactaacaacattaacaaattaacacaactaacaaattaacaaaaccaacacaactagctaaaccaaagaacact

SEQ ID NO: 24500 - DNA, 370 bp, Glycine max
agcttgaaggcaaactggatgcgttggtcaacttggtaacccagctggccttgaatcagaaatctgtacctgtcgcaagggtttgtggtttgtgctcctctgctgaccaccatacagacctttgtgtagatgcaattggctttgatgttttgatgatgatcatgatgatgtgttgcaattgatgcaaatgggcttttcaagattaaaattcaagacaatacttcaagattacaaggcacaacatcaagatgatcactagaatattaggaagggaattcctaattaaattagcaaaggtttggccaagtgatttaaaataaaaagtggttttcaaaggttttactctctggtaatcgattaccagaggatg

SEQ ID NO: 24501 - DNA, 405 bp, Glycine max
ctgacaagactcaagctgggatcatcgttagtgcgacactgagaccaacatgctatctatcatcgtcaagtaccaagaagatttaagtctagccgcggccccgagcataggattgcggacgaatatgcccaagtatacgcggaaaaagaggctcgaggaagggtgatcgactctttacaccaagaggcaaccatgtggatggatcggtttgttcttaccttgaacgggagtcaagaacttccccgactgttagccaaggccaaagcgatggcagacacctactccgcccccgaagagattcacgggcttctcggctattgtcagcatatgatagacttaatggcccacataattagaaatcgttaggagacttgtatggtctctcagaccttgactagatatgac

SEQ ID NO: 24502 - DNA, 350 bp, Glycine max
agcttgtcaaatttcgaaaatcatttgttgcatcagaaaatcagaaaattaacttaagaaaactaattaaaaactcaaaactgaaaagaaaatattattattgcaatgtaaaaattaatatactttccttacagcaatatgaacatatatttttctttaatctttctctgtctaaaaaacgtatctcacgattaaccaatcaactttaattatctataatcctaagaactggcaaattcccaaaataaaaaaaattaaaaattaaaactacctgagcctaaaaattccataaaaaacaaagcataatataaacatgaattaagaaaaaaaaggactcacaattggagagc

SEQ ID NO: 24503 - DNA, 400 bp, Glycine max
  unsure (1)..(400): unsure at all n locations
tgagcaaactcaagctngnatgggcacactcctcctattattgatgacttcaatatgacccatntccaaccattgagtcacaatacctgcaacaacgtgccaaatccttaatacaacaaaggataacctttgcttcatctgtcagagtatggagacacaagctaacaaacatagtaggactcttacctttgttgaaggagaatgagtttggcagaaactccaaatgtactaccaaaccttggtcagaagccaacttgccactaagtagaggcctcatttccatgggacttttcaagttaagtgtcatatagggacaatggcgtatgaactcactcttctaagctctgctaggattcatcctatggtgcatgtttccatacttcaccattacaatgaacca

SEQ ID NO: 24504 - DNA, 366 bp, Glycine max
  unsure (1)..(366): unsure at all n locations
gagaggatgctttaatggaggataagaaagaggggggagcatgatattgaaggaagaaaaaatagggagagaagttgaactttgagttgtgtctcacaagactctcattcatcaaagttataacaagtgttacacatgcttctatttatagactacgtagcttccttgagaagctttcttaagaanacttccttgagaagcttctttgagaaaacttgcttgaacaactagagcttaactacacacacccttctcataactaagctcacctgcttgagaagctttcttgagaagatccctagagaagatagagcttagctacacaccccctataatagctaagttcacccccatgacanaatacat

SEQ ID NO: 24505 - DNA, 173 bp, Glycine max
caataccccataaatctaacctctaagggttctaagtagtcctaccacaaaatccatagaagtagtgccccacttccactggggtatctctaaaggttgtaacttccccgaaaggttctgatgatctatcttagccttctgacagactatgcatgcatacacaaactcactaa

SEQ ID NO: 24506 - DNA, 307 bp, Glycine max
agcttttgtcctaaaatccaaactacaaaaaggatctagtcacgacttgaaatgacacatggccatgtttcaatatcccaaacactagtctatcctttgctaccccctccgagccaaagcatgttgttttctataaacaacaacaaagaaaaatagcaaaagcaaaatagaaaccctgagtggaaccacagctaaaccagttggaaagcaatgcaaactacacatgcatgaagttgggcaacaatgaaaaaagaaataaatctgccaaaggcgagtgaaaaaaagaaaaaagagagacaaaagatct

SEQ ID NO: 24507 - DNA, 197 bp, Glycine max
ttactatgcagataatatccaagaaaaataccttcatctgacttagcatcaaatcttcctaagttatctttgccttattcaatacaaaacatttacaaccaaagatatgaagatgtgagatgtttggttttcttccattgaacaattcatatggagtttctttcaaatgggtcttaattaagtcctatctaaaatct

SEQ ID NO: 24508 - DNA, 434 bp, Glycine max
  unsure (1)..(434): unsure at all n locations
agcttaaccttgttccccactttcatattaaccttactaagaaacctagcaatacttgttctttcctcctccctaagctcaactctcaaaaggagtaattccatttgttgtctatactcttcaacacttatactcccttgtctaagcctttggagcttgtccataagccccatttcatagtaggaggagatgtgcatcttcctaagagcaattttcaagtcattccaatactctactggaggatccccttgaatccttctttccctaacaagggaagtccgccaatagagtgcatacccttagaagttagggtagccaaaggaaccttcctttcctcacttgtatgatggcaagcaaagagttgctcaaccttcattntccaatctaaataagcctctacatcgtccttcccatggaagtatgggagggtaatg

SEQ ID NO: 24509 - DNA, 417 bp, Glycine max
  unsure (1)..(417): unsure at all n locations
aactaccataagggaaaagagcctagtgtgcttagcgcatgtttagaaacaagccagactaggcaagtaaagttgtgagaaacaagacaagattgttgccaaaggttactcacaatatgaaggtatagactatacataaacctttgctcatgttactcgtctaaggcaatacacattatactctcatttacagctcatacaaaaatgagactatatcaaatagacgtaaaaagtgcattcctcaatggagcaatacaagaagtagtccatgtagaacaaccccatgggtttgagggtaacactnttccacaccatgtatgtaaacttaataaagctttgtatggacttaagcaagctcttagagccttggatgaatgtatcaaatcatttctttaagcaatggatttgacagaggaa

SEQ ID NO: 24510 - DNA, 256 bp, Glycine max
  unsure (1)..(256): unsure at all n locations
ataattaactgggccaagtcagcgatataactccattattttttattcaaacatattttacccaaaaataaataactaaaaatactttcaattaaagtattattctgttattaataattaaaaaataaacaacatgtaagtaaatgttatacaaactagatatgtaattagtattttagtccttattatataaaataaatgcttattttctataacanactttataataaagaaaatatttcaacaactatgagtg

SEQ ID NO: 24511 - DNA, 402 bp, Glycine max
  unsure (1)..(402): unsure at all n locations
agcttatagaatatataataaaagaacattgacaattgaagagtctattcatgtttcctttgatgagtctaatgccattcttccaaggaaggattttttagatgatatttcagattccttagaagatacacatattcatggaaatgactctaaagaaaaagatgaaggaagcaatgaggattctcaagataatggagttagaggaaataatgaacttccaagagaatggaaagcctcaagagatcaccccctcgacaacattattggtgatatatcaaaaggggtaacaactagacattctcttaaagatttatgcaataatatggcttttgtatctatgattaaacctaanaatataaaagaagccataataaatgataactggatcattgtcatgcaaga

SEQ ID NO: 24512 - DNA, 327 bp, Glycine max
  unsure (1)..(327): unsure at all n locations
tgtgtgaagagatagacaaataaagacttaaatntttttttgcaattgtctattcgttaagcgcagaccttgcgctaagcgctcagtcttcacgcgttagccgagcttgcttgcgctaagcgcatcgacccctgatttgttggttgaatagttcagctaagcgcacatcactacgctaagcccaacatcttcactataattaaaccttaagtagtgggcttagcgtggatgatgtgctaagcgccacttcttccctggaaaaatttaatggtagcagcgctaagcgtgttgtcctgcgctaagcccctgatccattatggaatttga

SEQ ID NO: 24513 - DNA, 392 bp, Glycine max
  unsure (1)..(392): unsure at all n locations
agcttccttgaaaagattcctaaagaagctagagcttagctacacacacctctctaatagctaagctcacctccttgagatgagaagcttgaacttagctacacaccccctataatagctaagctcacccccatgacaaaatacatgaaaatacaaaaaaaagtctgtactacaaagactactcaaaatgcctcgaaatacaaggctaaaaccctatactactattatggccaaaatacaaggcctaaacgaaggaaaaaaaacctattctaatatttacaaagataagcgggctcatacttaacccatgggctcaaaatctaccctaaggctcatgagaaccctanggccttcccttggatctctggcccaatctacttggagtcttctat

SEQ ID NO: 24514 - DNA, 450 bp, Glycine max
tatgttgcaaacatttacaatagacctcctcaacctctttagaaaatcaaccacaacagaacaattatgacctctccagcaacatatacaatcccggatgaggaatcatcctaatctcaaatggtctagccctcaacaacaacaacagcagcctgctccttccttccaaaatgttgttggcccaagcagaccatacattcctccaccaatccaacaacagcaacagccccaaaaacaacaaacagttgaggttcctccgcaaccttccctcgaataacttgtgaggcaaatgactatgcaaaacatgcagtttcaataagagaccagagcctctattcagagcttaactaatcagatgggacaattggctacacagttaaatcaacaaccagtcccaaattctgacaagcttgcttctcaatctgtccagaatcccaaaattctacacat

SEQ ID NO: 24515 - DNA, 329 bp, Glycine max
  unsure (1)..(329): unsure at all n locations
agctntgaagatacaagacacaaatctacttgcgtgaaaacattctttcattctttctcgtaaagctttctacaaatttctgtatatattttaagctctcaaaacaccttataaacctttttagaaaaacctaaagtgctgagagatatattcgtctatacgaggatctcgtattagtcattgtgcaaacttccaacaaatattcttgatttatttagagccagtagcggcttggtaggacaaagaatattggattaagtcaagcttggggtagagattgtctctgtaagagcaaaaagtggcaatgaaaaatatttgtaacttttgat

SEQ ID NO: 24516 - DNA, 397 bp, Glycine max
  unsure (1)..(397): unsure at all n locations
cgaaagctaaccagttgaagattgaagaacaatgaagaatgaatgatgaacggtgattaacatccacggaattgatcatggaaacattatagagcattacagaagctcttcgacctagatttttcttcttttttctccttcttctcactaatttaagtgaaatatgcttactaaggatgttgaaccccttccctacaacccgccacacctatttatagcaaaatagggggaggaggttgcaacatagctcgcccgagtgagttggttgcttctcctctaagttatttaatgggcctaggtgggcccaggggctgaagaatgcccctaaattgaccattttgcccctattntgagtattttgctcatttctttccgaaacgtcgcgaaaccctacaga

SEQ ID NO: 24517 - DNA, 429 bp, Glycine max
agcttaaaaaccaactggtagttgaaacttaactaaaggttatgtttgacaaaactaattggaagcttaaaagcttaaaaactagctagtcaatattttatgtaacacttcaaattctttttccaaaaatttgcttcaaaaactatttaaataataaatattatgaaatgtgtcatttactcttaatttctatttctaagttggcaaagtatctcatcaattttctttttataaattagatgaaataaaataaagtaaaataagtgtgttgcttgaaaaatgcaagttttcacatcacaatattaaatttgtaaataaatgaacttaggtttataatatgatgcctttgccgcaaataaagcaaataaatagtctcacactagaagaaatttggatacaacccacagtgtaaaagtagttaaatgattg

SEQ ID NO: 24518 - DNA, 304 bp, Glycine max
  unsure (1)..(304): unsure at all n locations
tgtcgcccagttgcttcctccttacgcaacccaactttctataagggcctagattcaaattgctatttacacccctatcttgataattcaccgccccatttttgtgtttgtggctgttttctttctgaaatctcacgaaactttatggattccactgtgatgagtgttaagccttttgaagcgatcaacaatggtcctcagatgaaattagagtgtaacagtttatttacacacacctcactntgctaaatacactcccattttcgtgtttttgaccgggttcttctcgaaacatctcggaact

SEQ ID NO: 24519 - DNA, 379 bp, Glycine max
agcttatgttgatcccatatggttggagcattctcacaaaacagagtgaccttgactggtcaccatatgattttacttagtgagagtgacctaacatacccattgtgaggcgtgtcttgttatgtactcctaagcgccctagtgttgtttttcgttgacacggtacggcattgcatataggcttgagtcttagtataattgttgcataacgcctgtgaattgtttattatgagattggtgagtgttgttacgtcttgagtcgagtgtgtcattcttgtgtaatgtgattggtgatagaaaaatgaatttttaaggataaagtggtgaagtgacgtggattgtattaagttgagccatgtgatcaatataattataatgg

SEQ ID NO: 24520 - DNA, 396 bp, Glycine max
tgtaagagataccaaacataattgtgatgtgctacgcttattgccattctttagttcaccttaaagaaatattagattgtgcataatacatttgttaaataacaagtcaaatgtacaccaatgcaacttgaaaaaatttaaataataattatacacaaaaaagcattgtctaggtacgtaccattccgaaacatattttttcttcagatcttttactgggattaatatattttgccttttatgtattaattgaagattagctgagctgaagactaaaatctatatattaccaaatagcaaaacataaaaggggaaaatattgataatatattttggcaactatcatatatcaatcatgcatgctatgatccatggattcatcactaaaccagcctt

SEQ ID NO: 24521 - DNA, 348 bp, Glycine max
  unsure (1)..(348): unsure at all n locations
agctttataagtgcgggtctggtatacgatggtcaagtgttcgcgatatgtgaaagtgatgttccgagtacttcggatttggtccgaccatgccctcctgatttccagctgggaaattggcaagtggaggaacgccccggcgtttacgcaacaagcataatgtaaacctttacggttttaaaagctctatagttgggcctaggctttagagttttctttatgttaaggctttgtgtcttttgtttttgaatttataatacaaggatctttcttcatctggtcctggtctctacccattctcattcatttgcatgttnacttctttttctgaaacggcagattcgatga

SEQ ID NO: 24522 - DNA, 379 bp, Glycine max
  unsure (1)..(379): unsure at all n locations
gaagagagcttttatccatcttctcgctaagccaatctgctggcttagagagcttccgctaagcgtaacacttatgggctaatgcaaggaagactctagaagaagacaagcttaaagtaggagccgatttgagagcttgagacgagctcgcgagtgattgcgagatcctacaggtgaacgagacatcctcaccacttgtattgctgcaatcttacatcttgctcttctctctgttgtaaagagggctttctggtatggaaagctaaatcttctgttggatcttctctgtacgtacctgatgtaaagatatgactatctattcaatgatganttgtgcgtgatccgcgctatctgcatttcactccggtatacctctacc

SEQ ID NO: 24523 - DNA, 377 bp, Glycine max
agcttgttgatgaattttatatttaaatttatgttgttatctagagaagatttgagaggaaatattttgcaatataatttgtggtttttaatgtagtactaacaagaaaatggttgcagtggatttctataaagtgagaatagttgtagagattattgtaagggtgaagttagatcatttgtgtcaattggttgagtcatgtaaatgctctcttttagcttgaagcatggacaaaggcgcaggctcacccaaaccttgttcttaattttatttttgcaaatatagttcttgttgacagaatttgatggtaaatgataaatgttggctgcatcaccttgaagtgtgtatgtttatgaagccattatagtcaatgttga

SEQ ID NO: 24524 - DNA, 311 bp, Glycine max
atcactcatcaagtacaataacacgtctacgtagaacccatcatcgatatttaaagcctaaattttaatgaaacatcctttctcaagttaatcaaaatatcgtttgaagtatcactacaaaattctcatgaagataagcccacataaagcattggcgttcaaaccatcatattgaaatatgattcatcataataaatatgttcggtaatttccaaataaaagaagactatggagaatctaagttaataaggaaataaaaacaaatgaaacaaatataatcacgaataatctccaataacttacatattttc

SEQ ID NO: 24525 - DNA, 358 bp, Glycine max
  unsure (1)..(358): unsure at all n locations
agcttgtaggcctttgatcttcttcattattagagtcttttgcttcttgaagatcaatggaagtggaatagagaaggaggaaaggtgattggagatgccacttcaaggagaagatgagtcaagaacaagctcactaccataggaagccatggataagagcttgaaggtaggagaaaatgagtggagggagaggcagagaggggggaacaaaatttatgcctcaaatgaggtcagaactttgaagtctaatttctcaaatgatcaaagttgaaaaaattcacacacaaggcctctatttatagcctaagtgtcacacaaaattggagggaaattngaatttctattncaaattatcttg

SEQ ID NO: 24526 - DNA, 328 bp, Glycine max
  unsure (1)..(328): unsure at all n locations
gcttcaaatcgaaagctaaccagttgaagattgaagaactttgaagaacgatggattgtcggtgtaccagagggacactactgacaagaaatggcatacgacacgcttccataaatactaacatcaatgtatatttagagcaagcttatgcgcatatatccttacgaacgttcacttgcacaagacattctattaactaagaaaaatgcacccatatacaatcaaggcagcttcgttacctagattatttacatgtacttccaggtgtatnttgtacttacatcacacacattttcttggctaaatttacatacatgcatactcaaag

SEQ ID NO: 24527 - DNA, 119 bp, Glycine max
agctttatattcgctgttctgggagacatatgtcaagtggtcgcgatatgcgaagatgatgttcctagtacattggatatggtacgaccatgccctcctgattttcagctgggaaattg

SEQ ID NO: 24528 - DNA, 341 bp, Glycine max
agcttcttctttgtgactgtatatctttatctttgcaaccttatcgacaccgtgaaacctcgccaccatacctaggtatttttcttcaactttactttttgctactctatcttctttgaaacatattgtattgaataccatacgtgagtttggctcacctttcctggttgagtttttgccaagtcccatggtgaagtcgcatggcatggcctcaactatggtggttgcatggctgagttcttataataacatttagcatgttaatgtgctagaattgctgtagtagtagcaatgtttagggaatattcactttcgtgcaatgacatgtttaagctttagag

SEQ ID NO: 24529 - DNA, 473 bp, Glycine max
  unsure (1)..(473): unsure at all n locations
ttggatgcttgagnatgagnactttttgatgccattgcanagccgccacactcagaacacttaactgtgcacttttttgatatgcagttgttcaacacttgtcacacaaccctaaaaagtttgacctgtcaagattagatactatctcaggtggaggcagaatcctaatctaagatgggcgagccccttcacaacaacaacagtgtataccctcttttcataaagaactggttctagatagccatatgatgctacttctgtgcggcatcgtctactccctctacaacagtccctgaaagagctaacatttgaagcttcttcggaacctttccttgtgagcttgagatgcaaatggatctccaaagcatgagtttaaacatagacttagccttcatcaaaacttaacatgttaagggaccataggttcccattacatcaacacagaccaaaaattgaccgattacttttatgtn

SEQ ID NO: 24530 - DNA, 418 bp, Glycine max
  unsure (1)..(418): unsure at all n locations
agcttggctaggttaatgcaagaccaaatggccattgtaaagaagttgtatactagcaaggcaaaatccctcactgtgaatcttagtaggcagggatctatgtctatgtctaattgtttgccaagtccatcttaatcaaaactcctatgcttcccttttactttggttattatttattttcttgcccataattttgacctgatatagaataggaaaataatactcacacccgaaatacttattaaaacacatggtaagagagacaaacgaaaaaacgtataaatattataagtaatataatgtgataacaaaaatcactaaganaatatgagtatcagatagatgtttcaaaaaaatacgtgtctccaaatatcataattcacaaaganaaaaatatcagtttgcttccatacactta

SEQ ID NO: 24531 - DNA, 425 bp, Glycine max
  unsure (1)..(425): unsure at all n locations
ctatgctgcanatatntacaatagacctcctaacctatcttcgaaatcaacctcagcagaacatatttgacctctccagcaacagatacaaccctggatgaggaatcaccctaacctcagatggtccagccctcagcaacaacaacagcagcctgctccttccttccaaaatgctgctggcccaagcagaccatacattcctccaccaatccaacaacaacaacaaccccaaaaacagccaacagttgaagcccctccacaaacttccctcgaagaacttgtgaggcaaatgactatgcagaacatgcatgtttagcaagagaccagagtctcaatttagagcttaaccaatcagatgggacaattggctacccaattgaattaacaacagtcccagaattctgacaagttgtcttctcaagctg

SEQ ID NO: 24532 - DNA, 383 bp, Glycine max
  unsure (1)..(383): unsure at all n locations
agcttcatcaaaacgaactaccaatatgttgaatttcctatcacagttatcttctctcaaaggtaaagaaatgaagttgtctgaaaaacatgtaaattctttaaattcaagcagtgtcagaaggaagcaaatatcttctatgaattcctcggaaggtgttggtggccaaagatatagtaagatcaagacagaaaaggaggtgacctcctccaattccaaagcagcttcaaaaaaactgatggcaccttcaaaggctttattaacccccagaccttcccttattagaagtgcaagtataaattcaagaaagcataagaagcctgaaattgcttctcatcttaagaatcagcggagtgcccganaggttgaacatgacgaacaca

SEQ ID NO: 24533 - DNA, 334 bp, Glycine max
tcaattctcaacaggcatggacgatctaactatatgggagtatgagttatcatttaaatatggctacaatgccttgtcatatacatatgtgtattggcattcacaagctaactattcataagatttaagcccagaatgtttatatcattatatgttaagctagtttttttcctcttaagatcatgtagatagatttaagggagtcagggaagacagaagaaagcgctcggagaaaccgttattaatgaccttgctatatatggatttatgtaatagaatggcttttgatagagcccaacgtaatgtttggtccatgtagatgaccccactagtt

SEQ ID NO: 24534 - DNA, 340 bp, Glycine max
  unsure (1)..(340): unsure at all n locations
agcttctcccccaattttctataaatagggggagaagtgaagtagataagggttcagccccttaggcacttctctctctttcgaatttgcttaggaaaattgttttcgtgaagaaaatccaagccgaggcgcttccgtaacgtttccgtgagtgatttcgcgaaggttttcgaccgttcttcgacgttcttcattcgttcttcatcgttcttcagtcttcaatgggtaagtacctcaaaccaagcttttcaattcattctatgtacccgtggtggtccacattnggtttcatgtattnttattctcgtttcattcactctttataccctttttgacgtgc

SEQ ID NO: 24535 - DNA, 410 bp, Glycine max
  unsure (1)..(410): unsure at all n locations
ntgacttgagttatgaagagattataaatgtggccatgtcatgaatttcaaatgattaacaatcaagaaatttatctttcaatcttctctcaacatcatcaatatctttcaactctttctacagaattntctgattcatttatcttcatctttctaaaagtttttgtttaatactttctcttttaagaaaatttttttgataaaaaaatcatgctatttatctttttcattctcttcttcctttgccaaaagaatgaaggactaatcgcctgaattcttttgtgtctctcttttccctttccaagagaattcaaaggaccccgcttgagaattctnttgattcttcccttccccttaagcaaaagatttcaaaggtctaaccgcctgagatatatttttatttcccctta

SEQ ID NO: 24536 - DNA, 408 bp, Glycine max
  unsure (1)..(408): unsure at all n locations
agcttgacaaactttccctgagttcaacaactttaatgcatgataaaagagattattataaaggatgatcatgcggacacacacacacacacacgcatatgtaatagtggaaataaagacacataaagtagctctaaaaaacactttttgaattaatgaagaggtgtgtcgcaacctacccttcggcgggagggcgaggcgaaacaaaatggcgcgccttagaaaagaagaaaatgcatggagtcgccaccaatgtttattcaaggaaaacattagaaaaaccaaaaagacgaaggtctaagaaatttgagaataagggttcgggagttgtttacgcatggngaagacattagcaccctacgcgctcgtcacaagggacgacagcctntaatcgagtgtgaaaacatg

SEQ ID NO: 24537 - DNA, 446 bp, Glycine max
  unsure (1)..(446): unsure at all n locations
tggttcatatcattattagattacatattattctcttatttatgattagatactatatagtgatttagtccttattactctttattaaattgagggcgaccctggtgcagcggtaaagttgtgccttggtgacttgttggtcatgggttcgaatccggaaacagcctctttgcatatatgcaagggtaaggctgcgtacaacatccctcccccataccttcgcatagcgaagagcctctgggcaatggggtacgaagttttttttttttactctttattaaattgatcctctataatcaatattaatcctatttgttcattataaataaagacttagtgtggtcatccaacacacacacaacattacagtaaaatacttttatatattaacatctttgagagaaatatcatatcatgtacacttaaanataacagcaatataatga

SEQ ID NO: 24538 - DNA, 401 bp, Glycine max
agcttgccacccagctcgcccaggcgagctatgtttcttcctccatataggcaccgccttctgaaggaactgcttggaaggcccaagtgggcctggttgctatttgcaccccctatttactaaatacacccctacctttttttgctgattctttttccgtaatgttatggaactttacgaatttcgtaacgatacttgttttccttccgtaatgttacggaaccttatggattatgtaatcatccttttttttggctttcagaatgttacggaacctcacggattgtgtaacaatgcttccttttgatttccggcatgttatggaactttccggatcgtgcaacaatgctctcttttgacttctggcacgttatggaacttcgcatattgtgcaacaatgg

SEQ ID NO: 24539 - DNA, 392 bp, Glycine max
gagaggatgcttcaatggaggataagaaagagggatatgaaagagagaggggtgtagcacgaatttgaaggaagaaaaagggagagaagttgaactttgattgtgtctcacaagactctcattcatcaaagttacaacaagtgttacacatgcttctatttatagactaggtagcttccttgagaagctttattgagaaaacttccttgagaagcttctttgagaaaacttccttgagaagctagagcttagctacacacacccctctcataactaagctcacctccttgagaagctttcttaagaatattccttaagaagctagagcttagctacacatacctctcttatagctaagctcaccttcttgagatgagaagctagaagctaac

SEQ ID NO: 24540 - DNA, 424 bp, Glycine max
agcttgcatgatttacattctctccctttctaagcaaattcttaattcttcttgacatcatcaaaatcttcatgaattacatctatagcagtctcagcttcatgaccaatggctctatctttagcatacaaatccactatatcatcccagttttgaagcaccttgaatcgaaatggtttagccgatttatgcgactggaaaaaagagaaagtcaaatccaatctactttgaattacaaatagcaatatattaaagaatacttatggtgcactattcattccaagcattttcattctcaactatgatcatgtgcttagtgtcatcccaatcaaacccactctggtcaaggatgtcacttacaataccataccatgatctccatgaattgatacggtttttggcattatctgatgtgacattaata

SEQ ID NO: 24541 - DNA, 317 bp, Glycine max
  unsure (1)..(317): unsure at all n locations
tgcaagctagcggctattttctcctagaaagttcattgtaagagacatatacaagaagctttcttgtttggctggccattgtacatattcgcgcatatttacatagagactaacccattgctaatagtctatattgagacaggtcaatggggtcttatataactatgttaattgctaatagtcaatgcctatcaggatcatcacataatccaatgaccttagacttcattgnataatagtaacacaatcatattaacataataatttacctaatatggtttgcattatgaggatcaatctctcagacaaaagtcaaa

SEQ ID NO: 24542 - DNA, 423 bp, Glycine max
  unsure (1)..(423): unsure at all n locations
agctntgcggatttggtcttcgccagtgttaggatcgaagtggatctgaaaagaggcaaatttaatcatcctgcttagacgaatgagaaaactggggcaaataaagagggtgaggatgagggagaaacccatgctgtgactgccattcctatacggccaagtttcccaccaaacccaacaatgtcattactcagtcaataacaaaccacctccttacccaccacccagttatccacaaaggccatccctaaatctaccacaaagtctgtctaccgcacttccaatgacgaagaccacctttagcacaaaccanaaaaaaacaccaacaaaaaggaaatttgcagcananagcctgtagggttcaccccanannttccgtgtcatatgctaaactngatccccatatcactcaataattcaatg

SEQ ID NO: 24543 - DNA, 382 bp, Glycine max
  unsure (1)..(382): unsure at all n locations
ntaggttgctcattgattctatattgctgcaaagaatgtcagagatcagcataagctntagggtgcccacganattaaccacattttttccatcctttccttaatcaatttccgcattttccatcaaagtttaatcttacacgatcctaagtcagcccttgtgccatgagggtgcatatcatttggtaatcagagctccggttctaggatcaacacttcctttgctggagatattgagtaacatccttctttattctctttgccatatatattaccttcttattcataattttttaggctgaaccattgcanaagttaagccttttgatctctttgttataaaaaaaagcagaatttcgtataagcaaaattaaaaaaaaat

SEQ ID NO: 24544 - DNA, 291 bp, Glycine max
agcttcttagactcaccaatccataacttttatcctatccggctagaaaggcttctttaaagcatgatgtttttaatttcttaacaccaattttccttttcacttccgaaagatactaagaccaaagatgactaaaaaacactcttgtttgcgtcttttcccaaacatcgggaaatcatgttttctaaagacaaacaactctgatattggaatagctagcggagcatccaattttgtgcctactgcctaaaatgtctacaagctagagtagtctaaactatcggacagaaa

SEQ ID NO: 24545 - DNA, 173 bp, Glycine max
ttatcactctatattaaagtgacggcggccatgctgcggcgctaaagatgagccttggcgagtagatggacatggattctaatccagaaacaggctctctgcttatatgcagaggaaaagctgcgtacaacatccctcctgcataccttcgcatagcgaagagcctctgggca

SEQ ID NO: 24546 - DNA, 404 bp, Glycine max
agcttaggcttagcgcgtgaagacatgtttcttagcgcatgggttgcgcttagcgggtggacaactgaaaaaaaaatctaagtcttttctatccatttcttcacatgagcttaaaaaaaaacccttgttcactactaaacaagctacaaaattaatcacaatcacaagcaattattcctaactacatgcaagagataagaatgaaaaagagaaaagggaaagaaaagtcaggttgcctcccagtaagcgctcttttaacgtcattagcttgacgcatcatcctgttatctgggtccaacaaggttccaacttccaaaaccttcttctctagcctcttttcctccatcacattcaccttcaaacaaacattgtggtgaggcaaagctttctcttcatgaaacata

SEQ ID NO: 24547 - DNA, 236 bp, Glycine max
tgcagctgccgcatgcgagcttggttcgaggtacttacctgttgatgatcgaacaacgatgaacaacgaatgaagaacgtcgaagaacgggtgaaacctttgcgagattcctcacggaaaacgttactgaagcgtttcggaagcgcctttgcttatagtttcttcacggaaacaattttgccaagcaaatactatagagagaaaagtgcgtaacgggctggaccgttccttcttca

SEQ ID NO: 24548 - DNA, 354 bp, Glycine max
acataattcatggcagggtttggttaggttcaaagataaaaagggatgccccacattatttccatgacacaatgcgaaaatgatgaattggaaattatatgcaaaactggtcatgcatgcacctatgcggacactcaagtgtcaaatttttatggtcatgtgatgctagggctcaagattcatttcctctattttaaatcaacccaatgtttccaaaatatgttcttttatcaacttgtgcattcatcctagtccattttgggtactcgggaaaatttcacagcattcaccctttaggtgtacacacattttgttcaaaaactagctatgatcagcaaatgatctttttattca

SEQ ID NO: 24549 - DNA, 256 bp, Glycine max
  unsure (1)..(256): unsure at all n locations
agctntctgccaaggtctagatgacatttctagctggtattaactcactttaaccttcactgatcacagaatgagaattaaccttccaactctcagagcctcgctgttgttgcactcataacaccacattgctcactttccaaccgtaaggtaactctacaattccatccttagcagttgttcatggggcaatttagcattacaatcatcacagacatcttcacaaaaccggaaaacagaatgggtatgtctaact

SEQ ID NO: 24550 - DNA, 326 bp, Glycine max
  unsure (1)..(326): unsure at all n locations
agcttgaaattgcattcgggcacctattttgaatctcctatgctgtctctacatatataaaacagtcccaccatcccaattttgcaaaatcatattcatatatcattgggggcatttcaccgagcacttggagggcacacgtttggacacaaattgcaagagaatggggacaatgtggcatgccccattgcttcagaatacaacataggcctaatgccttctcacacaaaccctcaactcaacaaaacaagcatggattcagatgtgaatngcttcatgaatnttgcananaatgagcaactaaagcaccaaaacacatcaatgga

SEQ ID NO: 24551 - DNA, 132 bp, Glycine max
atgtcaacgcaaagcaatgatctctaactcagaattaagacatactgttagagacgattatgaacaacacttctcataggccaagggagtagatatgttaacaaatactttcccaagcatgtcactctgtgg

SEQ ID NO: 24552 - DNA, 381 bp, Glycine max
agcttctccctcttttccctataaatagggggaggagggaagaacaaaaacgttcaaccctcctggtatctgaggatcacttgaaattagtgaaaaaaatcatttccgtgaagaaaatccaagtcgaggtgcttacataacgcgtccgaaacgtttccgtgggtgatttcgtgaagattttccgccgtctttcgttcgttcttcgtcgttcttcggtcttcaaccggtaagttcccgaaatcgaacttttcaattcattctatgtacccttggtggtccccacttgtttcgcgtacttatattttcattcggttactatccgattccctttggacgtctttatcatttattaagccttctctccccaatcagaaaaaataa

SEQ ID NO: 24553 - DNA, 376 bp, Glycine max
tggaattgcgaaagccccactccatcattaggatttgtacctgacatctcaaacaaatatatcaaacgtgacaagacaattataggtgctgttgaatacctcacccactcaagtgtatcacacaattatggcttttctctaatgaaacactcttgcctgttaccactctaattccccttgagttcttatgcaattcaagagattatggccacaacaaagaacaattcaccaatatgcgtaaggtaaggctagacaatgacaaagttaaccaattaaaaggctaacaatgtttttatgcacatatgaaggaaacaaaattcataattaggaattcaataacagtgcttcttcaaccaatgtattacctttaagagtt

SEQ ID NO: 24554 - DNA, 374 bp, Glycine max
  unsure (1)..(374): unsure at all n locations
agcttaagccacaaggcaatgaagtttctttattctcaactctgaattgaattttcattttgtatccagagcactattctatggaattgtccctattaattccatggtaaatttagttcctataaaatatcatataattcatagtattatgaataaataaatgagtcattataagaaaaatgaaatgctaaaaagattgacatgtgtaagcttgtgagggccatttctttgcacatttcanataatgattaanacactaaaaagtttgtgtggtagaccatgctaatctaagaaataatctcaatatatgtgttgcatagtgcttctcctacaacaaccctcttattaaactgagattcaacatcaaatacaaa

SEQ ID NO: 24555 - DNA, 357 bp, Glycine max
tggttcgaggtacttacccgtagaagatcgaagaacgatgatgaacgaatgattaacgtcgaataacggttaaaacctgttagtgcttatctctactgactttaaaagataggctaagattttgttaaaacataagcacttatacaatgaaggaaagctggagttgctgcacatgatgtccaacgttatgtcaaggaataagatcgggctgcacaatgcacaaggcaagataaaatgtcaaatgaagaattgaaagtgcaggatccacgatgtcggatacaatgtcctgacatcctgcccgagaatactggagttgctgtacaatgcaagataaaagtcaagtgcagaagtgaagct

SEQ ID NO: 24556 - DNA, 401 bp, Glycine max
agcttaaagtccattatggatgcataggctaataacattctgattgtttctaatctagcaactagagcacatgtttcctcataatctatcccctcttcttggttatatcctttggcgactaatctagccctatttctaataattattcctcttggaagatcataatttgttttgacttcatcaacttgagagtcttcattgtttatttctccttttcctttatgatattttccaagaatatgtatttcttcttatgattctgaaatatcatctagtatatcctttcttggcaaaatagcattagattcatcaaaagaaacatgaatggattcctcaataatcatagttctttggttatatattctatatgctttactctgcaatgaatatccaagaaagat

SEQ ID NO: 24557 - DNA, 355 bp, Glycine max
  unsure (1)..(355): unsure at all n locations
tcaagatattatttgatgatgccaaagaatttcaaagatctttaaagatgaatttcaaggatgatgaaagcaagatgtcaagcaaagcaaagatctcaaataagaattaagatagactcttagaaaagtttctgaaaaacacaaatgataggccaagtgagtttctatcttaacaaaaacttttccaagcattttactctctggtaatcgattaccagaggttgtaattgattaccagtggccacaaagctttctggaaatgttttcaaagttattttcaaagttttcaaagttgtaatcgattaccaatgctttaaaacagttaaaaatgattntgtaaatatgtaatcgatta

SEQ ID NO: 24558 - DNA, 361 bp, Glycine max
agcttcctatttattatgcattctgcagaatcttttttgtagttcactaattctgtatggaagctggttcattttgatgccagaaattgaagctctcgagtgaagtctgaaagtgaaagtactgcctgcaagagttacccagtaattagctctgagcacttgaggtcatggactcatggtacagaaacccggcttctggtgtcacaagtgaaatgacatcttatatactatggaggagttaattttttagtccttttggtttaaaagtttcgttgttaatactagagtttcatgaacatgagtttggtaacgatgaagcacatgacagatttttgggttttatttttttgggggggggggg

SEQ ID NO: 24559 - DNA, 440 bp, Glycine max
  unsure (1)..(440): unsure at all n locations
actcaagcttattggaaatctcaagaaccgtgggttgcttgnggacttaatgtaagcatatgttgtgaccgaactagaataaatcttgtgtatgctttcttcttcctacaatctttatttttacgctgtacatttttttatttctgctttacttttggttaagttattgttgctgcactttactttcttataacttagtagtaaagcctaattgaatctagtaacattaagaaggataaaattttaattagtcaagacacgttcataattaattcaacccccctcttcttaattattctgaggccactcgatccaacatgatctttatttaggagaaaatttatgtgttcgtatctgcaacttgcatggaactgctttgtaaatcagcttgaaaagaatattggctactggtcatngattactgccctcttggtattgat

SEQ ID NO: 24560 - DNA, 319 bp, Glycine max
  unsure (1)..(319): unsure at all n locations
taacacaaggcatgcgaagtgggtggaattcctagagttattcccttatgttatcaaacataaaaagggaaaaggtaatattgtagccgatgctctttctggcgtcatgcattactttctatgcttgaaacaaaattgattggtcttgaatgtttgaaaagcatgtatgaaaatgatgaaacttttggagaaatttttaaaaattgtgaaaaattttcagaaaatggtttctttagacatgaaggctttcttttcaaagaaaacanaatgtgtgtgcctaaatgttctactagaaatttgctggtttgtgaagcacatg

SEQ ID NO: 24561 - DNA, 285 bp, Glycine max
agcttgtagatcaatggagtccttttgtattacttatgattcagaagatagacactatgttttacctccatcaagagtactcagttgaaattcatagttcgttggagaatataactacccaactggaaaacatttaaactaggctaacccttagcaacctccttaaccctaatgaggacgacacttagttgtgttataggtgattgtcgcaacctacccttcaacgggagggcgaggcgaaacgtaatagtgtgtcttctcatgatgaaaacacatggagtccca

SEQ ID NO: 24562 - DNA, 332 bp, Glycine max
  unsure (1)..(332): unsure at all n locations
atactaagctttaactgaatntgcaacgcttcaattgatttcaaaatggtgtaatcgattacaagatattggtgatcgattactagtgtatctgatcgctgaaattcaaaatcaattgtgaagagtcatatcttttcataacatgctttgtgtaatcgattacctgtgacaagtcttgaataaacaggcaagagatgtaactcttccaatggttttcaggtgttttcaaggtcataactcttccaatggtgttctttaccagacatgaagaggctatataagcaagaccttgacttgaagttcaataactttgacaacctttacacataaat

SEQ ID NO: 24563 - DNA, 290 bp, Glycine max
  unsure (1)..(290): unsure at all n locations
gttgcataatttgtgaccgaactagnnttaatcttgtgtttgctttcttcttcctacaacctttattgttacgctgtacatatttttatttctgctgtacttgtggttaaattattgattctgatctatactttcttataacttagtagtaaagcctaattgaatctagcaacattaagaaggataaaattttaattagtcaagacacgttcataattaatgcaacccccctcttcttaattattccgaggccactcgatccaacatgatctttattttggagaaaaatt

SEQ ID NO: 24564 - DNA, 391 bp, Glycine max
  unsure (1)..(391): unsure at all n locations
agctttgctgacgaaaggatcgaagtggttctaaaaagagacaaatttaatcatcttgctttgatgaatgcgaaaactggggcaaatgaagagggtgagaataaaggacaaacccatgctgcgactgccattcctatacggccaagtttcccaccagcccaacaatgtcattactcagccaataacgatccttttccttacctaccacccagttatccacaaaggccatccctaaatcaaccacaaagcctgtctaccacacttccaatgacgaacaccacctttagcacaaaccaaaacaccaaccaagaaaatgaatttgcagcaaanaaagcttgtagaattcacccncattctagtgtcctatgctgacttgctcccatatctactc

SEQ ID NO: 24565 - DNA, 226 bp, Glycine max
aatctcaagaacgcggggttgggtgggactttttgtggcataagttgcggccgggcgatggtgcacaacagggtttgcacattcatcaaggcgcataaacccaccatgctctgctagccacctacatctgagctcacgtactcccacgtagcccatattcttgtttatttcaacaccgggtacccatcaatcctctaagcttccacaaccttcaagcaggacaaca

SEQ ID NO: 24566 - DNA, 219 bp, Glycine max
agcttcctgctgtaccaacgtgtgtcttttctgtgttatttgtggactcaagcccatgaggttgaagcttttctgtcattattgtgggttgattgggcaggataggggctagttagctattgcattgtattatctgataaaacttttttgttgaaattatatgtggctcttctatgtctgactgtctgttatagctgcagctttttcattggatgtcaa

SEQ ID NO: 24567 - DNA, 304 bp, Glycine max
gacatggtgtccttgctcgagataccacaatacactgaagcagaccaagacaaataattcttccaatagagttatgcagctagcgatggttggggttctacaaaaggagaaagcaagtccagcataagccatttttgatcaatacggagaccctgatgaaaaaggatagaagagagctcacgggctgacacaaaaacttgctgaacctgaaacgtgctctggaaaggacgacgaagctgttgggacaagtcgggtgagcttccgatgacaggacagcgacgcgtggactttacgtgcctaaaat

SEQ ID NO: 24568 - DNA, 391 bp, Glycine max
agcttaagctacttcaactgcacaaggtgttggatcaagtggcctcggaataattaagaaggggagtggaattaattattagtgaacctttactaataaaaaatttatccttgttaatgttactagattcagctaggcttttactacacagttgagagtgtatcgaatacatatccaaagctaaccagacgtaaaagtgataattaaagtgcacaacggatattaaggagtatatggaagaacaagacaaactcaatagttttattctggtgcggtaacaactcgtgcctacatccatgccccaagcgacctgtggtccttgagatttctttgaccccttgtaccacctatacatgcaaagatccacaggggatgtaccctaccttgtatc

SEQ ID NO: 24569 - DNA, 274 bp, Glycine max
  unsure (1)..(274): unsure at all n locations
agcttgtggtttgtgtgatgttgtgttttgttgtacttgttaatgatcaatggtggggttattggtcagaattgagaagtgaaactgggaaagtgttgttcttgatgagaatgtgacagtacagttcatgtgtttgaagattatgttaatggaagtgttgtgttgaatcttttcataggatgcacaatgaaaagatatgcgtcttcggaagatgcacatgctaaagttggtttgggattgggagatttgaatataagaganatatggttttgcg

SEQ ID NO: 24570 - DNA, 370 bp, Glycine max
  unsure (1)..(370): unsure at all n locations
gtcacctgcggctgcagcttaatgttaaactataccttcctcctattcctcaataaaaagtcaggatcagatttcaacacattcaaaggaatattaggaaattttcttttctttattcttccttttagtcaataatttattgaacaaagttatattatttcctaataaataagcaacctcaagaagtttgctcaaacacataccaaggagtcaaggactctaatttttagaggaattgaaggatatatatgaaggatatatatgggtattcctgagaaaactggggtaagtatttgcangaatacananangcataccaaatcatgccttttcagttccctggtaatcttcttagtattgacccattcat

SEQ ID NO: 24571 - DNA, 436 bp, Glycine max
  unsure (1)..(436): unsure at all n locations
ngcttctacaagatgggcaatggttgaagaaagacgcacaacctccagaagatgaacgtactccccctcctcctcctcaatgagatgactcctcagcctcatgaatgaagttctttcaaagttacgaggcctccaaacctatgttggtgaacgctttgattccttgaatggtcgtatcgatgccattgatgctcgctttgaaggaatggatacccgcatcactcagcttgaggaggatgtgagttatcttcgtcggtgcttcgactttcctccaccatcttcatagatttagagtattattatctttgatattacgccatgtaacgccatgtatttggctatgtttttaaagtcattattctttgaactatacgtatatgtcagtatttggcacttagtatgatatgactgaattatatttaatcttgacttattg

SEQ ID NO: 24572 - DNA, 343 bp, Glycine max
agcttaacagggctgcgttggctgaactgaacactggagcttgcatggttgtggttagtgtctcttagtcaaaggtgatcgaggattgaatcaaccttccccgagagatcagagtacttgtcggagagcaaagcttgactgttggttagacgagcgattgcatcttcaagtctatccgtcgtcgtctttctggtagcgtggtcggccatggcgatggtggccgcagcaggttggaccagtgttaggtgggcagagggtgagtaaggaaaggaacgaaggaagaggaaagtatagcctttattcgaggcaaggaaaggcaccttcttgaaacaatgactgggta

SEQ ID NO: 24573 - DNA, 389 bp, Glycine max
  unsure (1)..(389): unsure at all n locations
tggcatttattcagctgcaaggtacaagatttaaccatagcataatatgtttctcaactctttaaatatttagctctatgcatatatgattggggtaatttgcaggtattttacttgtgcaaatgtgatgcctggttcacttggttatggagagcaagatgccaagactttcgcatcatgggtatataacactgcttctttcttaaatttgattattccttttgcttcactcaaacatatcagttgctatttaacaaacgggtattatcatcattgttttatctttcttagggtgttgattatcttaagtatgacattngtaacaatggtggaacacagcctattgataggtatgtaaaatagttatattttcacaacactgttatata

SEQ ID NO: 24574 - DNA, 347 bp, Glycine max
agcttgacaagcagtatctttcgattttctctttttgttgaactttcaactcaatctatctctttcacggaagttaacaatcaattagttttatatagagagactaagtattctttatgggaattcgatgacaatcttgctctttttttttgataatttgcaaatgatacctttttgagtgaataatatatacactattaattagtgcaaatatcttttatattctcttcaaatcacaaccctattcacaaccgtgtccaattataaccatgtgagtccgggtggacatttataaatctgattctaattaaaattaattctgagatacagtaattcatgttcgaata

SEQ ID NO: 24575 - DNA, 332 bp, Glycine max
cacctatgtctgcaagtcatttgatgttgcaagcaaggtcgatagccagctgaaatagtgatttggcccatgttctcaagtcctcctattcatggtgcatccattgtggctgccattctcaatgaccggttatgagctcaacttctgctacacaaagaaggattagtagctgactatcttatgattctttccccactgctcttttttttctctgatgaatactagtcttgaatggcactgtcacatggtaaagaatatgatggtacttcgatatgtatagaggccattctccaatatatggttgatttaatgggagatcctaatgacattgc

SEQ ID NO: 24576 - DNA, 385 bp, Glycine max
agcttttacattatctcattgtgatgcttctttctatctatgaattcttccattcttttttatatataatctagattagccaaatctaagagcactattaagaggtgaaaaatctaagagcattgtgcaggttccccttttcccacagcaacaatgagatcgttcttaaatctgtgtgaagtgaaaaatttatgagataaacataatgcaacgaaatggcacgaaggccctaaactacatgttagtcttattggtttcaacatgtaaaattcaagtgcaaaagatggtttcagcatgaaatatttatttgcaaccagacaagatgcatacacgtacctcttgaccaattgttaaatggagactggccctgtaaaacctgcacagc

SEQ ID NO: 24577 - DNA, 408 bp, Glycine max
tgacctccgtgaagacgaggaactgttcagaatcgacttaatagtgttgcgtatggtcttgtagaggatgatgacaacaatgttgacaagagtgcggggacaacaatgaagacgtggatgggtttgcaacgcatgacgacgacgacaatggcgacacaaaatgcttgtaggttgttcctacaaatggagatgggagtgagctcgagacccactgagagggcaaaaacacctgtggtttggagatgcaggaagttgtggaggagatttaggtggagacattgttgtaagagatgaaaattgctcttgcgattagaattgtgtgatggtaaaatgtgtgaccgtgtttgttgtgtgcggaggtacagggtttcgattatgtgcctgacgtatatatgctatgtggggaaa

SEQ ID NO: 24578 - DNA, 423 bp, Glycine max
  unsure (1)..(423): unsure at all n locations
agcttgctntntgtgcttttcattgctttaattgttgaataatccttggaaatttgtcttgttaaaactctattggtttagctttcatttcattttttttggtctttggttattgcttgtctctttgtttccttgcttgtgagttgccatatagggaattggaaatgaggattggtgccatatcttaaagaatttgagtcaagaagcaaggggccaaccaccttaagagctattggactaagaagcactccaaattgagtgaaacactaaagagagaatagccaccacaattgaggactnttttctttgtaattttgtaattggcaatttgctntgctttcaaattttgtaacaaaaaggcctttcattggaagtaagttgggagcctctgctangtcaccctactttcatttgtatgtaata

SEQ ID NO: 24579 - DNA, 247 bp, Glycine max
  unsure (1)..(247): unsure at all n locations
gcttctgcatgtctagagagttctagagagagaaaggtccttgttctagagagtttttgagattntgttgtgtgaagatctgtagagactagagctggaaaagaagccgtcttgagagcttgagatgagtttgtgagtgattgtgaggtcctagcagtggaggagacatccccaccacttgtatttcttcaatctttcatctttctcttctctatgttgtccaggatgctttccgattatggagagc

SEQ ID NO: 24580 - DNA, 293 bp, Glycine max
agcttctatataagctgacccattttatcaataaacacaagttgagttctattcagaacattagagtttatctcttttatcttagtgagagtgattctcctaaattcttgagtgattcaagaacaccctggctgtatcataggactttcacaacctttgtgtgtagccctcgctggacagagagacactttccttcctttcatcttcacccttgttctttcagaccacatatccagaatatccacctctgtccataattatctggtggccataactcgcattatacgcactca

SEQ ID NO: 24581 - DNA, 139 bp, Glycine max
gtggttgtcaattacgagtgttttgatatcctacgggtcacaataggacatccgaatcataagttattacgtttgacttttcctaagctgccgtttactatatatagcgtcttgatatattaaagggcttaatctgaca

SEQ ID NO: 24582 - DNA, 379 bp, Glycine max
  unsure (1)..(379): unsure at all n locations
agcttactaaaacctttgatcttgttgatagacttggatctatgagaatcatgcttgcctttgttgctcataaaaacataaatcttttacaaaagggtgttaagagtgcctttttaaatggtttcattgaggaggaactctatgtttaagaacctcctggttttgaagatcacactnttctagatcatgtgtttaaacttaaaaatgctatgtatgatttgaaacaagcacctcgtgcatggtatgatagactgagctcttttcttttagaaaatggttgtttcggaggcaaaagtaatactactctttttagaagagaagtgggaatggtttcattatattttaattatgtagatgatatatatttggagtactaatg

SEQ ID NO: 24583 - DNA, 352 bp, Glycine max
  unsure (1)..(352): unsure at all n locations
tctctggagggggatgacttggaatctttaattatccacgatcaatgtattgatgatgctcatgtttcatacttcatattgcattaaatagtataaactctgtcagtaactacttgtaatttctcataaggggtaatacttgtacttaagggcatgtcactcggtttggaactcacttgagactcaagctgatcaccaagggggggggttgtatgtgcacgacaaggtgacctcaacacttgttgcttagttttcataagtgagggtgtcatgtggaaacgcttatgctatntctagatgaatggtatcacattgcatttgagagtcgaagtcaagtgcatgcatcatactg

SEQ ID NO: 24584 - DNA, 368 bp, Glycine max
  unsure (1)..(368): unsure at all n locations
agcttaagataatttgtgtaattgattgtgataaggctataatggattaaaacatagagtttttccttctgaagaaacttttccaacttagaaatttttcttctcatttactcacgatgatgcataatgcacaaaagatataatatggactaagatgcaacatttaatataacaacaaatacaaatgccactcaagggagttgggcatgtaaaagacaaaacatattcaagcttttctccaagcttcaagctttagtcttcaagttgttcattctactccccttatctctaacatccttctcttgtcagcataactcgtttgccttctctgatcaatgtgcatcctatcntcaatcaacctgacatat

SEQ ID NO: 24585 - DNA, 208 bp, Glycine max
tctccatgcctcttggaaccacttagaatagtggtagttctgtctgcttaaaacaaaacgagttatatcacaaattatttgcatcctattcctttgtccaacattttaggtaacaccataacatagtgcaagacttgtggcgagacataaagacacccggtcacccattcaaatgccggctggagtgccctcgagtcccactgagagg

SEQ ID NO: 24586 - DNA, 391 bp, Glycine max
  unsure (1)..(391): unsure at all n locations
agcttgcaaaatctataattntaatgatctgctaatataatatgtattgtaagacatttttcgaaggatttactgatccttgttttgtttttaactaatggagcaggttaaagagttccatagaagagatggttttgaggtagcaagtgctgacaagatggctaagtcatgcatggtttattttgaaatgcatctatccctaaggaaaaaaataattacaaaagcttttaatggtagttatagtatctacaaggaaactttttgtaaccaggtctattgcctttttgtttgagtaactggacatgcaggtacaataattgttgttgaagatgacaagggacctganagaggaatgccgagcttcaattctgagttacccaattccaattca

SEQ ID NO: 24587 - DNA, 489 bp, Glycine max
  unsure (1)..(489): unsure at all n locations
attgatacgttgcatttcgagaccctcgtcatactgtgactcttccaatgctcacgctaggccatgaggtgacctgatttactctagggatatctgatttcaaggatgctgctcgattgttgacgattccgactcgtcaatcgcttatttacacggcttgcctcgcaccacatcacgaccacaactgagcctactcggactgcttgatcgcctttactacaaagggtgatgggtgtgcaactcgacacgtactgagagggctccttcttcctgccgtaagtagatacttttactcggcgaggcgatgtaggcggttacattgctgtaagatatgatgcccgctcttgctganagaatcgtgtgaggttaaacagagagacctcgtacgaagtgtgctgggcgtcggggccccttattatgtgcatgacgtatgtatactttgaggagaaaggggttggggacccgaacttactttgattggatctggag

SEQ ID NO: 24588 - DNA, 329 bp, Glycine max
agcttcactctttttccactcataacactatattctcactttctaaccctaggttaaccctacccttcatctctaacagttttccataagcaatttcagcacataaacatcacaagcatcatcataaaaaaccctaaaacagaatgggtaagcttgactcacaccaaacatggcaagttcaacatgctttcaacaaattccttcataaataactatcatgaagcagaaacctagctaaactacccatcatatctccctaaacccaatacccacgaaaatcaagtgagaaagaagtctacccaaacctgaaatttcgaagtcccacatgt

SEQ ID NO: 24589 - DNA, 362 bp, Glycine max
  unsure (1)..(362): unsure at all n locations
cctctncacgtctggaatgtgaagagcatatatatccatagaccccttatgtttcttgactatcggcgacagttcaatccagactgatgaaaggtgatggagactccccttctaagagaagatgagttaagagcaagctcaccaccataagaagccatggataagagcctgaaggcaggagaagatgagtggagggagagggaaagaggggaacaaaattttgagagagataagagggagaatgaggtctaaagtttgaagtctaatttctcaaattatcaaagttgcaaaatgcatacacaaggcatttatttatagcctaagtgtcacccaaaattggagggaaattngaatttctattc

SEQ ID NO: 24590 - DNA, 202 bp, Glycine max
  unsure (1)..(202): unsure at all n locations
agctntgagccaatacaaacgacaatatgtttttactgggatgtctgattgagtccagtcatatatcgagacgctcgaaattgaatgttgaaaccctaagctaattcaaacgacaataaatgtttactcagatgtctgatagagctccgaacatatcgagacgctcgaaaatgaatgtgggagctctgagctaatgcaacga

SEQ ID NO: 24591 - DNA, 298 bp, Glycine max
agcttgtatattttcccaatttatggttgttttgtagtgatttttgtaaataaatcttgttttatggttaatgttgtctttagaacatttccattggatttaatgatgaaatctgtgcattttcaggtgaaaaagaggctaagtattgaattgcaaaatgtagaaattgggctaagctcaacaattgtgctaagcgcagctttagcgcgcttagcacaaaggagaatctggcagagcatcagcatcaaagctgcgtgctaagcgcgagctcagtgcgctaagcccgaatccacttact

SEQ ID NO: 24592 - DNA, 480 bp, Glycine max
  unsure (1)..(480): unsure at all n locations
ttgaagcgtgaannttgagacntgattgatnccctcgaggaccgccgnnntnacgaggnctcagggtcggggcngtttttttgagcaccgagtatgcgncactttattggagctgagcgtcccagaggtcttacacgaatctcccaatctcttattatcggtgaatatgacaatttacgatccggttctcgaaccaccagtatctatgttgttctattgcgtatctgatatgtgctatattctcattgctcagaattggcaatagtcggatctctgacttttttgctactctactgagaaacttaaaaagtggagtgggttaaaggctcaatgttttgtctatctacaataactagcgacaccttgctcctaacgggaagttgtatgcatataaataaccgttactaacaacatgccacctgctacgcaaaattctgcttgcccacctagtgcccaaatagtgaagtaataccctggtcg

SEQ ID NO: 24593 - DNA, 307 bp, Glycine max
agcttttgcaagctggaatcatacatcctatgtttgacagccagtgggtgactgccgtacaggtagtcccgaaaaagaccatcctcacagtgataaagcatgagacggaggagctgattcctactcgggtgcacaataaatggagagtctgcattgactatacgaggctaaagcatgataccaaaaatgaccattatccgatgccatacagtgaccagatgcttgaatgcctggcagggaaatctcacatagctggtccttgatggtttttttggatatatgcttataactattgctcatgaggatc

SEQ ID NO: 24594 - DNA, 185 bp, Glycine max
ctactcaatcagtcaacccatagttgaaccacaatatggaatagcatatgtgaatgaaaatccgagaagtgataccaatgaccaagcgacactcctaaatcaaataccattctgaatgacaatttaaccaatatgactagtcgaaggcacttaaatcgatgtatacctacaaatttactagcata

SEQ ID NO: 24595 - DNA, 350 bp, Glycine max
ggctgcagctgttctaatttacattgatgtttttatgttaggaggttacatgccatttttgctttaagagtaatgtcccactaaaactaactttccaaatgtttgccttcgcaggaatggcaccgaggaagcttgcctcatagaggtccaggaaagacaaggcggccgaaggaactagttccgccccggagtacgacagtcaccgctttatgagcgttgtacaccatcagcgtttcgaagccatcaagggatggtcgtttctccgagagcgacgcgtccagctcacggaggacgagtatactgatttccaagaggaaatacggcgccggcggtgggcaccactggttact

SEQ ID NO: 24596 - DNA, 325 bp, Glycine max
tgatgtgagagagcgtggaagagtcagtcttcctactattatttgttgaccacttagtggtgcctagagatatgctgcgggggtcatgagaccttgggacgtcacgtggggtgctattgcccaaaatcaagcttggccaattccgacccatctccggcatagttagtcagtgagaacctgtgacgtacctaagcaagcgagctcttggcagtcaaccaattaaagaacaaagtccacgaagcaaggaggctcgtgtggcggctggccagctatatatcttgggtgttatctgagaaataccctctagtaatcgatcaccattcgt

SEQ ID NO: 24597 - DNA, 365 bp, Glycine max
  unsure (1)..(365): unsure at all n locations
agctntagtgtttagtgtcaagtcttatgttttactgtgtagggtctaatccttagggtttaggatttagggtgtaggggttatggtttagaatttagaggtaatggtttagggtcaagtcttagcgtttagggtttaggttttacggtttagggttgaaataaaattactccagactcatatgcatctaatgaaataaaattacatttagaagttgaaataaatggagtggatcaagccaggttgagtgactttagttatccataagtaaaccttaataaactgaataccatacattacgtgtgaaattcaaatgagaaatatacaacaaaatatttaaacggagacatgcaaatcattcattt

SEQ ID NO: 24598 - DNA, 409 bp, Glycine max
  unsure (1)..(409): unsure at all n locations
ggagcacaatggttntatcaatagcaatgagcacactatcctcagagcgatcctaaagaaagccaaaaatcaaaacaaaactgaggaatcccactaagagagaaagaaactcgagccagcacccactccaacccccacggtgggccccacataaaccccaccaaactcgaagtcctcagcactaagtaactccatgaagacattgtatgtcaatcagagaaagttctcattcgtcccaagtttgattgaagacctagacaagccaatggtgagcgtttgtacaatggtgaggtgagaagcagtgagagagagtgttgggctacaatggcttacttgtctgtgacgtgggctaacagcggaggtgcaatggaggcacgacagtcgcggaggcacagcgggntcccttatc

SEQ ID NO: 24599 - DNA, 379 bp, Glycine max
cctcttgcctgtctctatataaccttttgggcgggtcatatagatgtgtccctctaaatccccatgcaggaatgcaattttaacatctaattgctccaagtgaagattctctgcagctactatactcagaataactctgatggtagtcatctttacaactggagagaagatctctgtgaaatcaattccttgtttctgctgaaaccctttcaccataagtctcgccttgtatcttcttctaccgtcagattcttcctttagcctatagacccacctattctgtaacgttttctttccttttagcaatttagttagagaccacgtcttagtcttatgaagggatgtcatctcatctttcatcgctagctcccacttaata

SEQ ID NO: 24600 - DNA, 389 bp, Glycine max
  unsure (1)..(389): unsure at all n locations
gcttgtgcctcttcacgtctggaatatgaatagcatatagatccaaagacccttatgtgctttgctgatggcttcttcccgttccaagcttcaattggagtctgtcttttacagacttagttggacatctgttgagtatgtaaacagcaatgtagactacttcagcccaaaatgtgttaggtagtcccttctccttgagcatcgatctagccatttccataactgtgcgattttttctctcagacactccattttgttgaggagaatatgcgactgtaagttttcgctcaatgccttcatcctcacaaaatctttcanacttgcgagaggtgtactcttttccgtgatcacttcttaatacttttattcattttccactttgatttttc

SEQ ID NO: 24601 - DNA, 406 bp, Glycine max
  unsure (1)..(406): unsure at all n locations
agcttgccatttaaaaaggcattgttattatcaatttgctaaagatcccaatgaaaggaagtgactaaagtcagaatagttctgattcttataggtttcacaactagggaaaatgtttctttgaaatcaaaaccaggttgttgatggaagccttttgctacaagacgtgccttgtacttactgacagacccatctgaattatgcttgactctaaaatcccgcttgcaaccaattggttgcctattaggaggtttaggaaccagttcccatgtattgcttttgagtagtgcaaccatttcttcatccatagcatctttccacttanggatcttaagtgtngttnttgacagtttaggcacaacatgagttaaaagccagggtggttggagtctaggcttgacaattc

SEQ ID NO: 24602 - DNA, 243 bp, Glycine max
  unsure (1)..(243): unsure at all n locations
ntatattactatactatgtatttttctagtgtgtaaattccttgattagaattagttcatattcatagaacttgaggtggagaaatatatattcaaggcatgcacgtaccttatgagtagcatatggtacatacaaagatatcatagacttaactatgattaatcatctagactcattatattgcaagtaattaattaattaccaagtaactaaatagatgtactagcttgcttgatagttga

SEQ ID NO: 24603 - DNA, 297 bp, Glycine max
agcttgtgcatccaataccctgttgaggatgtcccatatgttcttaaaactggactgattcatttgcttccaaagtttcatggccttgcaggtgaagacccgcacaaacatttgaaagaatttcacattgtctgctccaccatgaaacccccagatgtccaagaggatcacatatttctgaaggcttttcctcactcattagagggagtggcaaaggactggctgtattaccttgctccaaggtccatcacgagctgggatgaccttaagagagtattcttagaaaaaattttccct

SEQ ID NO: 24604 - DNA, 343 bp, Glycine max
  unsure (1)..(343): unsure at all n locations
agagattctagagctgagctactctccactttatagctactcaactctgagatgaaaggagagcttagctacacaccccctataatagctaagttcacccccattcccacagatacatgaaaataaaaaaaaagtcctactacaaagactactcaatatgccttaaaatacaaggctaaaaccctatactactagaatggccaanatacaaagcccaaaagaagaaaaaacctattctaatatttacaaagaagagtggatccaaccttgacccatggggctcaaaatctaccctagggtcacgagaaccctagggccttctttagtagctctagcccaatcc

SEQ ID NO: 24605 - DNA, 405 bp, Glycine max
  unsure (1)..(405): unsure at all n locations
agcttctcggctacaattactcattccagtacaaggcaggccgtaataatgtggtggtggatgctttctcgcgtcttcatgagccagagcacacaacagaatacttccaaatcgtctccatgcctcacccaaaattccttgatgagctaaagagggaattatcgggaccagaggaattcaaaactctcatgctccaggtccgcaatgaaccttcgaaaaatccagattttgaaattagagacaaccttttgctttttcaggggcgaatttggataaatcaaggcaatcttttcatttccctcttattagaagaataccacaaatctccacttggtggccacatggggctagctaagactctcggncgtctcagcanagcttttctgagaaacatgcgctgcgata

SEQ ID NO: 24606 - DNA, 341 bp, Glycine max
  unsure (1)..(341): unsure at all n locations
tccatcaagtggtatcacagctcttgagcttcaagtctgtgctctttccacctcccttaacatttcgcgttgacttcctctaatatgaggatgattcatttgcctgcatgtatttcctcacatgcggtgggctccacgttgtccacatgattctctanagcctccacactatgtaactgcatgaagacattagatgtgaatcatatagggcctaattcttgccatgtttgttgagaccacctatagaggccagtggagagcgcttgtacaatggtgatgtgatattctgtgagagagagcgttgggctacaatggcttacttgtctgtgacgtgggctaac

SEQ ID NO: 24607 - DNA, 356 bp, Glycine max
agcttaataaagtccttacgacctacattgtgtatatatgattgcatggaatgagatgaagtgcaaaattgggaactgattgttagttgtttggatgaattgacacttgcctgaaacacttgtgtgcttgagagaaacattggcttgtgaggaaagaagcttagtcaatcttgcttgatgtttgtcatgcttgctaactgatttcatctctttagctcaattgcacatgcttctatcttgaaatgtgacaaatactaatttgggggagatattgattgatagatgtgcagttatctcagttactgtggttggtacttactaaacatgccattaacctaacttagcatagttagctt

SEQ ID NO: 24608 - DNA, 109 bp, Glycine max
caagcttggagcattagacttatatgctctatcttgacgaggattgttgaaattacatacattgtacgggtacttcgtccacatcttgcatggaactagactcaatcca

SEQ ID NO: 24609 - DNA, 288 bp, Glycine max
agcttacaacattcctggatttttccttcttagtgtttttcctgacgaaccattaacttctgaccatgccaaagatgagcataacatcatcaacaccgccaagcggcataagccgcctaaacaactttaagttactcatgcttcgatttcaagaaactgcttctctccacaccagctgtctggagaaaacgcacttagcatgcctgtgttattgcagatgaggatacctactatgacgcttgctctgatgttacaatttattgccgcattccacaacgactaggtgat

SEQ ID NO: 24610 - DNA, 436 bp, Glycine max
acgcacttgacatttatgggacgaggaagccacttaatcaacaccaaatctttcagattatatatttagatcaacataatctatccaaataattgacataaaatgcatatataacaaatgcatatataaatcacaccaaatataattcaattgattagtggaactcatatcctgtcattgtgattctctcaagacacaattctagttattaaaccagaaagattattttgctttcctttatacattgatgttagaatcaattactgcggtatagattcctttaattcatctctaagttcacagtaaatcaaagaaattatatgaggagcttgtgaacttggtcataaatttgtgaagcttgtgaacttggtgaacttggtgataaattatatgaggagcttgtgaactcggtgataaattatatgaggagcttgtg

SEQ ID NO: 24611 - DNA, 156 bp, Glycine max
agcttgtaggattatggggtacccatcatatgtggtactaggtggcggtcgggcaatggtgcacaacaagttttccacatccacaatgcgcgcataaacccaccatcccctgttgcccacctccaactgagctcaccgtactccacgtagcccata

SEQ ID NO: 24612 - DNA, 319 bp, Glycine max
agcttcaacattcaatttcgagcgtctctatgtattacgggacttaatcagacatccgagcaaaaagttattgtcgtttgaattagctcagagcatcagaattcaatttcgatcgtctcaatatattacgggactcaatgagacatctgagtaaaaaagttattgccgtttgaatttgttgagagcttcaacattccatttcgagcgtttcgatattttacgggactcaatcagacatccgagtaaaaagttattgtccgttgaatttgctgagagctccaacattcaatttcgagcggtctgatgtttacgggactca

SEQ ID NO: 24613 - DNA, 367 bp, Glycine max
gatccttaagcacctgcggctgcagcttgcttctacaatctcccccttcatcatgttctcatttatacttttcattctaaaatttagagatttatgcaaagatcattattcacggttagtcgttcactcacagtttaaggtcacactctcaccggttttggttcaagctttttctttcacactcaatctgtctactgactaacaattctaattccaagttcacattcttgttctttctttgtctaacatacatacttgctcaaactcatgagaggaaacacaaactccatcaaaatcatgtattcaattcaaaatgaaagcatacaaccattgttcacagaaacatatagagtgtttcactgtcatg

SEQ ID NO: 24614 - DNA, 372 bp, Glycine max
ctcatcttggtggagaagctctgtttttcatggcctattccttaatggaaggcgcctcctctcacctctactactttgtcttccgtgcatttccatggtggaaaatcaccattaaaagacctcattgaagctcaaagatccaacctgcatagaagcgccacaagcaagcttccatcatattgagtacaacattaatcctcatagttttagctatgaaattattattacatcttaccaattattgggagaaaaatcctcttgggtaactttttggattgattctatctaaaaattgatttaaaaatcaatcctttgattttgtttattgaattacagaagcaactttctaatcattacctacaaaacttatct

SEQ ID NO: 24615 - DNA, 392 bp, Glycine max
  unsure (1)..(392): unsure at all n locations
agctttcatactttgatgcatataattgtactggtttaaaatagatcttatgatcacaaagatgaattagtttcgatatgtcattttgcaaaacaattaagctttttatgaaaaccttcttatgtatgcattttgacatgtgccattctgatgctcaaaatgctccatgctcataatgtaaaaaggagggaagagaagattcaacataggcatttttatactagttcaccccaaccttgggctacatccaattctcacccaaactgatgagatttccactaacacaaccaacaacatgctagaacaaccaactattggattnttacaacctgccaacaacccattgggcttccaaactagccaactactagaccaacaacccactggattta

SEQ ID NO: 24616 - DNA, 403 bp, Glycine max
agaggatgcttcaatggtggacaagaaagagggagataaagaaagaggggtgagcacgatattgaaggaagaataagggagagaagttgaactttggttgtgtctcacaagattctcattcatcaaagttacaacaagtgttacacatgcttctatttatagactaggtagcttccttgagaagctttgttgataaaacttccttgagaagcttctttgagaaaacttccttgagaagctacagcttcggtacacacacccctctaataactaagctcacctccttgagaagcttccttgagaagattcataaagaagctagagattagctacacacaccctcctaatagctaagctaccttcttaagatgagaagctagagcttagctactcacaccctata

SEQ ID NO: 24617 - DNA, 375 bp, Glycine max
agcttcaaccatccccaataatgtagattaatgatagaccatatatctttacaagttagttactatgtaacaaatttctgatagttaatacttaatactaatctgaatgtaagataaaatcattgatccatcatgtaccttggtttaaatgtataattagataatttattattgttattatacagcacaccatggatttggtaaccattaagtagttaatatccatggaaagctagaaactagaaagtagttatgcctgagaaacttaaaacaaatgctatagattgaaatcctaaatagctgatcatggaataaagtgactcttaatatgctagtattttcatttcattgctgcaacataggtagactaaaaat

SEQ ID NO: 24618 - DNA, 398 bp, Glycine max
  unsure (1)..(398): unsure at all n locations
ntaatttcatccattttttctttaaaaaattgtttccttaacactaaagatttcataaccggttggaaaaaaatttattctcaaagctatttctattgttcttgcttagagaaactaatcaaatatcatggttatacgcagaatactagcaagaggagaaaaggtaagcacgagcttgccttagaaattaaaaaattcaaaaaattctattgtatatgctatcacccaactcgccctatagccaccttctaaaaagtaatttttgcacttaggaaaaaatagagaaaaatagagacgatggttgagcaataccaaattttctagaatttgtcccaaaacccttcctctttttccaaaagcttactttcgcttaagtaaagacattcaaaatccttcct

SEQ ID NO: 24619 - DNA, 404 bp, Glycine max
  unsure (1)..(404): unsure at all n locations
agctttaaaataaagtaatttttaaacattatttcttcaaaaagcttttttttatacgtaacttttttattataaagaaaacaaatagtgcaaacgcagttaacgtaagttcttaaacatgtcttaaataaaatatagattttcttaagaaagaaagaaattcaaacaaactagcataagtaaggaaaggaggaaaattactacaaaagcagagcaaggagacaccgaagttgatttgcctgttgcttttgaaccttgtgggtgttggtgtcttcagttcaggtaatttataccctatgaacacgtgcttttactatnttttttttaaatcaaattaatttttcaaatcagatttcgaatgatttatcatttatgcgtaatcaattttcagtgaatatcaatcg

SEQ ID NO: 24620 - DNA, 234 bp, Glycine max
tctttacatatcaaatctataattgttgataaattagtattttgatatgactattttcaagtttactttacaggtagtatatagataaatgattactctcgaccttacaatttatttttttaaatctaattattataacaaataactattattaactattacattttaaaaaaatgataaagatgagaacaacattaaatgagccactcgatttaatctctcctatttgttata

SEQ ID NO: 24621 - DNA, 394 bp, Glycine max
  unsure (1)..(394): unsure at all n locations
agcttgaagatgatgctttaatggaggattagattgagagaaggggggagcacgaaattgaaggaataaaagagggagagaagtgaaactttgaagtgtgtctcataagactntcattcatcaaagttacaacaagtgttacacatgcttctatttatagactaggtagcttccttgaaaagctntcttgagaaaacttccttgagaaaacttccttgagaagctagagcttagctacacacacccctctaataactaagctcacctccttaagaagcttcctttagaagattcctaaagaagttagagcttagttacactcacctctctaatagctaagctcacctncttgagatgagaagctagagcttatctacacacccnctataatagc

SEQ ID NO: 24622 - DNA, 382 bp, Glycine max
  unsure (1)..(382): unsure at all n locations
agcttctcactcncttgacattcatgggaggaggaagtttctcaatcacatcaatctttgccttgtccacctctattccccttactattccttcttgaaccatgaatgacatttctcccaattgagaactagattggactcttcacatctttgtaatactctttcaagatttgataagcaggcttcaaaagatggcccaaaattagagaaatcatccatganaacttcaatgcatttttccaccatatcagaaaaaatagccatcatacacctctgaaatgtagttagggcattgcatagaccaaaaggcatgcgccgatatacgaatacaccaaaaaggcaggtgaaagtagtactctcttgatcttgggatctacaaaat

SEQ ID NO: 24623 - DNA, 373 bp, Glycine max
  unsure (1)..(373): unsure at all n locations
agcttgcttgtggagcttctatttatgctggatcttcgagcttcaatgaggtccttcaatggtgatttttcaccatggagatgcagcggaaggcaaaggagaaaaggagaggggaggcaccatccactagggaataagccatggaagaaggagtttcaccaccaagaatgtaccttggataagaagcttgaagaggatgctttaatggaggaaaagaaagagagaggggggagcacgatattgaaggaataaaagagggagagaagtggaactttgaagtgtgtctcataagactttcattcatcaaagttacaatacgtgctacacatgcttctatttatagactangtaaacttcttgagaagctttcttg

SEQ ID NO: 24624 - DNA, 356 bp, Glycine max
  unsure (1)..(356): unsure at all n locations
ntcatcaagaagtattgcgccctcaggcaagtgcagggcgaaacaccacagcagcctgnggatggctggcagcgggcaacaaaccaccgccaccacctctagagttcatctcagctcatccacaaaaaaggttagagcattgcctacaacacatggccgaccaataggcgaccatagtccaaagccaaaggtatgcaaagtactaggtccgtgacctgcaagtcatcatgcgtccagctcaagacgttaaagaagcgctactatgaggcaacctagtaacttttaaattcctgcttgttatttgatcaccttttgttttgcaagtcatagtaggacacacctagttgctcatgatc

SEQ ID NO: 24625 - DNA, 387 bp, Glycine max
agctttaccttcacaaacacatattcacattactccattaatgcatcacacggtactctatttgaaaatggatcttttactctgtgcctgcaaggactgctgacccttccacctgatagttcatcgcatcaaatagacaaaatatatcataagatataagtctcaaagttcataaatagagagagccacacagtcaaaataagcaaactaaccatgaatgcaaaaacaaatattgaaataaataataccactattatgtgtagtgcagctttccaacttttgtacctaactgaaggagacttgtcaatcacttgagagcctgtagcagatgcaatactgtaataatgaagctcattgtgaaactgggtaaacctataggcagacatt

SEQ ID NO: 24626 - DNA, 301 bp, Glycine max
  unsure (1)..(301): unsure at all n locations
agccaccgnagagtgattcgatctcaagaatgagtgaattttcttcttggagtgaggaagctagaaagttatagagctctttgtgagacaagataaatattttgtgaagtctctatcctcaagcctgagtgagtcaccatanaatgagtcaaatttgtatacacatccttgtaaccctactatcactttgtatagtggaagaatctccatattggagaattataatcgtgcgctcccattactacttattattactaagtgcctatcttaacttcacgatgcgggatagtccgagttttca

SEQ ID NO: 24627 - DNA, 353 bp, Glycine max
  unsure (1)..(353): unsure at all n locations
agcttatgttgcactttcaacttctcgaagctaaatatgtagttgtaggaagttgttatgctcaaagtcttaggatgaagcaacaactagaagactttggagtaaaccttgatcacatttagggattaggcatatagaaataaggcatcattttcttagagatcatgtgttaaaaggttacaactacattgacttcattgatagtaagcatcaactagcagacattttcactaaaccgcttgctagagataggttctttttcattagaaaggaactaggcatattggatgcatctagcatagaataatattttgtttgcatagtgtgtgaatcatatngctattcatatcatt

SEQ ID NO: 24628 - DNA, 344 bp, Glycine max
ctatatacatctcaagctctctaccggtcgatgacgttatattttcgatacgactatgttcaagtctacttcacaggtagtatatagatcaacgattactctcgaccttacaatcgatttggttaaatctaagttattatgacaaataactatgattaactatcacattttaaaaaaatgatgaagatgagaacaacattaaatgagttactcaattgaatctctcctattttttatagtgttatttaaataaaataataataaaataacattacgtagtaagaaaatgtcccgcatctgattataaagtattttaatacctagaggataataatttggaatat

SEQ ID NO: 24629 - DNA, 318 bp, Glycine max
  unsure (1)..(318): unsure at all n locations
agctntagtcaaacagaataaacttaatatgtcaaagaattgtgtgttgaaaaagcataacaagactttctgtgattggtttaaagatacaatctttgcagatgagaatgcttcaaaaacattaagaaagctagcaaatgagcctaanagagatgttataacctggcaaggatacgacataaacaggtattcattctacacaaaagaacaagatgacaaaagtacaatgcagaacagcggggtcaccctaaggtctgaatctcaacactttgcaagtgtgaatgatgccaatccctgtgtagcttccatcccttactt

SEQ ID NO: 24630 - DNA, 75 bp, Glycine max
aaccgttacagatgagaacgccctataatgaggccctcgctttagagtctcctatttgttatagcgttgtgtctt

SEQ ID NO: 24631 - DNA, 327 bp, Glycine max
  unsure (1)..(327): unsure at all n locations
agctttntagttattcattggtgtattttgatctccttttggtgctctaaattgtgggaatgtgctcaaatatgtggggcaattttggtttgttttcttgcttggttgggttgaattgggggtttgtatgagatggccctaggcctataatgtattttgaagcaatggggcatgccacattgtccccgttctcttgctattgatgcctaaacgcgcgcccaccaagtgttcggtgaaatgcctcaatggcattagcgcgtgatttttgtagggaaacaacctatgggacanattggtttgcacatgttttatattttttgggacatg

SEQ ID NO: 24632 - DNA, 196 bp, Glycine max
tggagacattatatagcatggcagagagcatcttgagctatattgtggtgcgctattgtccttattctcactagtccaagcgaaacaagctcactaatgatgtggaaccgataacctacgacgcgccacacctaggtatatcatgacagggggaggaggtaggaacacaacacgaccgagcgaggaggctggtgat

SEQ ID NO: 24633 - DNA, 180 bp, Glycine max
  unsure (1)..(180): unsure at all n locations
agctntttttgttcgatgttgcctaaaaaatttacaatgcagttcggctaggtttcttcgtgcgaactgaaccgaagttgtgtttcggccgactggcatgttctcattttgtcggccaggaatacattagcccaccctggcataaaaaacatgattcaccgatattgaccagaaaagaaa

SEQ ID NO: 24634 - DNA, 347 bp, Glycine max
agcttttgtttactttttttattaaattattattattgactcaaatgtggatttaatatttataaatatatttttatgaatctaattactgtaatatattgatatggtcaagattttacattatcatttacttttttatcgttatataagatgataaaattgtaattttgtaataaaaaaacttattattttaacaccatataactaatgtatagtataatttgttctacgctcataatatatcagaattaacatatactgttatttgatttagtcttctacatatttttattattttcttatccctcgattaagattattttttaacatcatgagaatatattttt

SEQ ID NO: 24635 - DNA, 341 bp, Glycine max
caaactgcaaaataggagaggtgctctatagataatccgcactgcctgaagttttcaatcagtttccatggtaggatgataaacctgaacctcaagtgagtctcacaagtgacagtacccaacaaccgaagcctcccagcgccatgttagtcgatgaatacgactaacttttgtgtataaaacttgtgtatatgggatcaaactataccaatctatgggtgatttgtaatactataaggactttttgttaaatataggtagtagataatttatactttcgtgttgtgccgtttataatcaagttctctcagtttctgggtaaataggcaacttttgcaaag

SEQ ID NO: 24636 - DNA, 203 bp, Glycine max
  unsure (1)..(203): unsure at all n locations
tctcacacacatcttttcatttggttcttgagtgggcatcaaaggcctatatatatgtgacttgagacacgaatttgcaaagagttcttcacaactacaagtgtttattctctcnanagcaaaatcatttatcctctaagaatccttgccaattcattgcatcattaaggatcattgagtgctagatganaatctatctcttc

SEQ ID NO: 24637 - DNA, 387 bp, Glycine max
gttcatcaagaaatattgcacttgcaggcaagcaaagggtgagacaccacaacagcctgtggatggccagcaacaggcaaccaatgcaccgccgccacctcagagcccctcagctcatccacaaaagggttagagtattgcctacgaaacatggccgaccaataggtgaccaagtccaaagccaaaggtaagcaaagtactaggtccgtgaccgacaagtcatcatgtgtccatctcaagacgttaaagaagcactacttactatgaggcaacctagtaacttttaaatctctatttgttatttgaatcactttgcttctcaagtcatagtaggacacacctagttgctcatgatcctaggaatatataaaacaagcacaagctctg

SEQ ID NO: 24638 - DNA, 366 bp, Glycine max
  unsure (1)..(366): unsure at all n locations
agctttaaaanttgaattaaaactttcaataactgctggtaatcgattacacagtgcaaattttgaattcaaattttaatagctgttgtaaatcattttttgccactggtaatcgattacatcctctggtaatcgattactagagagtaaatctcttgaaaaagactttttaacttaaatttcttggccaaacctttngctacttcaattaggaattcccttcctatttaatatacccttcctaagactctagagactgtcttgatcatccatcttgaatatctttaatttctttgtcttgaataaagctttgagaaacatgtgatcctttggcatcatcaaaanaatcagcttgatccttttgct

SEQ ID NO: 24639 - DNA, 312 bp, Glycine max
acctgtatagcatctataggttaggcaattcttctatcatctaaatggtgtgtgtaacaaggtcagaagtgaccaattgatgtgaaaattccatcattgcaatgcctttattgtgtcgtgggttttccctttttccccttcctccaaccctcaccatcccctgctctacctccaatttttttcaaagtataatttgtttgacaatttcactgagataaagcttaatgttaggtccccttctgatccacctcttttcctctcccattactatatctccccataccgggctttcggcttgtatatacccagtta

SEQ ID NO: 24640 - DNA, 365 bp, Glycine max
agcttaccataattgagagtggtgaaccatacatgatgatggaaaatatggcagcagcgaagccacagaagagttttcgggcattgccatgcaaagcaaacagtgacaccagaacaacaacagagaacactgccaccacgaaggagaaaaggccaagaatcttggccttctctttctttggtgcgaagtagatgaagatgaagacgtatatgatttcaatccctgctcctgtgccattgattattgtcacaagtatgttgtttggggacacaaatggcaaaccatacctgtgagttgtaaaatcagaagaaaaataattagacccatcattaaaaatcaaactttactacatggaatcaacccat

SEQ ID NO: 24641 - DNA, 318 bp, Glycine max
tgcaaaataggagaggtgctttatagataatccgcactgcctgaagatcccaatcagtttccatggtaggatgataaacctgaacctcaagtaagtctcacaagtagcagtacccaacaaccaaagcctcccagcgccatgttagtcgatgaatacgactaacttttgtgtataaaacttgagtatattgtatcaaactttcccaatttatggttgttatgtaatactataagtactttctggtaaatataagtaatagataatttatacttctgattgtgcctttaataatcaatttctctcaaattctgggttaat

SEQ ID NO: 24642 - DNA, 457 bp, Glycine max
  unsure (1)..(457): unsure at all n locations
cggcntttgattcatgcagtacccgggctccttagagtcacctgcggctgcagctcaacgctccatggcgtggtatgtttacccatccccacggacaccacttgtatcctattttgactgtgggtcatgaactaatctgactgccacacaaacttcttgatctatctggtacattggatgacatgtgtaaatacagaatctaatattgctatcatacaccacacagtggatcaggctcccatgaagaagtctgtcacccatggacagctatgacctatacaaggactggtgcctgaccaacgtggaagcatacgctcaacacttgaaggttagattcctgacaatggaatcaagagccacatcatccgctattttaaaaatgctattgctggacatacgataacgtaatccacgaagccatggtgtaacacgtctacacgatcataacgcggctccg

SEQ ID NO: 24643 - DNA, 235 bp, Glycine max
tcaccagatcgaagagcatccaggatctcagctatatctattggtgatgcttgaagacactgatgcatactcatggctatacacacagttctaccaacaggagaactagctacctcctgcctgcctaccaacttatctaactaccctcattctagagtatctgccatcatccatctcgccctatatcatcttctaagtggaagtcgtgcacttaagaatgcttggagattcatat

SEQ ID NO: 24644 - DNA, 239 bp, Glycine max
  unsure (1)..(239): unsure at all n locations
agctagtcttctgctcttttgccancatagcgagtggcgaaatcgggatcaatgttgatgatgagggaatcaaccgcttcgctctgactgaggaggagggtgatggtatcactgttgagtttatgaaagctatttcaatttctgcttgataaacgaaacacgcgaaagaatgctgtactttctcctattgtgaacgagatagagtatgtatgatactcaaattatacgatgctatcgac

SEQ ID NO: 24645 - DNA, 356 bp, Glycine max
  unsure (1)..(356): unsure at all n locations
ttaagagatgttgcaagggagaagactgtttcctcaatgtggatgaaactggagacttagtatatgacaaagtccntgcggatcagctatgcctaaaacaacaactgttcaccttccagatgacagaatcaagaacagtcactgatcaataggctgattttaacaagacccttgatgatttggaaaatattgaagtaaagcttatagaggagggtcaaggatgtttgcttctgaattccttagcagaatccttctaacatttcaaggatgcaattctttatggcacagatcaagacattagcctagaagaagttcatacctcaagtaggaccaaggagatgcaaaaatagcaagac

SEQ ID NO: 24646 - DNA, 384 bp, Glycine max
agctctatttataatatgcctttgacctttatattaaacaaaacattttaaaaagcttgaacttgacctttatagtaaacaagccaagccgagccttaaataggccgagtcataagaccttcacaagtggctcagctcattttcatccctaattacagataatctatgctaatacctatacacaagagataatatctaaaaaccactacttacacacaaaagagataatatctaaaaaccacaagaacttaggggttacaaatacatcacctgagtgaatcttcttgaaatactaaagcctgacgagaaaactaatgagaaagccatctatttacctaaattattaactgttctatatctaatatgaaagcaaattaaaataat

SEQ ID NO: 24647 - DNA, 292 bp, Glycine max
agccataaaaaatgatatgagataaaataggatcttctatttgaagagaattctgtatatcacttttaaattcttcaaagcacatcatatgctcttcacaaatttactttatccttactccccccccacccgtttttgtatgacattattcaggtcttgactaacagttaagcgaataacattttccacattaaagctagaagtatattaatttcaattatagaaaaacaaaaggtgaaaacaatgttgaggagcaatataaaagacattagggtacaagtaaaatgaatat

SEQ ID NO: 24648 - DNA, 364 bp, Glycine max
  unsure (1)..(364): unsure at all n locations
agcttgctaaggaaacatacagagcaagcatatatttttttaaggaaaaatcatgataattttatgatttttaaaggtgtgtatacatgttcaaccaaatgaaaaacatccttgtgttagaaccccacacaactacaaaagataatcagaaaaatcttggagacaatcatataacattcatgtttgaaatattcaatgtcgatctattgttttaacgtcactagaaaaaaaaaccttggacaacaacaactaatatgaaactcattcgtttatgagagaccaagtggattacagacctagtgcacgtaatgaatttattaatntgattctcgaggcagttaactgcactcacatgaatcaaatc

SEQ ID NO: 24649 - DNA, 472 bp, Glycine max
  unsure (1)..(472): unsure at all n locations
atgagacgtgcatatgagacgtttcataacgctcactgacactncncaagctntgaaagagtcggttttcaccttctcgctaagccgttcttctggctgtttgtgatccgctatggcgcaacgctcgtggggctatcacgacgcagactctggaagaagataagctgtacaagtttgttatgcgcaaccattctgtaataagcgcaccgcttcagttcatccgctatgagagagaggcacgcgcttagccaaaattcactaatgtgcgcttagtggtccataattagctctatgcgcacgagcacgaacaaggccacctatttaagcgtgagattatattttagaggtggagtttggactgcgattctgagtcttgctgactagatgtatcaaaagagaaagtccatgtttaaagagtttgagagtttgttggtgaaaatagcgtaacccgatctgtgacattctgtaggtg

SEQ ID NO: 24650 - DNA, 407 bp, Glycine max
agcttattatctgttatagatgacttattgattaacattaccaattttgactcccaaatttaattcctattttgactgctagaccaaagaaagatacatttttctccctatctcttctattgcttcgtattaaattgcaagatgtttccatatattggtcctaattttttatactcgctcatgcatgttgaatattttgacaacattaggttttttataatttatgaatgatccttattgaaggactgctgtctgttaaaggtcatatataaatcactatcccagttgtataatttataatacctaattgagaacaaaacctttttctacattaaaaattcaaagtcatagaaatcttgtagcataggccattgaatattggctgccctatatgcacaatacaaaca

SEQ ID NO: 24651 - DNA, 285 bp, Glycine max
aagcatagattcattaagataatgggagattgagattagtgaacggtagaacaaaacttgtatggatcctcttgatttaggattgtcatcatacaagagggggagattgtggaagcaatgactttccagaatattgtgatgatgctaaagaatctagagttaagaaagttccaaagaatcatgagtcaaaaagcttcaagattcatgtttcaaagaatcaagattcaagaataatcgagtttcaagacttaatcaagtttcaagaatcaagattcaagagtaatc

SEQ ID NO: 24652 - DNA, 309 bp, Glycine max
  unsure (1)..(309): unsure at all n locations
tttaactccttttgtcgccactttgagcctatgtaccactttctttgttctgaagctcattacccgccttaagtgaaaaaccatgatatcaacttacccttaaggaattttggagctttggaattgttttgggaataagctgggaataagtgtgggggggtatgtttcattggaagatatgatttttggccatgcttaatgttttattttcgccatgcttcatgtatatatatattgcctagntctttctttaatcttcaatttcgtactgttcaatanaaaaaaatgaaaaatgaaaacaaataaaaa

SEQ ID NO: 24653 - DNA, 290 bp, Glycine max
  unsure (1)..(290): unsure at all n locations
tgttacatcccaattgtccatgtgtgtgtgagagacagtattattattttgttatgccattagatagtgtcttctaaactatatagatgttgattaaagacatggttccatacgataccttagcctggctaaactcttaagcttttaactaacgcccaccaacgatactgataattcatagaacattctctggtctaaagatggtccactcattaatgacctacatgntaataattggatgttggtctacaagaacatactaaaagcttcagataaatatagcaactgat

SEQ ID NO: 24654 - DNA, 184 bp, Glycine max
cctcataaaaagtctcatagcagtcacacaacctataaagatatcataaaaccctacacgaggtgtagctgactacacaacaggaagtcacagcttcacaatgctataggacacatgaccaaactagtaacaccactattcctaaccataccacaaatcattgaaaaaactcccaactgaaatc

SEQ ID NO: 24655 - DNA, 294 bp, Glycine max
agccgctggtgctgacccattaactgtcctaactcctttagactgagggtccctaggctcttgaccttaacttgaagaacctctttttaagcgaaggcatttgacttgatcccatgttttactaaagggaacaaaaatcggcgcaaatcaaaactccaacatttatcatgggtggaatggatgaatgcatgaggaaatatgacacaaatgcaatttattaacacgggagcccgggaaattgtctccttcttagatacaacatcttggggtagcaaagtgcccgacgtatgtatt

SEQ ID NO: 24656 - DNA, 376 bp, Glycine max
  unsure (1)..(376): unsure at all n locations
agcttgtgccttgagtaatttccggcgtttacttcatcacgagacatgagaaggtcatccactacatcaatcctggaagaaccggcgatatgatctggaaaagaaaatggctcgcgcccatatngtatctcataaggggtggaacccgtgctactgttccacgaaatgttatgagataagttcacccatgttaggaactttcccccgatgttgcgcggcgggaacaaagctcgtaatatccttcaatcacttattcatgacttctgttgaccatcgctctgtggatggtaggcagaactcattcgaaatgagtgccactaagctgaaagctcttgcccaaccactaatgaataatnatcacgatcgacaccaagct

SEQ ID NO: 24657 - DNA, 122 bp, Glycine max
aaagcaggaaggaacctagtggtcaatttacacaaacgaggcgaaaaggaaactaagctgaaaaaacagcagcacacagaaggactagcattggccaacaaaagttgcgcgacgaggaaccg

SEQ ID NO: 24658 - DNA, 178 bp, Glycine max
agctttagacactgcttctcggcaacgtgttgccaaattgatcgagatcgtacccgaatcaaataaacattaaaatacagtaactacgaagtgatcctaggtcgtttcccaacgagcaatgataaaccaaatgttcataatatactagcagtaacagtaacaattggggggggggggg

SEQ ID NO: 24659 - DNA, 342 bp, Glycine max
  unsure (1)..(342): unsure at all n locations
actcacatttctgattgcgtccttttatatattttgacgctcgaaatagaatgttgatgctctgttctaatcacacgacaataactttntactctgatgactgattgagtcccgtcatataacaagacgctcaaaattgaatgttgaagctatgagcctattcaaatgactatgacttcttactcggatgtctgattgagacccgaaatatatcgagacgctcgatattgaatgttgaacctctgagccaattcaaacgactataacttcttactcggatgactgattgagcccctgtttatatctagacgctcgaaattgaatgttgaatgcttaagcaaa

SEQ ID NO: 24660 - DNA, 425 bp, Glycine max
  unsure (1)..(425): unsure at all n locations
taagtcacctgaggctgcagcttctagcttcattgggattcgttcnctanttggtgctctaaatagagggggtgtgctcaaatatgtggggcaattttgatttattaggggttggtatgagatggccctaggcctataatgcattttgaaacaataggacatgccacatgtgccccgttctcttgctattgatgcctaaacgcgcgcccaccaagtgttctgtgaaatgcctcaatggcattatcgtgtgacttttgtaaggagacaacccatggggtatattggtttgagcatatgtactatttcttgttggaatatgtatacattcccgaaaaatgctttagcaattgccccacatatatcctagtcctataaactgaaattttctgcaatatggcacataatgaggtgcatattgggtaaat

SEQ ID NO: 24661 - DNA, 168 bp, Glycine max
  unsure (1)..(168): unsure at all n locations
gacancnagccaaacaaagtcaggaaatctatacactcgcagtgctttttcttccatgacttatgtagcaacatcattgatccaggcgtatctgatgacccgtgaaaagaggccgcaattataccgtgcctgttggagaagagacgtcacatgcattgaaaacaatag

SEQ ID NO: 24662 - DNA, 166 bp, Glycine max
tctacttatgtggcagggcgggcttccttcaccttcttgtctattactcgaactttgaccattgttcttccttgccgcgatgcttcttttcgtgtccgcctgagtgggcttatatcctaaaccatacttcccacgattttcttgggtatttatcaggctagttatg

SEQ ID NO: 24663 - DNA, 474 bp, Glycine max
cctgcggcatgcaagcttcttatctaagacattgtcttggtgtgttatgtatctccttccatggcttattccctagtggatggcgtctcctctcacctcttctcctttatcttccgctgcaactctatggtggaaaatcaccattgaaaaacctcattgaagctcaaagatccagcctccatagaagcttctcaagcaagcttatatcacttccagttccctacattactatatatgtgtctagggtaatcatgccacaaattgaatctttgattacagcttcctcttttctaatggtcaagatcatgggtaagtcggttattgtatccacttagaagctattattttgaaataaaaaaaaaagctatatgctgttctaagcataataattttggcaaaaaaatggataaactaaggccagaattagacattacagatggtatggggaagtatgagttcaagttcctatattgc

SEQ ID NO: 24664 - DNA, 481 bp, Glycine max
  unsure (1)..(481): unsure at all n locations
agggatgtnnnnatgattacgttgcatctacgtgacactgtagagtggtacatcctatgcaccaatgtagtggcttggatctcatgcacatgatgttatcttctatggagagacatatcgatagagagggcgcatggtaaacgaagggaattaaggaaacaagttgagccttgaagtatgcctcacaagggtatccatcatcacacgaatggacaagcgatcgcatgtttcacatccaaggctctctgatggttagcatccttgataacaacgaaggtatctgcctggaagcagagggagaagcctacgtgatagccagacgggcgctcgtaaacccttgcgtagcagaactcacacatgccttaatcatgagttacnaaggggaggaccactggactcgtacagtatatcatgaataactaagggggctctaatctatcctttcctatgtgagcaccgaaagcagatcttcacatgatct

SEQ ID NO: 24665 - DNA, 435 bp, Glycine max
atgttgtaataatacttttaatgaatatcttattttttattcctttatcaatatatatgcgaggggtaaagggtgtcacacttactcacgttagacattttctatctttgtataaatgcatccattttgtaacactatgatgaatgaatgaatgaattgaatgaatcctaaaactacttttcatctatcttccatttctttcattcctaatatgtttcattcctaatatggtatcagcagtttttgcttacgtgtctcttgcttcctattgaagttatttgtggttctgctcgatggtgtggatagtgctgctagccttcgctgtgtggcgtcgagccctgactcaagggggcgtgttgcgagtcccacatcgggtgcgtcatgaggatgattaagttcttatataactacgtaagccaccctcttatgaatcat

SEQ ID NO: 24666 - DNA, 383 bp, Glycine max
  unsure (1)..(383): unsure at all n locations
agcttatctatgananaatcagaagggaaccatcattatgccattctttctgaacaaaattggtgtcaagttcctcccttagtgtcctaatcagctgagagaatttgtggaagccgagtggaccgtactatcagatctctcattgagaggcaaatgagctgtcttgcaaacttaagagtgtttgtatgtatgtcttaaaattggttgaacgccaatccagcgttcagttgtattggaaagtgagacaatagaaatacacactattatcatcatggtgtgttaagttgatgttgaatgcgggattagttagacaaaactggtgtccatacgttgtgtttgtgttaccgtccaaccaaacataaccaacgtttttttaagaaagc

SEQ ID NO: 24667 - DNA, 465 bp, Glycine max
  unsure (1)..(465): unsure at all n locations
ctaagcttatataaacaatgaaagaaatgtttatggtgaaagaaatttgttaaagatgaaggagaatgtcttctccagcctctctaccctatttctctctatttttcacatagcaaatgcttcctagattgtggttgtggtggtcctcctttttgttttccgccaatctcagtgttttaaaggctcttggacttctcagtacacgaaggctcgctcagctagcatgtctcgctgagcaagagtaagtgaaaatccactaagcaagcttgggcgcactaagcgcgaaaagagacaacatcctcgctgggcgggctggctgcacactgagcgcgcagatctctaacttatcctcttctagggtttcccatccgctaagcgatctggctgccttgctaagcggatgatgctcgcttagccaatctgcctcgctaagcgagttcatcagcagctntttgtaccttctct

SEQ ID NO: 24668 - DNA, 383 bp, Glycine max
  unsure (1)..(383): unsure at all n locations
cggaccttaagcaccgcggctgcaagctttgtggtacataaaacggtgcttggatagcctgatcgctagctgccatgttctcaatgagttccatcacttcctcgggtgtctttaacttgatctttcctcccgtggatgcgtccagtaattgcttcgattgaggtcgtaatccatcaataaagatgtttaattgtactagctcgctatatccatgagtgggcgttttccttaacaatccgtggaaacgatctaaggcttcgctaagggattcatctagtaattgatggaaagatgagatttccaatttcccttcagctgtcttggattcanggaagtactttntcataaatntctctacaacttctttcccaagtcctaaaggt

SEQ ID NO: 24669 - DNA, 464 bp, Glycine max
  unsure (1)..(464): unsure at all n locations
gactctctgcgatntctttaaaactagtcacttataatgttgtgacttttgaaaaaatcttcagaaacaagtcacttgaagaattgtgactttaggaaatgtatttttcgaaatcagtcactggtaatcaattaccattaaggtgtaatcgattacacatcaacagatgtgactcttcattttgaattttgaaaattaaaacgtttagaagctctggtaatcgattacaagtattgtgtaatcgattacacaagtttaaaatgatttgaaaacatttaaacacaagttataactcttgaaatgtgaaatcttaacattttaaaacactggtaatcgattacttccttctggtaatcgattaccagagaataaaactctntggtaatgattntgtgaaaaacttcttgtgctactcaatgtttttgaannaactttttagtacttatattgatngagtcttctct

SEQ ID NO: 24670 - DNA, 450 bp, Glycine max
  unsure (1)..(450): unsure at all n locations
agctnntaaaacatgtcattgtaaaaaatatgtgcatgtttggtgctaagtgaccctatctgttatattgctggaagtataagatccttcactatatccaaaattccaattaggaacttcactttattatgcatcatataaaaaataaaaggacccagtatcagtatggcttattttggtatttcctgtgctctcaaaagcttcctcaaaattcatgacagatgctacaatacaaccaataaatgtcaaaggtattgtaaattttgtaacacagttaaactctgcaacattagctgtactntgtagcatacgcttttctgtttttaagcgcattttaaacaaccacttnttgaaaatttacaaaattataataaaatataaaatataagtgacatttatatattcaacccaatatcatgagcatagaaaggaaaaaagtatcaaaagaac

SEQ ID NO: 24671 - DNA, 222 bp, Glycine max
tgtctcagcgtttatgcaagacagagaccaacatgttatctatcatcgccaagtacgaagaagagttatgtctagccacggcccacgagcatagaatcgcggatgagtatgctcaagtatatgcggaaaaagaggctataggaagggtgatcgactctttacaccaagaggcaaccatgtggatggatcggtttgctcttaccttgaacgggagtcaagaac

SEQ ID NO: 24672 - DNA, 447 bp, Glycine max
  unsure (1)..(447): unsure at all n locations
agctntgtggcatagaaagctttattntttgataagtttagatatcctgagaattctgctcatggtcaactcccaagaacagtggatgtaattgcagaagacgaccttgttgattcttgcaagcctggagatcgagtggcaattgtggggatatataaggctcttgcaaggaaaaggtagtgtgaatggagtatttaggtagctccagaaaatatactgacataactcctttgcacttgcttgctttcttgaacagaaacttgattgactgattttcatgtaggactgttctcatagccaacaatgtttctcttctcaacaaagaggataatgcaccaatctacagtgttgaagatgtcaaaaacattaaagagatagctacaagagatgatgcanttgatctgctaagtgattcacttgcaccttctatatatgggcattcttgga

SEQ ID NO: 24673 - DNA, 341 bp, Glycine max
  unsure (1)..(341): unsure at all n locations
tgcctataggttggacctcccagaagagtatggagtcagcaccacttttaacatttctgatttaactccttttgcaggtggagctgatattgaggaggaggaactaacagatttgaggtcaaatcctcttcaaggggaagaggatgatgcaatccccctatgaagggaccaatcactagaaccatgagcaagaggctccaagaagattgggctagagctgctgaagaaagccctatggttctcatgaaccttanggtagatttctgagcccatgggccaaggttgggtccaattatctttgtacatattagactaggatgtcattatatttggtcccttga

SEQ ID NO: 24674 - DNA, 419 bp, Glycine max
  unsure (1)..(419): unsure at all n locations
atgcttgcagaattggtcttcgccagtgaatggatcgatgtgggtctgaaaaaaaggcaaatttgatcatcctactaggacgactgagaaaactggggcaaataaagagggtgaggataagggagaaacccatgctgtgactgccattcctgtacgaccaagtttcccaccaacccaacaatatctttactcagccaataacaaaccttctccttacccaccacccaggtatccacaaaggccatccctaaatctaccacaaagtctgtctaccgcacttccaatgacgaacaccacctttagcacaaaccaaaaacaccaaccaagaagtgaattntgcagcgagaaagcctgtagaattcaccccaattccagtgtcctatgctgacttgctcccacatctacttgataattcaatg

SEQ ID NO: 24675 - DNA, 404 bp, Glycine max
atataagcgcgggtctgtgagacaaatgtcaagtgctctctatatgcgaagatgatgttccgagtactttggatttggtacgaccatgccctcctgatttccaactgggaaattggcgagtggaagaacgccccggcatttacgcaacgagcataatgtaaacctttacggttttaaaagctctatatttgggcctatgctttagagattttccttttgttaaggctttgagtcttttgtttgtgaatttataatacaaggatctttcttcatctgttcctatgtctctacccattctcattcatttgcatgtttacttctttttctgaaacggcagatccgatgacgagtcccccgaaggtactaatacctgtgacccgcctgtcgacttcgagcaagaaatg

SEQ ID NO: 24676 - DNA, 363 bp, Glycine max
  unsure (1)..(363): unsure at all n locations
ggatcttaagncacctgcggcttgcaagcttacaagcagcttcattcactgttgtttaactccgctatggctagaatactctgatttttgagctgaaatgtttattagataaaatagacatttggacaaaatcagtggaaaaagaatgaacaaaaacgaaatataaatgagaaagaaaaagttataaatattaacatcaaaagacacgtgcggaagatacaaaaagaatgtgtatcttgatttgcttaaaaactgttcatttttttgatgtgtatcacaagcctattttgctttgagtcttttttatttttatattgtcaatcttatctaatatcattctaggactttctttgtgttccacct

SEQ ID NO: 24677 - DNA, 396 bp, Glycine max
  unsure (1)..(396): unsure at all n locations
tgggtgatgttgcgcgtactgatgggtaccattatgtgttttctggggtttaacccatgcgggtgttgaagagacggcatgggcatctccttccttcctttntgcccctgttgccccgattcttttggcgttcacgtttgtggaggaaacgtaatcaaactttcctctcttcaatccaacctcgattctttccccggcaaacaccagatccgcaaagctggacggcatgtaacccactagcttctcatagtagaacactggcagagtgtctaccatcatggtgatcatctctctctcaaccatgggaggagctacttgtgccgccaaatccctccatcgctgcgcatanttcttaaaggtttcaccctctttcttaaacatattctgcagttgagt

SEQ ID NO: 24678 - DNA, 456 bp, Glycine max
cctgcagctgcagcttgaaataaattgtgggaatatatcgtttgctcattttctcactagcataacatacaatgaacttggaatcatcgcagttgcatggttgttcaatgcaaaataacaccactttcctttcaaaataataataataatacaacatttcaagagataaagtctacacttctaacctttcattgtgtcgtaaatagcatgtgtgtgtataataatatgttggggttgcacacgtgataccgtccatgtgggtgatgtcccatgaaaatcatgatagtgcttactaccttattaccttaaaatagccttttaacaaccacactactggaatagatatcacataacacagcacgggtgaagtctcgcattattacattaattaatgacatctcatatattgctttccctttgctaacaagcacccaatagccaacatgcaataaacac

SEQ ID NO: 24679 - DNA, 452 bp, Glycine max
agcttcaacattcaatttcgagcgtctcgttatattactggactcaatcagacatccgagtaaaaagttattgtcgattgaattggctcagagcttcaacattcaatttcgagggtctcgatatattgcgggactcaatcagacatccgagtaaaaagttattgtcgtttgaattggctcagagcttcaacattcaatttcgagcgtctcgatatatgacgggactcaatcagacatccgagtaaaaagttattgtcgtttgaattggctcagaggttcaacattcaatttcgagcgtctcgatatactacgggactcaatcagacatccgagtaaaacgttattgtcgtttgaattggctcagaggttcaacattcatattcgagcgtctcgatatattacgggactcaatcagacatccgagtaaaaattattgtcgtttgaattggctc

SEQ ID NO: 24680 - DNA, 356 bp, Glycine max
  unsure (1)..(356): unsure at all n locations
ggaactacttcacatggtcattatggggcctatgcaagttgaaagccttggaggaaagaggtatgcctatgttgttgtggatgatttctccagatttacctgngtaaactttatcagagagaaatcagaaacctttgaagtattcaaagagttgagtctaagacttcaaagagagaaagactgtgtcatcaagagaatcaggagtgaccatggcagagaatttgaaaacagcaggttcactgaattctgcacatctgaaggcatcactcatgagttctctgcagccattacaccacaacagaatgggatagttgagaggaaaaacaggaccttgcaagaggctgctcgggtcatgc

SEQ ID NO: 24681 - DNA, 400 bp, Glycine max
taactccgctatggcttgaatactttgattttagagccggaattttcattagattaaataaacctttggaccaaatctgtggaaaaagaatgaacaaaaaccaaaaataaatgagaaagaaaaagttattaatatttacatctaaagacacgtgccgaagaacaaaaaaaaatgtgtatcttgatttgcttaaaaattggtcattattttgagttgtattacaagcctattttgctttgagtcttttttttttttaatattgcaatctaatctaggatcattctaagacttcctttgtgtgtcaccttggcctgtggagttgtactttagcctattttccttgaattcattcaataatgcattgtaaattcctttagataacttcattcatcttgggttt

SEQ ID NO: 24682 - DNA, 474 bp, Glycine max
  unsure (1)..(474): unsure at all n locations
ntctggactacttgagcnacccgacannatggaaaataagcacacagaagatgagagagatccacgacccgacgganatcttgcattactggcaggggangacaacagccgangtcgtaataacatatcggccacaaaagtgccatctaatcgacactggagtaccgagaaattagacgttcacgattgctacggcaacgaaaatgaactttactttcttccattcaatctccatactttccccgttacaacagatccgctcaacgggccggaagctaccccagtcaactcaaatgtcatccctggctcagtgataacactaagctgactcattcttttctgcaacgtgaggacactatagcacacacactacttacgaaaggaataaataccattgactaccttctaccctacacaacatggataagtatgagaagatccccgcctgacgtcctgactcacacagaagccccc

SEQ ID NO: 24683 - DNA, 441 bp, Glycine max
  unsure (1)..(441): unsure at all n locations
agctntaatgtacatttattaaaaagaaaatatatttatatatatatatatngaatactaattaaatntagcatgttaattttatacataaaaaatagaatagctgtattaaataagatcattttttggaaattttattttttatgtataaatgatttctaattaaatttaattaatattcaaaatgttccttccaaaaaaatattcaaaatatttatattttttcctttntagaaaaaataataatttctaaaaatgatattcaatatagctattctaatttntatatataacttatttctaaaattaatatgttaaattcacttaatattcaaaatatttttatttttaataaatatacattaattaagcttgttcagttntttttttttatgagtaggctngttcanttttttttactttaatagttcattatatatg

SEQ ID NO: 24684 - DNA, 427 bp, Glycine max
tgtagggttaaagtctcacgattgtcacgtgctcatgcaataattgttagccgtggctatacgagacatcttgccaaacaaagtcaggttagcgataactcgcctgtgctttttcttccatgctatatgtagcaaagtcattgatccagtcaagtttgatgagatggaaaatgaggccgcaattatattgtgccagttggagatgtattttccccctgctttttttgacatcatgattcacttgattgtgcatctggtcagagaaatcaaatgttgtggtcctatttatctatggtggatgtacccgattaagcgatgcatgaagatcttaaaagggtatacaaagaatatatatcgtccaaaagcatctattgttgagaggtacattgtagaagaagccatttgaatttgttcagaatacttagag

SEQ ID NO: 24685 - DNA, 450 bp, Glycine max
  unsure (1)..(450): unsure at all n locations
agctntgaacaaatgaaatggcaccttgcatcaattcttaaaactatatcacaaaatacctatattacctttcactcacccttgcctcaattttggtgtggtattgaccatcactcaaaatgactctctattcatcctccaattcgcaggtcgacaggatgcaaatgcatgcatgcttatgatttagatgtttaaacgcaacaattaaacaagtgttatcgtgttcaattttacttaaacgcttacggcaccccgttaattgagccaaatggcttcgaattcagtgggtaagattagaagagtatgttcttaagaagtaaaagacacaactcaggaagttaagatgcaaataattaatccaatatttattaatgctgcgaatcatggttacaaaggaatttaagactttgaaaattccaatgagtccttggagaacaaacatgtattgag

SEQ ID NO: 24686 - DNA, 389 bp, Glycine max
  unsure (1)..(389): unsure at all n locations
tgacactctgaaactaagctatccaatgggtcgccattattntcttcttagtcctttttctttgtatgagcatttctattttgtctcttgtaatggagtaagctagcttatgctattgaaattaatcatttgtcaccattattcttaattctctcttctcttcacaggtacaaggtagcattaggggtggctttggcccttcgttatcttcatgaggatgcggagcagagtgttcttcatagggatattaagtcagctaatgtgttgttggacacggattttagcaccaagcttggcgattntgggatggctaagttggtggatccaaggttgaggactcaaaggacagggctggtggggacttatgggtaccttgccccagaatatat

SEQ ID NO: 24687 - DNA, 229 bp, Glycine max
attgggaaataccgattgattctcttcctgcccgtgatatagttcacacgttttattttcttagctcattgtgtttagataacaattagatgagatgctttgatcatgggtggtgcttgtattgctcccaaactatgctgaactggccgtatttttaaatgcgagctatatttaagtttaactaaataggggtgagagaacaggtactgcatctgtttgtcgtggacat

SEQ ID NO: 24688 - DNA, 451 bp, Glycine max
  unsure (1)..(451): unsure at all n locations
agctngatgtcattcanaacacactatgtttatctaatttaagactaaacatgcattggttatttaattgtattcattatgcgatataatttgttgtaacccgttactaaccaattaatattatcaactactcgtttggttaagcaaggaaattgttggtccaacaaaaatcatttacgtgtgcagcatacatcattgtcataattgacaacacataatgacattcatgcgtattatagtttgagcgtgacacattggctgacttcagtacacattttgaaactagcagtcgctcgacaacacattggttgacttgactacacattatcgacaacacattggctgacttgacaacacatttacgcgtgtctattnttttgtaaacaaagttaaacaaaggctcggtcacaaccatctatatatatggcagactangctactaaatcacaca

SEQ ID NO: 24689 - DNA, 280 bp, Glycine max
  unsure (1)..(280): unsure at all n locations
actaagctatgcgcatacttcttacgaacgttactngcacaagactcnttttaactaagagaaatgcacccatatacaatcaaggcaccttcgttacctagattatttacatgtacttcccaggtgtatgtgttacctacatcacacacatatcctttgctaaattcacatacatgcatactctaagcactttggctatcaaaaattgcatacgtgcacatcttggtatttctaatacctatacatacacagacttcatgatgaatcttgactatctaca

SEQ ID NO: 24690 - DNA, 446 bp, Glycine max
  unsure (1)..(446): unsure at all n locations
agcttttgttatagctgaggacgatttcattgngtgtatggtcatnanagatctcacaaacactggtgtcatggaagatactccaaaggcatccaatgcagttgtagttgatgagattgtccatcaagataaagaacttgtgtcttagcagtcaacaacctctaatgaagctacatcaagggagaatgatgcacctgatgttatcattgtctattcaaaaaactcaggtcctaccccactaacctatgctacccccattgttttgattagagatcaagtgcaagagatgataggtcaagcaatggactccttaaccgaacatcataggcaagaaaatgagtagtttatgctcttcacacaaaatgccatcaccacccaattntcaaaccttggtgctattatactctcgaactgacaacatgctcagaaaactatgttaagagtta

SEQ ID NO: 24691 - DNA, 387 bp, Glycine max
tcaatatggtctgttatctggtccatctttgagacctactcttgtacctgccatacagattggttctatacagatgccactgcatctgcatccacaggatggtgcacccctctcacacatgcatccatcgcagcctcctttgtttcaatttggccagctaagatatacatctgccatatcacaagctataatgcctctgggtcctcaatccatgtcatttgttcagcctaatataccatctagtttctcttacagtcataaccctggaggtcaaatgccagttcaaactgctccagaaacttctgattcctttatgaaaaatgagatcaggcatcattctgttgacagccaaccaggcaattcaagaaacttaccacagagttcact

SEQ ID NO: 24692 - DNA, 405 bp, Glycine max
  unsure (1)..(405): unsure at all n locations
agcttacaagcaagctggcatcactctggttttttaactccgctatggcttgaatactctgatttttgagctgaaattctaattagataaaatagacatttggacaaaatcagtggaataagaatgaacaataacgaaaaataaatgagaaagagaaagttataaatattaacatcaaaagacacgtgcagaagaacaaaaaaaaatgtgtatcttgatttgcttaaaaattgatcattattgtgagttgtattacaagcctattttgctttgagtcttttttttttttaatttgtcaatctaatctaatatcattctaggacttcctttgtgttccaccttggcctgtggtgatgctcttttgctntatttgtccttgaatctcattcagttaatgtcatgttg

SEQ ID NO: 24693 - DNA, 386 bp, Glycine max
  unsure (1)..(386): unsure at all n locations
tgatgttgcgcgtactgatgggtaccacgaggtcnttgcttgtgacaaacccatgcgggtgttgaagagacagcatgggcatctccttccttgcattttgcccctgttgccccgattcttttggcgttcacgtttgtggaggaaacgtaatcaaactttcctctcttcaatccaacctcgattctttcccccgataacaccaaaaccgcaaatctggacggcatgtaacccactatcttctcatagtagaacactggcagagcgtctaccatcatggtgatcatctctctctcaaccatgggaggagctacttgtgccgccaaatacctccatcgctgcgcatattctctaaagggttcaccctctttcttagacatattctgcag

SEQ ID NO: 24694 - DNA, 442 bp, Glycine max
  unsure (1)..(442): unsure at all n locations
agctntatagaaggaccatcatttcccgtttactgtgtcttaaattaaggacccaatgaagtatattaattagtgagacatttaatataaaatagattttaaatacacatttattattaattattgggagaagaataatgaggtttaataatgtcattagtgaatatttgacttcagtttttcattattagatgattatgcattcatttatccaaatttatttggccttgatatttaaataagaaaaagtattatatatatatatatatatatatatatatatatatataataaaatcaattaaattaaggagattaaatttttaactaaaatgaaaatatatattttaccgaattaaaaatagtcaatatagaatatttaaataattatatgcttatcttccatcacagatatntaattacaaaatgtactctaaaatata

SEQ ID NO: 24695 - DNA, 304 bp, Glycine max
gagcacagagtagccatcagaattagaagtccggtgggaaattggcaaacaactggcagaccgatcgtcaagcagctctggagccaacacagataagaatccaaaggaggagtgcaaggctgttatgactagaagcaaaatggtgagcatgaacgaaggtgagaagaggataagtgaagaacaacaacaactggtgactgaactagcaattgacccaacggtggaacctttgagtgagatcgatgaataagtggaagcataagatgatcaacacaaggagataccaataattgtgagtgaaaaa

SEQ ID NO: 24696 - DNA, 415 bp, Glycine max
  unsure (1)..(415): unsure at all n locations
agcttctcccccaattttctattaatagggttgataagngaagtgaaaaagggttcagccccttaggcacttctctctctttcgaatttgcttggaaaaattttttccgtgaagaaaatctaagccgaggcgcttccgaaacgtttccgtaacgtttccgtgaggaattttgcgaaggtttccaccgttcttcgacgttcttcattcgttcttcatcgttcttcgatcttcaacgggtaagtacctcgaaccaagcttttcgattcattctatgtacccgtggtggtccacattgtgtttcgtgtatttttattcacgtttcatttactttttatacccccctttgacgtgcttaagcccatttatttaagtcatttctggcttaacctanaaataaaataaatttccaccgatc

SEQ ID NO: 24697 - DNA, 414 bp, Glycine max
  unsure (1)..(414): unsure at all n locations
tctcccncaattntctataaatagggggagttttgatgtgaaaaagggttcagccccttatgcacttctctctctttcgaatttgcttggaaaaattgtttccatgaagaaaattcaagccgagccgcttccgaaacgtttccgtaacgtttccgtgaggaatttcgcgaaggtttcgaccgttcttcaagattcatcgttcgttcttcgttttcttcagtcttcaacgggtaagtacctcanaccaagcttttcaattcattctatgtacccatggtggtccacatttcgtttcacgtatctttattctcgntttcatttactctttatactccctgttgacgtgcttaagccatttatttaagtcatttctcgcttaatgtaacaactagaataaattccaccgatcgtttg

SEQ ID NO: 24698 - DNA, 457 bp, Glycine max
agcttagctacacacacctctctaatagctaagttttcctccttgagatgagaagctagagcttagctacacaccccctataatagctaagctcacccccatgacaaaaaacatgaaaataccaaaaaaaagtccttactacaaagaatactcaaaatgccccgaaatacaaggctaaaaccctatactactagaatggccaaaatacaaggcccaaacgaaggaaaaagctattctaatatttacaaagaagagtagatccaacctttacccatgggctcaaaaatctaccctaaggttcatgagaatcctagggccttctttagtagctctagcccaagcctcttggagtcttctatccaatacccttggggggtaggattgcatcatcccctccagcttggaaaggatttgacctcaaatcccgaggttcttcatactctaggctccttccctc

SEQ ID NO: 24699 - DNA, 455 bp, Glycine max
  unsure (1)..(455): unsure at all n locations
agctnttaacttcatgtcgagagtatgcattaatatatacatgataccttttgccacccaatcaagtgtagcttggctgtttctggcagttctaaagcaacaatggtcatctttgaatgtcactacgtgccaatacgtcgcttgaatggacttgctaactcgtaagtagaagggacaacccttttgtttacaaattgcaatgactctcttgttgtcanttttttaaccttcagattcttcttagacattatagcaaagtatttgatagcctctagaatttgtttcttattattgaattgcaaccctacttcaaactttacatcttcatcattttctagcaccttaaaatgaggaaatctgactattggaggaccttcatcttcacttccatctggagtatccaactcatcagaatatccatcttcatcatcaaaatcagaatttggtgagtctac

SEQ ID NO: 24700 - DNA, 352 bp, Glycine max
  unsure (1)..(352): unsure at all n locations
tgcttgtggggcttctatggaggttggatctttgaccttttactangttctttaatggtgattttccaccatggagatgcagcggaagacaaaggagaagaggtgagaggaggcgccatccactatggaataagccatggaagaaggagcttcaccaccaagatgagccttggataagaagcttggagaggatgcttcaatggaggaaaagaaagagggagagaaagagagagggggagcacgaaaatgaaggaagacaaaaggaagagaagttgaactctgagttgtgtctcacaagactctcattcgtcaaagttacaacaagtattacacatgcttctatttatagact

SEQ ID NO: 24701 - DNA, 478 bp, Glycine max
  unsure (1)..(478): unsure at all n locations
cctgcngcatgcaagcttgcacaacagagtgctaggttccttgttctttatggccattttttatcagcatatactaatggatcacatccaaatagcttagcaaaaggtgttttaatcatgttattaaaagatactaaatgccttttcagatgactttaatgtgatcacatcagtgttttgaataaattactgagtttagctgagttcatggaagtggtgttgaaccgagtcagaacaccaactcatcctcctattctaatatcacattgattaattaaatgacacagatggtggttggacctcaaacacttttattttatttgactatattgatgatatgtgacattgagcccataagggagagattgatccatagtgtgaggatatgcaagaggtcaatttttcatattaaaaattctggagcaagttgtcaaaaccaataaaatcataccatgtgagcaatgtagatacctgtttt

SEQ ID NO: 24702 - DNA, 451 bp, Glycine max
  unsure (1)..(451): unsure at all n locations
tatatgatagtgtaccttgcacttcaccaggaaagtcacttctttcatcataccaggtctgcaacaataaagtgcttcttttgatgaggattaacatcttccgaactgtgggattcttttattcttcataggactatgacaaatcctaggagaatatttcatgcttgaaagaatctcagacatagagtattaaatgaatgtcttaaatatactatttaaatgatatatcatatcctcttatgagtgcatcatttgaaaattcagacgcacagagacaaactatgatctgatatcatatcaaacactacttttatcatttgtattatttgcatctaaccaaaataattaggagtcttgattcatatttaagacataaatgtcttttgacttaacaaccagtatatgtactcatttcanacactacacaacaactataggcccaattagtaca

SEQ ID NO: 24703 - DNA, 457 bp, Glycine max
  unsure (1)..(457): unsure at all n locations
agcttatgatattggttaatgctnncttactaattttggttatttgattntgggattaatttcttttataataaactcacccctcgaaatttttgtaccgtgcggttggtacctgtgatgatcgcgggagcagaatgacaacagtagtggactggaagtgagattcttttgtggagccgccgagccggcgtgatgatgttgggattattttgggagagagttgtgttttgttaatcaactcctccatagctggttccgtaattctttttcttgatttgaagaagtaaatcacaaatttaattatatgtatgaataaatttattttccattatgtgaatgatgtgtactaggttactatacctatatatatttgtattcacttaagtaatggtgcattgtttggtgaatgtatataaaanaaaatttgaaatttctcgcggtttagagtggtgatatc

SEQ ID NO: 24704 - DNA, 389 bp, Glycine max
  unsure (1)..(389): unsure at all n locations
gagcacttnttggtcgatattgtatctcttcactttctccttgctagatcaatctaatatgcctagttcatttctaatgaaaaagaacctatctctagcaagtggtttagtgaaaagtctgcttgttgatgctcactatctatgaactcaatgcaacaatcaccttttaacacatgatctctaagaaaatgatgcattatttctatatgttcagtccaataatgcatgccagaatttttagttagattgatcacacttgtgttgtcacattttagaggaatgtgatcaaggtttactccaaagtcttcaacttgttgcttcatccagagattttgagcacaacaacttcctacaactatatattaagcttcggtagtagaagtgctaca

SEQ ID NO: 24705 - DNA, 491 bp, Glycine max
  unsure (1)..(491): unsure at all n locations
ctctaagtcacctgcggcatgcaagcttatcaattagaggaactaggtaactgtatgttttaccactcccagtctccgcagcaataataacatccttccctaacagcacagacggtacagaagaagcctgaacacacataaataatgctcacaacataagacccagcaccccaaaaaatgaaaaggactgaacttagaattgtacttttcatgatattctccattcagaatcacagttttaccttgccaacctaactgacctttaatataaacctgattggatgatagtatcaaaagcacttaaagacctacatctaggacctatctggaaaaacttttccataaacacctataggagaagaaaataagaagggtaaatgaattgagttttcccataagctgtatcaacttatgcacttcagcttttggagaggttntagataagaacatttctacaaaagttaagtgcataagttgatttcagcttatag

SEQ ID NO: 24706 - DNA, 346 bp, Glycine max
  unsure (1)..(346): unsure at all n locations
gtgacaatgatttattcttgtaacttgttgaagttagtggaacttggtggttttccaagatctagacatagtctcgtggttgagacgaactagcataaatttcacatgtcttattttctctcttgttatttgaattgacatggggtttgaatttgatctttacttttgaaaaactttgtttgttttacaaagatttgaaactatagtctgatatgtcctgtgaaaatctaatatttgttttcttaaaatttacttcatcaaacgatatctttactgtattcaaaaaggattttaagtatagtaaatatcacaagtcaacccctntttttatgatatttacttttac

SEQ ID NO: 24707 - DNA, 509 bp, Glycine max
  unsure (1)..(509): unsure at all n locations
agaccattggttgagtgccgtgcacgnaccncgnngancctctagagtcgacgctgcnggcatccaacctntaaggattggcgcgggctttagatgagacataaaccaccaggggtggggtcgggaactctctataacacaaaccctaaagggggtcgtggtagaagaacccaaccttttggcaacactaagagaggagacaaccccccacaaatgctgcgcccttgtggggaacctccctgctgccgccccccattatctctcaatgttcaccctcttaattaaaacatctccctcgttccccttgtgagccaacacacaacaacacaacacatatattttttttcttttgtttcaaaccctcctattataatctgagccaggactagctattcggtatcaccaaatatatatgatcattcccacatgggtctgtgctcttcccaagagaagaacaacaaaatattgatgggctggaagactcagaactcttgatcacaaggaatatg

SEQ ID NO: 24708 - DNA, 427 bp, Glycine max
  unsure (1)..(427): unsure at all n locations
gacactataaaactcagctggaagcaacacagcttataagagccacctttttcctcgcttaagagttctacggggggggagttcacagtacccttataatcttgggtggagttaagcacctcaaattaatgtgagcaccatattaattatcaactggtgaattcaattaagttcttaattatattccaacaacaagatcgcagaaattaacctgaaagaaagaggtttgagagggatccagccctgtgttgccaggaggaacaacaacatcaataggtgcaaccaaccctacacgagcaggagctaccaactgtatagaaaatntggataacaacatccaaaagtgaatatataggaagctcacaacttaattaaaggtaactttctctcattcaacatatatatacactacactcaatcatagcat

SEQ ID NO: 24709 - DNA, 451 bp, Glycine max
  unsure (1)..(451): unsure at all n locations
agcttaatcaattgaaaatggacggtgtgttattntctttggactctactaggggcaattttccttggcacccttaatcatgttcaatttgttggtaagtttaggtcttttaatccaaaaaaggaaacttggttaccatgtgagagtaatttggataaatgaaaatagttttggttgttatatgcatgagtatttcgatgcttgtttgcaacaatgtattatgcaaaagtacctaccacatagagagtggctacgcaatttggaatcaagaagtttcagattgtgtgatttcattctctggcaccaaagctattgcattgaaaaattactgcatacccaaaattactttaaaaaattgcaaacaatattagttggcaaaaaagcagtctaaagctactatgtcatcatggacctcatgtatcaaaagaaaatacaaatggtaatgatgctg

SEQ ID NO: 24710 - DNA, 348 bp, Glycine max
gctatgaaaccatatgcatgtatcccccaatttagtttcatctctactacaataccagttatgaaaacaatgcacgaattctaaaatgcaacacttagcggaagggtcaatttgtaaagttcatatagcaattcaattctaatccaaatataacgtattttttatatattcatattccccaagagtctacttttcaaatattattttattttcatcaaacggtatgtgaatcaaacaaagtaaaaaactgtgtgaagtatgttaaagctgaaatttgtaaaacagcatgtgtgcacaaactttcaacaccaaataatatagaaatgacgtctagagcccatactcatg

SEQ ID NO: 24711 - DNA, 416 bp, Glycine max
agcttaaagtatgcccgagtcattcatccctatgagatgttgttgaagtattggcgatcagaattgccattccttggattatagggttgaaccaagctcatgcttttacaaaaaggttcatcaagtcaagttgaaatatggaagtaaccgtcttgcaaaattggggcaaaagatgaatcgagtcacatcactgcttcgtctactgccaaacatatttaggattgttgatgtccttgttacttccagtttcaccttgacaaagatgtcatggaccatgttgaaaatctaaattgattcaaccccatatcctgcgtaaaaattcgcaatacttcaactgtacatcattcgcatgcatccatgctttttcattggtgcattgctcatacattctttccttgaaaataaataaaataaat

SEQ ID NO: 24712 - DNA, 423 bp, Glycine max
  unsure (1)..(423): unsure at all n locations
gggatttcctttagtagggaatctatccttcctatgatgtatccaaaccaagtcaccctcattaagaactagctcttttcttcctctattgcctttagttgaatacacctttgtttggttctctatttggttcttaaccctctcatgcatcttctttacaaattctgacctagattccccttctttatgtataaaaaaagtgtccagtgggaggggaatgaggtctaacggtgttaggggattgaacccatagacaacctcaaaaggggactgcttggtggttctatgaacccccctgttgtaggcaaattctacatgagaaagatactcatcccaagacttatggttgcctttcagaagagcccttanaagggtggataaagacctattcactacctctgtttgcccatcagtttgtggatg

SEQ ID NO: 24713 - DNA, 379 bp, Glycine max
  unsure (1)..(379): unsure at all n locations
atgctaagncncgncgngagtggntcgacccgaatcgggagtgcatcggataacattttgtttgcgattgtataggctccgctaacgcgcgtgtgttgctgggttctcttcatcaaggtaacactaacttctatacttcatttgacctattttatttcttctgggtagaaataagtaatgttgcatgattcttagtaaggtgttattctgtttgcactataacagagaatcaaccatgatttctgtagatggatccacagggttgatgaaattgcctgcaattgctttaacattttactgtccaacagagtgggcttcactattgttcgtttaacatattctctgtttcttgagcaagtaatgcttaagtatagataat

SEQ ID NO: 24714 - DNA, 444 bp, Glycine max
  unsure (1)..(444): unsure at all n locations
agcttagaaagaatntaaaaaataaaggttttctgttgaatttttacctcagcagcatccatcagctacaagcttgaattattcctgaatgaccaaatgctggagaattgtttctcacacgggtttcacatttgggtgctgctgctggcaataccgtttcaaaggcttcaactagcagtgccacctttttcttcctagctggagcaagctgtgtcacaacttgtcttagagcacaatcaagcatccaatcctctgagttctttctctcatccatcatttgatgcctcaggtcaaccttctcttgtcctggctcangaaccaatggcagaaaatttggctcttttgggttgaactntctcatttcatcatcatcatcttcaacacccttctttcttctaatgccatctttccaattcttgctcgtgctttcctcttcagcactta

SEQ ID NO: 24715 - DNA, 429 bp, Glycine max
tgtaggattatggggtacccatcacatgtggtactatgtggcggtcgggcgatggtgcacaacaagctttccacatccataatgcgcgcataaacccaccatcccctgttgcccacctccaactgagctcacgtactcccacgtagcccatatcctcgtttctctcaacaccgggtccccatcaatcctctcaagcttccacaacatccaagcaaaacaacattcaaacagcacaagctatcacagccaagcaaaaacagagcaaaggcagaaaactctgctcaaacaccaaccaaaatcacagcttttctcacttaaagaccacagtaacaattccttcgatccaattcgttaaccgttggatggactccaaaattttactggaagtctatagtgcataagcctacaatgtgaccgttgggatctact

SEQ ID NO: 24716 - DNA, 512 bp, Glycine max
  unsure (1)..(512): unsure at all n locations
tgggacttattcactgcattgacantcttgtaggnaacnngagacccaccagagngcacccgcacgcatgcaagcccggccccaagattctttagaangtttgttaaacccggcgagccaacaagacgagcccataaatctagggatgaacgccacgaatacaaggacagagcggagaatacagggtattcaacaaatgcttaagatcgtcgagtatactagtatcatgtgtatcaaaaaataacctctctaatagtttgaagagctcttatgtaacgagatagccttttatttgcaacatcctatatataacaaaaaaaagatcatagtgcgtagttgcaatatgctttttacatgctcaccttgtcattatgcaaaagcgcaacactataacatgctcatatctcttcctgtctttcgtgaaagttgtccttagcttgtatttaatttgcagcgatgaaatattcaaccaattgttttgtccactgattgttactatggtaaacactgcn

SEQ ID NO: 24717 - DNA, 277 bp, Glycine max
acttctgttgtgcatggcaggaacatcacatggtcacccacaaatatttatagaatatgcacttgattcgtaattttaagtgtggctattggcatgtgggccgactgtaatttatactactgatctgtctggcttttgaactagggtctagtattggtatgagctgtttccttttacacatatatttcaggactatatgcaagatatttataacagctatgttcattggtaaaacatgtaaaactatactcttcagacaatgtgaacatgtgattct

SEQ ID NO: 24718 - DNA, 457 bp, Glycine max
  unsure (1)..(457): unsure at all n locations
agcttgtgcattcaatatcctaatgagggtgttctttatgttttcaagactggactaatacatttgctgcccaagtttcatggtcttgcaagtgaagatcctcataagcatcttaaggagttccatattgtctgttccaccatgaagacccctgatgtccaggaagatcatatctttctaaaggcttttcctcattctctggaggaagtggcaaaagattggttgtactaccttgctcccaggtccattaccaactgggattacctgaagagggtgttcttggagaaattcttccctgcatctaggaccactgcaatcaaaaaatacattttatgcatcaggcaacttagtggagagagcttgtatgagtactgngaaagattcaagatattatgtgcaagctgtcctcaccaccaaatttctgagcagctccttctgcaatatttctatgagggac

SEQ ID NO: 24719 - DNA, 452 bp, Glycine max
  unsure (1)..(452): unsure at all n locations
agctntaaaagtatgaatttgcttgctctttcttcttatctagttggtatttgtatgttttgatacacatcaaaactccattttttgtacaaaattttggcataaattaggaaggaaacttgtgttgtgtttcccaaggcagctaatccaaatcaggttagtcttaatatgtgtttgtcacaataacttatcaccaatggtgagtagcatgatcaagtcaatggccaagatttattatgttaagtgcactgttgaaatggatttagctaggagagacctttaactcaatgggatgatgtctcattattaaccaaacaccatgccaattagcttcatttgattttgttgatataataatactaggatatcaagatcaacccgttttaacccttcaatctcatagcataattatagtaggttgttattgtgtgttatgcaatcaagtacttctg

SEQ ID NO: 24720 - DNA, 464 bp, Glycine max
  unsure (1)..(464): unsure at all n locations
acacagattcaatgatggttctatcaaaattgtcttcttttaattatgtggtgacatttttgtaaatagtagtaatattttaacaaccatttaaaaaaaaacatcattgaaatcgcaaattgacgacggtttttaggaaaactatcattgaaatagataattcaacaatagttttaaaaaatcatgtttgaaagtgaggagttttgacttttgagtctcgtgccctttaagagtctcactccatctactgacaccctcttagagtctctttgcgcactctctcactctgtttcaattgcaccctaaaatgtgtcaccgtcgaagctgtctagcattgccatcgatgcttattttcggtggcaactgtaacagtcataactnttaataaataaataaggaatcaatangttaataaataaataaataangtaaaaaaataattaggtcataaattttcactatat

SEQ ID NO: 24721 - DNA, 450 bp, Glycine max
  unsure (1)..(450): unsure at all n locations
agcttcaccacttccgactaaacttccagctggagttcatatattctctngngcttggcctggtatgtataatttttcaaaaaattgctgtctggttttttgtttgcatatcctgtttttaactggcatgttcttttcttctgtaactgcaaaaaaatatttacttgttgagtggcttctaactttaataatctttaacaatttttaattaaggaatgatgcccattgctgattgcatgaacaaatgaattggaatccttccaatcctttgaataacttctcatgctatcatgcatgaggaatatagtgcaattttattcatatgccgacatatataaattcttgacccaatcaaatatgttattaacttattatctattagtatgaagttctggtttgaatgttacatttcatgtagaagaaggtggatctgagtatcccagacacatg

SEQ ID NO: 24722 - DNA, 454 bp, Glycine max
  unsure (1)..(454): unsure at all n locations
ctaagctgagataacttgttggagagctaaagaacttttgtgattttttgaaacttgattgctaaccaaaaactgaacttagtctgaatggtagacacaaaccaatataaatatgtgtcttactttctttttagttatcttttgtcttaaactgacatagtgtttgaatttgatcttgtttgaaaaacatattctattttttaaaatatgtttccatcgtttaaacttgtttttgcgcaaatttgttatctctttttattaagttatacttcaaatgataactttagttttcacgaaaaaagacttaagaaaattctaaaattacaatttaaccccttacgatatttctatttgtagttaccttttttaagactttacttttgatcacttaatcacattgaaattcatagtctattaaatntattattaaataacctaattattgcacaagttt

SEQ ID NO: 24723 - DNA, 393 bp, Glycine max
  unsure (1)..(393): unsure at all n locations
agcttgaaattgaacaacggaagctgncgatatatttatatgttcataacttatgacacaaaagtccgattcaggcgcataatatatcgagacgctcgaaattgaacaacgaaagctctcgaggaattcaaatggtcatatcttgtcacacggaagtccgattcaggcgcataatatatcgagacgctcgaaattgaacaacggaagctctcgagaaattcaaatggtcgtaacttgtcacacggaagtccggttcaggcgcataatatatcgagacgctctaaattgaacatcggatgctctcgagaaatgcaaatggtcataacttgtcacacggaagcccgattctggcgcataatatatcgaaacgctggaaattgaacaacggaagct

SEQ ID NO: 24724 - DNA, 424 bp, Glycine max
tgaaattgaacaacggaagctcttgagaaactcaaatgtgttcatctcgtcacacggaagtccgattcaagcgcataatatatcgagatgctcgaaattgaacaacgaatgctctcgtgaaattcaaatggtcataacttgtcacacggaagtccgattcaggtgcataatatatcgagacactcgaaattgaacaaccaaagctctcgagaaattcaaatggtcataacttttcacacggaagtctgattcaggcacataatatatcgagacgctcgaaattgaacaacgtatggtgtcgagaaattcaaatgggcataacttgtcacacggatgtccgattcaagcacataatatatccagatgctcgaaattgaacatcggaagctctcgagaaattccaatggtcataacatttcacacg

SEQ ID NO: 24725 - DNA, 476 bp, Glycine max
  unsure (1)..(476): unsure at all n locations
cctgcngcatgcaagcttctagtaatcgactgagtatggttcaatanattctcaaaaccgactctaacagcatgtgtcacaacttcagatgccttttcgaagccattagcattcccattgttgaagtttgaattcgtcactacggcaccaaatggattggcagcaaaagaattatcacccagagcgtgctttctaagaccaaaataaacataaaaagtaactacctaaaacagctggcgattcaggaagcataaattatagcatgaatagatcaagacataagtggaaatgaagattacaacaaagtacaccaaaattcatcaattagcaggcaagctacccaaaacatatgcagaattcagtgtttaaataaacatcagcatatgacacaccctattaataacatgtcatatatgctgagctcacctgggctatatatagttattctatattataccagatgtataatctattat

SEQ ID NO: 24726 - DNA, 439 bp, Glycine max
catacaatattaatatctatattttatattatcaataaactagaagatatttcaaatataatttttaaataattaatataaaaattaaaaaatctactatacataacaaatgacaagatataatggcatgacaatacaaaattaaaaatataattaacatattcttaattttattaaacattaaataatttgaaataaataaaattttaaaatattatttattttaaatcagacaacatgtaaatgtccaattaataattctgcaatttgttaaatataataatgaatagacagaaatagttaaaccaacttattaagttgacacatagtgttgaaagatatgattacaatgctaggccttttttgtttttaatacttgggaaatcttaactaattagacttgattaaaaataaataaatattatttacaacatgacta

SEQ ID NO: 24727 - DNA, 449 bp, Glycine max
  unsure (1)..(449): unsure at all n locations
agcttgaagctcaaggataagtntgtagattttntagaaaaagttntggcatttacatgcctaactcctatgagtggcatttgtattggttgttaacttgattgttgcatcttagtacatttcatatttattttgcattgtgcatcatcataatgtgagtgaagaaaattttctaagttagaaaaatttctttagaggcaaaactctctgttttaatcgattatagagttgtcgtaatcgattacaacaagttttttgaagcttagagagttacgtctcatatcggtttaatcgattatagtagtattttaatcgattaaactattttttgagacaatggctgatttttcaggagtctctactttaatcaaataccaagtggattaatcgattacttctctctcgttcaagtgttcagaggtgaacaataactctntaattgatactta

SEQ ID NO: 24728 - DNA, 446 bp, Glycine max
  unsure (1)..(446): unsure at all n locations
tcaagccaagacccgattctcgtgcatgcagaggcttcctaataagaaaaatgccaaactccctcaaaaaatctgatttcaaccttaaataggtgggttggtccgtgctcgcgcgcttaacacaaatttgaattgcttagcacgcatatgtggatttcggcttagcatgcttctctagcttagcggatgagctgaagtggtgcgtttgatgacctggagcggtgtgctcagcgaacctgacagctcatcttcttctagattcttcctcgcgcttagccactgagtgttgcgcttagcaaatgctcgctaaaccagcagattggcttcgtgagaagggtgaaaacaacattnntgccaattgcctaattaacctgaaattgagagaaattgataattaaacacacananaaagtataaattatctattacctatattaaatagaaag

SEQ ID NO: 24729 - DNA, 446 bp, Glycine max
  unsure (1)..(446): unsure at all n locations
agcttaaggtatgagaatctaatgtataattgggtttatatgcaacagnnntgcggacagtttccttagcaataaattatctcattttcgtacgtataggttggtgggtagctaagtaaagcatgttttttctcattgttgtttaaggacaaaacttaatttactcaacggttctatcaggaattcagcctgaaagttctttcacattaagactatatgagttctcttctcatatcaattctattataattcattttatatttactactactgccttcgcatgcaattgaaaaaataaagaggagatcataataattaataagacattatttgaattggaaaacaaatatttctggcatattagtgaatatataatagtctaagtatagcaagatttcgagcaccgtttcagtcaacttcatctaattntacatttatatgaatac

SEQ ID NO: 24730 - DNA, 386 bp, Glycine max
aagatctttcaaacatttaaacgggagcatagtttacttatacatataattaatttcatagacaatcatgttattacttaaactttagacatggtccacctaaaatttccatccttcctaacaagctaaaccaaagtacctagctagatgccttttttctttttcccatatttggttgatggtgttgagatggaatgtgaaatcggccgcacattaatttgagctagacttgcgtgaatagttaaagaccccaccttcaccattaacatgtcatgcaaagccagatcgtgcggctatggatggatcagtgttcttttgtcgatcgtcctttctttttccatgtgttacagcaagatctggttgactgaatggttaccatcgcgtga

SEQ ID NO: 24731 - DNA, 398 bp, Glycine max
agcttataacactactagtgctatttattgacaaacattaagcatctaaagaagttccaacataacaacaatagtccaaacccaaacacaaaacaccaaatttctcgaaaccaaaccaaatgaaattttgaaaaccatacacacataaaaggattgattggaatttgtgtggtttagtgatgaaatttgtggtagacatttgcatatcatggttaagactagaggattaggccatgcgttaggtaaggttattgctagaggtttggggagaggggatggtgatgattttgacggtgctccccagcgccaaaggccgactgcattggcatgcaggcaacgggtacctgtcattgttgacgatgttgtgctgcggtatctgtggactcgcctgcggtacc

SEQ ID NO: 24732 - DNA, 77 bp, Glycine max
ttaaagggtcgctataatagtgcaatttggtgcttaacgtatgttatgggttgcattagaacgaatttcacatatgc

SEQ ID NO: 24733 - DNA, 448 bp, Glycine max
  unsure (1)..(448): unsure at all n locations
agcttacttgtatgatggctactgttgaagatantggnacaatcgaggctttctataatgcaaatctgggaatcaccaaaaagcctgtgcctgacttcaggtaaattgcctatttgatatatccatcatattgacaaatgtatttcaatgatagtgttttgtggttctgatgtttatgtgttcatgcgttttggcatattgattgcagtttctatgatcgttcatctccaatctacacccaaccacgatatttgcctccctctaagatgcttgatgctgatgtcactgatagtgttattggtgaaggatgtgtgattaaggtaagcatttcagaaccttcacattctactgatctgctctgtacatgagaattatacaattcttaacaaagatgtcaaatataatgagattaatttatttataggaaactaaccttgtattccatact

SEQ ID NO: 24734 - DNA, 425 bp, Glycine max
tcccattacatgggcttgatccactatgtctaatctatcctcctcattcaaatcccgaagctcttttccttcaagcacattatcatattctagtcctagtccacaagctatgcctttcacttccatgatgccatcctccgagaccagtttgatctgtatatttgcatcattttttttcagattttccaaacctgattttatggattctagactagtagtgcatttgagacctatcagtcctaacaagatcagtcctttctcaagttcttttccatctgtttctctataagcaaaagcaattggctcaaggccaccatgcttcatctcttcaatcacctgcccaaatttgatcttctggtttttgatggcatggaattcccctgtactatcatagtactgtgaacacatatccaatattgtggatg

SEQ ID NO: 24735 - DNA, 188 bp, Glycine max
tcttatgatctctgagtgaagctccatgattattccttcggtttattattacattacttctatggttccatttaacattatttcttatttatctatctatatatatatataactgtatttctatctatatcattctcaccccactccccaacagtgtgaaagatgttccacatgaatctgggaaatat

SEQ ID NO: 24736 - DNA, 347 bp, Glycine max
ctcagctgtcctggttagacatgattggacatgaattgttatcttttatgtattaatttgggcaaaattggatgagggaaagagtggttttcgaaatctgcactttatgcagaattttgctgttggaaatgtgcaacagaattttgtataagtgcagaaaaatgcttgtgtatggctggttgtgaaaagggtagtacatatggggttctggacaattgctagcagatcccaacggtcaaaatgtagaattatgtactagagacttccagcaaaattttcgagtcgatccaacggttaacaaattggaacgaaggaaatgttactggggtatttgtatgtgaaaagct

SEQ ID NO: 24737 - DNA, 429 bp, Glycine max
agcttatctcatttcattttatatcaactattgtacacaaggaattacatgataaaatgctgagagagtagcataaaatggagccaccttgctaactcatgagacatcccatttgtttgtctcttgaccaaaacctattccaaaggttgaaaattgggccaaaacctgttagacaaatgacctcagataacttaagaaggggggttgaattaagatattgcaaactatttccccaattaaaattctattttaatttcaatgcaagttacaagttcccttaaaaatgaactcttaaataatgattcaaataaaacaatctgaatataaatgcaaagcaataagaaataaaatagtttaagggaagagaaagtgcaaactcagatttatactggttcggccacacccttgtgcctatgtccagtccccaag

SEQ ID NO: 24738 - DNA, 515 bp, Glycine max
  unsure (1)..(515): unsure at all n locations
agggcccttgnnnntttgttgaccttacagcccttgcatntacgcgacactatacaatactcaagcctggactcatgagtggtaagatgagggccaaatggattggttcttttgnngnacnaanngntnttcttatggtatagntgagaacaaaagcgactccaaaaacaagagcttaaggtcaacggacaccaacttaagccattcctcacaaacccttctttaatggacgtaatggtggaagagacttncttactccaccatactcttnctccaccatgacttanggactntttcttttcctatctccttctttacttttattacatttgtccgattctatttgatggtttaattacttttaatcttttaattgtgctacattgaggacaatgtattgttaagtatggggggggggngagttttntnnntatnntttnnntnnntttttnttttnnttttttttttttttttttttnttttttttnttttttttttttttttatttatttttt

SEQ ID NO: 24739 - DNA, 432 bp, Glycine max
  unsure (1)..(432): unsure at all n locations
agcttgtaggattatggtgtatccatcacatgtggtactaggtggcggncgggcaatggtgcacaacaagttntccacatccacaaatcgcgcataaacccaccatcccctgttgcccacctccaactgagctcacgtactcccacgtagcccatatcctcgtttctctcaacaccgggtccccatcaatcctcccaatctttccccaacatccaagtaactcaacattcaaacaacacaaaccatcacagccaagataacagggcaaaggcagaaaattctgcccaaaacaccaaccaaaatcacagcttttctcacttaaaggccccagtaacaattccttcgttccaattctgtaaccgttggaatcgactccaaactttactggaagtctctagtacataagcctacattttgaccgttggatctact

SEQ ID NO: 24740 - DNA, 438 bp, Glycine max
  unsure (1)..(438): unsure at all n locations
tgtagaatggctagacatgatacatgtcagggttttttttgtgttcaagataaaaagggatgccccacattatttccatgacacaaaatgcaaaaaaatgatgatttggaaactttatgcaaaactggtcatgcatgcacctatgcggacactcaagtgtcaaatttttatggtcatgtgatgctagggctcaggattcatttcctctattttaatcaacccaatgtttccaaaatatgttcttttatcaatttgtgcattcatccgagtccatttcgggcgtccggggaaatttcacagcattcacccttcaggtgtagacacattntccacaaattggttatgatcaatgaactnntttttggaaatcgtctcttttcaaaagcatgtcgtttttagctagacaactattttcttttttctccttcttttttttta

SEQ ID NO: 24741 - DNA, 223 bp, Glycine max
  unsure (1)..(223): unsure at all n locations
agcttcttggctatcctcattccagcgatctgntttgtancngtgctagaganngaacaacggctcacaaatggcggtgagctgcgatatgaatctggcaatataattcaagcgtacctggaagcctctgacttgcctctcagtacgaggttctggcatctcaaggatggccttcacctgtttggggtcgacctctattcctttctgactgacgactaaacca

SEQ ID NO: 24742 - DNA, 508 bp, Glycine max
  unsure (1)..(508): unsure at all n locations
aggaatgtggggatgatgctactatggcttgcannatcggnannaancaaangnaagcntggactcaagagagggaagtngagggctacttagtttnggtttcatttganggaaccaagggcgcgctcttatgggatagncgagatcaaaagcgactccaaanacaagagcttcaagggcaacggacaccaactatatccatttctcacaaacccctctttagtggacgtattggtggaaaagacttacttactacaccatactcttactccaacatgacataaggacgaagaatttccgatcaacttctttaattatattacatatgtccgaatctttttgaggctataaataccttaaactttaaatgggcctatttgaggacaagaatttgttaaattggggggcgggagataatgtcattaattgttactattgtctcgacgtatttgaacatataatcatgtacataataagtgatagataacatgggtcgatacctctagaa

SEQ ID NO: 24743 - DNA, 437 bp, Glycine max
gtgcaagcttggaaaaatatttctatacaaaagttattcttataaagcgactaacaaactcccccaaatttacagttttgcttgtcctcaagcaaagaaagaacagttcacttgttctcaagtgacaaagagagtggccaatcaaaagaaaatggtgtttggttcatcaaggatatcaaccatatgaactaaatatcatggaatgcttaaatcaatcacttctaacaagcatgcagcttttcaaagataggatcacaagtattagagtcatagctgatataagctagtaagcatgacaaaaatcaaggaatgatcatcaacccaaaccttacagtctttgttcactcaaactcaagtgtttaggctatccatcataacaaccacacagttccaccttgcattcatctctatcatacagtatgacacacaaaatgaat

SEQ ID NO: 24744 - DNA, 450 bp, Glycine max
tgtctgtcactgctggcccaggatatgccaaaacaagcctttatttaatgaacaacttacggtaagatactataatatgctatagttacataataatatcaattacatataactgttttgttttgtaattagtcagtcatgcttagttacctcaacgcccttcttctcaagactgctgtgtaactcttgaaaggcttggatgccacttgtgtctatgtcggttaacggctgcaacaaattaaaacaaataaattaataataataataatagaaaaagctgaatgaaaggttctactgcaggagttgtatgttaacaaaggacaaaagtagagagtctcacgtgacatttcgactatgaaaaactggattattgtgcggtagtctcctttatcttgttcttcttcgtccatgaaccatcttaatgtcctgcaagagaatagttcttaagca

SEQ ID NO: 24745 - DNA, 436 bp, Glycine max
  unsure (1)..(436): unsure at all n locations
agcttgccacccagctcgcccaggcgagctttgatctcccaggctagcaaggttacttcctccagaagcaacagccttctggaggaaggatctggaaggcccaagtgggccagattgctatttgtacccccctttttactaaatgcacccccttctatttttttggtaattctttttccgtaacattacgaaactttacgaatttcgtaacgatacttatttcccttgcgcaaggttacgaatccttacggattatgtatttactcttttttagctttcgaagaagttacggaaactcacggattgcgcaaaacacctcttttcgatttccgtcaaattacggaattntcacgaatcgcgtaagcctgcttccttatgattctcggcacgtctcgggacttcacatattgtgcaacaaaaggcgccaagtatctcg

SEQ ID NO: 24746 - DNA, 149 bp, Glycine max
tgtccacaaaaatagggctttgaaagtttatcatttcagttctcctactcatagtagaatggatcatttttaaggtccaacgccttaaaatgatgactcttcaaggcaaaagaatcgcttgaggcacacataagacagaactgcgtaag

SEQ ID NO: 24747 - DNA, 448 bp, Glycine max
agctctcatgatcttgttcagagttacttatttatttatttcctatgcttgaactttcctagaccaaagtaagctccatctccataacaatgatatccatgcacatatggtgagcacctaggatgcaccaaaactgggacaaagacatatacgggtacgaggacaaggacgaaaaatggtaagtctaaaatctcaagatataggtacgactaggaaactgtttttttaatattttttattaatttaaaaaaactgaaaaataaaaaaaaaccatgagaaataagtagcaatgctagtatattataaaatttaagataatccaatggcctaccaaaataaagcattaaggtgcaaagtgcataattaacattaaatagtcctacaagcaagttagttcaatgtcttaaataacaaataatatacaacatcaagcattgtcaacattctc

SEQ ID NO: 24748 - DNA, 417 bp, Glycine max
tgacgttccaattgctggaacacagagctgccactctcctcttgattatgatgtagaatctacagccaacgacttagaataatggggtcattccgaaacatctcctgtagttcttcaagaaggtgagaaattagaagatttcagtgcaaatgaatctcatttgactgttgaacctgatcctccacagctcaattctggaatcaatcagagaccaaaaaggatcactatacctcctgaaagatacggatttgaagacatggctgcctatgcattacatgcagttgaagaaatagattcaaatgaaccaaccacttaccaagaagctatcaatcatcctgaagctgagaattggttgttagctatgaaagacgaaatggaatctttgtataagaatcagacctggaaacttgttgaact

SEQ ID NO: 24749 - DNA, 383 bp, Glycine max
  unsure (1)..(383): unsure at all n locations
gctaggaacccaacttagcttaatgcaagaaacatctatggtttgaacccaaaatttggttttagaattggaaaagcatgaaaattaggacttgcttgcgagagtttttacccgaaattgttctgcctcatgattgatactttgcacctaggtaacgtgggaaatgcttttcaatggtatgtatatataggtaaataaaaggggcatgaaattctttgcaaagggtgaatgaatattgaggtcgcttcctaaatgaatgtatgatagcatggaattctcttttgaatgcaagtgtgtgcaggatgtaattagctttccaatatgcatataaataaatatgagagaaacaantaaatttgtatgatatatanttgaaatgtgtg

SEQ ID NO: 24750 - DNA, 446 bp, Glycine max
  unsure (1)..(446): unsure at all n locations
agctntctctggtctacaagagctctttctttctcatacacttcttctgcaaatggaaacacgttctacaaactcccaggtggttgtctcaaaccaggagagaatggtaagatcttgcttatttttttctaaatataatagtctgaaaataacaactcatgattatcttaatgtacatttttgtgggcttgaagagaaagttgactagcaagcttggtgctaattcatcagcttttgtgcctaactggcaggtattattactttttattgttaaatttggcagttggtgtctatttgtgtctttattgttgtcatttgcatgtatccttggaaaactgcagataggtgagtatgtagaaatctggtgaaggctcttcttttattgaagtacactgctaagccacaatacaagtgatcgaggccgtacccgaatcatataaacatga

SEQ ID NO: 24751 - DNA, 378 bp, Glycine max
  unsure (1)..(378): unsure at all n locations
aaaatgacttatgcctactgacaaaaaccatcactagatgttaaaaatgtgtatgtaaatgtaataaagactttatcctacagacattttggtcgtcaactttgaaggggcgtacaatgacggattatcgactgtcaatataggttttacctactgatttactntcacctacaattcacaatgtgtgtaggtaaaagtcattaatttatatctacaacctctaactataggtaaaaatattatcttgtacctacaacctccaactgtaggtaaaagttattaacttatgcctaccatataaggactatagatacangccatctacttgtacttatgcctactgacananatgaaacatatgaaccaaggaacaagaaa

SEQ ID NO: 24752 - DNA, 453 bp, Glycine max
  unsure (1)..(453): unsure at all n locations
agctnttatccatggcctcctatggtggttagcttcttctagactcatcttctccttgaagtggcatctcgtctctctcttccttctccattccgctgccattcatcttccaggaagcaaaggaatccattgatgaagaagatcctaggcctacaagctcaaatggagcttacatcatgtggtatcaagagcatcttcatctaggtgatgttcatttgcttcctctatctttttgttcggtgaattctctttagttccttgttcttcatcttattctccatgtatatcctccattgtcttgtggtttggtgctgtttagagtatattcaaaaaaataaaccgattaaatcttagatctacatttgttcttgcatttctctggttcanattttgtagatctactcttgaatcttggttttgtgttgattttaggttctatcaattntcattcat

SEQ ID NO: 24753 - DNA, 346 bp, Glycine max
  unsure (1)..(346): unsure at all n locations
agctntataaatcaaactttgccactggttatcgattacaggaaactggtaattgattaccagagagtaaaaactctggtaacttagaaaatttttagagaaagtcttttgaaaaacaaaactgtgctatgtttgttttttgaaaaatcttttcaatacttcccttgtgaagtcttcttgatttcttctcttgaatcttgaattcatcttctcttgaatcttgaaatcaaacttctcttgattcttgaatcttcttgatttcttctcatgaaacttgaaattaatcttgatcttgaacttgttgactcaatcttgaaatcattcttcgggttttttgtcatcatct

SEQ ID NO: 24754 - DNA, 372 bp, Glycine max
  unsure (1)..(372): unsure at all n locations
ttgatcgtgcttgcgcggttagcgcaactctggaccacttagcgctcattagtggattttggcttatcgcgtgcttttctcactcagtggatggattgaagcgatgcactttgctggatgacccttcgctcaatgaacatgcacaactcatccttcttccaaattcttcctcgcgctcagccgaggagtgatgcgctcaattggatgtttgctaagcctaaagattggcttagcgagaggatgaatatcaacacttcacaaactcgcctaattaacctaaaatggagagaaaatgattattaaatgcacaaaatggacgtactaagtatntattacctatcgttaacaaaagtaattacaaaactacaaaac

SEQ ID NO: 24755 - DNA, 423 bp, Glycine max
  unsure (1)..(423): unsure at all n locations
agctgtttatgaaaggagatgacttttcctttcgagtgtgaatctcaacgntcagatacactggtaatcgattaccaatatctagtaatcgagtacaccatttcgaaatcaattggaacgtcgcaaatctcgttgattaccagagaatacaaactctggccactcagaaacttttgagaaaactctattgaaaaaacatacatgtgcgatgtttgttttctgataaaacttttcaatacttcccttgtgaagtcttcgtgatttcttctcttgaatcttgaattcatcttttcttgaatcttgaaaacaaactctactggattcttgaatcttgctgatttctgcttgttgacttaatcatgaaaacattcattgggctataggtcatcaactttgtcattatcaaaactacttgaatcaact

SEQ ID NO: 24756 - DNA, 388 bp, Glycine max
  unsure (1)..(388): unsure at all n locations
tgtaatcgattacacacatactgtaatcgattaccttactttgtttttagaanacattctcaacagtctcatctttttatctgtttcttaaatggccatcaaaggcttatatatatgtgacttgagacacaaatttgaaaagagttttcaagaacaaagaggtcttatcctcttaaaaagcaaaatagtttctatcctcttacaaattccttggccaatacacttgtgattcaataaggaattattngagtgctcaaattgttcaatctatctctttcaagagagatttcttctcctcttcttctttattctgaacagggattaagagaccgacggtctcttgttgtgaaaagaattctaaacaacaaggaatgattgtccttgtgtg

SEQ ID NO: 24757 - DNA, 459 bp, Glycine max
  unsure (1)..(459): unsure at all n locations
agctcgcaaaatatagtaaggaatgaaggtttttatttaatgtaccgnggcctttcaccaacaatagtggcattacttccgaattgggcagagagtttcttttccttttgccactctaactacattgatcaatgtctattgcaactaaagatgcaaggctctgtgaagcacggtttggatttacttttgttgtgccttgtatcagcattcattatccttccatcttctcatgtgatatgcacaaactatacataaacatagacgaaacataattgataagcccaaaatttggagttacacaggtctcatgaatagctgatgattatcttcagatcaatttttattcgtcttatgatcctctctaggatacagtctttacaagctacctgattgttcattaccactagtttggaaaattcttggtctccttagtgcttattccttaacaggtgctatcac

SEQ ID NO: 24758 - DNA, 370 bp, Glycine max
  unsure (1)..(370): unsure at all n locations
tgtaggattatggngtacccatcacatgtggtactatgtgtctgtcgggcgatggtgcacaacaagtttttccacatccacaatgcgcgcataaacccaccatcccctgttgcccacctccaactgagctcacgtactcccacgtagcccatatcctcgtttctctcaacaccgggtccccatcaatcctcccaagcttccacaacatccaagcaaaacaacattcaaacagcacaagctatcacagccaagcaaaacagaacaaaggcagaatactctgctcaacacatcaaccaaaatcacagcttttctcacttaaagaccacagtaacaattccttcgatccaattcattaaccgttggatcgact

SEQ ID NO: 24759 - DNA, 443 bp, Glycine max
agcttctacttatgtgtaggttgggctttcttcactttcttgtctccaacgcgagctttgaccactgttcttccttcccgcgatgcttcttttcatgtccgcctgagtgggcttatagcctaaaccatacttcccacgatttccttgggtatttatcaggctagttatgccgccgttgtttttgcctaaacccatcccgggttcataaccgttccccaacataactcgggccatcattaccgctgcatcggacagacaaggttgcccaaagagggagtccacggaggaaatgctgaccacctcaaaagactggaaagcagattctaacgattcttctgcggcttccacataaggcatggaggatgggcagcttaccaagatattttcctcgcctgacacgatgaccaagtgccgctccactacgaatttcaacttttggtgga

SEQ ID NO: 24760 - DNA, 406 bp, Glycine max
  unsure (1)..(406): unsure at all n locations
ngtctanaggtgtgtttgattcccatatcttctactttggcaaaacaaaatcaaaattgaacttctcttgttcttcaggcttggcagcagtatcaccattcctatcattaataattgattttgggtctttaacggtttggacaacctcagtgatagaacccaaagctttctccttttgacgagctggtaaatgatattaaatgattacttttaaagtcagaatatcacatattactaataatggcttaacatattaccatcataacgaattaatgacttangtaatccatttggtcgtaatgccttttcattcacgccttctgtatacttgctcacttcaacctgcattctgtagtaatagatgtattagcagtaagcatatttcagctgttacttaatactaaaa

SEQ ID NO: 24761 - DNA, 389 bp, Glycine max
  unsure (1)..(389): unsure at all n locations
agctngagatgaggaatttttgaanggtgtttcttcctgcttttattcgttgaccacaaagtggtacctggagataagtcgcgggggtcaggagaccttggggacgtcaggtggggtgctattgcccaaaaccaagcttgaccaatcccgacccaacccgggcatagtcagtcagtgagaacctgtgatgtacctaagcaggcgagctcctggcagtcaacagataaaaggaacaaagaccacaaagtaaggaggcttgtggtggctggccagctgtgaaacttgattgatatgtgagatatggcctctggtaatcgattaccaagggtgggtaatcgattacaaggcttaaaaatgaagacaggaggctaagatggtctctggtaatc

SEQ ID NO: 24762 - DNA, 353 bp, Glycine max
  unsure (1)..(353): unsure at all n locations
acacttaaaactcagcttaccacgttctataaaccgctttgttttttatgtttataaaaactgcctttgtttgtaagcctattactacggttatttctaaaaaccgcctttgtctcatttataattattttatttcatgcttttcagaactcatattgtctttccatctcccttctcccttcacgctgttgccgtgacctccgcaagctcgtccttgaaaggggaaggaaggaangcaangaangagagtggatctccaaaaggatcctcctacctcttgcagcgtcggtattttttttagccgttcatgttatagttctgtgtaggttaacaatgatctaagcttcactctc

SEQ ID NO: 24763 - DNA, 417 bp, Glycine max
agctctgagcaacttcaaacaacaataacgttttttctgatgtctgatagagacccgtaatatatccagacgctcgaaattgaataccgaagctctgagcaaattcaaacgacaataagtttttactcggatgttcgattgagtcccgtaatatatcgaaacgctcgaaattgaagaccgaatctctgagcaaattcaaacgacaataactttttactcggatgtctgattgagtcccgcaatatatcgaaacgctcgatattgaatgtcgtagctctgagcaaatacaaacgacaataactttctactccgatgtctgactgactcgcgtgatatattgagacactcaagattgattagcgaagctctgagacaattcagatgacaataacattttactcggatgtctgagtgaga

SEQ ID NO: 24764 - DNA, 417 bp, Glycine max
  unsure (1)..(417): unsure at all n locations
cctgcggcatgcaagctntgagggtgcgtagcccaccatcttttatattagagtatttataatgtgtctaccatcacgatcatcgtctccctttccatcattgggggtaccacctgggccgccagatccctccaccttttgggcgtgttctttgaaagatccgtccccctttttgcaaatgttctgtagttgcatcctatccggaaccatatcaaaattgtactgatactgcctaacaaaggcaaccattaggtccttccaagaatggactcgggaagattccaagttagtgtaccacgtaacagctaccccagtaagactttcttggaaggaatgtattaacaattcctcatcttttgtgtattcccccatcttctgacaatacatctttagatggttcttgggacaagtagtccc

SEQ ID NO: 24765 - DNA, 385 bp, Glycine max
  unsure (1)..(385): unsure at all n locations
ntgaacaatatacttgcccttcatttaactgtctctgggctcgtctgtcacgcacaacaaagtactttcgacacctactatacgttgatttgaccaatgctgttatgggaatgttgcgacaatccttcanaaccttattgatacattctgagaggttggttgtcatgtggccatatcgacgtccttctctatcataagccatcattcatttctcctttgaaatgccatcaatccatgtagctatggctgaactcaattcacgaaatttttctaaattttgatcaaaaatgtgcttgcaaggagtgtaggctgcataaaattagttatcaataaaaattttaagtatatatgaaagttaataaacgtcaccatcaatatcaaatct

SEQ ID NO: 24766 - DNA, 423 bp, Glycine max
  unsure (1)..(423): unsure at all n locations
agctntcttggaagatatgcatcagtagtttcnttttcctaaagtatgcccccatttttcggcaatacatcttcaagtgatttttggggcaagtggtccccttgtatttatcaaaatctgataccttgaactttggtgggatgacaacatcaggtaccaaaaacaattttgtcatatcggcgaaagggtaatccccaaacccttcgacagcctttaatctctcttcgatgagatcaagtttctctctcccttccactctcggaggtggccccctattgagaaatgcagtggttgcagagggcggtgttaaggagctcccgcagtattgggttgaggcatagcattaaacgccggtccctcggcggtgaatatgggatatgggtcgaagtcaccctgagcctgcttcggtggttcttcacgggt

SEQ ID NO: 24767 - DNA, 219 bp, Glycine max
  unsure (1)..(219): unsure at all n locations
cattcaggtgtagaaatctccctaagattgagttcgccgatgctttcaagactaacaagaaagaacccaaaaaaatttgggtacctaaggataaaataattcttgtggcatatatctttaaccgganaaagacatgccaccatggcacccagatagtggctactctactcatgacacatgacaagagaaatgtgtatgttccaatgcctgactctcatg

SEQ ID NO: 24768 - DNA, 467 bp, Glycine max
  unsure (1)..(467): unsure at all n locations
atactcagctgttcttaaattttngtaatcttcagtaaatcgatcattattttttgagaaggaaagataagatcaagagaagatgtataccaatttttatactggttcactctctatttctagagaacctaatccagttatctaatctaatctgaattagattttcactatgcatatagaatttttacaagcaatctagttcctaccccagaaaaagagaccaagatacccaaccctaaggtcctttgtgaataagagcctaagagaaacctaccttagccccaattaaaaaaacttattctagcatgtcttcagacattcatgcatatactaacaatntacaccaaaaacaaagtcaaagcaagacacaacctgatcaattgtatgcaagaaccctgctcgaatgaatgagtgccttcttgaactcaagagaaattcacaactaacttttcacaatgagatcttca

SEQ ID NO: 24769 - DNA, 453 bp, Glycine max
  unsure (1)..(453): unsure at all n locations
agcttgaagctcaaggaaaagcttgtagtatttntggcttttacatgcttaactcccttgagtggcatttgtattggttgttatcttgattgttgcatcttagtacatttgatatctttttggattgtgcatcatcataatgcatgtgaagaaaattttctaagttagaaaaatttcttcagaggcaaaaactctaggttttaataaattacaacctcgttttaatcaattacagttacaacaagttgtctgaagcttgtagagttaagtctcatatcggtttaatcgattattgatatctcataatcaattacactgttgtttgaggcaatgactaatttagtcaggagtctctgctntaatcgattaccaagtggattaatcgattacttttctcttgttcaagtgtttagaggtgaacaagaacactntaatcaattacttaggtcatct

SEQ ID NO: 24770 - DNA, 426 bp, Glycine max
agaatctcagctaaagagtgatctgatcattaataattgttactccttataatttatcgctctattgtttgagacaatgactgatttattcaggagtctttgctttaatcgattaccaagtggtttaatcgattacttctctttcgtttagttgttcaaaagtgaacaacaacactttaatcgattactttgagtatctaatcgattacattgttcttgtgttatttcaagatgttggtaagaatagtttaatcgattaaaaagattatgtaatcgattactttgtagatttaatcgattacaggcggttataagtgttttctctataaacaaccagcttgtgttcccctccatatacataaagagaatactcaatatctcgaagataacacataagcctctgaatgagctaaagatcctaagatg

SEQ ID NO: 24771 - DNA, 453 bp, Glycine max
  unsure (1)..(453): unsure at all n locations
agcttatgatattgggtaatgggttcttactaatggtgtttttttgnnnntntgtattaatttattttataataaactcacctcttgcaatttttgtatcgtgtgattggtacctgtgatgatcgcgaacctttgttcgtgggagtagaatgacagcagtagagtacgagaagtgagattcttttgtggagccgccgagtcgacgtgatgacgttgggattattttgggagatagttgtgttttgttaatcaactccttcatagctggntctataattctttttcttgaattgaggatgtaaatcacaaatttaattatatgtatgaacaaatttactttccattatgtgaatgatgtgtactgagttactatacctatatacatatatatgtattcacttaagtaatggtgcgctgtttagtgaatgtatatctgaaaataattactttcat

SEQ ID NO: 24772 - DNA, 427 bp, Glycine max
  unsure (1)..(427): unsure at all n locations
tgtaaaatgcatgccaaggtcttgcttttatagactcttttcgtctggtcaaaaaaaccattggaagagttatgactnttgagaaaatcatgttaagtgttataactcttaactttttcttcaaaattattcactggtaatcaattatcacaatggtgtaatcgattacacaatgtattttatgaaaagttgtgagtcttcacaattggatttgaattccaacgttcagatttacttgtaatcaattactaatatagtgtaatcaattacactatttgaaaatcattttggaacgttacaaatcatttgaaaacattttaaaaaccaatctggtcactagtaatcgattactgcaaactggtaatcgattaccagagagtaatcactctggtaactntagaannattgagaaaattcttttgtaaac

SEQ ID NO: 24773 - DNA, 237 bp, Glycine max
cccccaacggcagcaacaaaccaagagaccgccgggcaagggccaccagaaccacaaaggcacccacggaaccagggggacgaaacaacggcccaaaacaaacgagcgaccggcaaggggcgacccaacacaacgacgacaaacccacaagagagaacaagaagcccccacaccacacgagcgacccagaggaaccacgaagcaacggccggaaaggacaacgacggaggaaaagag

SEQ ID NO: 24774 - DNA, 450 bp, Glycine max
  unsure (1)..(450): unsure at all n locations
agcttgatctgatnnnaaggggttttacttgatactactatttctccgncctgcacttggattatgtgtctagcattttttgggcttattttgcgcttagtggcccattaatgtctagcattttttcgggatgatttaccgaagcattggatcattgggttattgttttgaatatgtttacgagtcaaattaaattatgtttgttattttgcaatttaaaatgaaaatcccccgtttttgaatttgcacacaaggtgtttggtgaaatgtgtctttggaaaacaacctaaatcatttcctgtactgcataattttggagattctagttgtttttgatagtagtacgacggtgttcgtcatcctcattgtcttcctgtttgtcattctgttctcgctgaatgaattgtaactcatgctgctatccattttctttctggttaagctcatatg

SEQ ID NO: 24775 - DNA, 483 bp, Glycine max
  unsure (1)..(483): unsure at all n locations
gatccttaagcaccgcggctgcagcttccgcatccgtactggaagaccttgttctgctttcctaaggcaatatcagcataattccgatatggctcccgatcgcactcagctacagaatatgttcaagaaggaaggtgagacctttaaagaatacgcacatcggtggagagacctggcagcacaagtggcccctcccatggttgaaagggagatgatcaccatgatggtagacactttgccagtgttttactatgagaagttggtaggctacatgttgtcccgcttcgcggacctagtattcgttggggaaagaatcgaagtagggttgaaaagagggaagttcgattacgtttcctccacaagtgccaatgctaaaagaatcggagcaactggggcaaaaaggaaggagggagatgccctcgccgtcactacggcgcccgcgtgggtcanacccccgcagacatctcatggtacacatcagta

SEQ ID NO: 24776 - DNA, 371 bp, Glycine max
taagctccttcaactgtacaaggctcttaatatttgtagtttattcttgtggaaccttcacccgacaaagacactgacaaaaacttatcttctcctttttggacaaagtatgacaagctgggggcaaataaatattcttcccatctgaccttggatgcaactgtgatcatatccccatctcagctagatcatgacgggtattcaagccatccttcgtcttgccttgaatgttaaggagcgtaccaatgacactgtcacatacattattctccacatgcataacatcaatacaatgtctaacgtctagattagaccagtacggaagatcaaagaaaatggacttcttcttccatatgcaagtcttactttta

SEQ ID NO: 24777 - DNA, 427 bp, Glycine max
  unsure (1)..(427): unsure at all n locations
agcttggattgattcggtctgacgagggatttaggtttagtaatttaggctacaacatagaacacaaaagcatgattgattagagaaatatatttatatgcatcaacttgtttgttagaaagacccaacatttctacctactgctgtcacttttaattactttgcattttatagtttttaacataaaattttagtttaaattttgtttgaaattatcaatcatacatgttctctcaacaatgcttcatttctgaacttaacccaggctaacattagttccctgtgctccatacttagattcatccattttagtttttaaatacttgatgatccagtgcacttttcggcaaaccaaatttcccttgaatatatntgtacgaagaanaagtggaacaaaaagtaactgcaagggaaatccaacaaagta

SEQ ID NO: 24778 - DNA, 383 bp, Glycine max
  unsure (1)..(383): unsure at all n locations
tgagatgaggaagtgttgaagggtgaaacttcctgtttattttgttgaccacagagtggtacctggagatatgtcacggnggtcgggagaccttggggacgtcaagtggggtgctattgcccaaaaccaagcttgaccaatcccgacccaacccgggcatagtcggtcagtgagaacctgtgatgtacctaagcaggcgagctcctggcagtcaacagataaaaggaacaaagaccacaaagcaaggaggcttgtggtggctggccagctgtgaaacttggctgatatgtgagatatggtctctggtaatcgattaccaagggtggttaatcgattacaaggcttaaaaataaagacaggaggctaagatggtctctggtaat

SEQ ID NO: 24779 - DNA, 454 bp, Glycine max
  unsure (1)..(454): unsure at all n locations
agcttgcctcanagagatctaggaaggacaccgctttcgcatgtttctagtgccactcccgagttcgatagccatcgtttcaggagcactgagcaccagtagcgtttcgaagccatcaagggatggtccttccaccgagagagacgtgttcagctcagggacgacgagtacacagatttccaggaggagatagctcaccggcgttggacgtcgctggtcactcccatggccaagttcgatccatatatagtcctcgagttttacgccaatgcttggcctacaaaggggggcgtacgggacctccggtcatgggtgaggggccagtggattcctttcgatgcagacgccctcagtcagttcctgggatatatgcttgtattggaggagggccaggagtgcgaatatagtcagaggaggaaccgggccgatggatttgatgatgaggccatcgctc

SEQ ID NO: 24780 - DNA, 358 bp, Glycine max
  unsure (1)..(358): unsure at all n locations
gtgtgaagagatagacagaaaaagactgagaacgacnctttgctcatttcttcngcnaagcgcagaccaggtgctaagcactcaggctacacgcgctaagccgagcttgctcgcacttagcgtatagacccctgtgtggtcgactggatagctgagataagcgcacatcactgcgctaagccccacatgattacagaaattgatgcactacaagtgggcttattgatgctagcacaccctacatgggtcatggacagaagtactgacgaggattatgccttaccatactgtgcaagcagacaaggtgagatgcaatacaatgactaatctaaattattcatattcatcgttgtattca

SEQ ID NO: 24781 - DNA, 317 bp, Glycine max
  unsure (1)..(317): unsure at all n locations
caaaaancaaangaggaaacttcgccaaaaatccccattgaaaaacctttattcaaaccttacaaagttagtgagaaggctaaaagaaaaactatggaacttagaagaactaaatccttaattgaaggcgtaggtgacaaccatagtgaattattaaacaagattggtagtttacttagagtcattccaaataccccccaagcctcggaagatacttacaaaatggtaacaagaaggacctccaaattaatcaatgttattaatgaagatagtgaccagaactcagataacacaactgagataggattagtgtcaga

SEQ ID NO: 24782 - DNA, 470 bp, Glycine max
agcttccacaacatcaaagtaatacaacattcattttgcacatgctatctcagccaagcaaaacagggcaaaggcagaaaactctgcccaaaacaccaactaaaacataacttttctcacttaaagaccccagtaacaattccttcgttccggttcgttaaccgttggatcgactcgaaaattttactggaagtctctagcacataagcctacattgtgaccgttgggatcttctagcaaacatccagaactcattctgcactactctttccacagccaatcacacacaagcatttttctgcacaaagccaaaatcctgctgcacctatttgacagcaaaattctgcataagtgcagatttcgaaaatcactattcccctcatccaatcttgcccaaatcaaatcctacaagtcccaaatcatgtatcaatcatgtctaaaccaaaatcaagctttatagcacagcaaca

SEQ ID NO: 24783 - DNA, 342 bp, Glycine max
  unsure (1)..(342): unsure at all n locations
actctnttctctcttttctctcatggttcttgttctttttcctctttncacttctattggtccattttcttgcacaaaattccatggcttttccattggtgatgatcatggaaggctaaacacttaatcaatccaaggatccacttcaagcaagattgaatttgagttttggtttagtatttctaatctttgtgaatgttcatctttttcttcaatcctatttttgattttcatgattatgattatacttangattgaaaacggattangttatggattgattctattaaacatgatttgtattctattnttggttagntctatttcttcatctttggtttt

SEQ ID NO: 24784 - DNA, 311 bp, Glycine max
  unsure (1)..(311): unsure at all n locations
acaacagagcctacaaccaggacggggangggcccnggagncaaacacggccccgcaaaaaacatcgaggaaaccacgaagctaccctgagggatcagaagcctggcttgcacattggacttgcatgttgctctccatgcatccatgaaagcctgcatgtacaattaaccaacatcaaattagtgataatattccccccctaaggattatgcttttgattagcaatttcgagtatgattcattgttcttgtggtttcatatgatctctccctacagactacagtacttgcaacatgttgtgaatggcattt

SEQ ID NO: 24785 - DNA, 360 bp, Glycine max
  unsure (1)..(360): unsure at all n locations
gcccttctgattctgtttatacatttctgactcttgtgatgagatgcaatgcanagattggacctcctgttagttgttatcaaagaatagcttatacacttgtgcttgagtgaaacagttgctgtgagactgtggtttgagctactttccttgatacctgtcttatgattaacttcatctaactgtatagttcacattttgttctcctctttgtctagctgcatattctgggaaaacaagtgataggtacacattgcttcatcttttacatcatgcaatcaataaattttaatgcatacacctttgaacataaacactgcatgttntaccacttgaggacaagtgagttgttctcttttg

SEQ ID NO: 24786 - DNA, 454 bp, Glycine max
  unsure (1)..(454): unsure at all n locations
agcttgtcttcaacaaataaatcattatctttttgtgatcttcaaagcccaactccagcttctttctccccatatccactatgcagcttgcagttagcatgaatggccttcccaatattacaggaatgtcattatcttcacagatatccattaccacaaagtctgcctgttttactctgaccagcacatcttcaattactccatatggtctggtaatggagcggtcaacaagttgtaaagtcatcctagtgggcatgatctcctactctcccaaccttctgcacatggagagtggcattaagttaatactggctcccaggtcaataagagcctttcccacagtgacttctccaattgaataaggaatggttacactcccagggtctatacgctngggtggaaggaccttttgaatcacaacactacaatttccatccacaacaatgttttcctg

SEQ ID NO: 24787 - DNA, 462 bp, Glycine max
  unsure (1)..(462): unsure at all n locations
ctcagcttctaagcaagcttccatcattgtggccctatcctatcttgatgacattnttttacttgattcatatgtacaagttaagtaggttaagttaaatttgatgaaatttcgacaacatttcgcattggtctccaagtacacgacatgaaagcggtgacatgaattcaccacgatcaagtaagcacccgtagaacaaagcttcatgcactaaaccgaaatttaatcaaatttaacacaacatacttaacctataagcaagaattaagaaaaaaaataggccttcccatactgtccaaacagacaattcgagattcaatacaatgattaatctaaattattcatattcatcgttgtattcaatctcaaaagaggaactatggttcgctcataatgcaaaanattntaatattaaacaatacccatacattaacaacaagtgtaataacgacataagtgtca

SEQ ID NO: 24788 - DNA, 258 bp, Glycine max
aaatcaaccgaggaaacttcgacaaaaatccccatcgaaaaacctttattcacacctcccaaagtatgtgagactgctaaaatagcgattgggggacctccacagactatatccttcattgatggcgtaagcgactaccgtagtgaatgctctaacaaggaggctaggctacttagagtcattctttatacccgccaagcgtctgatgatactgacaatatggtaacaagaagtaccttcatctgaatctacgttatt

SEQ ID NO: 24789 - DNA, 454 bp, Glycine max
  unsure (1)..(454): unsure at all n locations
tcgccaagtatccccattgaanaacctttattcaaactcttctttttagtgagaaggctaaatgaaaaattagggaacttagaaaacctaaatccttaattgaaggcgtaggtgataaccatagtgaattacttaacaagattggtagtttacttaaggtcattccagatactccccaagcctcggaaaatacttccaaaatggtaacaataagtacctccaaattaattaatgttattaatgaagatagtgaccaaaactcagacaacacaactgagataggatcagtgtcagaaaagaatataaatccaattaattccaaacactggaaaacaccctccaaattatattatcaacgtccgactgcccctgacctactattagaggaaagaggtgaaaacaattttaagagntttagtgcaaacaacatctatgaatggaacatagatgcaca

SEQ ID NO: 24790 - DNA, 300 bp, Glycine max
  unsure (1)..(300): unsure at all n locations
gaacaatgatctgaacatananatggctactgccagganaggagaaaaaggcacataaaatgacatgcaagaatgtaattatgcctttattttgcatgtttgtatgtccccgtctaagaaaaatcgtacataaatctttctctccccctttctcctctgggtaaatatgcctggtgtggctatctaaagactgcgcataatgtaatgtgtaataaagatgtttggaccagtgtgatggtgctcattattatgttcgtatagtaatgaaatgtatttgaccgagaagagagttgttcccgt

SEQ ID NO: 24791 - DNA, 381 bp, Glycine max
  unsure (1)..(381): unsure at all n locations
agcttccncacaatactacacnncttcaatactcttcttatccaannaagnaccctacggaaaagagagatgttgattcattgacggcattcgtgaatgctttacggtgatggttaattgagtatctagctcaatgttccgtcgaacaataccggcgataaatttcttcacagttttggcaattcactgaaaatgggaatggcagttttgacagcaaaacgaagattctcagctagaagtatccctgtataggtttagataatcttcctcacaaatataattgtagtagacattctgagaatgtgattgcctgttntgttagatgagtagagttatggttgcattatgttgcttcttcactatcataatctacgtttttag

SEQ ID NO: 24792 - DNA, 357 bp, Glycine max
  unsure (1)..(357): unsure at all n locations
ggttaagttggtccaacattttcatcgctnnnnntttaatccttttgnnnnaagactntgcgtcaatggaatctcgttcggaagacatgcaagtactgaaagttatgtgtgcagaaaaatgaattccatgcaacccattttcgcagtcctttatatatgccagaaagtgaattatcgttgcatgcccagaagagtgcatcttgcttttctactatatatgactatgatatttggacattcaattttttctaatatctatttgatacttattatttttctttatctttctttgtattacattataatattatttataatatttatattttttaatatatatatatatatatatatata

SEQ ID NO: 24793 - DNA, 498 bp, Glycine max
  unsure (1)..(498): unsure at all n locations
gaatattattgatgcttgagaancgaannataaaannaagcggagagnccctatgaatgggcggaaacttttctttctttttttccaacncncnaacacgcgcgagaagaggatctgggtaatagacacccacacgaagcacattagccctgttcatctataaagttattggaaatgtggntataataaagagatattagctttgtgtagagaatgaanaagagaggaagagatatatggatttgaattctcttactaataaattaataattatttgttatcgattaaaaaatttatttatcatagactactaatattttcttatataaaaattgctaccccgatatgccgctcacctattaaaggtatttatcattaaaatgtgacgagagaacacaaaaatttccatatatgctgtgacagatgtttttagaaattttgaatttatatgtattattatcaacacatttgtttcttgatgcgtgtagatagtgctcn

SEQ ID NO: 24794 - DNA, 448 bp, Glycine max
  unsure (1)..(448): unsure at all n locations
agctntataagcgcgggtcttgtaaacaattgtcaagtggncgcgatatacgaagatgatgttccgagtacattagatttggtacgaccatgccctcctgatttccagctgggaaattggcgagtggaggaacgccccggcatttacgcaacaagcataatgtaaacctttacggttttaaaagctctatagttgggcctaggctttagagtttttccttttgttaaggctttgtgtcttttgtttttgaatttataatacaaggatctttcttcatctgttcctacgtctctacccattctcattcatttgcatgtttacttctttttctgaaatgacagatccgatgacgagtcccccgaaggtactaatacctgggacccgcctatcgacttcgagcaagaaatgaatcaaatggaagatgaaggaaacgaggatgtgggacttc

SEQ ID NO: 24795 - DNA, 395 bp, Glycine max
  unsure (1)..(395): unsure at all n locations
tctcaaggaagctacctagtctataaatagaagcatgtgttacacttgttgtaactttgatgaatgagagtcatgtgagacatacttcaaagttccacttctctccctcttttattccttcaatttcgtgcttccctctctctctttctctccctctttcttttcctccattgaagcatccttccaagcttcttatccaaggctcatcttggtggtgaagctccttcttccatggcttattccctagtggatggcgcctcctctcatctcttctcctttgtcttcctctgcatctccatggtggaaaatcaccattaaaggacctcattgaagctcanagatccagcctccatagaagccccacaagcaagcttncataatgcatgacaagcaca

SEQ ID NO: 24796 - DNA, 363 bp, Glycine max
  unsure (1)..(363): unsure at all n locations
agcttaataagtccatctatgtattgaaactatcctcctgctagtggtatttaaaatttcatgaggttatttcttcattcagctttgaagagaatgtcatggatcactgtatatactagaaggtcagtgggagtaagatttgtttccttgtattatacatagatgatattctacttgcgactaatgataagggtatgctatatgaggtgaaacaatttctctcaaagaactttgatatgaaggatatgggagaggcatcttatgtcataggcataaagatccatagagaaagatctcgaggcattntaggcttgtctcaagaaacctatatcaacaaagttttagagagatttaacatgaaag

SEQ ID NO: 24797 - DNA, 146 bp, Glycine max
aggggctatgccgttgaagccttggagaaagagtatcctatgtgtgtggatgattctcagattacctgggtcactttatagagaaaatcgaacctttgagtttcaagagtgagtctagacttaaagagaaaagctgtgtctcatag

SEQ ID NO: 24798 - DNA, 444 bp, Glycine max
  unsure (1)..(444): unsure at all n locations
acctgcngctgcagctgcattggaattggaaagccccctccattattggattattacctgacatctcaaacaaacaaatcaaacgtaacaagacaattatagttgctgtttgaatacctcacccactcaagtgtatcacacaattatggcttttctctaatgaaacactcttgccttttaccactctaattccccttgagttcttaggcaattcaagagattatggccacaacaaagaacaattcaccaatatgtgttaggtaaggctagagagacaaggaaaaggttaaccaagaaaaaggctaacaatgtttttaggcacaaatgaaggaaataaaattcagaatttacgaattcaagtaacaatccttcatgcaaccaatatattgccttaaagagatttttttttttaaaagttcttcaagcatgaaccattcagcccaa

SEQ ID NO: 24799 - DNA, 281 bp, Glycine max
  unsure (1)..(281): unsure at all n locations
ctttcattntcagcagatgaagatgaatctgtggccacctcatggtcncttttaangacaanagcatcattacttgcactgagtggttgggagttggaagccatcttctcaatccaattcctagcctcaacatgagtcatatctcccagagctccaccactggctgcatcaatgatactcctctccatgttgtcaagctcgctatagaaatctcgcgaaaggagtggctcagacatctcgtggtgatgacagcttgcacagcactaactcgaatcttcact

SEQ ID NO: 24800 - DNA, 451 bp, Glycine max
agctcaataaatctatgtatgatttaaaacttgccttacttcagtggtaccttaagtttcatgggataatttcttcatttggatttgatgaaaaccacatggatcaatgcatataccacaaggtcagtgggagtaaaatatgttatcttgttttatatgtagatgatattttacttgcaaccaatgatcaaggtttgctacatgaggtgaaacaatttctctctaagaatatggacatgaaggatatgggtgatgcatcttatgtcatcggcattaagattcatagagatagacctcgaggtattttaggtctatcataagagacctatattaacaaaactttatagtgaatttggatgaaaattgttcaccaagtgttgctcccatcgtgaagggtgatagatttaatttgaaccaatgcccataacatgacttttgaagggaacagatg

SEQ ID NO: 24801 - DNA, 408 bp, Glycine max
tgtacctattagtacctctggtatattgcaaatctaaaaataaatctcgtggaatggcttaagaaatgacccgtgcgtccatgctttgctatcacttggccacctcgtaccattttgcttcctttcgttttaaacataactgacacaatgtcactttcttcactaacctgaagccaagctaaattatggagaagggaggaaaaataatcactcaaaatgtttcaaaaaaacactgaccaatatggaacattcatgaaatgacatgctagcgaaagagatgtcatataactcaacaatagagaaagtgaagttactagaaaaggtgtatagcattcctttcatacgatggaccttctgagagaaactatccaatggatgtgttctgttgagagcaacaatgaatctact

SEQ ID NO: 24802 - DNA, 442 bp, Glycine max
cctgcggcatgcaagcttgaaattgaacaacggaagctctcgagaatatataatggttataactcagcacacggacgtgcgattcaggcgcataaaatatcgagacgctcgaaatagaacaacgaatgctcttgagaaattcaaatggtcataacttgtcacacggatgtccgattcatctacataatatatccagacggtcgaaattgaacatcggaagctctcgacaaattgcaatggtcataacttttcacaaggaagcccgattctagcgcatcacgtatcgagatgctctgaattgaaaaccggaagctctcaagaaattgaaatggtcataacttgtcacacggaagtccgattcagacgcataatatatcaagatgctcgaaattgaacaacgaatgctctcgagaaattcatatggacataacttgtcacacgg

SEQ ID NO: 24803 - DNA, 448 bp, Glycine max
cttgaaattgaacaacggaagctctcggaaatgcgaaggtctctctcttacacggaagggcgactcaggcgcataatgtatatagacgctcgagattgaacaacgaatgctctcgtgacattcacatggtcgtagcgtgttacacggtagtccgattgtagagcctttcttaacgagaagctcgaaatctgccatcggaagctctgtacacagttctatggtcataactattcacacggaagtccgaatccagctcgtaatccatcgagacgctctataatgaacatacgatgcgctcgagaaatatacatggtcataccctatcacaccgaattcgattatgcgccagtattacagactcttcaattgaccatcgagctcctttacatcaaaagtcgtttttctctcggagatccatatagccgaagctatcagacctcgaaatgcg

SEQ ID NO: 24804 - DNA, 469 bp, Glycine max
  unsure (1)..(469): unsure at all n locations
agcttcaatggacttgaggaagagggatntgttgttatanacctctttgatgaagtagggtggagcaattttcttgaaaactttagtgtttagcactatggtccatatgctctattttggggaattactcaacaagaaggagtcaacatcaaacgtactgtccgaaggaaaaaaagttatcatctctttagcaatcatcactactacgcctaggtgtttagaagaaaggttgcttttttacaaggattgcgagaaggagatcaccaaggaaactgtacataaggttgtgcaaagctcatcagattcttggggactacaaatctttcctacatgtgcagactcatacatagctntctattcaacatggttatgcccatacttgggtcaatagactacgtcagtggtagggaccaaatctgcatgtataanggaatcgtgggtgagaagataaacttaccacaagttatct

SEQ ID NO: 24805 - DNA, 406 bp, Glycine max
  unsure (1)..(406): unsure at all n locations
tactcagcttacaagaagcttcaagcaagtaagtttctctctctcctttcctttcttgntatcattatnanntattcttgggttttttcaatgctgcatcttcgtcctgtttgtgatccttcaggtttcatcgtgttaatgtatgtttgcaaatcaagtgtttcttctgtttttttatcagttctggataaattgaagttaaaaactaagaaaaaaaaactgtagagcgtgctggctttttttgtgtgtttaataatttttattaccctctaaagtggcgctattattaagtgattatttttttctgttgaacttactnttagtttttgaatttgacgaacttggatgctaaagtgttngtttgttcatatttcatttatgacataaatataaaaaattgatttgc

SEQ ID NO: 24806 - DNA, 404 bp, Glycine max
agcttgcctaagtaactgttattgagacataatgattattaaacacacaaaatgaaaatactaagtatttattacctatacttaacagaaaatacttatgacactacaaaataaccataaattgggagagtttgatacaatttatacaagttttatacacaaaagttagtcgttttcatcgactaacacatgtacactaccaccacatcctccacaatgagaagagtgaaagacaagggtaaggaatccctaatagaattggaagagggtccaaaggtatgtggaatggagacacgcaacaactgcttctgaactaagtcataggtaggaactgtaggactcgataaaatctagtggactgcctcaaggttcgatgtgagtccaacaagaacaaccaccatgaa

SEQ ID NO: 24807 - DNA, 299 bp, Glycine max
  unsure (1)..(299): unsure at all n locations
ataagctctgaaattgcgacactgcacctattgcgactaagtgagacagggtttagcgaccaatcactagcttactttggctgaatgcacccactgcgcataacgcattgatctcgtgcttatcacgcggcattgatgttgatgctctgccatattctccttagcactaagcgcgttgaagcaacgcttatcagaggatatgcacttaacccatctgctgctttctgcgattcaaaacttaacctctntttcacctaagaatgcacaaatttgatcattaaattcgatggaaatgttta

SEQ ID NO: 24808 - DNA, 457 bp, Glycine max
  unsure (1)..(457): unsure at all n locations
agctntagantatcctaattgaggaagatgtatcaagtaagaaagaaaatatttgacaactttttaaattntgcatcaaagttcagtctacgtgtcacaatctgagataatttgtcacgttggatagtctatgtgacactaaaattggcaataatgcacttcactaacgacattactttttaatttaacggcaaacattattttgcaaaacttatgtaaagatatgaactattttttacataaggactaatttacaaaatgagtaaaaaatcagggaccaaaatgcctatttactcttttttaaaacattacttgattgtcatattactttttctcaccatttatgatttgtcttctacttaaaantttttttcatctctttacacaaaaacaaaatattaacatattgtacccgaattttttcaaataaataagcggtttccgtgaattaaatgtg

SEQ ID NO: 24809 - DNA, 449 bp, Glycine max
  unsure (1)..(449): unsure at all n locations
ntntctacaaccttntctccnnccttggcaacatcaaaattgttaagacctcggaaatcaacacagatatgacaaaggagtagaaaatataagtatcagagtattaaatacaataagccaaactcataatcaagaaaataatcaaaccagaattcaaataacataaaatgtcaacaaccacaaaatatccaagactgaaatttaaaaacacaagataaataagcaaagtacttagcataataatgtaaattctaagaaactaaaagccaaaatacacggcttatagaagataaataagcagaatctaaaatctaagaagacggaggaggtggtggaagatcgaaactctgacgaatgtatccgacatcctcttcaagctgtgtaagacgaatgtccataccggcaaagcgtgaatctaacgagtcanagcggtcaccaacatacgaacg

SEQ ID NO: 24810 - DNA, 437 bp, Glycine max
  unsure (1)..(437): unsure at all n locations
agcttgccacccagctcgcccaggcgagcatggttgcttcctccagaagcaacagccttctggaggacccaagtgggcctgattgctatttgcacccccatttttactaagtacaccccctgccttttttggtgattcttttttcgtaaagttacggaaacttacgaatttcgtaacgatacttgttttctttccgtaatgttacggaaccttgcggattacataatcatccccttttttgacttacggaatgttacggaacctcactaattgtgcaacgatgcttccatttgatttacggtttgtcacagaaccttacggattgtgcatcaatattttcttttgttttccggcatgtcccggaatttcacaaattgcctaatgatgggtgtcaagcacctcacaaggaccaaacaaaattntacatgtcatcaagc

SEQ ID NO: 24811 - DNA, 430 bp, Glycine max
  unsure (1)..(430): unsure at all n locations
tgttgaaattgccatgtttggatgagttagacatacccattctgttttagggtttttgtgatgatgtttgtgatgtttatatgctgaaattacttatggaaaactgttagagatgaaaggtagagttaacctanggttagaaagtgagaatgtgatgttatgagtggaaaaagagtgaggctttgagagttggaaggttaagtctgaattctgtggtaaatggaggttaaagtgagttaatcctagcttgaaatgtcatttaggacttatgagaaagcttggactgtgctagagagaaaaacaaatgaccaatgtgaacaaagagccatttctagggcaaatttgggtgttgaagagtacaaatttgattcggtgagagtttaggtgtaaatccagtttgaacaagtctaaatagatgttatggactggt

SEQ ID NO: 24812 - DNA, 455 bp, Glycine max
agcttataagaacaaaatggcctatatcattaccaaatatgcatgagaattaggaagcatcaacaataattaagccaaggctattgtgcaagcaatcaatgggacaaaacacaccaaaagattatgatgatggatggctcaaattctcacaaaggtaaacttatcactttcaaatcgagctttcaaaactatcatgacatgtaaaggaaaaacaaggatttcaaatcacaaaatttcaagagacttttattttcagaacaattacccattacttgaacatatcctataattcaaagacaaacatgcaaatttaacacaacaaaactaacagaattaaactagaacccaacacaactaacaaaattaaactaatttaacacaactaacaaaaccctaaccagagaacacacatcccccatacttaaacaacacattgtcctcaatgtggcacaatt

SEQ ID NO: 24813 - DNA, 390 bp, Glycine max
  unsure (1)..(390): unsure at all n locations
tcatgaacactntcatatctgtctttcttcaaccttctancttccnttgcacacaatgagatataagctcgttaaaggaccatttgtccttgtgagtgttagctcactttgaattgcgcaaagtgtacaaggaagtgagatcaaaactaaatgcatgagaaattcttcattaacctctagcttaagtactccattgtattacttttttcccatttttttaaccaaaagaaataaataaataaaaaaaataagaactacatacgcaaaaaacttcctcaaatatatgtcagaagcgatatgtatagtagccgttcatagacccaaatcgcccgaattcaaatcaaatatccaatatggcaatatctgaatttatcgacacataatatgtgt

SEQ ID NO: 24814 - DNA, 386 bp, Glycine max
agcttctagatgagaaaactactgttatttataaactttacttgatgcatgtgatgcagaaactattcttgtttagtcttaacactctttaactgtcctattggtttgttttcttatttatatacctaatagggaagttaaataactttttaacttttatacgcatgtgttgttgttagctagctagctattggagttcgcacttcactgtaacattcctgtgcttattctctgcaatgcaagtgtgattgtcaaacgagtatagctgcatttccagtttgtcttacggttctcatttcacgctgcacacatatatgtccccgtgccttttgcatatacagtatcacttgcgagcagaactttctctggctattttaagtgtgaaa

SEQ ID NO: 24815 - DNA, 416 bp, Glycine max
  unsure (1)..(416): unsure at all n locations
gcataaatgggacgttgattntgtcaagagacggagcnctcaatatgaagacgttggngttattagaatttagccttttcaaaccgcccagctaatgaatgatgatgatatcagttctcaagctgaaaacaacggggtaaagcaaacaaaaatgaatatatatatatagagagagagagagagagagagagagagattaataaaaatcaattatattttcaaaaacactttttttaccatattaaaatacaaatagacttgattaattataaaattagttgaaaatatttnttatattcttgaaaataattaagattatgtntgattaaattatttgttatgggaatatntattatagttgctaaaatatttttatcattaccttaaggatgttatntgtttttttatctttttat

SEQ ID NO: 24816 - DNA, 375 bp, Glycine max
  unsure (1)..(375): unsure at all n locations
tcttaagcacctgcggctgcaacttgagccaaattcngctctccatattccttgacccagggagagaatgtcaattcttaccctcggaagcaaaaaaaaaggggagagggataatttccaatcaaagaggaagcaaaataggagagaacgaaaatttccaatcaaaggaaaaaaagagaggaaagggaattcccaatcaaagagtgggagaaagcacaaagaaaagaaagaaaattcccaatcacagaatgggagaacgaataaagagaagaagaaagggaagaaagttcccgatcaaaaaaaaataatatgcaaaaaggtctttggaccggacaatatctgaacaatacagaattgtcaccaaatgaataaaaa

SEQ ID NO: 24817 - DNA, 293 bp, Glycine max
tctcggctcatgctgcgaacgcctctaactttcatctgttcagcctaaggcacccacccagagagaagctgcccaagttgcaactccgaacacgccttgaccggtcggtaatttcaacacgacaaggaactttcctccaaggccattgccggaattcaccccgctcccaatgacgtacgaagatcttctaccatccctcatcgtcaatcatttggacgtggtaactcccggaagggtcctcgaaccccctttcccgaagtggtatgaccctaatgcaacttgcaagtaccatg

SEQ ID NO: 24818 - DNA, 451 bp, Glycine max
  unsure (1)..(451): unsure at all n locations
ggatcttaagcaccgcggctgcagctgtgtagcgatattctgctgggataagatnttcgcacctattacccagatgtcggtgcagcttgataatagtttcctcctcttccttggtgtagtttcctcttttgaggtttggccttaggtaattcagccaccttagtctgcaactctttccacatctcgcaagacctaacaaattaataacaacaacaacaaagtaaaaccaattacaatggattcatatatgatttagctataagctgtgcatgtatataattaaatattgaatatatggttcctacaaattcatgtagaagttaaaccaaaccttgaaaacagagaagaagaaaaattgaaagccacattggcgactatattgatggtacatactctcacatacttaatttgtttctgaccaaactatttgataagttccattcccacctga

SEQ ID NO: 24819 - DNA, 393 bp, Glycine max
  unsure (1)..(393): unsure at all n locations
taaactgtaaagcaaatctcanaannatgattatntgcgcatgataaatattctatcaccactcttatcattctacctaaactaagagagaagataaaatcaatttagatattttcattgatgataataaccaaatgagggatacaatatataacctagtggttgtcaataacacgtcctcatttaactttagaaaatttaaaatagaaatgaataatataaaaaggataatcttaactcatctaatatttaaactacctatttgggtttctttaatctcatcctatcattgttgacagattcacttggagcttaccctcaaggtctttaaaaaaattgagcttgatttgttcttcttttgatgttttattangagtagaagtagtgtatgat

SEQ ID NO: 24820 - DNA, 372 bp, Glycine max
  unsure (1)..(372): unsure at all n locations
agcttaagctccttcaactgctcatggctcttaatatttgaagagtatccttgtggaaccttcacccgacgaagacactgacaaaaacttatcttcttctttttcgaccaagtatgacaagctgggggaaagtaaattttcttccgatcagaccttggatgcaattgtgatcgtatccccatctcagttagatcttgacgggtattcaagccatccttcgtcttgccttgaatgttaaggagcgtcccaatcacattgtcacatacatttttctccacatgcataacatcaatacaatgtctaacgtatagatcagaccagtacagaagatcanagaaaatggacctcttctccatatggcagtctacttta

SEQ ID NO: 24821 - DNA, 279 bp, Glycine max
  unsure (1)..(279): unsure at all n locations
ttccgccccggagtacgacagtcaccgctttatgagcattgtgcaccagcagcgcttcgaagccatcaagggatggtcgtttctccgggagcgacgcgtccagctcagggacgacgagtatactgatttccaggaggaaatatggcgccggcggtgggcaccactggttactcccatggccaagtttgatccagaaatagtccttgagttntatgccaatgcttggccaacagaggagggcgtgcgtgacatgagatcctgngttatgggtcagtggat

SEQ ID NO: 24822 - DNA, 608 bp, Glycine max
agcttagtgtttttttttgtagaatgatgttcttgtgcttttcctttttgaatgcacgactttatctcttttctctactagttcgtcaattttcttcgattctttgatgccctgtttatagtaagaggtttataaatatggagagaatctttagtattgaaaatataaccattgttgatcttgattctttcttccctctattgacagttgttgtgtatttttgattgattctagataaatacattctaaaatagtccttcataactcaacatagccgttagacatatataaggaattctaaaatagacttgtagatacattccatttaatggtatcatttaatattgcataaactgatttattctagaaagtgcatatttaaatatgcatttggatggatttggcaagtacttctcatcaatcatgtttaacatatatttaatcaaatagttaacacaaatttatatatttattttcatcaaaatcttaagagatgtgtggatcatcctatgatggattggctagtttctaatagtgaacacatcactatggaaaatattgttaaaaagctcaaccaaaaagaatgaaaaatgttatatatgtacatg

SEQ ID NO: 24823 - DNA, 456 bp, Glycine max
cctgagtggttctaactcatgaatttcttgctcgacaagggatacttctgtcgtggagagggaaaaatgttatgcaatgctggtatgggcatgaaggattttaacgtcattagaaccaagtgtgcctcaatttcggttgagaccactttcattttttaaggtaaaatatacattttaaaagaaagtgttccttggattgcttatggcacatgatataatctgtttgattgttaatgaatcattggtgttttctgtttgacaaagggttggccgtgcttcagaactctgttagactgtgatttcaatttggcaagaaccttcgcttgacttataccatttttatattccatttttgaggtatatactttatggagcgttcgtttttttttgaaaattttatccccatattgggtacgctttccccatattttttaatataaagagggctttttaaaa

SEQ ID NO: 24824 - DNA, 644 bp, Glycine max
agcttgcaaagttagaaatatcttgtgtgattccgatgttgtgaagtcaaggaaagatttttctattgccatgatgaggtcatctatagttttaggagcctctttgtgttgtaatgactgaatggcattaaagaagccaagatctaagacattaaaatcaagcaagtttgggggttgagaaaccaatcgaatgtcaaaaccgccttcactagcagcttaatggaagtcgttgtcatcttcatcaatgtgacatggagcattgtcttgttgtatgaaaatagtttctcctctatcccctattggccattttgctttgattgcagacaacacatgatgaataagaaaatgtttgcttacttgtttatttattgaagatattggttttgtttccatagtccctgtatctctgtttgcactccttctctttgccggttcctttgtaacaaatggaaaaataccaatcttgccatctaaagtctcattgccattagagttgaatctttgtctagccatgacaataagaacataaccttgcaaatgaaattcttgcttctacatgttcgatgtggctcctcctccccagcagccaagtaataattcatagagttcttggtcatataaaaccatctttcatcaatgaatac

SEQ ID NO: 24825 - DNA, 569 bp, Glycine max
  unsure (1)..(569): unsure at all n locations
ccttgtagaatggctagacatgatacatgtcagggtttgttttggtttataggataaaagggatgccccacattatttccatgacacaaatgcaaaaatgatgatttggaaactttatgcaaaactggtcatgcatgcacctatgcggacactcaagtgtcaaatttttatggtcatgtgatgctagggctcaagattcgtttcctctattttaatcaacccaatgttttcaaaatatgttcttttatcaatttgtgcattcatccgagtccatttcgggcgtccggggaaatttcacagcattcacccttcaggtgtagacacattttccaaaaattggttatgatcaatgaactttttcaaagaaaagttggaaatccgttcttttcaaaagcatgctggtttttagctagacaacctaattttcctttnttctaccttttacttacttgcccttcttaccctatttgccctctttttcttttcactctcttttctttctatttcattttctttccttttctatttctatttttaacatgagattttttggttatttaaatatatac

SEQ ID NO: 24826 - DNA, 595 bp, Glycine max
  unsure (1)..(595): unsure at all n locations
agcttaagcacctttttcctcatttcttccttcattgatgggttgagccttctctggggctgtctgactggtctatagtcttcttccatcattatcttgtgcatgtagtaggcagggttgattcctttaagatatgatatgtgccaccaaattgcttccctgtgtctcttgaggacctctaccaacccgttctcttcctctgccgttagcttactgttgatcaccacaggcttggtctcgttcttttccaagaacatatactttagatggttgggtaggatcttcagctctaccttggtcttctcgaatggactcaagcttttcaattcttcaaaacttgtcacccctgcaggaatgttttcctcatgatctaagtcttccaagaaagcccttagatcccttttcctcatcactggttagacaatctacaacattgataaaaactttctccaatgaattttgtgtgggagagcaccaacgtcttttttatcgacctcctccaccttgaagcaccttctatcttcccctangtatttaattgcttcgaaaggttgaagtttaccttttggtcgtcgacactcattttcagattacc

SEQ ID NO: 24827 - DNA, 539 bp, Glycine max
  unsure (1)..(539): unsure at all n locations
ccttcaaacctcccacaaaggagaagacagagtaaagattgtgtgtctccaaactttactaggtgagtttgaatccttacatatgaaagagttagagtccattttcaattatttctcaagaattctcgttgtttcaaatcaactaaaaagaaatggtgagaagttagaagatgtaaaaattatggagaatatactacgcttgttagatcccaaatttgaacacattgttgtgacaatcgaggaaaccaaagatttagaaaccatgacgataaaacaacttcaaggaccactacaagcttatgaggagaagcataagaagatgcaagaagcataagaggaagcaagagatcactgagcaactcttgaagatgcaattgaaggagaatgaagaaagtcaaggaaatgaaagaagtcaacaaggtcgaggtagagctcnaagtcgcagtcgaggacaagttggatgtggcaacaatagacganggttcaaattcatcagcaacagttacaagaaagggaaaagctcaacangagaacgtgga

SEQ ID NO: 24828 - DNA, 837 bp, Glycine max
  unsure (1)..(837): unsure at all n locations
aacgagacgaacagcgcgcttcagaaccaagcaccgaaccgacgagacgaacagcacgtgaggaaagcacgaatcaggagcaccagcagaggcatgaaccnttgaaacctcggaaaacccccggatcaccnaaagaccgccggagcagccaagcgggggcccagggaatcaagattttttggaacatacgagggaaggaaaaagcgggaaacgacgaacacgcaacaagggcgagggaagaaacaaacgagagggacgaggaaaccggggatagggaggaggaaacacaaagaagaatgaggaccagaagcagagaaagagcgcccagacagatacccagaccaaggaaggaggggcgggccgagagaggcaaaaaaaagaggagagaaacagaacggacgcacgaagaagcaagaaacacggaccaggaagcagggggaaaggagacaacagaagaagaggcacaagccggagaagagaccccagggacgaaaggcgccagaaaccgggccagagaaccacaaggaaggggaagaaggcaaaaccgagaagaacgccacagaaacggacggacgcccggcaacggcaaaaagacacggagccgaaaggaaaaacccccagacagagggggggaaaaaacaaaacaagggccaaaagaaagacacaacgagcaacagggcaaaccacagaaaaaacaagggggcaaaagcaacagaagcagaaagaaaagaacgagggaaaccgaaaacgaagacgaacaaaggcgcagcgagcaagggggaagaaagggaggaagaaaggggcaaggacaagagcacgagccgccaggggacacag

SEQ ID NO: 24829 - DNA, 493 bp, Glycine max
ttgatgcaacatttggagaggttaatgaaacaacgattatgatgttctccatgagaggttggatcaaatggagaatatagatctaatggagaaaaaagggagaaaaaaaggaatgatagtggtcctaagacaaaaccgaattgatggtattaaactcaacattcctccatttaaaggaaagaatgatccggaggcctacgttgagtgggagatgaaaatagagcatgttttctcatgcaacaactatgaggaggaccagaaggtgaagcttgccgccacggagttttccgactatgctcttgtgtggtggaacaagctacaaaaggagagagcaagaaatgaagagccaatggttgatacatggacggagatgaaaaagatcatgaggaagcggtatgttccggctagttactcaagggacttgaaattcaagctccaaaaactaacccaaggcaacaaggtggttgaggagtatttcaaggaaatggatgtg

SEQ ID NO: 24830 - DNA, 505 bp, Glycine max
agcttgttgtcccttaggattctcacttatgaatcttttagtactaaaaacaaactcaatttagaaggagacgacaatgcacctgtgaatagaggaaggtgccaagaattgcaatggcagcaccaagagcattgatgggctgaacaggcgtgtgaaagataaggatggaagagacaatgaccgaaatcctcttcattgtgtttccaatgctgaatgttaagggagaaatctgatcaagagacatgtatgagacttgattgtacaagtggtagaagacactctgggcagctacccacctgtaaacatcaaaatccattagttaacaacattttataaagggagacataaggttgggtgggtggttaaggaaaaatgaaaagaaaaaaagactgaatttactcctccctgttaatgaaaattaacaaaactaacatctcacatctgccaataataaaattcatatagaggatacactatagtaatttggccagcaccatgaaataaa

SEQ ID NO: 24831 - DNA, 501 bp, Glycine max
  unsure (1)..(501): unsure at all n locations
tgaagaacttggtgtagctccttgatgaattctatttcactttttattatagatgcttgatctccctaaaagaaaaacaaaacaaaaaactcatgaaatgatcacatacacacacaaagattacgagtaacaagaagaataaaaaaaatatagagggagaaaattaatacccttttgatatagaaacatggggtcaaagatcttaaaactttgagatgttcattcatctgtcttctcctgttcctctcgacggctatgtgagacatgatttggttctagataactatggttgagtgtgctattctttttctctctcttgtttttcagcttcttagttcttttctttcaccacacaaatcaaagtctgctgtatttatacgagccaaagtaagactatgagtcctgaaaacaaagcgtaataaatgccataggttgctntcccgtgaagtattctttaacgtagtttacacatagacacacacatatactacactctatctc

SEQ ID NO: 24832 - DNA, 537 bp, Glycine max
agcttaataaatctatgtttgatttaatacaagcctcacgtcagtggtaccttaagtttcatgggataatttcttcatttggttttgatgaaaaccacatggatcaatgcatataccacaaggtcagtgggagtaaaatatgttttcttgttttatatgtagatgatattttacttgcaaccaatgatcaaggtttgctacatgaggtgaaacaatttctctctaagaatttggacatgaaggatatgggtgatgcatcttatgtcatcggcattaagattcatagagatagacctcgaggtattttaggtctatcataggaaacctatattaacaaaattttatagtgattttggatgaaaattgttcaccaagtgttgctcccatcgtgaagggtgatagatttaatttgaaccaatgcccacaaaatgactttgaaagggaacagatgaaaaaaattccttatgcttcagttgttggaagcctcatgtatgctcaagtgtgcataaggcctaacattacttttgcagcttgaat

SEQ ID NO: 24833 - DNA, 543 bp, Glycine max
  unsure (1)..(543): unsure at all n locations
ttgacaaccctctatcttactttntcttgtttcgtgtctcttcgttgccatcatagagagcggggcagagagaagaaacactctctggcctctcatcttcaagcttcgatggagatgagcgttgcaaggctaaagaaggacgagatccagaggctgaagaaggagatcaattagctccgacgtccggcgacagagctgcatgactcagagacaagcgcgacgctgaagaacctcctcgaagagggagaaagaatggtgacattcctagagacgagcgcgccagcaccaccatcaccatcgctgatgttattcaaaccctaaccctcctcaccctcaccctcaacccgttttgctcgtcttttcctgtgggaccgccttcaacgacgtcgtcgaggagctcaagaattcaccacccgcatcgctcacgttcttcccatttctgacgatggaggaagcactgctgagattgttcgtgtgttgtcagtactgcgttatgttaaataataattatgattactagtgtttctaccattgggaattttt

SEQ ID NO: 24834 - DNA, 296 bp, Glycine max
tcataaaggaaagaaatcgtcatattagctgcgactatccaattattggacatgaaaaaaacatgcgatgaatgtcaacgaaaacgagaagcacataatatctaataacatattactggtacaaggagctactttgattatgctcgataaaaaaaacaaccagaaatagctcatgtgaaattaaacgcaccagtttatggatataaaataccctctattaatattatgtcgaaaggatttgcgcatctgaatgagggcatcattcatgtcccccctctaagcctgaaaaacctttc

SEQ ID NO: 24835 - DNA, 559 bp, Glycine max
tatactctacttccatcataattttatgcattctatactagtggctaattcctttaaggtctaaaatatgccatccaatagcagccatgtgtttcttgagaacttcaaccaatcagaactcttcaccagaggataaggtattactaatcaccaccgactttgcttcattctcttccaagaatacatacttcaaatgcgctagcaggactttcaagtctaccttgggtttctctattgtgggattcttctttagctcttcaaagacacattcccctaaaggaattacctttagtttatctaggacctccaaataggccttaagatctctctcctcctcttttgtgagacaatcaatagcattcatcaatgccttctcaagtggagagtgagaggccatgttttgcacccccatattagcttttgctcaattgtttccactttgaaacacgccttgtgatcattgggatattttatttcttcacatgaattgaagggactttttgatcatcaacactcatttctaagttaccattgcccattgtaactacacacttaactg

SEQ ID NO: 24836 - DNA, 550 bp, Glycine max
  unsure (1)..(550): unsure at all n locations
agctagcttgtagggcttttatggaggctggatctttgagctttaatgaggtcctttaatggggattttccaccatggagatgcagcggaagacaaaggagaagaggtgagaggaggagccatccactggggaataagccatggaagaaggagcttcaccaccaagatgagccttggataagaagcttggagaggatgcttcaatggaggaaaagaaagagggagagaaagagagaggggggagcacgaaaatgaaggaagaaaaagggagagaagttgaactttgagttgtgtctcacaagactctcattcatcaaagntacaacaagtgttacacatgcttctatttatagactaggtagcttccttgagaatctttcttgagaaaacttccttgagaaacttctttgaganaacttccttgagaagctagagcttagattcacacacccctctcataactaagctcacctccttgagaagctttcttaagaagattcctaaagaagctagagcttagctacatatacctctcttatagctaagctca

SEQ ID NO: 24837 - DNA, 365 bp, Glycine max
tcgtttcgccaccatttgtcacccacaaatttagtgttctgtagaggtagtgaatagatatctatccaaattgttaagggctctcctaaaaggcaatcacaagtcttgggtgttggacaagtgacctcaataacttaagaaatgggatgaatttaagttaaaaaatttcttatttaatggactcttaaatcccttttaaatctattttattagaatattggagatgaagatgaaaattatatcaacagaatacttcaagtgtgcaagataaataaaatatgcaagataaagtaatcaagatagggaagagagaaatgtaaacttagtttatcctggtttgaccacttcctgtgcctacatccagt

SEQ ID NO: 24838 - DNA, 506 bp, Glycine max
agcttctgtccctgagaaactgggtttctgaagacttatggagtgaagattgctgaaaaccctagccttgcaacaagtcctagggaagtagacacggagatggacaagaaaatccgcggtattgtgagtagcattctgaaagatgcttctgtgcctgatgctgagaaagatgttccaacatcttccaccccagatgtttctgtgcctgatgtcaataaagatgttccaacatcctccgctccaaatgctgaagccctcccttcacccagtgaagaggaatcaacagaagaagaggatcaagcctcagaggagacccctgcaccaagggcaccagaacctgctccaggtaacctcattgacttggaagaagtcgaatctgatgaagaacccattgccaacaggttggcacctggcattgcaaaaaggttacaaagccgaaagggaaaaacccccatcaagaggtctggacgaatcaagactatgggccagaagaagagcactccagt

SEQ ID NO: 24839 - DNA, 511 bp, Glycine max
tttcgattcattctatgtacccgtggtggtccacattgtgtttcgtgtatttttattctcgtttcatttactttttatacccccttttgacgtgcttaagccattttatttaagtcatttctcgcttaacctaaaaataaaataaatttccaccgatcgtttgaattgtattatccgttaacttcggttaaaatgaattccgaccgttcggtcgtgccgtaaccacgttggaaatcaaaaaaggggtaaaataataatataataataaaaaaacatcttttagtaaaataaagcggaaaatcaatcggacgttttctctttgggatttctcattcttaattgaattgactaatgactaaagtgaaactaaggctaaaatcaactcgcctagtcaagctcgtccataaaaataggtttttgaagtttgtcatttcaatttcttactaaataaaatggatcattctcaagtccaacgccttaaatgatcaccttttaaagaaaaaagaatcac

SEQ ID NO: 24840 - DNA, 478 bp, Glycine max
atgggtttttttaagagggggagaaagaaagaagggggagcatgcaattgaaggaagaaaaaaggagagaagttgaactttgagttgtgtctcacaagactctcattcatcaaagttacaacaagtggtacacatgtttctatttatagactaagtagcttccttgagaagatttcttgagaaaacttccttgagaagcttctttgagaaaacttacttgagaagctagagcttagctacacacacccctctaataactaagttcacctccttgagaagcttccttgaaaagattcctaaataagctagagcttatctacacacacctctctaatagctaagctcacctccttgagatgagaagctagaacttagttgcacaccccctataatagctaagctcacccccatgacaaaatacatgaaaatacaaaaaaattccatactacaaagactactaaaaatgcccccgaataca

SEQ ID NO: 24841 - DNA, 624 bp, Glycine max
  unsure (1)..(624): unsure at all n locations
tttcaattcactctatgtacccgtggtgtgtccacactctgtttcatgtatttttattctcgttttcatttactttttatacccccttttgacgtgcttaagccatttacttaagtcatttctcgcttaatctaaaaataaaataaatttccaccgatcgtttgaattgtatcatccggtaattttggttaaaatgaattccgaccgttcggtcgtgccgtaaccacgttggaaaacaaaaaagaggtaaaataataatataataatcaaaaaataccttttagtaaagtaaagcgaaaaatcaatcggacgttttctctttggaatttctcattcttaattgaatcgactaataactaaagtgaaactaaggctaaaatcaactcgcctagtcaagctcgtccacaaaaaatagggttttgaaagtttatcatttcagttccttaccaattaaaatggatcatttttaaggtccaacgtcttaaaatgatcacctttcatgtaaaaagaatcacttgattcacgcataagaaagaactacgtaggtctgatttcctctccaaggagggtacgtaggagcaaaagctncgcttttgtcgaccctccaaaaataaaagaaataaa

SEQ ID NO: 24842 - DNA, 583 bp, Glycine max
  unsure (1)..(583): unsure at all n locations
agcttctcccccaattttctataaattttgggagaagtgaagtagaaaagggttcagccccttaggcacttctctctctttcgaatttgcttaggaaaattgttttcgtgaagaaaatccaagccgaggcgcttccataacgtttccgtaacgtttccgtgagtgatttcgtgaaggttttcgaccgttcttcgacgttcttcattcgttcttcagtcttcaacgggtaaataccttaaaccaagcttttcaattcattctatgtacccgtggtggtccacatttggtttcatgtatttttattctcgttttcatttactttttataccctcttttgacgtgcttaagccatttatttaagtcatttctcgcttaacctaaaaataaaataaatttccaccaatcgtttgaattgtatcatccgttaactntggttgaaatgaattccgaccgatcggtcgtgccgtaaccacgttggaaatcaaaaaagaggtaaaaaataatataataataaaaaaataccttttagtaaaataaagcgaaaaatcaaatcgacgttttctctttgggattctcattctta

SEQ ID NO: 24843 - DNA, 568 bp, Glycine max
tcgcaagatggcttcctcgtcaagctcatctatctttagtctctccatagccaacactaaaagataattctctaaaaagctcaccccccattttcgaattcgagatttcaactttaaataggcaatcctattggctgtcgcgtgcttagcacgagatggctcgcttagcgcacataagtggtttttggcttagcgccagtcttctcgctcagcctagaggatgcaggcggtgcgcttagcgagttgacactcgctcagcgcttctatacaactcatccttcttctagagtcttctatgcgctcagccagcggatgtcgcgcttagcggattgcttgctcagcgcatgaaacggattagcgagtcaatgaattctgcacttcaccaatcttgcccattttacctgaaattggaatggaatgatcattaaatacacaaaattgggatactaaggactgattatctatattaacaaaagtaattgcactactacaaaaataaactataaatgggaggagttggaatcatttaccacagtttcttacacacaagttggtcgttttaaccgac

SEQ ID NO: 24844 - DNA, 685 bp, Glycine max
agcttaaaccaaaataaactttttaatgtaaggtactttttcttacttactattgcaattttctcgagaagcatcaaataagcactttactaaaattgaagaccaggagataacacccatcaaaatcaaatatataaaagattctccgctttaattaactactactaataatctatagcatgcgatgcaatgatggtaaactattttggaatgagtcttgagagactcgattatgacttgtgagttttcaagtgttcaattagtacttattaattttttggtccgaatttaacaatatttgtgataaataaaataatgataatgaagaaaattgtcttataaacatattttattattataaaataaatttatatacatatttgttgacaaattaaatagtcttctatttaatgcccgtcaattaaaacattaaatttcactcaaagtgaaataaaaaacttaaaactttttcctcctcaacttaatctcacatcttataagattcatcaaattataactttttttaataaaattattatttctaaacctttaaaattatttaaaattacaattgcatctttaattatataaataaaaaacaataacttaagttttccatagaagaaaatatcagaacataatattactatacttaaaaataaaaaaaggcttgattaattttaaa

SEQ ID NO: 24845 - DNA, 534 bp, Glycine max
  unsure (1)..(534): unsure at all n locations
gtggagtgcctgacaaagaggcactggttctttatgttgcttcatgttggaatacgaatgcaagcactgcttgtgacaatcatatataataaagctttgaacctatcatgccaatcaaagcaaggacagaccacaggggaaataatcaacttcatgagtgttgatgcagaaagagttggtgagttcagttggcacctacatgatctgtggttagtagtcctacaggttttagtaggcttgttggttttatataaaaatcttgggcttgcttcaattgctggttttgttgcaattctcattgtaatgtgggcaaacattcccttgggttcaacccaagagaagtttcacaacaagttgatggagtcaagagatgaaagaatgaaagcgacatctgagattttgaggaacatgaggattctcaaactgcaaggatgggaaatgaagtttttgtctaagataactgaactcagaaagatcgaacaaggctgtntaaaaaaagttatatacactntagtcttgatcatatctatattt

SEQ ID NO: 24846 - DNA, 528 bp, Glycine max
agcttgtactgcccaacaatacagcgtttataactactcaccatctatgatagtagacattttttgtgatgtctttgaaaaagttaacggagcataaaatttaacatctaatatagcccttggagttatttttttttacttgctctgtattttggttagtatttttggtagttgtatttcagctcttttgctaagaagccatgcaatacaagaacttaacttttatattcagaaaaaaaaaactttaccttttttatattttgcccctcttaacctcatggtgaagcgagattgcttagctggatctatctggtgttcaaacttcaaagtattgattttaacaacttacacattgttgttgtaataaatgtcattactacatcagtggcacagatggaatcggagcctctacagttcaagattgacctgcacatagaatgcagttatccatccaatggtgagtaattttgaaaggtcttttatgtatcgcttcaatacaaaaagaaacactcaagggttaatgggtta

SEQ ID NO: 24847 - DNA, 424 bp, Glycine max
tttgatttcaataatgacttgagaaagaatttttatcttttatgctcctttatcatgtggcacgggcgatttttattttggaaagacttgtcctgactccaccaaggtataatatattgctatagctactcgtttcctttgttttttctgtgaatggaaaaaatttatatataatagtaccctaaagatgaaactaatgtactaaagatccccttctgatgtttgtccctacattttcaccttaatcacgtgtcaggttaatgagaagttttccacaaaggagaaaactccagtattgcgaactttaaaatatcatctaaaccagtgcccaaacaggctttctgaagagatggtgaagtgtatggcaactgcatattgctggctcccgagtgcaacctctgtatatagtgaaaaaagtagatca

SEQ ID NO: 24848 - DNA, 564 bp, Glycine max
agctttcccactctatgatctttatctttgggtgttctctgtctttatctagccattgaataaggaaaggctcacgggccaacagtttgctttctcacttagaaaactgtgattttctctttgtcttgaagtcataaaatgccttgtagtgtcatcatcaaatcatgtttctgtaaaattcgtgaaatttgctatgcttgtgtaatttaaaaaattgaacatttacaaattacaagtaagaaaatgaagatgaggataactttacataagtttgaaagaatcgaatttgttggtaaccatttatatcattttctcaaacttatcaagcatttttaccctttgcatggatctgacaaatagtgtcataaaaatacctgcacgttgaaatgctatatctatcagccttgagaataaatttgaacatgattggacaattacttgagataaagctctataatattttgtcacctgcaccaatgaaagatccattcgcaatagttatgttgcctttgctgctcatagtgataccaagatttagcagaggtcctcctaatacggtataca

SEQ ID NO: 24849 - DNA, 591 bp, Glycine max
  unsure (1)..(591): unsure at all n locations
tgcttctcccattttgtgagctaaatgctgatttcctgttttgtttaaaaagataaggcataatcccttcttttatttcatctatttaatgtttcaagaaattctttcataccttcaaaattgacgtattattttttttctaaatttaccggtatcaataaggggaaataaaagtatttcaagaaaggacaactcagttaaataaacttattgtttaattaggacaatttaataaaaaataataaattatttttaattcttaactaatgttcaagggatacaagattacaattaaaaaatttatatttttttaccgagaaaaaggcattatatttattaatccttctttcagttttatgaattgcttaaaaaaattccattcattaactaattcatccgttgcttaattataaattatntatttttaaaaaattacttttttagtaataaatgatagaagatatattattttaattatttcaataaaacaatatagtgaaataaacattttttttacttataatcaaatttatttaataattttaattagatcttataaaataaacctttaaaagaataataaaattgcat

SEQ ID NO: 24850 - DNA, 816 bp, Glycine max
  unsure (1)..(816): unsure at all n locations
cgggcaggagagaacagaacgagaacggagcgcaaaaaacgagacgacgagaaagaacagacggaaacacaaaanaaaaaaaagagaatgaccgagccngcanacgcanataagaaacnaccnngcacaaannacgagagggagagggcaggctaaaaaaacacaacaccggcgaaaaggaagccccggagcacaaaaacccacagaaaaagaggcgccgcccgaacggagaagacgaagagccgacccgaagacacgccaccaaaggaaacggaggaagcgcgacgaaaccgacaaggagaagaaaagagaacccgcgggaggagccgccgggggcggggacacacgcacaaacggggaagagaaaaaaggcaaccgcagggagaaaaaaggaacgaaggaagaaaaagagggggcgcacggacaaaaaagaaaaaaacgacgggggacgaaaaaaaaaggggggacacccagcgccagaaaggaacaaaaaaaaggcccgagacgccccaccaaagggagggggaaaagaggcaccgcgaaccgacagagagggacccagcaccacagccaaaagaggaaaaaagacaagcgcacagaaaaaacagaacagacgcccagaagaggggaggacgcaaaacagcacaaaaagaaaccgcaggacacaggacagacgagaacgagagaaacgacaagaaccaacaaaacaaagaaacaaacaaccgaaagcggacacaagccgaggaagaggagcgcaccgagcggaagcaacaaacaaccagcgaagcaaacgaagagaacagcaacgaaagcacc

SEQ ID NO: 24851 - DNA, 584 bp, Glycine max
  unsure (1)..(584): unsure at all n locations
tgtgtggtagcttgtgcttagttctaccctttttcctctattgtttctgtcattgatcaaaaatgacttctgctggacctactttttctttttctgaaactccgactatcacaactgcgaaactaaactggaagaactatttgtcctggtctgcttcagttgagctgtggttccttggccaaggataccatgatcatttggaaaagggtatcgatactgttccaagtgacagaaaatctgagtgggagaagctggattatcagctatgtgctgtcttgtggcaatcagtcgaggcggatgttttggagatccttagatcgttcaaaacatgttgttctttttggaagaaggccagagaaatctntgccaatgatattcagagtttgtttgatgcaactatgaaggtcacagccctcanacaaaccagccacgacatgattgcacacatatgaaaagctcgagctgcagtggaagagttgaagaggtttcttgtagctgattccttgaggaagtgaataaaaagctggataagttctatatggttcctatcttgaggagtcttcattcagattttgatcatatgc

SEQ ID NO: 24852 - DNA, 1129 bp, Glycine max
  unsure (1)..(1129): unsure at all n locations
attttgagaccancttgtcaggaancnnttttggtagatcccattatgtagaacatacccccgcccgcggctatcgcacagnacctnaanacctcaccagaagaggancanacaacgcgacgagggtgagagttgctancntctctcacncacacncactatttatactcgacggggggagacgtatatctgtgtgtagagagatgacagtaggcgcactacgatgcgctcatgcgtagcgtacatacatactgaagacgtacgctaaacgaggatgaaacgcaccacgatccgacgagaaatcagaagctagtacgcagaaaaaggagcaccgtcacgacgtgtggacgttgatagctcagcctatcatgagatcaaaacgtaactaggccattgcgtgatgggcacggaggaactgggtacacacctgatttgactggaacagtgagggtgcgtaggagaagacctgctgagatcacttgacgtatcgttgcagaatcactcaaacgtggtctacaactagatggcaccgtgagttcaagcacgtggttgcgcgcgcgcaaggtagaagcacatgaatgttgcgggcgagatatgaagagaaagtgtgcagcacacggcgagcagaacatgaggacggctatgaaaaccactatgatgcaatggacgtatggacagatacagagtggaataataccactatcactgattcggacggaaatgtaaggtaacgttctgtgttatctgaaatcgcgcgccggcatgtataaggaacagtgagcgatgctcacctgccaatatggggagcataatgacagacgttagaagaccgtgttgtccgcgctccgactgtcaaagacgccacgactctttaacgaagaagttcagctcacatgtgatagcgctatgttatgaaatacaatgtgatctaacgagcgaaaaccagtgacaaaaagagtcttggacgagtacgacagtgccagtgaagaaagcgatggttaagtaagagaagcgaggtacctacgcgtcggcaggaggcgggaccgacatgaagcgaactgcagagtagggatcgcacgagcacgaatagcatgaggtcgggtgtgataggttacgtacagaaagggcc

SEQ ID NO: 24853 - DNA, 603 bp, Glycine max
  unsure (1)..(603): unsure at all n locations
taaggggctggacattgatgatctagttgccttatttttttagactcccagtactttatttgtctatggttttttgccttcaaagcatgtaggtttatggttataatttgttttgatgagtatttacaaacttaaccttagatgcggttaaaattgagtttaaagcaaaatcatgtatatttcaaaacttttattccaaaatcaactttgcagtaaaatttactatacaattttcaactaaacacaataattacatttttttattttttttacagaatacattttttttagttaaatgcacttttggaaacaaacttgattttattttaatgtaatgagacatacacaaattttgcagaacatgtttttgtgcttcaaaagtaagcgagagagtctcattgattttcaatggaagtgaaaataggttgggttgaacaaaattatgtttaaatggactangtctagctggaaaaaaaatggacttgattatttaaaaaattaatctaaattggtctattacatattataaactttattttaggtttatctaagtttgatttgacctataaacctatctaaaaacttatttgatattaaagtttt

SEQ ID NO: 24854 - DNA, 534 bp, Glycine max
agcttgcttctacaaaatctattgacttatatagttgtccataaggataaattagagaatgtgaaaaatggttagaaattaaaattttattaaaagataaatatgcatgctacaaggctaacaaagcatagttaaaatgagataaagagaaagaatccttgaaccatttttccttttcttcaacactgccttcctcttcaagagattgcttatgaatgtaaggtcacccttctttcttgccatgatgtcataccctaatttcgttcgggtaccattgtttgagggcatgcaacctttgtttaaccgctttgaggtacttggcaccctttgttgcacaatacgtgaagttctgtgacatgctagagatcaaaaggaagcattgttacataattcgtgagattccgtaacatgccggaaatcaaaaggaagcattattacacaatctgtgagggtccgtaacattccgaaagccaaaaaaggggtaattacgtgacccgtaaggtttcgtaaccttacagaaagaaaacaagtatc

SEQ ID NO: 24855 - DNA, 610 bp, Glycine max
ctaagctttcataagtgaaatcaggtgcaacacatctctctgagtagttctctcacgaggtggagtttgagccatgttctcagtatgaaaattaacagtcgaatgctcaaaatcagaatattcagaatcacgagcaacaaaatgcacagaatgatcatgatgctcaaaatgcacagaatgaccagtatgcacactatgcctaactaatctatgaaaggttctatctatatcaggatcaaagggttgtaagtcacctggatttcccctagtcatgcactatatgcagcaaatcatgtgtttctcaaacaagcaccaggggagggttaaaactacaactttagtcaaacgatatccaaatgagctgaaattttgtgagcaacacccaaaaatcatgaaaagattgcccaaaagatttcaaacaaaaattaaaagtataactatgaaaaatacctaagaaaagtttagagaaataggacaataatacttgaaaaataaaaaaacctagtaaacaactgattttttgagtttgggagaccctaccagctaagtgagttgtcaaatatgggaaattttttctaccccaatgcatatatataatagtcattctgat

SEQ ID NO: 24856 - DNA, 457 bp, Glycine max
  unsure (1)..(457): unsure at all n locations
agcttaactagggtgctttcgnngaatctttatatatgatgccatgnagcnctggaacgtatacgaaaaaaaaaaaaaaactaacagttgtagcgaaactatatgaatttgaaagatagggaacttgtaaagctagacaactacgataaaaaaaaaaaaaattaaagtacttttttgcttcatttttgtatcgacaaatgtaattttcattaacattgcttaattgagtaggaactttcttttatttatgcagaaaattatgatatatgtttaaattcgacaaaaaattgtattatggactctcttatgaaaagtatatatgaagttttacggttttataagactaaaaaaagctacatgttctttatcgaaaaaaaaaagctacccgttaaaaaagaaacccaaaagttcctggatgaaagtgagggttaagaaaaaatgcacgtttgtacattaa

SEQ ID NO: 24857 - DNA, 479 bp, Glycine max
  unsure (1)..(479): unsure at all n locations
cttgtcccccactaccaagcaagtatcaagctattctactantctcaagctaaattcctatctcgccccttatacataatctctcaggtgtgatggttaaataactggtcttttgggcctatttgctaatagtaccctctgttctgacgcctctgcattttcctgatatgctgccattgtagtaactcgttcctctgttatagtgggttgcagtgtttgatcctccgtatcattccacggcccatggaaaagcaccttgtcctcaaggtgaaatgcatcgcgaagggcatcccaattctcccaagtagcatcatctggagacaatccctgccactgaacccaaacttttatgagtgcatcaccctttctacgtgtggccaaaataaccaatggagccactggtctttgttgatccaatgaaatacttgtgaaagtgttcaacgccactgctggatcaccatggatgaatttgagcaatg

SEQ ID NO: 24858 - DNA, 458 bp, Glycine max
agcttaactgtgtgtattcaccaattttttgatttttgcttaacgataagggggaagctgtttatgcaccaattaacatactcagatataggagacacactatgggaattggcaccctttatgtctatggtgcccaatgcacaagctatcatgcatttaatgataaatgatgttataataaaaaaaaattagaagttactgcatctaccggttgcaaaagaaatgcttgcgacttacaccaaacacacgaaaagatgattacccaagttatggccccaatcataatgttacttacatatacctgaaactctatctatgcctacctatcttaattctccggtttatacacttgttttactctgatatctctgtataaataaacttgcaggatctactgaagatcaataaaaggattctgcccgtgtaaaggagagagggtagtttgattcaaaacacat

SEQ ID NO: 24859 - DNA, 322 bp, Glycine max
ctcagcttgcacaagttccttccatgcatgatcactcggcagtagttttacgccaccacccatcatatatcccagaaccccatacccacgaaatctatcagagagagaggctcacccagacctgacatttcgaagctccgctcgtagacgcgcacttaacgactcagaaaatgctgtcctttcacgatctggagcataaatgagtaccagatgttggagctctgttggggattcaatggagaatgacggaggagaaaatggcatcctgagggacagagagagatgtctgagaaagagcgggggctgagtgaatagagagaaa

SEQ ID NO: 24860 - DNA, 603 bp, Glycine max
agcttccatcaagtggtaatcagagtttatgagcttcaagtaggtgcgccttaaacctccattaattttttgctttaccttctcttccattgttgtttcttcattttttttctccatgtatctcctcacatgtcttgtgctaaatgtttttaacatgattctttagagtttccaccaattaaacttgctatagaagctagatttgattttctatggttcaaatttcttgttcttgttcttgaaccatgaattgtgttgagtttaggttcctttgagttttgtcttgttattttttgtggctgaaacataaatcataaaattcttacaaaaatattaaagtagaagaaaacctcaaaaatctagagtgacttgttcacctattgtagttttgtcatagaagtcatgtctagtcatgaaacttgtcacataagatttcttatgttgtgcctgaatttattttcttgtttctttgtctaactcatttgttcatgagtgtacgaaattcttttaacctattattttatttgagtcaagtcttttatgttaattaatccttaacatgttcatgcaaaattcttagagtctttgattgtgaaccttttc

SEQ ID NO: 24861 - DNA, 546 bp, Glycine max
  unsure (1)..(546): unsure at all n locations
ttgagccaaaatcctgactcaccataaaccttgacctctggtgagaatgccaatcgttaccctcggaagcaaaaaaaaaaagaagagaaggaaaatttccaatcaaaggaaaaaggagaaggaaaatttccaatcaaaggaaaaaggagaaggaaaatttccaatcaaaggaaaaaagagaggaaaggaaattcccaatcaaagaatgggagaaagcaaaaagaaaagaaaggaaattcccaatcaaagaatgggagaaagaaaaaaaaagaagaagaagaaagggaagaaagttcccgatcaaagaaaacagaagaaatatgcagaaaggtctttggaccggacaatatctgaacaatacagaattgtcaccaaatgaacaaaaagaaggaaaggaaaccacgacctataatggtcttccccctttaattgccaaccaaaatcttgtgcgctagcgaacttttcgccccgcactanacaaaaacagaaaaggataagcccaccaaaaaaatcaaaagccaaaacacgcaaaagccgaaaacccat

SEQ ID NO: 24862 - DNA, 542 bp, Glycine max
  unsure (1)..(542): unsure at all n locations
agcttcttctagactcatcttctccttttagtggcgtatcctctctctcttccttctctattcgctgccattcatcttccaagaagcaaaggaattcattgatgaagaagatcttaggcctacaaactctaatggagctacaccaatactaatgccacctttctttctttgatgtctccccatttagtgttgcctaagtcttgggtgctgcccgaggtggatgtggtggatctcttgtcagaagatgaggtagaggacctagaggaggacacttcgtatgaataagacctcatcacaaagcccggcttatggaggaagattcttcaaaggattcatctgaggattctcgttagaagggctttctccatccaactntattgaattctttttgtggatacaattgactttgggcttgggtaaggatgactactctaagttttaggattttccccttatatgtattttgggacaagtagacctatgctcagaccttttgtaattattaatcatgactacttacattattggtttgggttggatat

SEQ ID NO: 24863 - DNA, 569 bp, Glycine max
  unsure (1)..(569): unsure at all n locations
tgaaatgggtgcaagggtttaatcattcttgaacattgtaaggctgngtggctaagtgtctaaatcagatcaatcatggccttcatcatttccaaatcatgcattcatttagtattcagagattcatgcaaaaatcggtactttatgctagtcgatctctcacaatttagattcacacatctcaccggcttatagcaaatgattaccttcgctatttacctgtcaaacaaactaacattttcactcacacccctaatttcatgttctttctcttctaactactgcatacttatccaaggcatgtgatctagtatcgcaaatcactcaattcatgcaatcaatccaattcaaactaatcaacaaacaccagaatttaaaccaaaagatgtttcaaaaaccaaaagccactatgcataattcaaaaccagtaaactgtttaaaaagttgtaaaatgtgctaagtaaataaataaaactaaactgaaactgaaaaactgtctaaatagcataaaaataaatggaatcctatcgtcactcatcttgaactaaaggttcgtttttaaactcatc

SEQ ID NO: 24864 - DNA, 544 bp, Glycine max
agcttgttgcaaacatttgtggtcctttctttgtgtaatccatatgttatattgttccataatatagttgcatattattgttattgaattgttccaagatatcaagatttgtactgcattcaggtgaggaaactgttacagtagctactgcttcgaaagacaggacattgaggctatggaaggtaaaataaaagctgttgagatacagttccttatgctgtgcttatgcttactatgttatgttttcccatttgtgttaaagctcaatgctggggatcatgtaaacaatcctatgagggttagggcttacaaaatcttgcgtggtcataagtcttctgtacagtgtgttgcagtgcagactgctggagagatggttcgtatttgcttttctatttttaacttctccactttttttctccttgtatgagtagagtaatagtagtgtgtagcattagtcttcttctattgtgtttcataggtttgttcagcttcttgggattgcaccatcaatctatggcaaactaatgactttaatgcggaagat

SEQ ID NO: 24865 - DNA, 583 bp, Glycine max
gacactatgaaactcagcttggtattcctgcattcactaaatatttattgtttttgctttgcctgagaataacaattggttgaccacaacagcgctgggggcggcaacggacaatggtctttcaaataaacctgttgtacatgaacaaacattatatcatgcgctgaccgtgccaaacgaacaagcgaagtcattgcataattgttacactaactatattcaatgtacctgaacaaaatgatttccaaacacgtgaccgacacatatgatgcggtggccagaagagtcaggtggtggttgacttctaagagggaaaaatgtcatgctttgttgttgggacaacgatacaaagattacgttataccgtgaagcaatcacatatcccatgtctgttatatccatccacttgtccacactaacctgaatgaaccagacatacacatgtaagtaatttaaacattgttattaaaaaaaattaacctaaaaacatacctttgaaaatccatcaacaagtagggacaactttaattgtcaaatctctctgtgccaccgaagaggttcatgtactcatgcgatcacctgc

SEQ ID NO: 24866 - DNA, 668 bp, Glycine max
  unsure (1)..(668): unsure at all n locations
agcttcatacaactttgtgcgattttttcctgttcgttcggacctattgtttcttctaatcctcctttagaaatgaaatgaaaatgtcttaaatctcattattggttatgagaaattctatctgtatgctttcattcctccttcgtcgcattattttttgagaaaaaaaaatgtgtgttgttctgatcgtattgggggtttgtttctttaccaagcacgttcgcattttagtgaaagctttaaggaacttcaatgtcttctgtcttttacttttcaagacttcaatgtctgaattctttacattttcaagacttcaatgtcttcagtctttacttttcaagacttcaatgtcttcatgtcttcagtctttacattttcaagacttcaatatctttagtctttacgtttcaagacttcaatgtcttcagtcttttatgttcctaaagacttaatgtctcctatttttgntatgcaagcctacaacatcttttgcttaatacttttgatacttccgtattgatatccttttgttctttttataaggttcacttccttggctttcgctaagttccaacccgatagcatgatcgcttgaatgaaactagtggccttatctttacttaccttttgattttcaataaaagataagtaaaaaaggggcactatca

SEQ ID NO: 24867 - DNA, 565 bp, Glycine max
  unsure (1)..(565): unsure at all n locations
tcagcctgatcactaagcgacagcttatccatggctttgcgtgttctattgtcgccaagcgcaattccttacggccaaaattgaggtccatgatgctaagcgccaatcatggcagctaagtgagattcattgcagcaatgtgagcactaagcgagtccctctcagctaagcacatgctcctctatacttaagatgcatcattttagctaagctggccagagcctggcttagcgagagttgcagcttttctaatctgcagacctcgctaagcggaagaatcaatgcgctaagctaagccttttctctgtgaaaaaaaaactttttgaatttgaaacatcggctaagcgcgcggattcgctaagcaacaagtcttgaaaaaccaaacgtncctctctcgcttagcgagacatttgctaagcgcgagtgtcgaaaatcgcttgggtaagtgtagcttcaggacattgacaagtgctgaacctaagggacagttggagaaatatgcacaaacacccatttctttttctcctctttattcaatcttgcatctgcattgtatttactgaat

SEQ ID NO: 24868 - DNA, 480 bp, Glycine max
ggctaaatcccaaaggaatagaggagtttaggggattttgtgcatattaagaaaaaaaataagaaaataaaaagaagtaaggataaaaattaaacatgaagagtagaaccaagagtttcatcattcttgtgccatttaagatcttattcactcaactttattgctttttttttttccgaatttttttccgaatttttttttttttttttttttagcctttgagaaacaacatttcattcagcatgtccaacatttaaccaatatacaatgtacatcaagtatggcccaaaatacatcatgaagcatagccaacaaaacaagttgtccaatgaaacaaaaaccccccacccacacttattcccaaaacaattccaaagctccaaaattccttaaggatatggtaatatcatggtttttcacttaaggcttgtagtgagcttcaaaacaaggaaagggaaacaaggctcaaaagggctatca

SEQ ID NO: 24869 - DNA, 607 bp, Glycine max
  unsure (1)..(607): unsure at all n locations
tgttgctcctcctgctgctgctgcaccttgaagnatttgtggctttgttcaaccagttcctccatctagcacctcctcccctgaccatactcgaaaataacgttctttgttgttgttctctattcttttgagttttctcttctgtcctttttttttttaaagatttttctgttttaattttacttgtacttgagatagaagattataggcttacgagggaaatgggtgttatagtcttgtagagtacacacattatgcattatgcttcacggatttaatttttgagctggaagtttttcatctgtttgtgctggttatctttcatgattatgatatcttgtagccttgtagactaggatatcttgtattgttgttgccgagttgagaacctttctctcttgtgatgttccatcttgcatatcaacggtgctacactgtacgaaaggattggagtacgaaattcacgaagttccttcatagtaaaaaagttaactcttattattaattattatacctatattattatgtaattattttaaaaaataaattaaaagaaaaccagaataacaatcttttgattttatcccgaatctatctcattattttg

SEQ ID NO: 24870 - DNA, 600 bp, Glycine max
  unsure (1)..(600): unsure at all n locations
agcttgctgcatgttctttctttgattttccaactttgtgtattttttatctgnggactggtatgtttggtgattatgtctctacactttgtgtaaatattactttggtagatagtaaattaggcattcccatacagttatgctatgattttctgatgatcaaagcagcacaccaactgcacagtttatttcatttcactcaagaggtggacttagatttgtgatgtacacaattgtataatggtaattgaaatcatttgattgatcttcttcggcttgataaagcattgtatcttatgtttgtttgcataagtgttgttcctcttgttaccaactaatctatgcagttaaattttgtccattgagaaacaaaaggtaatcttagagtgtcgttgacatattggtatgtaaattacactcattattctaaatatgtccatgttgtttttgaagtattattggttgacatattggtatgcttaaccacaaattattaatggcgtactaagaatcaaaataaacaatatttattgcaatactttgtaaaaagtaaactgatagtgactatgctggtataaaaccatatttaactaactccct

SEQ ID NO: 24871 - DNA, 516 bp, Glycine max
  unsure (1)..(516): unsure at all n locations
ttagcttctttaggaatcttctcaaggaagcttcttttgttgttagcttagttattagaggggtgtgtgtagctaagctctagcttctcaaggaagtcttctaaaagaagcttctcaaggaagttttctcaagaaagcttctcaatgaagctacctagtctataaatagaagcatgtgtaacacttgttgtaactttgatgaatgagagtcttgtgagacacaactcaaagttcaacttttctcccccttttcctcctttaattttgtgctcccccctctctctttcttttcctccattgaagcatcctctccaagcttcttatccaaggcacaattttggtggcgaagctccttcttccatggcttattccctagtggatggcgcctcctctcacctcttcttctttatcttctgctgcatctccatggtggaaaatcaccattgaaggacctcattgaagctcaaatatccagcctncatagaagcttcacaagcaagcttccattaagatttt

SEQ ID NO: 24872 - DNA, 424 bp, Glycine max
  unsure (1)..(424): unsure at all n locations
aaaagnactaccggatcngtatgttattatgggtgattgagttcctacatggagtcctaagaagcaaggcattgtgacactttctacttgtgaagccgagtatgtagctgcaacttcttgcacatgtcatgccatttggctaataagattgttggaggaacttcagctgttgcaaaaggaaagcacaaagatctatgttgataatatatctacacaagagcttgccaagaatccggtgttccatgaacgaagtatgcatatagatacaaggtatctttccattatagagtgccttaccaagaaagaataaaaatcgactcatgtgaaaacccaagatcaagttgcggatattttcaccaagcctctcaaaattaagatcttttaaaattgccagcaaaacttggtgtgcagaaaaattttccaa

SEQ ID NO: 24873 - DNA, 191 bp, Glycine max
ccgtccaaagctccggctatggccacataaacgtctctcaactcgtcgcatatcttttcggaccttgatggccattgtcttgaaccataacttgcacacgttgcacccttataagatcggacatataggcttgcacctcttcactctcctcaggggtttccacctcttcctcacttgaaacctttagcttt

SEQ ID NO: 24874 - DNA, 658 bp, Glycine max
  unsure (1)..(658): unsure at all n locations
agcttagaggttgtgtgttcttcaattttcattggccacaccaaatgattaaaaatctttatgctttagactcgttgttgaattcacactcgagtttaggggctatgcatcctcatgtctccattgacagagttcaatagttaaagaattttgtgctttaacactttgtgctattcacactcgagcctagaggatgtgtaccctcgaatcttcattggattgcacctgctttatgccactcgagcataggaaatcatagagataagatataattaatccttactatatagtaaacaaccactatataatccgttttttcactaaactaggtgatttttttagaaagtatagaaagtatttaccaagatcctattttcatcaacattggtttcaaatatagccaatgcaaaaaaaagtatttctacatcaattatattataattaatgtagaaaggtaaaaaaatggtggaaaataggtggcaccaccctgccatataatccgcactcaatccaagagcaagacagaatacactctcttatgcgctagataggaaaacctttttccagaataaaattcaatggacggagaagccctttttgggtttgagagtgtgcatanacgatgctttaacggatgatgatgtggtggattttgatt

SEQ ID NO: 24875 - DNA, 588 bp, Glycine max
tcaagcttttagtcttcaagaacataatataaagaaagttcgttttttctattgaggcagaaaggaagatactggatcatagagtgaatgaactgcaggatagacaagaaaccgcagctgaattagaggagaaaatgagatctcaaactggtttactggctgccaaagatcaaggtgagctttgtctgattccttctcttttgagaagtgatcttgtaatattttttatggatgagaaacttacatttctggaacttaatggtttattgcagaaatcgaagcactaatgcatgcacttgatgaggaagaaacgcagatggaagaattaacaaataagattgtggatcttgaaacggtagttcaacaaaagaatcaagagattgagaaccttggatctttccgtggtaaggttatgaaaaagctttccataactgttagtaagtttgatgagcttcaccacctgtctgcaagtctcctttctgaggttgaaaagctccaatcccagttgctagaaagagatactgaaatttcttttttgaggcaagaagttactagatgcacctatgatgctcttcttgatcacaaatg

SEQ ID NO: 24876 - DNA, 246 bp, Glycine max
  unsure (1)..(246): unsure at all n locations
agcttcaatgaaggaagtataatgagagtgatagagngttgcaatcctaccccttaagggcattggatataaaactccaagaagattgggccacagatgcacgagaaggccctacggttctcatgagccttaaggtctacttcatgcccctgacatgggctaaggattaactcacttatcttgtgatcttagattaaggattccctctccttggccctcggatttagggctccatattatacgtgc

SEQ ID NO: 24877 - DNA, 284 bp, Glycine max
cgaacgagcccgagatgtcgaagatttttcatgtccatagccatcaaagtccgaaaagagtatgatgaactaatggacgtcaatatggccaccggtgatgccttgtaacgagaaaccaagatggcccaaatgaagaacacctgccaacaaagtattgaggggcttcatagggcaatgggtgtaatctcaatctccaaagaagtgaatggaatcatcatgggtcaaaggcatgatctggagcgacgagcttaaggcttgccttaggtcgaaaagaaatttgaccc

SEQ ID NO: 24878 - DNA, 470 bp, Glycine max
gcttcacgttcattttcagcgtctttatagtttcgggactcaatcagacatccgagaaaaaagttattgtcgtttgaattagctcagaagttcaacattcaatttcgagcgtctcgatatgttacgggactcaatcagacatccgagtaaaaagtcattgtcgtttgaattggctcagagcttcaacattcaatttcgagcgtctcgatatattacgagcctcaatcaaacatccgagtaaaaatttatggtcgtttgtattggctccgagcttcaacgttcattttcgagcgtctcgatatgttacgggactcaatcagacatccgagaaaaaagttattgtcgtttgaattggctcagagattcaacattcaatttcgagcgtctcgatatgttacgggactcaatcagacctccgaataaaaaagtaattgtcgtttgaattggctcagaacctcaacattcaattt

SEQ ID NO: 24879 - DNA, 573 bp, Glycine max
  unsure (1)..(573): unsure at all n locations
ttgagccaattcagacaacaataactttttactcgttgtcttatngagtcccgtaatatatcgagacgctcgaaattgaatgttgaacctctgagcaaactcaaacgacaataactttttactcggatgtctgattgagtcccgtcatatatcgagacgctcgaaattgaatgttgaacctcatagcgaattcaaaccacaataactttatactcggatgtctgattgagtcccgtaatatatcgagacgctcgaagttgaatgtttaagctttcagccatttcaaacgataataactttttactcggatatctgattgagtcccgtaatataacgagacgctcgaaattgaatgttgaagctctgaactagttcaagcgacaataactttttactccgatgtctgattgagtcccggaatatatcgatacgctcgaaattgaatgttgaatctctgagccaattcaaacgacaataaccttttactcggatgtctgattgagtcccgaaaatatcgaaaccctcgaaaatgaatgttgaatctttgaaccaattcaaacgaaccaaaacttt

SEQ ID NO: 24880 - DNA, 583 bp, Glycine max
agcttggatttccttttagtagggaatctatcttttcttagatggagccaaacccagtcaccctcattaagaactagctcttttcttcctttattgcctttagttgaatacacctttgtttgattctctatttggttcttaacccactcatgcaacttctttacaaacattgacctagattccccttctttatgtataaaagaagtgtctagtgggagggggaatgaggtctaacggttttagcggattgaacccatagacaacctcaaaaggtgactgcttggtggttttatgaacccccctgttttagaaaaattctacatgaggaagatactcatcccaagacttatggttgccattcagaagagcccttaaaagggtggataaagacctattcactacctttgtttgcccatcaatttgtggttaagaagtggtagtgaaaagaaagttagttcctagcttatcccataaggttttccaaaagtggctaaggaacttggcatctctatctgacacaatggtccaaggcaaaccatggagtctcacaacttccctaaaaaaaagtttgagatgtgggaag

SEQ ID NO: 24881 - DNA, 551 bp, Glycine max
tgtgggattttgtgatagtgattttgccggagatgctattatagaaaaagtactaccggatttgtattttttatgggtgattgtgtttttacatggagttctaagaagcaaggcattgtgacactttctacttgtgaagccgagtatgtagctgcaacttcttgcacatgtcatgccatttggctaagaagattgttggaggaacttcagttgttgcaaaaggaaagcacaaagatctatgttgataatagatctacacaagagcttgccaagaatccggtgttccatgaacgaagtaagcatatagatacaaggtattatttcattagagagtgcattacaaagaaagaagtagaattgactcatgtgaaaactcaagatcaagttgcggatattttcaccaagcctctcaaatttgaagattttcgaagattgcgagcaagacttggtgtgcagaagaattttccaattaagggaggatgttagatattaattagaccaatattaataacaagttttatgagccttaaattgtggaagatgaaagttgt

SEQ ID NO: 24882 - DNA, 559 bp, Glycine max
agcttgctactacaatctccccctttttgatgatgacaactctgaaatcaagaaacacatacacacactttttcctagtcgatcactcacttaattttccattctccccttttgtttttgagtttatgcttcacttgaaattaagttaattacttatgtgagttcttgatttaatccatatttctctccccctttggcatcaataaaaagccaaagtgcataacaagtataaaacatacatacactattaatcattcacaagacattcattgaagaatataaaaccaatcatgaagcaagaaacatgaatagatcaaatatataaaaaccacatagtcatataacataattcatgatttttcaaacataccatgcaaataaaagaaatactaaattgttcaaatgtcataataatatagcaaaatacatggctagaaaacaaagtgctagtaatattaaaaatattagaaaaactaaaatgatggtggcggtggtggtggtagatcaaagcttgtacgaatgtaagaaacatcttcttcaaccttggtgattcttgact

SEQ ID NO: 24883 - DNA, 535 bp, Glycine max
tgagctcgctgttgctaccccacaaagcccatcgaatcttgttttggccccattcttcctttcatgccctctttgtttcccgttccaatgctttggctatggccacatagacgtctctcaactcgtcgcattcttttcggaccttgatggccattgtcttgaacctttccttgaccgcttgcaccctttcaagttcggccttcaaggcttgcacctcttcactctcctcaggggtttccacctcttcctcacttgaaacctttagcttcgggagccaatctaactcttgtgtccgagccttcagccacttgtgatagtcgccgaagatcccattgctgcttcgcctaagctccttatcttttctttgcaccatgctccatgcctttcaaaccctttgaaatatccttgcattggggtcacttaaaccccgtgtgatgaagggcgtgatactttctttcaacgatgctcctttcatgtggtaggcaagttgtcttatggcaaggataggattataattgatacaacccctcaatcc

SEQ ID NO: 24884 - DNA, 516 bp, Glycine max
agcttggattgtttgggatatgagcttctacttccttgttggtcgacacaggaagaagaaaaaaagtgccatgtagtttatgtagaaaaggttcatgttggtggtttctgggaggaggtaagcgaagttactttattagcctttcaacatttcaagactaaagaattgagcttgggaaccagttaagcataaaaccacacgtggttccccagagtgaaggaaaaaaataggttgtgctaaacaaaagtgtaacagtaaaccccacccatcctccaaattacaagcaatacggagacaaagccaaaagacaagagaacatcatccttggcttgacaaagattttctattgactgaatagagcaatgttgtcagtatcaggtccaagtagagatcaaaataataaaaataaaaataaaaaatatttaaaaatgaagggatgaatagagaaatgttgttagtatcaggtccaagtggagatcaaaataaaaaaataaataaaaacaatattaaaaaatg

SEQ ID NO: 24885 - DNA, 461 bp, Glycine max
tcggaagaaagtgatgaggtacaagcccttaggcattgcttgaaagagcccgagtagtcgaagagaagttcaagtccatagccatcaaagtctgaaaagagtatgatgaactaagggacgtcaatatggccaccgctgatgccttggaacgagaaaccaagaaggcccaaaggaagaacacgtgccagcaaagttttgaggggctttatagggcagcaatagtaagctcaagctccgaagaggtgaaaggaatcatcatgggtcaaaggcatgatctggaaggacgagctaaaggcttgccttaggtcgaaaagaaatttgtcccaacagttaaagtgagactgaagggaatatgtgggccatcatcgatgagtgcaaagagaagctaaatctagcggcgactcacgagcaaaggctagaagatgagtacgccaagatatcagccgaaagggaagcaaggg

SEQ ID NO: 24886 - DNA, 478 bp, Glycine max
agcttgggacgttggggtacggcttttgttgaaagaaggagaaaggaatggctgttttccaaggctacacgaaaaataagacttgaaacactcaagtgtttctgctctcgggaaaagaagtgtttctcacacaccagaagacatattgcagattgcaatggtcagatcatggacatctgtccttttaacctccagaccaaatttcgataagatccaacagttaatgaatgcaggagggcacttttaccaagacggcttcaggtagcttccttgagaagctttctcgtgaggcttctttgtgaagcttccttgagtggcttctttgagaagctaaagtcttaactacccacacccctctaataaataaactaacctccttgaaaataaaacatgaataaaatagcacaacaaataaaatcaaacatcaattataattactaataatatttcagggtgttacacccttgctcctacgtat

SEQ ID NO: 24887 - DNA, 434 bp, Glycine max
tgtaggccttagatcttcttcatcaatttttttcttgcttcttgaagatcaatggcagcggaatggagaaggaggaaaggtgattatagatgtcacttcaaggaaaaaatgagtcaaaatcaagttcaccaccataggaagccatggataagagctagaaagtacggaaagatgagtggagggagagggagaaagaagagggtaccttagtaatgtaggatttttcagcccttgtattttaggacacttatactagtttttgtattaagaataattttataatttcacatgcattaaatgtattatttgatgtgtgtatgttggtagataaattcaattgaattagaagaagcacaatgcacatgatgtagtaccatgtgagatgtgttgaaagtgaaaacaagatcatagagagaaggggttgacatcatgga

SEQ ID NO: 24888 - DNA, 546 bp, Glycine max
  unsure (1)..(546): unsure at all n locations
agctttacttcatttcttcaagtagtgtatgatttgcttccagattaaaacacgttgcctaaaagttactatcaggccaagaaaatactatgtccgatgggtatggagtatcaaaagattcatgcttgcccgaatgattgcatactatacaggcatgaattcaaagaaatgtccaaatgccctaggtgtgggtcgtcacggtacaaagtaaaggatgatgaggactacagttcggatgaaaactcaaagaagggcccttcaatgaaggtgttgtggtatcttcccatcattccaaggtttaagcgtctttttgctaatggagacgacgcaaaagaccttacctggcatgcaaatgggagaaactctgatggaatggtttgtcatccggctgactgctcccagnggaagaagattgatcgtttgtatccggattttagcaaagaggcaagaaatcttatgcttggactatccagtgatggaatgaatccatatgacaatntaagcactcaacacagttcatggccagttatgctagtaatttacaat

SEQ ID NO: 24889 - DNA, 487 bp, Glycine max
tcgctttgacttgagtcatcaagagattataaatatgtgactttgttatgagtttcaattaattatcatcgtcaatcatctttgaatcatctatctttttcaacatcatctctcaaacatctttcaatcaatctttcaatatctttctatagaattttctgattcatttctcttcatctttctaaaagttttttatcaacactttcttttccaagaaaagttctttgttcaaaaacttgtgctattcatctttttcattctcttctccctttgccaaaagaacgaaggactaaccgcctaaattcttttgtgtctctcttttcccttacaaaagattcaaaggactaaacgcctgagaattcttttgattcttcccttccccttaagcaaaggatttcaaaggactaaccacctgagatatcttttgtttccccttacaaagattcaaagaactaaccgcctgagaattctttatcctaacacattg

SEQ ID NO: 24890 - DNA, 593 bp, Glycine max
agcttgtcagagctatcatcacatgattctttattgttacaaaataagttgctttctaggaaacttgagattttagcagaaacacatggtaagttgccaattaaactatctattggtcaacctacacattcttctgttttgcaggttataggttgtaccatgtgtggcgaggctcatgaaacaggccaatgtattcccattgaagaaaacactcaagaagttcactatatgggaaatcaacagagataaggatatactcaaggaggattctcaggcttctagcagggtccttataaccaacaaggacagtggagattacaccctatcaatcaattcaacaaggactaaggtgaaccttccaacaggccaattcaacaagggcctaacatcttttagaggactactaagttggaggagactttgactcagtttatgcaggtaacaatgtcaaatcataaaagcactgagtcagcattgaaaaaccttgaggttcaggtgggacaactggccaagcagatagctgacaagtcatcaagcagttttgtggcgaatacaaaaaaaaatcctaaagatgaatgcaaagctgtgatgac

SEQ ID NO: 24891 - DNA, 528 bp, Glycine max
  unsure (1)..(528): unsure at all n locations
tgcacaacaagtaactatatctatttttgtacaaaatctacttactaacttccactaatatatacaattacaactcagaaggaagggatggaccttgattaggcctatctaatctacctaattaaactaatcacatagcaaagcctaaattcacaacccaattattcaagtgcaaaggttctgactttcaggcccaagcttatttgtgaaaaaattgaagatcactttcttagctttccaaggactgctcacaagatccatttgaagttctttagtgtcctataggccttgcacaaggcagatatgttaggtaagcacaaaaatccaaaaataagccacaactatcaattaaactcaaccattttcctaagaccaaaaatgaattaaggtagaaaaatagtagtcaaagagagctcaaataggctaagaagaatagaaaaatactaaactacaaatgctcaatcaaattcccctacactttatattttgcactcctggacaaaactaanagactaagaaaaagaaatc

SEQ ID NO: 24892 - DNA, 609 bp, Glycine max
agcttatggatggcgtgtctggcttccttttggtatttttcctgttctcctattcaaggtacaaccaaatcaggaagcaccctctagatgaagagaaaaccgccttcataactgaagacaccaatttttgttacagggtcatgccctccggactcaagaatgcaagagccacatacaaaaggatcatggaccgggtctttaaacaacaaataggccaaaatgtcaaattctatgtggatgacatggtcgtcaagtctcatagtgtagcccaacacttaatagatttggaggaagtgtttggagagattcacaagtataacatgtgcctcaatcctgaaaagtacacatttggggttggaagtggaaaattcttgggcttcatgatcacccacaagggaattaaagccaaccttgacaagtgtacgatgatactagaaatgcacaatcctaccaatgtcggagaagtggagaaactaaaaagtagactgacgtctttgtccacgtttctcccgaagcttgcagaaaaggcgaggccattctacaagttactcaaaaatactgagctgtccccaaacaaatgtgtccctgggcgaatctcaaaggctcgtc

SEQ ID NO: 24893 - DNA, 518 bp, Glycine max
tgcctaattaacctgaaattgagagaaaatgattacctaacactcaaaatggaagtactaagtatttattacctatgcttagtagaaaatacttataacactacaaaataaccataaattggaagagtttgatacaatttacacaagttttatacacaaaagttagtcgtattcatcgactaacaccagtccccatgaaaagttagcaatttccagtgttgaaaccaaacataattttgcctcatcatccaacaccagtaccataaacataaaatgcttcaaatgcttaggcagaggacatattgcttttgattgtccaacctggaggaccgtgatcatgaaggcagatggagaaatcaccagtgaatctaaaatcaatgaagaagaagtggaagaatagcttgaggaggaagctatgtagggtgatatgctaatggtgagaaggctctggggaagtcagatgcagccactggacaacactcaaagagaaaatattttccacaccagatgcacaatta

SEQ ID NO: 24894 - DNA, 526 bp, Glycine max
agcttcaacattcaatttcgagcggctttatatattttggtactcaatcagaaatccgagtaaaaagttattgtcgttggaattggctcataggttcaacattcaatttcaagcgtctcgatatattacgggactcaatcagacatccgagtaaaaagttattgtcgtttgaattggctcagaggtttaacattcaatttcaagcgtctcgatatattacgggactcaatcagacatccgagtaaaaagttattgtcgtttgagttggctcagaggttcaacattcaatttcgagcgtcccgatatattacggcactgaatcggacatccgagtaaaaagttattgtcgtttgaattggcttagagcttcaacattcaatttcgagcgtgtcgatatattacgggactcaatcggacatccgagtaaaaagttattgtcgtttgaattggctcagaggttcaacattcaatttcgagcgtctcgatatattacgggactcaatcagacatccgagaaaaaagtatt

SEQ ID NO: 24895 - DNA, 951 bp, Glycine max
  unsure (1)..(951): unsure at all n locations
cgaannnaacgagaacgnctcggacttgcatgagactttgttagnnaacnnctnnnnanttannannaactcctcacgctactccgtgctcaaacgcgccgacgcgcggggagaggggagcttttccctctttctatctgcgacgcgaccgcgcggcggtgattaagacgaaccgtgactagatccatttcgaactctactacatccaaaggctaagatagtagtttagccgtacagttttcatcacaaataactgaacacaaatgcgtgcctggtgggcaaacgggtataagttaacccttctaagagcagtgttgcttgatatgatcagtttgatcatagggacgcaccgactgactcgaacggccgacgtagaccttgtggcaaaatccatgtttcacgttggtccgggggtcaaaccttttcaaaaaatctagacaagaacgcctggacactgcctacacatgggtctccatttcctcacactagtgggggagatcgtcttggaccatcatccgccttattattacatggaccgaactcgagctattgtctttcatcttacctcacaccaccagcatgaatctggctctttcctctgcaatggaatacctcgattcctcagcttctcaacactatagaacatcattgtgtcgtttagcctctctactcgacttcacacttttacctttcctgtgagctataaacaacatgagttacatagatctcgctgcacctctctgttctcgtacatgatatcggagcatgtgctttatattcataatcctccacgacgtgaacacaatctgatacctcacctggcgggtacaaacaccctatatcatcgctaccgtcctgtacacttatctacacgatccgacgagttcttcgatacacgtggctacgctctcgaatctaatggactgtggaaatgcatcaccattgtgagcg

SEQ ID NO: 24896 - DNA, 682 bp, Glycine max
agcttggaactctagaacttaaatagttttcaagatttatatggttcaatacttgccctgaagacaattgatgttgaacaaaaattaatggagtgcaatttcaagaataaagtagtagtacaaactcaaagaaacacacaatgaggcaagagctttttaataatgattgaaacaagaaggattatattaaagagcaaaaaaagaagaagaaaaaaacaccgaaaaaggatatacttcctaaaagctacttagtggctttgaccactacttgagaactcctgtcaagaggaacatttatatgctgaaaacaatcatcagctataactatttatatgctgagaactcttgtacaaactcatttatgcataatatcacaaattcatgttctttcatgatgttaaccttctttctagattcacactgtaccactccccatgctttgacaggtacggccacaatagtctacaaagcataaattttatcaatatacataactcacgactttaaagaataaagataatcaaataagcatacttcgtatggtattaagacactagttgcatgtaaacttggtaacttcaactaaagtaattatattttgaccattggaagaaatggtgaaaagtgaggggggaaggaaaaatattgaagcttggaacttcaactaaaatgcatttttgtt

SEQ ID NO: 24897 - DNA, 447 bp, Glycine max
ttgagaatatggttgcagccattggtcaatatggtgttcatttgcccattcctagctatcatgacattagagttccactcttgaagaaggaagttgaatatactgaaaatttgatgaaaggtcatagggagcaatgggtcaagtatggttgtactattatgtctgatgcatggactgatcggaaacaaagatgcatcattaattttttgattaactctcaagctggttccatgtttttgaagtctgttgatggatctgattttgtaaagaaaggtgaaaagctttttgagttgcttgatgccattgtggtggaagttggagaagagaatgttgttcaagttgtaaccgataatgggagcaactatgttttatcacgtaagttgttagaggagaaaaagaaacatatttattggactccttgtgcagctcattgtattgatttgatgc

SEQ ID NO: 24898 - DNA, 604 bp, Glycine max
  unsure (1)..(604): unsure at all n locations
agcttaaaaangaattttacgttttatactgctggtaatcgattaccatatatgtgtaatcgattacacagtgcaaattttgaattcaaattttaatagctgttgtaaatcatttttggccaccggtaatcaattacatcctctgataatcgattaccagagaataaatctcttgaaaaagattttttaacttaaatttcttggccaaaccttttgctacttcaattaggaattcccttcctatttaatatacccttcctaagactctagagattgtcttgatcatccatcttgaatatctttaatttctttatcttgaataaagctttgagaagcatgtaatcctttggcatcatcaaaacattcagcttgatcctttgtctacagaagggacatgaatggagaagtgtaagagtgtaatgcgacacataataatcaggaaacctattttctttgtttatgaaatgaggttaaaaatgtagtgaaatgaaataaaaatcatatcatcgttatttttcccaacacatttctgtttcgaaattgcatttaaaacaaaaaacatgaaattgtaaccaccttgaatggagcctaaagtttcaaatat

SEQ ID NO: 24899 - DNA, 470 bp, Glycine max
taatgagttgagggtagagctttgtttccctttttatgatgacttcggcatttgtagtctccatagcatggtaaacagatgaaacaccctatgctgagacaaattcaatagtcccaagtactttattaaacaaatgtattttgtttttttgatgttgaacttgatttttaacatcgggtaggggtacctgtccctttgtgctttacataaaggaaaatgaccctttaagaaaagaaggagttgaattaaaaccgtttgacaaggataaaaaattatagcattatatgttatgttgctagctccaacagagttactaagaggtggaaatttatattaccattcctttatgtcacttccatgtcctgcctttttaatctgtttttcttatccacatgttgtgttggtcgatagaacgtgttgccaagctccatagacgtcattatagtcgctctacattgaacatgtgaatg

SEQ ID NO: 24900 - DNA, 602 bp, Glycine max
agcttctcgatatattatgcccctgatttggacccttttttgataacttatgaccatttgaatttctcaagagctttcgttgtacaatttcgagcgtctcgatatattaagcgcctaaatcggacctccgtgtgataagttatgaccatttgaatttcccgagagctttcgttgttcaatttcgagcttctcgatataatatgcgcctgaatcggacttccgtgcgaaaagttatgaccatgtgaatttgtcgagagcattcgttgttcaaattcgagcgtctcgatatactatgcgcctgaattggacctccgtgtaacaagttatgaccatttgagtttctcgagagcatttgttgttcattttcaagcgtatcgatatactatgcgccttaatcggactctatgtgacaaggtatgaccatatgaatttctcgagagcattcgttgttcaattaggagcagttcgaaatattattgcgctctaatcggacttccgtgtgacaaggtatgaccatttgagttttctcgtgagcttccggtgttcaatttcaagccttctcgatatattatgcgccggaacggatattccatttgaaattg

SEQ ID NO: 24901 - DNA, 299 bp, Glycine max
gatggacctcgattacgcctatcatgcctaccaaattaaactaatcacatagcaaagcctaaattcacaacccaagtattcaagtgcagaggttctgactttcaggcccaagcttatttgtgagaaaattgaagaccactgtcttagctttccaaggactgctcacaagaaccattcgaagttctttagtgacctataggacttgcacaacgcagaaatgttaagtacgcacaaaaatccataaataatccacaactatcaattaaactcaaccattttcctaagaccaaaaatgaatt

SEQ ID NO: 24902 - DNA, 589 bp, Glycine max
  unsure (1)..(589): unsure at all n locations
agctttggctggaggtgttattccctttttgtcctcaaggcttttagtgttatcaatgtggctccttangatttaagaaatgtttggatgaatactttattctattgtggcccaaatggaatttcgtgtctcccatattttctgagatagtaatgtatgcgctgatcatttggctaattatggtgtagaattactctattatgttggaagataaactttgaatttggatgaggtgtagaaggggagatacttggtattgcaaggacaaaaaaataaaggtaacctttgttatttggatggacaagacttgaagagaaaccatgattgcaaagtgaagaagaaaatgaagttttctaatattgtagaagtgttgggagatacttccgttggaggaggagtttgtactttcaaattgatcgaaggatatttctcttttggcttgagggggagaattgtagtgtttcaagcgaaaaagataaggtgcatttaatacatagtgggaattgaatttttatcacaaaggtttagcttgtttaaatacaaagtgaaagattgcattttactagatgaaacgtatttgattggatga

SEQ ID NO: 24903 - DNA, 530 bp, Glycine max
  unsure (1)..(530): unsure at all n locations
agcttgagcttatggtttctgccccataatccttctaaacnagngccngctccattcttccttatgggccctctttggttcccgctctaacgcttcggccatagtcacattgacatcccttatctcgtcacactcttttctgaccctagtgactgttgtcttgagcttttccttgaccactctcgttctttcaagctctgctttcaaggcttgcacttcttttctctcctcagggactttagcttcttccccacttgaaatctttagcttcgggagccaagctatcccttgcgtccgaaccttcaaccatttatgatagctgccgatgactccgntgctgcttcctctaagctcattatcctttctttccaccgtattccatgctttttagactctctgaaacatttttgcattgcattcactgaaaccccgtacgacaaaaggcacgatgatctcttctgatggcgcccctctcatagggtagccctattgtcttatggccactaccggattattattaatacaacccc

SEQ ID NO: 24904 - DNA, 279 bp, Glycine max
tatacatcagtgcatttcccagcagcaggtttcgttttttattttgcttttggggtgttatgagagtgaagagaaaattaaacaaataattttaaggaaaagagagtttgtgtcagtttcttacaagaaggaaaatatggtgttggtggagagggttttgtagtctttaagagagtgtgctgttatgtcagttaatatggggaaaaaaataaaaaaaaagcatagaggagttgtggcgaagcatgtgtaatgtggcgaggggtcaaacttttataaagc

SEQ ID NO: 24905 - DNA, 375 bp, Glycine max
ggagcctcatgagagggctccatacccgaatcagataaacgctaagaaggccgcatccaagaagtgatacctggcccgcccccagcgagcaatgatcgaacaactcgaactaacatctaacaccaaaaccgtaatccaaaaagggggttggggttgttaatcccacagccatcgcacttcacttaagataataacacatctaagacatgttgcctccccttgatggaaaaacaagtctcttattctagattaccagacctatccctaatcagatcaaccacttaatcccacccaaaattaatttacctaagtgagaattaacacaaagctgtcatcacgtattaagcaccccatcccccaataattcctttcaca

SEQ ID NO: 24906 - DNA, 253 bp, Glycine max
agaaactcagcttgcctgcccgagcagcagtcttgagggccttcgtctattttgcgaacggtcaccaacccgggaggggtttaagcaaagacagggggggcatatccagcctgatgactgccaaaagaaatccggggacctactgattaggctataagcccactcacgcatatgcaaatagaagtatcgcgggaaggaccggccgtggtccaacctcccagatgagaccagacagtgagggaaacgcgccctg

SEQ ID NO: 24907 - DNA, 96 bp, Glycine max
tgtcaagagaccacttgaagagatgtatcctttataaaaacttaaaaaccctttggaaaacttatatcttttatacaacgttgaaaactattggaa

SEQ ID NO: 24908 - DNA, 509 bp, Glycine max
  unsure (1)..(509): unsure at all n locations
agctttagtctacatgtttttaatgttgnttcctctatctctaacaaccatggcccatggggaggagttgggaaatgaccatgttcaagtgcacaagcatagcacattggaatgcgatcaaggggagaatgagactcaagacctcaaatagacatatgtacataaaaaagaagggcggtctgcccgatgcagccctcaggaaaggaaagtcattgctcccacaagcctgaacgactatcttgcaggagtccttagggcttgccaattttacctggcgttgcagagcaacaacacttgccacaaaagtgatgaaggacttgtacttcgaaacatcgtccctcacccattcaaagtcagcaacagtaggggggacgatggtgacctagcactatggctttgacacacacggggggacgccctaaggcatcccctttgctttaccttgctccaccagaaataaaaggggggagaatcatagtaatccggacaagcttccttgctggggaagc

SEQ ID NO: 24909 - DNA, 299 bp, Glycine max
  unsure (1)..(299): unsure at all n locations
tataaatacaaacatgtgttgcgcttgtggtgaccttgatgaatgagagtcttgtgagacacaactcaaagctcaacatctctcgcttttcttccttcaatatcatgctcccccctattgatttccccccctatctattgcctcatttgaagcaccctctccaacctgcnntcccaggctcatcttggcggtgaaacctcctcttgccttgcttattccttaaaggaaggcgcctactctcaccttctctccgttgtctttcagggcatctctatgggggaacaccgccattcaaggac

SEQ ID NO: 24910 - DNA, 574 bp, Glycine max
agcttgtaacttggaagttggaaccgtttacagctttttccaaccgcgtccacgactcttatgttatgacagtgtctcacgacggaactgattcttcttcttcttccgattcttctatttgggtcgggtttaactttttaaaactcatttcatccacctttttttttgccatttttttattatttatttctttaatttgtactcactacactacaatttaaaacgattttaatagcttaaaaatattgattcttttactcaattaattcacatactcaatgacctaaactatttgattcttttactacttatacaataagaatatcacccgtttaagtaatctttgcttcaataaaaaaatctttttcaaaattaaaattaataaagtagtacctaaaattaaccgtgttttaacaaaaattaattagattagttttatcatccatttaagaaattatataaattacctatgataatttgataaatattttttatcctaaaaatttgaagataaatttttaataataatcataatcattttaataatttggatgtaaaattttctcattttaaa

SEQ ID NO: 24911 - DNA, 610 bp, Glycine max
  unsure (1)..(610): unsure at all n locations
tcttatccaaggctcatcttggtggtgaagctcctttttccttgtcttattccctagtggatgacgcctcctctcacctcttctcctttgtcttccgctacatctccatggtggaaaatcaccattaaaggacctcattgaagctcaaagatccagcctccatagaagccccacaagcaagcttccatcagaagggaatgaaaaagatgaatagcacaagttttgttttcaaggtttggaaaaccagaaaactttagaaagcttttggcaaaggaagaagaagaaggagttcaaagagattcagaaatcaattggcaaaagtttgttgtcaaaagaatgaatgtataaaatgcaaatcaaagccttgcttttatagactcttcaagtctagtcaagagaccattagaagagttataacctttagaaaaacttaaaaaccatttggaaaagttataacttttagaaaaacttgaaaactattggaagagttacatcttttgattttgttcagaaactatcactggtaatcgattaccaaatcagtgtaatcgattacacaaagctttttttgtgaaaagatgntactcttcacaattaaaatttgaatttc

SEQ ID NO: 24912 - DNA, 571 bp, Glycine max
  unsure (1)..(571): unsure at all n locations
agcgcgcctccaatattgagctncgtttttattattttatcgggcttttctccctcctgaaatcaatccatcacatccaaattcagcaaaacaataataaagcaaaatccaaaaacagtagttcctatattttccaaagactgacaaacacaaatacacacaaaatactacatattgaaacattcaacttgatatattttttccattttcaccttgccccaaagtccagagtccttatcataccaatacctcccaggcttcaacttctgaggagggatagggcagcccagaatctcagccaactcctcttgtcttaactgcctgccattcacaacaagctgctccggccgaagctgattcgcaggacactccttttcagccctcattatctgattaatctccaaagaactacacactttcgacaacattctggaacactttcccaaagtcgacctcttcgactcatcaattggcttcccaatgcaactcacgcatttccttccctcaggcatagaccccatcgctttcagcacacaggtactgcaataccttgaataacacaccaaacacg

SEQ ID NO: 24913 - DNA, 510 bp, Glycine max
cttcatattgaaaaggatccaccagtgcttttgcctactgaaatatgatgcatcatatgataggacaaaacagactctaggtctagaaacatctaagaaaaataactacagcataaacatgatactgggatcaatatatatatatatatagatatatacgcacacacacacacatggaggaattgaattataccggtgtaacttcaacgatcattacaccatttttataactcgatatagaatgtgatttttattaatctaaccggtgaattatatctacatattaccaagattgtttttgtccaaattgaacaccaagataatcaagtggtccatattttagtatatatcgacatgtttatattacatcgactttaatttatataaacgaggtagcaaatgattttggattaatatgaaatgctgtatatatgatctatgcgaaacagactttcgatccaacggtgagtgtattacgaatattatttagttgacaaggatagaatggta

SEQ ID NO: 24914 - DNA, 519 bp, Glycine max
agctttcataagaaaacttccttgagttgcttctttgtgaaaactttcttgagaagctagagcttagctacacacacccatctaaaaactaagctcacctccttgagaagcttccttgagaagctagagcttagctacacacacccatctataactaagctcacctccttgacaaaatacatgaaaatacaaaaaaaaagtccgtactacaaagactactcaaaatgccctgaaatacaaggctaaaaccctatactactagaatggccaaaatacaaggcccgaaagaaggaaaaacctattctaatatttacaaagaatagtggatccaaccttgacccatgggctcaaaaatctaccctaagggtcatgagaaccctatggccttctttattagttctagcccaagcctcttaaggtcttctattcaatacccttgggggcaggattgcatcaagttacaaggttgaaaagaaatctcaaggaccgaacgtcgcttggggactggatgtacgcaca

SEQ ID NO: 24915 - DNA, 580 bp, Glycine max
ttgagaagcatgtggtcctttggcatcatcaaaacatctattttgatcctttttctacatggactaaagacaaagctgaaaatttcatctttctagagagagcatcatccaccccattttccttttttggtctatattgtatctctaaatccaaacccatgagtttagaggtccacctgaaatattcatcacccattactcgttgttcagttatgaagtgccttcccaacaagtagtgcctccatttttggacagccatcataattgccattaattccctctcatatactgacttcatttgcaccctgtcgcaacctgcccttcggcgggagggtgacgcgagggctcacgggtgtgtcttccaagaaaggatgatgcacggagtcaccaccaacgtttattcaaggagaacgtcggaaaaaccggatagacgtggtctacgaactataagtgtgaaaggttcgggagtggtatatacgcacggtgaaggtattagcaccccacgcgtccgtcacaagggacgacaacctttaatcgagtttgcaaagatgaacttcaattgttttattttcccttttac

SEQ ID NO: 24916 - DNA, 905 bp, Glycine max
cgccaccgaccgaaacgcccacagacaccaccacgacgagaagcgaggacacgatacgaaaaggccgccaaccagcacccgcacgcaacacgcgcagcaatgagccatggaaaccctggaaaaccccacggaccaccagcaagcaaccaggggagggaggcagcgaagaaaattctccagatttttccacccacggcagaacgagaaacgagcgacgaagaagacccgcaccaagcacccagagaggagcccccaccacccacacaacgacgaagacgcaacgagacgaaagaacaacaacaccagaaagagcgacaacagcccgcccccaccgcccacaagccacgcaacgcagccgcacacaacaggaggagcaccggaaaacgccacccagccaagacgaaacgaagagcaaaacccggaacaaggaggcacaaacggacaacacacagaagaacaagcacccacgacccagcaagcacgaaagacgaacggcacaagcaccacagcagaacgacggacaacaacgcgagacgcaacgcgacgaacgccgagcaaacaagcgcaaaagaatccagaacgaaccacagacccgggaacgacgaaagagcgagcggaacccgcaagagcgaacaaaggacaccacgacgaacacaaaacggcacacaaacacaaacgacgaacacaccgagcagagacccaagaagcacgcacggcaggccgcacagacgcgagcaacgccgccaacgacggaagggaggcaaggaggcacgacagcaagaaagacacgcacgaagagaggaacgcacgccagccaggaacccaggacacgcagcaaagacaacacaaagaggaagcgccagaccagacggaacccgaagaacgaccggcaccaaggcaacgcg

SEQ ID NO: 24917 - DNA, 736 bp, Glycine max
  unsure (1)..(736): unsure at all n locations
gggaaggaaatagaggagcatggaanacgcaaataagaaaacacccacgaaaaaaaaacagggagggggggaggtacactccttganagacgaaagcagaaaggaagggagaacatgaaaaaaaaccccccccaaacgggacacagcacagaaacaacgaaagaagagaaaaaaggaaagcgaaaaggaaaggacgaccgaaaaccgagaccaaaaaaacggaaccaaagggagaaaaaggcccaagaagagacagaagaaagagaaaaagaaaaagagggaaagaaagaaagacagagacagacagagaaacggagaacaaaaccagagagcccaacaaggaaaacgaacaaagacgggaagaaagaagacgaagcgcaacagagcacaaagaaacaagggggggaaagacacgacagaaaagacacgaccacaagacgacgaagagaagaagaacgaaagaaccaacgaaaggagggccgcaggaaagaagaggaaaagacaagagaaacgtaggaaaagacgagagagagaacaacagagggaaaaaaaaagaggggaaaaaaaaaaagccaatagagaccaagaacaacggaaaaaaggaaacgcgagagaaaacggcgaaaaacgaaacaagaagggcggggaaagagcgaaaaagacccaaaaacaacggacgagacgaggggaaccacaacaaagaagggaaacacagcacacgccaggaaaaaccccg

SEQ ID NO: 24918 - DNA, 580 bp, Glycine max
  unsure (1)..(580): unsure at all n locations
agcttatgctgcaaatatttacaatttatctcctcttcctcagcagcaaaatcaaccacagcagaacaattatgacctctccagcaacagatacaaccctggatggaggaatcaccctaaccacagatggtccggccctcagcaacaacaacagcagcctgctccttccttccaaaatgttgttggcccaagcagaccatacattcctccaccaatccaacaacagcaacaaccccagaaatagccaacagttgaggcccctccacaaccttccctcgaagagcttgtgaggcaaatgactatgcagaacatgcagtttcagcaagagaccagagcctccattcagagcttaaccaatcagatggggcaattggctacccaattgaataaacaacagtcccagaattctgacaagctgccttctcaagctgtccaaaatcccaaaaatgtcagtgccatttcattgaggtcgagaaagcagtgtcaaggacctcaacccgtagcaccttcctcatctgcaaatgaacctgccaaacttcactctactccagagaaaggtgatgacaaanatttacctaac

SEQ ID NO: 24919 - DNA, 460 bp, Glycine max
tcttagtttcagatgatgcagatgggcttgtagctttctcatgctctcctctaatgactatggcatcatttctggcgctaaactgttgggagttggaagccatcttctcaattaaatttctggcttcagcaggagtcatgtctccaagggctccaccactggcagcatctatcatacttctctccatattgctgagtccttcataaaaatattggagaagaagctgctctgaaatctgatggtgggggcaactggcacatagtttcttaaatctctcctagtactcatacaggctctctccactaagttgtctaatacctgagatatccttcctgatggctgtggtcctggaagcagggaaaattgtttctaagaatactctcttaaggtcatcccagctcgtgatggacctttgagcaaggtaatacaaccagtccttttgccactcctctaatgaatg

SEQ ID NO: 24920 - DNA, 582 bp, Glycine max
agctttgcactgtcatttatattctctttgcaatatcgttacagcaagactgaaaagacaaaccaatatccatcactacaaagacacgcatttgtaaaatggtggacacaatttgactcatccaaagcggatccagaacaagtaaaactatggttcaaatcccatccagaattcctcaaagcggctgatccagagacttctgtgtttttgaaccaaaagtctcatctggcagcatttttagcaagatcgacatcaaaggaggtcttagctaaaaatctgaaggaagttctacaaatgttacaacaggaagaagaagtttcatcctcaaagaaggaagaaacaagttctgccgaagaagaagaagaagatcccttttaccaaaacgaagatgattgttttggtatctgtttagattaaatttaatttcggtcacaaaatcgtctgtttgtaattaatgtgtaattaatgatggacaatactacctgtcctgtagccattaaagtctcggtcgaaactacttgtcttgtacaaacagtcaaatagtcccggtcaaaactaccggcaactaccggtcttagattt

SEQ ID NO: 24921 - DNA, 552 bp, Glycine max
tgtacctgcgtgtgccgggtcgtggcgatgtgtttgtgactcttacccttctcagaaccactctcttcacgatgatgatcatgctgcttgatcattttctcgccggaatactccgaacggtgggtggctccggcctcgtttccggccgacaccggtttcttcgaattggagccaatatgtctcaagttcttctcctcgctatggcaccaatcgcacagttctatatccggtaattctccgtagtagttgctacaatacctgaaaaaaagataaattgaactttaagtttaattcactcctaaagtaacaccaacattgaaaagtacaaaattcaaataaaaaaatcatacatgttttatgaagctacacgtatatgaacataaaaggtagcataaatatggccatgatcatgatttttgcatcatggttataaaaaacaatagagttcttggtgaaactaaattagatgattatgttatgataaataaagcttgcacttttatgatttttgaatgatggttatgagaacaatagagatattactaagggaat

SEQ ID NO: 24922 - DNA, 548 bp, Glycine max
  unsure (1)..(548): unsure at all n locations
agcttgttccgngaagttttagattatttagttgcttagcatcaacagagaagaaaattggcagctggtgataaacctatggcatgaggatttttatagattttgtcaggaacccttataatgtagggcgggcccattgcattctgttatttattgatttccctaattgatgggaagattttggaatttgaatttagtagtgtttcatttacggctgataatcactattcaatattcatcactaaatgtagcagctaattgagggttttctatcacgttgaatattcctttttcccttgaccactgacaataaactagagttccatgctatcattggaactcacgtgctgtatttcttgaaaaaccatatcagactaccctactgtggtcgaggagaggctctattttcctgtgtagtttgtttatatagtactaattacaataatatattttgtgggtttcaatattatggttatttttatttgtgaccatgtatgtacatgagtggagaattggggtcttaatttaatggaggattaaccaccaat

SEQ ID NO: 24923 - DNA, 550 bp, Glycine max
  unsure (1)..(550): unsure at all n locations
tgtacatatgaaagtcatctccatattctgatgaacaatagatgacgaagnnacatacaaaggagaaaataaggtatctccacgcaatagacaataggagagattaacaaatgttatcatcacaagtcaaggctaaaagattcaaacttttaatagtattatggaaagatcgagcatagaacaaagaagatagttatatgagaggcacatatacaaaattattttcagtaaaagtcaaagatatttgacattacagttgtcaccaattacatcattgaactggatgaaattccacaagccaagaatgttcagattagtaggtaaggaaacctaaggcagtattgagtatacattgtaaatggtttggattattggatattagtggaaccttattaggaatattacaaattgtactcacttaggtacaaatttcagctttgtagtagtataagcaaagaatactacatgtagacacggtcctttccattatcagaagagcngaataccaaagaccatccgagatacaattcaattcactaactttaaaaaa

SEQ ID NO: 24924 - DNA, 618 bp, Glycine max
gcttcatcttcaaccctttaagaagtttttaagaagattcaattgaaatagatgaaaatgatgatctcagtcctttcatctaaagattccacctatttctaacagtctgaggaaatcaaagaagatcaaattttaaatcaaagaaaagggcagaagattcatcctctactccaaaatgttatgaatgcaatcaacctggatatctgaggattgattgcccaattttcaagaaaagaatagagaaatctgaaaagaaagtttttaatgaaaagaaggctaagaaggcctacattacatgggatgaaaatgatatggactcatctgaagattcagaaaatgaagttgtaaacctgagtctgatggccaagaattatgaaagcgatgaagaggtaacatcttctgataacaacttatccatttcatttgatgaattacaagatgcatttgcttatttacataaagaattagttaaacttgcaaaactagtttcatcttctaagaaaacaatttcatattagaaaaagaagttttataattaatgaagaattagaaaatcttaagactgaagttttaactttaagatcaaatgatacaattcattcttctaccatgcatgat

SEQ ID NO: 24925 - DNA, 512 bp, Glycine max
taacctaaaagaagcttaacctaacaaccttattaatgtaacctggtttcttcgaagtgagatcaatgttgttcttcatgaactgacagttcgagctgagaactttaaacctcctccacttcaatgtacatggcttcttcgtcaatagggttcaatgcttgaaactgaaacaacaaatacgttgagggcaagcgagaatggtgaagggttcaatcgaaggtcacaaggctgtctacagggttcaatgctgaagggttcaatgctaggtctcagtgctgtctacaggggttcaaagaaaagacaatacgttgagggcaagcggtttaattttgattttttttgtttaactctaagacagtttttaatgaaaacccgtgtaaatgttatagcctgtaacattctaaggcggtttttgataaccgccttagattacaagtcgtaaaatgcaaattatttcacaaaaattacaaaaatgccaccgttcaacttttagagcgatcctacataactga

SEQ ID NO: 24926 - DNA, 119 bp, Glycine max
ttgagagatttttcttacagcaaaacactaaaacactctgtacttcatgaaatggttttgaagctctgaggggacactttatattcctgtggaggctagccatttttgccagcatcaga

SEQ ID NO: 24927 - DNA, 688 bp, Glycine max
  unsure (1)..(688): unsure at all n locations
ctaagcaaattaacaaggataaagtgattattctgcctcgtgtatacncttatgcttaatttatccttcatttttgtctttatcattgctctcaattttgattttcttttcttacttcttctttagtgttatttggattgtgaaaaggttttgctcttttctttccggactaaaaaaatgtcaccttatttgagaatgtctcttgaatatatatatatatatatatatatatatatatatatatatatatatctatatatatacttactgttcttattcatcatgaagcctttatttggctggtgagcataactgattatgtttattccattgcaaattaagccccatcatcttcgtgtgcaaaagcgcatggctttgacacttagcatttgatggcttccgacccttctgtttgaaacctatacagcaggggtttccagagggacctcaaacttctgctaccacctgtgaagggctccgcatgatcctttttacctgggacaaaaacatccagcgtaccaggtaatcccctataaccgtgtacaatttggcaaagaaaaaataccccctcctcctacccatagaaaacccccttgggcctaaccgggcttaaaaaatcatctttttaaagccccggctgaattcaaaaccgcaaagcgaaaaatccccccccttttttacccccccc

SEQ ID NO: 24928 - DNA, 573 bp, Glycine max
  unsure (1)..(573): unsure at all n locations
agcttgaacattgaaactctacaatgtatataagtgatttcattcctaaatccaaatccacatagaacatcaaaagatgaatcatagttgaaggagagagagagaaagagagaaaaaatattgagattttatttttgcaagtcacaaaaatgaactaaaagcttttttacaatgatgttacaagctcttatgtagaaagttgaaattgcattattttttttttgcacaaaagattttcatttgagcaagaatacatctcactacaacgaatttacaatattcacaaaggacttctccacttaaatcttcatgtttctaatccttgctcgttggtgtgagagattgactcactgtgacaagtttctacttaactcaaaatcgttggcaaatcttcacaattttcacttgatcactagtcctctntccattgtgacactactagaatttatagatttaacatcacccgattaatatcggttttttgaaaacccaatgttaagaagagcatggtgacatttttgtaaataagttgagttagttcacatcggttntgtcanaactgatgttaactac

SEQ ID NO: 24929 - DNA, 682 bp, Glycine max
  unsure (1)..(682): unsure at all n locations
cacattataagtttgaaattaactataatttgacatatgtttcttaataatatatatcatctactcatgtgctgtgtaattgttatattatcttgaatataatgaataatcaataaaaaaaaggaagtgcattcagcatgcatagatttgtcaagaatgccaaaaaatttcttatatttgattttcttaataactaactgttcattgtccctattttctgattagcaagtcttcaatttacgagacatatgctaccatggaattgtgaaaccaacatgggattgcagctttttggatatccattagaaacaatgataatttttttatatgcatatggaataccatatgtatgatgccttccatatatatatatatatatatatatatatatatatatatatatatatatatatatatatatatatatatggcgtaccatatttgagtagtataatatattgtggggagggtgagtgttaaaaaaacttttttccccattgtccggaggctttttnttttctaaagtatgggggaggggaatttgtttccaccctttcccttttatattcaaaaaaaggtgtttcccgatttttaacccatgaccaacaagtgacccaaacaacaatttttcccgtgtacacggggtgcccctcagggggtaaaaacaaaatttttataaaag

SEQ ID NO: 24930 - DNA, 595 bp, Glycine max
  unsure (1)..(595): unsure at all n locations
agcttctcaaggaggtgagcttagttatgagaggggtgtgtgtagctaagctctagcttctcaaggaagttttctcaaagaagcttctcaaggaagttttctcaagaaagcttctcaaggaagttttctcaagaaagcttctcaaggaagctacctagtctataaatagaagcatgtgtaacacttgttgtaactttgatgaatgaaagtattatgagatacacttcaaagttccacttctttccctcttttattccttcaatttcgtgctccccccttctctctttcttttcctccattaaagcatcctcttcaagcttcttatccaaggcaattcttggtggtgaagctccttcttccatggcttattccttaatggatggtgcctcccctatcctcttctcctttgccttccgctgcatctccatggtgaaaaatcaccattgaaggacctcattgaagctcanagatccagcctccatagaagctccacaagcaagcttccatcatattgtttctctaagatgtggtgctctcgcgaatgaattatttttctttgcaaaaaaaaacatgtttgccttttatgtggaaaaaa

SEQ ID NO: 24931 - DNA, 536 bp, Glycine max
  unsure (1)..(536): unsure at all n locations
tatccccacaagagtgcagaatagttggttagtctgtattgattataggaggctgaaccaggcaaccagaaaagatcattttcccctgccattcattaatcaaatgcttgagcacttagcaggtaagtctcattactattttcttgatggtttttctggttatttacaaattcatattgctcccgaggatgaagaaaagaccacattcacctgtccctttggcacttttgcctataggaggatgccctttggcctatgcaacgcccctggtaccttccagcggtgtatgcttagcattttcagtgattttttagagagttgcatagaggtgtttatggatgattttactgtttatggatcctcttttgatacatgtttggatagtctggatagagttcttagtagatgcattgaaactaaccttgtgctgaattttgaaaaatgtcacttcatggaagaacaaggtatagttttagggaatatcatttccagtangggcatagaggtagaccctgcaaagatagctgttatttcac

SEQ ID NO: 24932 - DNA, 357 bp, Glycine max
agcttttttttagtaattttttaaggaaaaatagtacttggacactcatgttatagcaaggcaaggttgaggagggcagattgcaatgctaaggtgcatccctagttaccaaacaagtcatagcctttctagttaagctctcaaattggcaccctagaattgtcttcttattagaggtgttcatgttaaacatatttacctacagttgaatatgataggtacatattaaagacttttacctacattaggagatgtaagtagaagttaatgacttttacttacacactatatacagtaggtaaaatctatagtgatagacaattagccgtcattatacgctccctcaaagttgatgga

SEQ ID NO: 24933 - DNA, 428 bp, Glycine max
tttgtactttcggaatttgcaaggtatatcttgttattttaggacagttttcaattttcttcggttccaaacatgatgtctcaagaagcaatacctgctccttccaacaataacaacctcagagactccacggttcaacttcatgaaccaaactcaaaccctaatcctaaccctaattcggttaagagaaaaagaagcctacccggaacaccaggcaagttattatttaattaaatccttctcttctgcatactatatatgtacttactgttctgattcttaattcagaaaaaatatatttgtaattaattacgggttaattatgtggttgtggttgcatggaccaagcagatccgaatgcagaagtgattgctctgtcgccaaagtcgctgatggctaccaaccgattcatctgcgaagtatgcaac

SEQ ID NO: 24934 - DNA, 553 bp, Glycine max
agcttagggatggaatacttactttgttggtgatgaacaaaagcgcaaaacagaatcaaaaaatgcgaaaaatgatgaccctagggctgcaaattcgtcacttctgtggctatggcttttgaaaggggggaaaagaggtttttgaatgcaaaaacgtccaccctttcgtcattcttataatttggtgcaggggtggctcgcccaggcgagctaacctgcatttttttttttttgaggggaacattaaccatgtcccctcctttctcatggattagcgtcttgcctaacttgaacttacttaagttagaattaggcgttgattacttatttttatttttaaaacaaacaaatagtaaaagaaaactgcgaatacaaaggttacggggctgccttgcagcaacgttctctgcttgtctagcgcagagagagggcaacgatcagtcgatcgtgaccctatccccacttgcatccattcctaagtacctgcaagtaataaacaaccaggtatggccaatcttgaccgcgtcggtgtcttaccttgaatggtttctgc

SEQ ID NO: 24935 - DNA, 446 bp, Glycine max
  unsure (1)..(446): unsure at all n locations
taggtttccttctagaatcttctaaactgcgtcccctgntgcctttgatctcttgagaaaaatgatttgtaggtactcttctagaaggttctctacagaacaagccttgagtaagttactacttggttcagttttttttttttgggggggggggggggtntntggntatttacanattcttattgctccctatgatgaagaaaataccacattcacctgtccctttggcacttttgcctataggaggatgccctttggcctatgcaacgcccctggtaccttccacctgtgtatgcttatcattttcaatgattttttagagagttgcatataggtgtttatggatgattttactgttaaggatcctcttttaatcatgtttggatagtctggataagttcttttaaatagcattgaacaaacctttggctgaaattttaaaaatg

SEQ ID NO: 24936 - DNA, 510 bp, Glycine max
agcttataatatatcgataggctcgttattaaacattgtaaactctcgcgaaattcaaatgggcataaattttcacacggatgtccgattcgggcgcataatatgtcaagaggctcgaaattgaacaacggaagctcttgagaaattcaaatgggtataaaatttcacacggatgtccgattcaggcaaatcacatatcgagacgatcagaattgaacaacggaagctcttgagaaattcaaatggtcataacatttatctcgaatgtccaatttaggcgcatcacatatagtgatattcgaaattgaacaacagaagctctcgtgaaattcaaatggtcataacttttcacactgaggtccgattcacggttataatatatcgatacgctcgaaattaaacatcggaaactctcgagaaattcaaaagatcatgacttttcacacggatgtccgattctggcgcataatatgtcgagaggctcggaattgaacaacggaagctcttgag

SEQ ID NO: 24937 - DNA, 380 bp, Glycine max
tctcgacatatgatgcgcccgaatcggacagccgtttgaaatcttatgaccagttgaatctcacgagaggctgggaagtttagaaccaagcgcctcgatatgtatctagacagatactcacatggaggggaaaagaacagaccgttgggattggaacctagcttccgtaggtgcattatcagcatagttgacatggaagcgcccgaaccggggatacgtgagaaatgccatgaccatctgctggaagccagagtttacaaggtttagtgacgagcgaatagatagtatacgctcactgatactcacggccagatacaatgatcttaccgcttgtatacaagcagaggatgaggcgtttcaagactatcgtctagatatag

SEQ ID NO: 24938 - DNA, 833 bp, Glycine max
  unsure (1)..(833): unsure at all n locations
attgataccctagtacggagcctgagatacccctagagancgaccctgcgaggcatggcaagacattcgcggtctccgggagcaagaaggaaattgatcttcatgtttatcacaaggcgaacgaccaacaacccgagcccccgtcacgatccaaagtacaggcaacggtcgcccgaaggaccaaattacccaaacctaaagaggcaccacccaagtaacccacaacaaaaccacaggccgcacacagcaaaaacgccaacaaagagggaaccaccaaaaaaaccgcagtcacctaaccaaaaagcggggcaacgcgcaaccgaactacgaacaccaccccgcaacacagcaagcagcaacgcaaccgctaagacttggcaggataacaactccatcatcccaagggcagaaaacacgaacagcgaccgacccccctcacacaaaccataggagcaaaacataaccaggcagaacgaagaaagccgcacagatcaccgccgcccgacgacccaggagggaccacggacccaccagcacggacgaagaccccacaagcacggggtacacaataacgcacggagcaaaaccccaaggccccaaaaacagtcgacccacccacagggacccaactacgaagcacaaagaacctccaaagaagggcgcccaccccaccacggacaacccccgagccagcgaacaaggcgacataaacaaccaaccccgaacggctcaggacaaaaccacaacgacgcaccgacagaccccccagcaccacagacggccacaacacagcaaagccctacgaccgcaaccactcgacacgccgcccccac

SEQ ID NO: 24939 - DNA, 501 bp, Glycine max
  unsure (1)..(501): unsure at all n locations
cctatttatcttccaaatgtctttgcaaatantttttttataaaatgcatgaagttttaatgtctagatgcttgctttgatgcatgggcataatgcaatcactctatgtctagcaatgattttattaagataccatttccttttagttctattagaaattatcctttgtcgagtaactaatttctaaaactgatgcatgcaaaaccttccttgtattcctattaaggattaccctctattgaacacataacccccaaaataatgaaaaaatgaatgatgcatgaaattaaaaataagaaaggataataagaaagaaaacatatgttacattgataaatatgaagtatacaatacatctgttggatttttagacttgtcaggtcttaacttaggatttagtctctcataaccataagaggccttacacttgaaaggggtttagaaactgatggaaggaatagatggaaaaagggaatactagatgataagagagaagaaaga

SEQ ID NO: 24940 - DNA, 360 bp, Glycine max
aaaagcacaacacgagggtctgtgattgttttaaagatacaaccttcgccgatgagaatgcttcaaaaacattaagaaaactagccgatgggcctgtaagaaatgttactactcggccaggatacgatataaacaagtattcatttcacacaaaagcacaggaagacaaaagtacaatgcataacagcgggggcaccctaagggcagaaactcaacactttgaaagtgtcaatgaacgccaatccctgtgttgcgtccgtcccttactttgggttcattgatgaaaattaggagctgaactatgtgaatttaacgggttgtgttttcaaatgtaaatgggttgacaacacccccggtgtg

SEQ ID NO: 24941 - DNA, 263 bp, Glycine max
ccaagaccacataaattatttgctttaccttctcttccataggagagagagcaaaaatagaacaagaatgacatcatatgtgtggaaggcacaaaaatgaaccaaaagcttttttacaatgatggtacaagctcttatgaagaaaagttgaaattgcattattttttgtttgcacaaaagattttcatttgagcaagaataactggcactacaacgaagtttcagtaacacaaaggacctcctcccttaaatcatcatgaatc

SEQ ID NO: 24942 - DNA, 543 bp, Glycine max
  unsure (1)..(543): unsure at all n locations
ttattgttttttcaattcctaaagtgattttggtatttaatttctcgaaaagttaaaaaatcactatttgggtttttttccaaatgagtatgtacttcaattttttcatggaactgctgttcatgtatttatattagattattttggagtagtctagtgttccaaattagttttttttcttcctgacatggagccctttttaatctacagaacagccttgaggatatttacagtcttctgcggtttctgagaatagagccttggggtcattgggcctggtaaaatttcctctttctttgtgttggatatgttagctcgttattatgcccaatgttatctactatttcctcttttttctcatcgatatttttttagcttccgaaggccatttttggatggtgaatatatttttaggagggagcangggaagttaaatatggttttaaactgaactttgtatctctaacagaatttatttataatttctacattctatggaagtgtagctttcaaatattattttccgaggattgattaaataac

SEQ ID NO: 24943 - DNA, 305 bp, Glycine max
agctttgagcaaattctttcgacaatttcgttttactcggatgtccgattgagtcccgtaatatatcgagacgctcgtaattgaaaacagaagctctgagcaaattcaaacgacaataacgttttactcggatgtccgattgagtcccgcaatctatcgagacgctcgtaattgaaaacagaagctctgagcaaattgaaacgacattaactttttactcggatgtccgagtgagtcccgcaagaaaccgacacgctcgcagttgaaaggggaagctctcataaacatccctcgactataacttt

SEQ ID NO: 24944 - DNA, 723 bp, Glycine max
  unsure (1)..(723): unsure at all n locations
atttgagttctttgcatctacagacacttagaataanattcccacgcgnacttacagaaacttctaaacggcgnggccattctgttttttancnaangaaaaaaangaacagggaagttttcttttaaaaggttctctccagaacaaaccttgaataagttactacctggtctagatatatttttttgggggggggggtgaaaaaaatattattaaataataaatattacacttatttatttatctaatacatatctattaacattttatcaaaatacataaacaatatcaattcattttaaaacacattatacatcaagatcctataatcattaactatataattataaccaagcattcaaataaaatcattatattatatcacataataactatcatataaatagaaattgtaatttaattaatatattaataaaaaacatccaaatgtattaaatatgcactatatctctatataaatctaataactatttgatacctacatcaatcactatctatatttatatgaaactttcatttcattattattccactctaactaatcttaactcattcaattactataataatcatcaatatcatcactcaatatataaaaacatttttatgttgatctttaccataatcacaactctattatattactcactactttatacgtcatattaaatacatatactactaactactactctctcaacg

SEQ ID NO: 24945 - DNA, 619 bp, Glycine max
agctttgctatgatgtatgtgttactgttaaggcgtgtggcggctgttaaggatagcaatatagttgatacacttccatttagcatactgtcatctcattgagtgttgcatccccaccaacaaagatttccttactatcatcgtttgaggtatgtatgtgattctcacacttatgtgcttaagtattataggcaatggttgacatgttactattctttagtagtacattgtaattcattgagtgagccatagttccccgtttgagattgaatacaacgattaatacggacagtttggattaattgttgtattcaatcttgaattgtctgtttggatagtttgggaagacaaattgtttttacttcattttgacttataagttaagtatgttgtgttatttttgacaaaatttcgaacaatgcatcttgctttgttctctgggtgcatacatgataggcgtgaattgatgtcaccgctttcatgttgtgtccttggagaccaaagcgaaatgctgccgaaattttgtcaaaattaacataaccgtcttaacttgtttgtttgaatgaagtaaaaaattatcctttccaatggggtatgggacacctttttattgaaaaaa

SEQ ID NO: 24946 - DNA, 583 bp, Glycine max
  unsure (1)..(583): unsure at all n locations
tggagtgacatgaaagttgattacaatgaactaaagtatttggcttgcttatgctcatctaaagcaggataagttggaaccaagggccttgaagtgtatcttcataggctatccacagggagtgaagagatacaaactgcggtgtttggaacctagacacaagaagtgcatcatcagaagagttgtaatgtttaatgaacttcaaatggaaaatttaatcctgccattcaagtctgctggaagttagagttcacaagttcaggtgaagtctgaagagattgtaaacgctcaataatagtaatggcaagagacaagtttgttcctgcatctagacaagcaaatgaagaagcatctcaagattattgtttagctagagatagggaaataaggacaatcaaacctcctgaaagatatggtcatgcagatctgatctcctatgctntaatagttggaaaggagaatgaagatcaggaggaacctcagtcctatgatgaggccataaagcagcaggacaactcanaatggattgaagctatggaagaagaaatgacttctctagaaaagaatcanacttggatacatg

SEQ ID NO: 24947 - DNA, 522 bp, Glycine max
agcttctcaaggaatttttctcaagattgcttctcaaggaagctacctagtctataaatagaagcatgtgtaacacttgttgtaactttgatgaatgagggtcttgtgagacatacttcaaagttccacttctctacctcttttattccttcaatttcgtgctcccccctctctctttctctccctctttcttttcctccattgaagcatcctctccaagcttcttatccaaggctcatcttggtggtgaagctccttcttccatggcttattccttaatggatggcgccttctctcacctattttcctttgtcttccgctgcatctccatggtggaaaatcaccattaaaggaccccattgaagctcaaagatccagcctccatagaagccccacaagcaagcttccatcagtctcccttgattaccaccagctcctattattatatgctagacaaaaaaacaaacaatgaaagaaaagatgttagagaagaatgaatcaactttttcattggatcaacct

SEQ ID NO: 24948 - DNA, 544 bp, Glycine max
  unsure (1)..(544): unsure at all n locations
tatccatgaacaccgatatataatcacggttttgattctacaaagataacaaaacagtcatagatatatttatctattgaacagaactgtcaaaaatactagtcactatataatgatctgaactacatctcacctgaaagtcaatgaagtaagcatgctgtataaaagtgaaacataattacaaagtcagcgaatttattatcaatgaaatgaaataatagttttaacagtctcaaatccactataacacaaagtaaacttgattagtacctcccagacatcaatggtaaggagtggctgcaagagataaaaatgaaatctcgtcagacattttaaccatgatgcttcagccttatcctagcattcatgtttcaaaacataaaatgaattatggatattatgtaatccttactacttacataatagtagtttcaaacaaaggggttcacagcattgggagtcttcaccacaactagcttcttgtcctcaccagattgaagaggattcagaacatntcccacgtcaagtctgctttctttatcta

SEQ ID NO: 24949 - DNA, 571 bp, Glycine max
  unsure (1)..(571): unsure at all n locations
agcttggagaggatgcttcaatggagttttaagatttattgagagaaagagagaggggggagcacgaaattgaaggaagaaaaagagagcgaagttgaactttgagttatgtctcacaagactctctttcatcaaagttacaacaagggttccacatgcttctatttatagactaggtagcttccttgagaagctttcttgagaaaacttccttgagaagcttctttgagaaaacttccttcagaagctagagcttagctacacatacccctctcataactaagctcacctccttgagaagcttccttaagaagattcctaaagaagctagagcttagctacacacacctctctaatagctaagttcacctccttgagatgagaagctagagcttagctacataccccctataatagctaaactcacccctatgccaaaaaacatgaaaatataaaaaaagtccctactacaaagactacttccaatgaaggtaagtaaattgcanattacaaaattacaaaatggtcctcaattntggtgggttttctctctttggtgattcactcaatt

SEQ ID NO: 24950 - DNA, 506 bp, Glycine max
ttagttgaacagaataatccaaaaatgtcaaagatctgtttgttgaaaaagcataacaagactttctgtgattggtttaaagatacaatctttgcagatgagaatgcttcagaaacattaagaaaactagccgatgggcctgtaagaaatgttataacttggcaaggatacgacataaacaagtattcattttacacaaaagcacaagatgacaaaagtacaatgcagaacagcggggtcaccctaagggctgaatctcaacactttgcaagtgtcaatgacgccaatccctgtgttgcttccgtcccttactttgggttcattgatgaaatttaggagcttaactatgtgaaatttacggtatgtgttttcaaatgtaaatgggttgacaacaacaccggtgtgcgcaccgatgatataagatttacgctggtagacctaaagaacttgggtaccacaatgaccatttcatcatggcagaacaatctaaacaagtattttacgtg

SEQ ID NO: 24951 - DNA, 581 bp, Glycine max
agcttaacaaccaactcctgaggatctttcctcaggagtgcaaatttggaataagcacaaagtgtttccccctcttccacaacaactggggtcttcaaaaatgtgttaagcgtatcctcataaaatttaatcaaatgacctctcaccctcggggtcatagaggttggcatagaattccttcacaatggcaacattaatgttgccgtcaccaaaatcagtcaactcctcatcctagtggcgtctttcgagttcctccttgaactcatcaatctctatataatagaccaccacgtttctctcaggcaaaagcttcttgggcataataacatcagtatatctttcccaagcctcttatgaagtgaatctggatctgtcaaatctgtcttgggtaggtgtagagggtgcctttcttttcctagaagccatctccaaaataaaagacaaaacacacaagattagcacagttttattttcaagaaaatagaaaaattaaactaaagacagagctagacgcttagcacagcatgctgacgcttagcacgccttatgaaattaacacacgcgctaagcgagcaagctga

SEQ ID NO: 24952 - DNA, 428 bp, Glycine max
tgtatagtccccaatttatgggtattttggtttatttcttgtaaataaatcttgttttatggttaatgctatctccagaacatttccattggatttaatgatgaaatctgggcattttcaggtgaaaaagaggctaagttttgaatttcaaaaagcagtagttgggctaagctcagcagttgggctaagcgcatatccatcgctaagcgcagcttcagcgtgcttagtgcaaaggagaatctggtagagcatcagcatcaaagctgcgcgctaagcgcaagatcagtgtgctaagcgtagaaggtgccttcagccaagctaagcgcgagactgtcgctaagcccaatttcacttactcgcgctaaaagcgaaggtggcgttaagcgccacgtcgtgatttcagagcctatttaaagcctgtcttgtgc

SEQ ID NO: 24953 - DNA, 484 bp, Glycine max
  unsure (1)..(484): unsure at all n locations
agcttccatcactcatgtttgtcatgtttgaatgcaaaaactatttactgtagcaattcgtggtatctttcctgacaaagttagggttgccataactcgtctatgctttctttttaatgctatctatagcaaagtcattgaccctagaaaattggatgaattggagaatgtggcttccattgtcctttatcaaatggagatgtattttcctccatcattttttgacataatggttcacttaattgttcatctggcgagggagatccggttgtgtggtccttttttttacggtggatgtatctagttgagcgatatataaagttgttaaagggttataccaagaatcaataccgaccagaaattttgattgttgaaaggtatgttgctgaagaatgtatcaagttttgctcccaggacattgaaattggtaaatctgtcgtccttcctgaaactcatcatggccggacacggngggggggggggg

SEQ ID NO: 24954 - DNA, 500 bp, Glycine max
tgacgacgatgatgagggatatgcaaattctgttctgtgacagaagtggaaagtaagcatgaggcatacgctggaccaaccaaacgcggtcttccggatggtgggatattgatgagtggatgtcacactgaccaaacttgtgcttatgcaagtactgcgggcaacgctgccagagcttatggggcttttagcaatgctatacaggctataattgaggagactgatggtgcaatcacaaaccaagaacttgttcaaagggcaagagagaagctgaagaactccggtttcacacaaaaacctggactctattgcagtgatcaccatgttgatgctccttttgtgtgttgatctcttctcatctgatgactgatgcatagaaagagagaataatgtgtgttgtttatagaatgctggtgtatagatgtatatgtttggacaatcatattgaagttatgtgtgtgatcatacaggttttctatgcatcactattatcaggtacg

SEQ ID NO: 24955 - DNA, 373 bp, Glycine max
agcttattctccttcatttgcacaaggttcttaatatttgaagagtatccttgtggaaccttcacccaacaaagacactgacaaaaacttatcttctccttcttggacaaagtatggtaggctgggggcaagtaaattttcttcccatcagaccttggatgcaactgtgatcttatatccatatcagctagatcttgacgggtattcaagccatccttcgtcttgccttgaatgttaaggagcgtcccaatcacactgtcacaaacatttttctccacatgcataacatcaatacaatgtctaacgtcaagatcactccagtacggaagatcaaagaaaatggacctctttttccatatgcaactctgacttt

SEQ ID NO: 24956 - DNA, 443 bp, Glycine max
tttagcttgttacaagaaaatttattcctaaccatcatataaaatcataaaattgagttccaccaaaaataatgtttgaaggaaaactcggggatgttggtgaagtcgggaaatattgctagaaagataacattgtcaaactaagaaaagtgtagggtgaaaattgtgtcttttcctctttgtattcccctataaatattggttattacaaataaatacaagctgattttctgccctgtaaattagcaaaactacggtaaatccctatattgcagttgttatattctaattaaggaaagaatctcagatttgcaattacaaataggcttttaaatggctttaaatatccagctgtattatgctgcaattagaacatttccattttcattgacagcccccctcaaattgatgctggtgaatctaaaagcattaatttgtcaact

SEQ ID NO: 24957 - DNA, 444 bp, Glycine max
  unsure (1)..(444): unsure at all n locations
agcttcttgctgcgctcgtcgntcactttagcgagattcggtatggtttcttcgaaaacctgcagcacgggcttccggagctcttcgctgctgaaccgcgagcgcaggaaccgcagctccgtgagcaggtgctcgatctccacgtcgcgaaccgccctgatcgcgccaatttgtcgctccatcgctgcaccgaagttcaaccgaactcaaaacgggagtcagagagtggtttggtggttgggagtgataagaaggggtcatgatttttaatccccgctaacataacatactaattgctaacattagccggtaaaaataaattgaactaaaagcacgttcataaaaagggaaaaacgaaaagattgatgtgtagatgtgaaccttggatttcgaggtcgatgaaatgtggtggctgcagttgaggttgaagttcgggtactgatt

SEQ ID NO: 24958 - DNA, 518 bp, Glycine max
  unsure (1)..(518): unsure at all n locations
tgaagcaagaagttgctagcatggaagaggaagttttattttttattctcctaatgtgtaggagttagtttatgttttatgtaccctgcttaagtgttaagagctttgttttagttttttttatgtaatgtatgtttatatttaagtttccgcatagttaaccctaatattcttatattctaagttttcaaaatttagtaatataagaaagaaaagggtaatattatagttttgatatgaaatttacatataatggcaatttttagttgtcactatgttaaattaattatttcaaaattgaaaacactaacgatattacagttaaattgacgggtgggccaaaatagaacttttcaaaaagataaaaagactaaaacaagacttttaaaacataaagaaccaaagttgaaaaacatgaaaattataagggaccaaatgatagtttaccctaccctcttttctgcatgtcatgttagttntattttgatgttattggtgtgaaattctattaaaaatat

SEQ ID NO: 24959 - DNA, 557 bp, Glycine max
agcttgtatttaaaaatgttttaaaattatcttttaattaatatttgaatttttattcctttattaatatatatgtgaggggtagagggtgtcacaataaccacacgcagtggttacatagattgtatgttttagttttgttttgctattgcctgttgtttgtggcatttgaggaagggaggactcacccttgcaaccaccattttagggggaggtcatggagcatccacagaggatgttcacttggatcaatagctaccgctacaactacacgatggaggaagaagcgctcctccacacacactttggttacatctggtgccactttttgttgttagatgagcctaggataccatcgatcaccgtagagacacacactacgtatcacttgtaggtcttggtaatgacaactctaagtgtaggattgtttttcctttttatggatatttggggtgggaagatttctatactcagtgtcatgatattttgttgtattaaaccttttgatgatattgggtaatatttcgaggggcggtgaatattttattttttttgtt

SEQ ID NO: 24960 - DNA, 569 bp, Glycine max
tctagtcaaatggacttaccttgaattaattcctttgttagcccctttgagcctatgctcccctttctttgttttgaagctcattacaagccttaagtgaaaaaccatgatatcaccttacccttaaggaattttggagctttggaattgttttgggaataagtgtgtgtgtgtgggggggggagggcatgcataccatacattcctccaccaatccaacaacagcaacaaccccagaaacaaccaacagttgaggcccctccacaaccttccctcgaagaacttgtgaggcaaatgactatgcagaacatgcagtttcagcaatagactagagcctccattcaaagcttaaccaatcagatgggacaattggctacccaattgaatcaacaacaatcccagaattctgacaagctaccttttcaagctgtccaaaatccctaaaatgtcagtgccatttattgaggtcggaaagcaattgtaaaagacctcaacccgttcacctttctcatttctaatgaacctgccaaacttactctatttcagaaaatgggatgacaaaatttacc

SEQ ID NO: 24961 - DNA, 426 bp, Glycine max
agcttctataagaagattcctaaagattctagagcttagctacatttacctctctaatagctaagctcacctccttgagatgagaagctagagcttagctacacaccctctataatagctaagctcacccccatgacaaaaaaaaatatgaaaatacaaaaaaaaagtccttactacaaagactactcaaaatgccccgaaatacaaggctaaaaccctatactattagaatggccaaaatacaaggcccaaacaaagaaaaaacctattctaatatttacaaagataagcgggtcatgcttagctcatgggctcggaatctaccctaaggctcatgagaaccttagggccttcccttggatctctagcccaatctacttggagtcttctacccaatgccctcgcgggataggattgcatcattcc

SEQ ID NO: 24962 - DNA, 519 bp, Glycine max
ctaagcttcacatatatcccgcaaatattcccaagtagcacccttagcctctattgcttcccattgaatcaacaattgagacatggtagcttctaaatgtttgacaactcgaacattcaacaccttccatgggcaaagtgttggtcccagttcactagaagtgagtggaaaaggaagatatggtggaggacttttgccatgaaatggtttcagaagagcaatatgaaatacaagatgtattttagcagactcgggtagttgtactttatatgcaacagtaccaattctttcaatcactggaaatagaccaaaatagtgcatgcctagcttccgatgcttcctcaaagccactgaatgttgcctataaggttgtagcttaactaaaaccaaatcaccaaccttaaattgcaaatctcttcttttcttatcatcttgcatcttcatatattgttgagcccttagtaaattacccttaagcttgctcaaagttgatcaacatagtgtaaaaattcctgagtg

SEQ ID NO: 24963 - DNA, 803 bp, Glycine max
ttgaacctttgaaaacctggaataacacaaaatccaccaaggccccacggacctagctgcgtgcacagggattttttttcttttttagactctacgaccgaggcaattggctagtcttttctaatgattgacgcttccaccttcagtatattatgaacgctggatcttgatagcagctatgacacacgtttggaggtacgaccgttgttgatgataataataatgatcataccacgcatatcttcctcatgcagtgctctggctagataccgtctcgactatcgacactctagatattccgtagtatgttgcagtccggagattggcgtactatattcgaaggagtcgattcgaacgaatgcatgccgatgaatttatagtatctcgttcgtcttatcttcttcattttctgtaatacacactgttgtcctgggaatgtttaactgatatggcgtttacatcatctaacattggtcgtttcctacccactacactataccttgtacaaaataggctttcccgtaatctaatgccgctcctctatgaattgcattcattttattctacctcttctcagcatcgtcattactggcttcttaggtcctactccacgtcttttagacggggtttgttcgtcttcctaaagagttgtcgtaatgttcctccgctcacctttcatttatatcgttagcagtccaatgtcgtgtcgtacgtaatttacgtattgagtgtttgtgcttatcctatcgcttatgggcgtctggtgcctatcctacgcattacatctgtatactcatttctcc

SEQ ID NO: 24964 - DNA, 170 bp, Glycine max
  unsure (1)..(170): unsure at all n locations
agaaactcaccctaggcaaggaacgcaaacgcgagggggaggaacacctgctcngcacggaaacaaaaaaacgcgggggaggcagaccctaggggcgcagacccacccatcccgggggaacggccatagaaaggggggaaaagacaccgtggaaggcaaaaacgcccccc

SEQ ID NO: 24965 - DNA, 461 bp, Glycine max
  unsure (1)..(461): unsure at all n locations
aaatgtgacacttttgaccttgaaattatgcctcacatgacatcgcaccctctaggtcattgaagtcggcatagaattccttcacaatggcaacattaatgttgccgtcaccaaaatcagtcaactcctcatcctagtggcgtctttcgagttcctccttgaactcatcaatnggatataaaatagaccaccccgttactctcaagcaaaagcttcttgggcataataacatcagtatatctttcccaagccctctatgaagggaatctggatctgtccaatctgtcctgggtaggaggagagggggcctctcttttcctagaagccctcttccaatataaaagaccaaacccaccagaatagccccggtttcattttcacgaaaattgaaaaattaaactaaaaacaaacctagacgcttaacacaatatgccgacccctaaaccgccttatgaaattaa

SEQ ID NO: 24966 - DNA, 594 bp, Glycine max
cactactcaagcttcatgatgatgaatcaagctgattcaggaagggtggttgacatcttgagatgatgacaaaaagcccaatagagtgatttcaagattgagtcaacaattcaagaatcaagagtcaacacttcaagaatcaagaaaagataaattcaagtttcaagagaagaaatcaataagacttcacaagggaagtattgaaaagttttttcaaaaaacaaacatagtacagttttgttttccaaaagaaggagaatcaggattagctaagttaccagagctgttactctctggcaatagattaccagtttcctgtaattgagtaccagtggcaaagattgttttcaaaagctttcaactaaatttacaacgttccaattaatttcaaaatggtgtaattgattacaagatattggtaatcgattaccagtgtggttgaacattgaaattcaaattcaattgtgaagagtcacatctttgcacaaaaatgctttgtgtgatcgatgaccaagatttgataatagcattccaatgacaagttttgaacaaaaatcaaaagatggaactctttcaatggttttaaattttttt

SEQ ID NO: 24967 - DNA, 316 bp, Glycine max
cggaggggtccaccaaaacctgcacacgggcgaccagagctcttcgctgccgaaccacgagcgcaggaaccgcaggcacgcgagcaggtgcccgaactccacgacacgaaccgcccggagcgcgccaaagtggcgcgccaacgctgcaccagagagcacacgaactcaaaacgggagacaaaaagagcgaggggggcagggagtgataagaaagggccaagattcagaaaccccgcgaacataacacactaagtgccgacactagccgggaaaaaaaaatgaactaaaagcaccgccataaaaagggaaaaacgaa

SEQ ID NO: 24968 - DNA, 528 bp, Glycine max
tgtccacatcagacctggcagatgtcgatggtgccgtcttctttgggacctgagggacatgtctgggctgcatagcaggtgcatttggcagaggatttgatggctgggtcgcggtcatgaatggatgagaaatgtggaagaaccagtcgatgtagtcaggtgcacaatgacctggcacaatgcacgtctcacctgctggcacaagatggtctgagtagtgcatccacatgtcgtctatctcatcaaatgacacccatgaatcaacaggcggagcaggaatactctggatgtatccaaattgccacatgaccctctctggtcgataactaacaacaacgggcccccagcggagttgaccggaatagcatgaaatcaaatgaaactcccagacccgttggtgctccccatatggaatccagcagacatcaggaatcctaactcggtcctagtgttgcctgtacgttcctgtagaaatgttctttatagtcttcttcgtagcaatccacctattggcatgtggtgaatcct

SEQ ID NO: 24969 - DNA, 460 bp, Glycine max
tatgctgcaaatatttacaatagacctcctctaccttatctagcaaaatcaaccacagcagaacaattatgacctctccagcaacagatataaccctggatggaggaatcaccctaacctcagatggtccagccctcagcaacaacaacagcagcctgctccttccttccaaaatgctgctggcccaagcagaccatacattcctccaccaatccaacaacagcaacaaccccagaaacaaccaacagttgaggcccctccacaaccttccctcgaagaacttgtgaggcaaatgactatgcagaacatgcagtttcagcaatagactagagcctccattcaaagcttaaccaatcagatgggacaattggctacccaattgaatcaacaacaatcccagaattctgacaagctaccttctcaagctgtccaaaaatccaaaaatgtcagtgccatttca

SEQ ID NO: 24970 - DNA, 1054 bp, Glycine max
  unsure (1)..(1054): unsure at all n locations
cacagccagaccaaaccgaccacccgacacaacaagggcccgccgaacgaccgaccgaaaataacacacaggancaaaaaaaacattgagccctgcagaactcggaanacctcaaanaacccccgaccgnngccccaacacccacaacgaagagcaagcaagagatgactgcaccgcaccgaccccttcgacacgagcggaaagaacgatggacgccacgggaggcacggacgcaccaccacgacgcaaccacacacgcgcgcgcagtgaaggagcacaacgggcgcgacgaaccccacgcgagcagaagcacaaaccgacacaacacacgccggcacgcaacagaccccggagcgcggcacacacaccagcacaaccgccccgaccaacacgaggaagcacccaccgacgcgaggacgcaacaaagaacccaagacagcaacggccgaaccacggccacgccaacgccgacagccacgaaccaggccaccagcggactcacagacgacccgacacgcgcccgacgggcgcaactaacggagcccccaccggacgcaacaggaacgaacgaccaacgacacgccgcacacgaaggcaccaaccacagcgcaacacagcggccgcacactacccacagcgcacccctcgacgccgacaacacgcacaaccgaccgacccccccccacggccgcaccgcaggacaggccaccacaggcacacgccgacgccgcgcacgccacccgacgcccgcccgcgccaccacgcagcacaccggcgaacggcaacgaaacacgcagcggcgaaccgacccantcgctgacagaacgcccaggcccgacgcgccaccgagcgcgcgcgcaacgcgagcgaacgcggacccccacgccccacgcaacggaccggagacggaccgccacgcaacggcacccgacacgctcacgcaccgaatggcggacggaagcacgccgcccacgcgcaaccacacgacacgcgacaagacgagcggacccgcaacacaacacaacgcacacgacgcgcaccctcgcgacggccg

SEQ ID NO: 24971 - DNA, 550 bp, Glycine max
  unsure (1)..(550): unsure at all n locations
tgagctagagaggaaaatgcagcttgcaagagcacctgtcttgcaacgaagataaattgctatatggttccagaacagaaaggctaggtagaagacattgttctcaggtaacataacaaaaacacaatgctctcaggtgttgataaaattttatcacacctaaaatcccctgcacctagttttggcatatttagtaagataatataactgttgtaaacaaggtagaatgcaactaatcacttcaaattctccatccaaacacaaggtaagagatgtaaaacactcagttgcattttccactgttatattgcaattttggacaaatagatctagcagtagtattctatattaaacaatctaatgccgtcatatgatcaaaaaaattaaaggcaataagagactatgttggggggtgaaggaacttttcaagtgccanaatagtctntaaatagaatattatctcaatattagaaatttctatcacagaaaaatatataattgagactccattgtccatctaatgtttncaatgtcatatctatcacattta

SEQ ID NO: 24972 - DNA, 605 bp, Glycine max
agcttgcaagtgaaatctaattactctacttaagtacgcaacacaaagaatagtttacactagaataaaaaggtatggtcaaaagagtattctatataaaatatatctcgatacgagtcctcgaactatagagtatcaacattgctaagaacaagaaatcacgaacaaccatactatctatgcaattaaggcaaaacaccatactactaacatacccagaattataaggttcttataataagtatacaacgtacatataagaagtaagaatttaatagttaataaggatgtattaaagaatcacaaacttcaactactacattcacgactacacacaaaataaagtgagttaagtagtcatgcgtttacacatcaagaaaggcatactcatccaagacatatatatggttcaaaaggttttcacaacactaatccacacatcaagatagaaataagtttattaacaacatacaagcaagaagataagggcctcattaagcattatccatcagtatcaaagcttcttgcatcacctaacggcttaccataatgtcgaacccgacttcacaaattatagagatgggcagtctcataactcatgactc

SEQ ID NO: 24973 - DNA, 396 bp, Glycine max
tagggatggaacacttacttgttggtgatgaacaatattgctaaacggaatcaaaaaaatgcggaaaaggaagaccctatggctgcaaactcgtcaatcccgtgggtatggcttttgaaaggggggaaaagaagtttttgaatgcaaaaacgccccccctttcgtcattcttataatttggtgcaggggtggctcgcccaggcgagctaacctgcaaattttttttttttttttgaggggaacattaaccatgtcccctcccttctcatggattagcatcttgcctaacttgaacttacttaggttagaattaggcgttgattacttattttttactttttaaaacaaacaaatagttaaagaaagctgcaaaatacaaaggatactggggtgctt

SEQ ID NO: 24974 - DNA, 604 bp, Glycine max
  unsure (1)..(604): unsure at all n locations
agctttagtcaaacagaataatccgtttatgtcatagaattgggtgttgaaagagcataacaagactttctgtgattggtttaaagatacaatctttgtagatgagaatgctttagaaacattaagaaagctagcagatgggcctaaaagaaatgttataacctggcaaggatacgacataaacaagtattcattttacacaaaagcacaagatgacaaaagtacaatgcagaacagcggggtcaccctaagggctgaatctcaacactttgcaagtgtcaatgacgccaatccctgtgtagctttcatcccttactttgggttcattgatgaaatttgggagcttaattatttgaaatttacagtatgtgttttcaaatgtaaatgggttgacagcaacaccggtgtgcgcaccgatgatataggatttacgctggtagatctaaagaaacttggttaccacaatgaccctttcatcatggcagaacaagctagacaagtattttacgtgcaagacccttgtgatgaaaggtggtgtgtggttctgcanggcaaaatagttggtgttaatgtagaagatgaatattcatacatggacacctat

SEQ ID NO: 24975 - DNA, 479 bp, Glycine max
  unsure (1)..(479): unsure at all n locations
tatagaaaactaaacaaacggtttcaatttctttttttagagcatgaggatcttagaaaactcattaagcttatttatttgattttgtcatggaaaccacttcacctagtgatgtacaacacacctttgattatgaggaggtaaaggcattattggacgaaaaggtatccggtggatggaagattcttctaaagatttagaagaaaagttcaaggaaacgcttaaacaaaatgttttactgcaaaaagaatgcacccttgctaataatgagctcgaaaagttgaaaaagaagaacttagatctctagacgaaatgtcaacgtcataaaaatgtctcttctgatttaaactataagcttagaggatgtgaggtcttgaatgaactactgcctaagattgtaagactctatgcagagatagaaaccttgagagataacctangcaaatttgttgtattcatgaagcccttaacaaaattat

SEQ ID NO: 24976 - DNA, 437 bp, Glycine max
agacaatgctcttattcccctacgaattgtcacttgcacaagacatcctattaactaagaaaaatgcacccatatacaatcaaggtagcttcattacctagattatttacatgtacttccaaggtgtatttgttatttacatcacacacaccttcttggctaaatttacatacatgcatactcaaagcatttcggggtaccaaaaattgcacatgcgctcatcttggtatttctaatacctatacatatacaaacttcatgatgaatcttgactacctacgcaataaggtgctacatttcatgctcttttttttatttttttttttgaggggaatattaaccattgtccctcccttttcatggattatcatcttgcctaacttgaacttacttaggttaaaattaggcggtgaatacttattttttacttttaaaac

SEQ ID NO: 24977 - DNA, 376 bp, Glycine max
actccagctgcacagcagattttcgttatgacccactttcccactcattaaaaaccaccacgccataaacctagggaactatacaaaaacagatcggcccctggatggaggaatcgcggtaacctaaaatggcccacaccatcaaaccagccacacaccatttggtcttccataacgaaggcgcctaggccgcccataccgcccttatctccaccagatctacacctaactcaagcccatatacaagaccaacccgaagcccactcacgccatccaccttaacaacgagggggccaatgactatacaaaccatgcactttcagcaagagactaaaggctgccatccaagcctaacccatcagaggcgacattcggc

SEQ ID NO: 24978 - DNA, 333 bp, Glycine max
agcttttttatttgcttgatgccatttttgatgaagttggagaaaagaatgttgttcaagttgtaaccgataatgggagcaactatgttttagcgggtaagttgttggaggagaaaaggaaacatatttattggactccttgtgcagctcattgtattgatttgatgcttgaagatattgggaagcttcccttgataaggaagaccattagaagggcaattaatctacttgggttaatgtatgcccattctagtaccttaagtttgttgagagattttacaaacaagaaggaattggtgagacatgctattactagatttgccactttttatc

SEQ ID NO: 24979 - DNA, 644 bp, Glycine max
  unsure (1)..(644): unsure at all n locations
taaaaatttaagaaaaaaacattgtacataaaattctctcatttttcaaataataataatactaatatagacatattataaattattttttaatttctattctaaaatattaatttaaaatattataataaataaagcgttagtatttaatattattattattgaaattaatttttgatttagtatttgagatttgaataaatatgaacaaaaaagttactaaatagcatccttcattattggttttttttaaaaaaatttaatgattcccaaaagagttaaataatcaaattatcaattgttaacaattttggttaaaacaacccatagtgaaacagacaaaatattaataagaaataaacttattgaatttgaaggtcttaaaaggaaaaaatgcacatccgtcataaatttaagacaaagaacttttanaattctttaattaacattttaaccatttatatttgaacaactgtttcaaaaaaaaaattcttacagaatcatttatactatttaaccgtgctggaaaaaaaaaacccacaactcttgaattttattttaatgcacatttcttatttataaagaatagaaaggggttggtgcattttcttaattccttgccgatgggttaaaaaagaaaagaa

SEQ ID NO: 24980 - DNA, 550 bp, Glycine max
  unsure (1)..(550): unsure at all n locations
agctttgcaaatgttatttctgaaaagtttctctattgtcttacttactatnncaacttgcatatcctaacacccacccaacaaaaccattatcctgaaattattctaacttccatatccttagttaacaaaccaaatttgattatcagcataaagaataggagaacaaaatttgtaggacgggcaagctcatatatgttgaataagcttcaaaataaaaaaaaagaactatttgtattacagaagatcaaagtatcataaaaagatctggaatactattatagaaggaaacctgcatacatcatgctcataaaacaatttgctagaagatcaaagtatcataaaaaggcctgcaacaataaaaaagaaaccccatttctcaatttccagcaaattcaagttgaacataagtcaagggaaagcaggaaggtggggggaacatantgaaaaatgaaatccctgaaagctacataggttggaatcattgaccattaattaaaaagacctaaatttcgatagtcttgaaagacagtataaattcaaatgcagc

SEQ ID NO: 24981 - DNA, 567 bp, Glycine max
tttaattatttcctttctttcaagagacatgatgttttctattttcaacataccaagttataaaattaacttggtaataaagagagaaaggagcgacagacaggtcgtgacttcgaattttcctactcacagataacataacattgaccgataaattttttttggataaaataacacaggtctgaagttctttatcatcaaatttaattagtaaatgctccctttcatacatgcagactagtgggacttccacaaacgagaagtccaaacaagaaaggaagcacacagccataaaccacaatattcacaaaaaagatcccttatggtactttcagagttcctatcacactattttgttggtcagccaaatttatatacacaagatgacagatagcaaagagattggtaaaaggaacaacaaaaaatgaactcatagaagggctaataaaatatcaagtgcctgcctgttgggtaaaactaccactcaaaaaaaaaaggtaacagtaatctcaacacgctagtatcagaatccctcatgttctttctcgcatcagatgataagtaaat

SEQ ID NO: 24982 - DNA, 596 bp, Glycine max
gagattacctgcaggcacgcaagcttcttatccaaggctcatcttggttgtgaagcttcttcttccgtggcttattccttaatggatggcgcctcctctcacctcctttcctttgtcttccgctgcatctccatggtggaaaatcaccattaaaggaccccattgaagctcaaagatccagcctccatagaagccccacaagcaagcttccatcacttaggctataaatagaggccatgtgtatgcattttttcaactttgatcatttgagaattacacttcaaagttcatacctcttttgaggcacaaaattttgagccccttctctgcctctgcctacactcatcttctcctaccttcaagctcttatccaaggcttcctatggtggtgagctgcttcttgactcatcatttccttgaagaggcatctccaatcatcattcttccttctttattctgctgtcattaaacttcatgcagcaaaggactccattgatgaagaagatccaaggcctacaaactgcaatggagctacatcatgtggtatcaagagcatcttcatctaggtgaagtgcttttgcttcctttatcttttt

SEQ ID NO: 24983 - DNA, 618 bp, Glycine max
  unsure (1)..(618): unsure at all n locations
tgttttggtctaagtaaaattcttgaaatcttccttttattcgagaactattaccatttttactcatgtataaagttgaaaatgctccttctcgaaaagctacttttgctaaaatttaccttggagactaccttcactacctaagaggaataatcccacaagaatatgtagaaatcaaaaccaaacaaataaatggtaaattttgtttatgtcatattagagtacgtgttcgaaataatcctcattgaatattataatgtttatgatttaaactttctgctatccctatccaaattccccaccaaggagacaatgaagactggaaggatgatgatcaagggactttgaaaaaagctcctcgaaagagaaaagctccttcttctagcagcacaagaaataatgtatatcaaattctctaattcaattagattttattatttaataattttctaataataaaattaaaattcttgcaaggatcgaagaanaccactaacaccaagaatgatgatgaagntaagcttccaccaaaaccttccanattccaacaaccatcaaggttcaatttgttctatttcaatgtaacttatttttcgattttcacaattatgaaaattc

SEQ ID NO: 24984 - DNA, 474 bp, Glycine max
agcttgaaggtgtgtaacccaccaacttctcgtagtttatccctgttaatgtgtcaactatgattgttatcatctccctcaccatcattgggggcgctacttgagctgctagatccctccacctttgggcatattctttgaaagattcatgctctttcttgcacatgttttgtagctgcattctatctggagccatatcagaattatactgacactgcctaatgaaggcaaccattaggtccttccaagaatggactcgggaaggttccagattagtttactaggtgacagctgccccagtaagactttcctggaagaaatccatcaataatttttcatccttcgagtatgcccccattttcctactgtccattttcaggtgattcttggggcaagtagtccccttatacttatcgaactacgacaccttgaactttagagggatgactacatcacgcactaggcataactcta

SEQ ID NO: 24985 - DNA, 331 bp, Glycine max
tgccgaagatgatattcccagtactttggatttggtacgaccatgctcttctgatttccacctgggaaattggcgaatggaggaacccccctgcatttacgccacaagcataatgtgaacctttacggtgttaaaagctctataactgggcctaggcttttgaggtttcactttgataaagccttgcgtcttttggttttgaatgtataatacaaggatctttcttcatctgttcctgggctctacccaatcttcttcctttgcatgtttacttctttttctaaacggcagattcaatgacgaatccccccaagatactaataccctgtga

SEQ ID NO: 24986 - DNA, 418 bp, Glycine max
ttaacctcatcgtctctcacagtctttagatttgggttcctttccaatccttgtgttcggactctcagccacttatgatagccgtcgatgatcccattactgcttcccctaagctctttgtcctttcttcatgccgcatcccatgccttgcgaactccttggagtaccctcgcgttgtggtcactgaaaccccgtgcgatgaaaggcgtgatgctttcgtctgatggcactcctctcatggggtagccaagctgtcttatggcgaggacgggattataattaatacaaccccttgttccatcaagggaacatttggacatccttcgtatgaagatagaatcctaattcttccttccttcttggagaaaaaggtgtgaaaccagccacacatagagagccagtgcacaacaaacaattc

SEQ ID NO: 24987 - DNA, 675 bp, Glycine max
agatgaaacttgaaacctcgagaccccccattccgaaagcccaagggcgcgcaccgagacacaacatttgtcgaagggtgtctacccagagccgaagcagaaaggggcaaggagaaagccgctaccgaccaacacaagggggcagcgaaaaagggagaagcaggaccacggcagaaaacacaaggacgaccgacgcacccaccgggaggaagaaggcgggaaagaacagcacgacaagggcaacaagaaggcggacgagaccccaagaagacggagacgccccccaaggacgacaaggaagagaccacagaggaaaacaacagggagaagaaacacgccggggcacaacgcaaaaccaaagggccgaaaagcccgaacacagagccacaccacaaggaaaggaaacgaaccaccaaccggcaaggaggggacaaggaaaacgacggaccacaacccccgtgaaaaggcggaaacccagcaaagagccgagaaccacaaaaaaaaaacacagccaacggacgagcaaaggaggagcaaaccggcggaggcgaacgaacaaaaggagagaacacgggccacccaaaaaacgactaagcgccccgccgaaaagacaccgcgggggggggaaaaaggaacgggaggacacacaaagggcgagagagagcggcgccaccg

SEQ ID NO: 24988 - DNA, 452 bp, Glycine max
ttaatctttcacactatcatctatgcgttctttttttttcatctaagagagaaaatggaaaatattatttcttattgctcaagttcatttacaataaaggacaaccactttcttatgtttaccaactcaagaaataatcaaagtaaatagaagttattcaattataaactaacagaaagattatgatggcagacccccaattaaaaggatgtaactagaaagaatacaaaggagtgttataaaaaacctccaattgaagaaagttataggagaaggaataggctatgctgaatagaatccatttctttaaagcaattttcctagagttgtgacaaaatgctacagttggttagccaactaagtaatgactacagtggttagttaacagactagggtgacgatgtttaatgaaaccttgttggctaaatggaagtggggttcattccgcaatg

SEQ ID NO: 24989 - DNA, 572 bp, Glycine max
agcttgagcttagctattcatacctctctaatagctaagctcacctccttgagatgagaagctagagcttagctacacaccccctataatagctaagctcacccccatgacaaaaaacatgaaaatacaaaaaaaagtccttactacaaagactactcaaaatgccccgaaatacaaggctaaaaccctatactactagaatggccaaaatacaaggcccagacgaaggaaatacctattctaatatttacaaagataagtgggctcatacttagcccatgggcttgaaatctaccctaaggctcatgagaaccctagggtcttcccttggatctctagccaatctacttggagtcttctacccaatgcccttgcggggtaggattgcatcagaaaggtcacccttcaaagacggtcctccaaccgatgtcggtattcaacgacactgtgttaccaccacacgtcataaccgatgtagaaatgtcattagagccgatgtagaaggcctttttttttaatattgaacttaagttccatcatcatgttattgttgcgagcagaacatatatata

SEQ ID NO: 24990 - DNA, 329 bp, Glycine max
  unsure (1)..(329): unsure at all n locations
cttgtaatgatttacntactttccgggacgggaggcgttantttataaccaaacccagcatcactcatgactagtttctaaagagagaacggctcaacagacacgtctggaattcaaaacctcgtacactcccattcactaccttagagcgataaaccttatgaggataaataactcaggacccgaactacttaatgcatcatatttgattatgtcaatgcacgagttccatacactgcagacatcctgagacgaatcacatacgtggaatgtgctaacaacaatcggagctccctatcctaattcaccaccatggcgacaaagaacca

SEQ ID NO: 24991 - DNA, 577 bp, Glycine max
  unsure (1)..(577): unsure at all n locations
agcttccaccaagtaatttatgtgttttctgtgaacgcataatgtatcatgtatacatagaatttgtgttggtttctattgttatcatcatactttgtaagagcaattcaagaagatgttcaaaacaaatatttaccatgatgatcagaaaaaaaaagacaaatttgtgaccattaattaatcaactgtactttctgtaaaggctaaagaaataaacggatggaatttggcttcatactatttatcatcctattccctcatgtatttctttatataatggagatgttcctgggacttcatgtttccttttctttagtcaacctctttggactcctcaccaataattttagagactcaacaataactggtgttgggtacaaggaatgaatacaaaaaagaacataaaccacttattcatacaatgacaaccaacatgtctgcaatgaatgaagtgtaaagtatgagacaatggagtcctaagattgaggcatgtctaccaaaacgcanagaaaaacactgatagttatgttgggaaagtgcataacagaccacaattatacaaaaattaaaggtttgc

SEQ ID NO: 24992 - DNA, 803 bp, Glycine max
  unsure (1)..(803): unsure at all n locations
caggcgagacaaccaacgagaagcgaaaaaagcagaaggaggaaaagcacaaaataaaaccaacaaaanaaaaaagaaggggtgatctgagactcgcaatccagaaaaaaccagnnaggccaaaaaaaaagagggagaggggcgtacacataagaaaccccaagacaaagggaaagaggcaaacaggggagacccaaacggacacaacggccacaaaaaacgggggaaaccaacagacaaagccaccgggccaaaaatcaacccacaaagaagagcaacaaacccaagggaaagaacggacacagtgaaccaacagcggaaaaaggaacgagcgccagaaacccacgacggaaacaaaaacagggaagggacaaaaacgacccagaacccccaacagaaaagaaggggaaggagaaacaacacaacggaaaggaagaacagcgggggccaccgaaaggagcccccacaaaaaaggaaaagaaagaggggccaaaaagggggacgaaacgaacggaacccggacaacaacaggggggaaaaaaaaaaaaaaaaaaagggccaccagggaaaaaaaacacaccaaggagggaaagaagaaaagggcgaaaccccaaaaaaagaacagcaagaaacaacggcggaaaaaggacgacaaacgccaaggacaaaacggggaacaaaaggggccaaagaaaaggcaagcaaacaaaacaaggcaccacacgaagcaaaacgaccgacacgacgagcacacacaccaaaaaaacgcacgagaacaaaaacgagcaaaaaacccaacgaac

SEQ ID NO: 24993 - DNA, 315 bp, Glycine max
gcgaaatgccaagatgatattccgaatactttggatttggtacgaccatgctctcctgatttccagctgggaaattggcgaatggaggaacgccccggcatttacgcaacaagcataatgtaaacctttacggttttaaaagctctatagttgggcctaggctttaaagttttcattttgttaaagctctgggtcttttgtttttgaatttataatacaaggatctttcttcatctgttcctggtctctacccattctcattcatttgcatgtttacttctttttctaaaacggcagatttgatgacgagtcccc

SEQ ID NO: 24994 - DNA, 885 bp, Glycine max
  unsure (1)..(885): unsure at all n locations
cgcagcacgagaacgaagaagagcaccgcgacgaccagagaaccgcgaacaccaccagagagaacaacaaacgacaannaaagaaggagaacctgatcaagcacgcagacccnnnaaannacgcngggnacacgaaaacacagcaggagaggggtatccaaccaaagcacgaagaaagcaaccaaacacgaaggaaaacacaaacagaaccacaccaccaaaaaccccaaaaccgcaggacaaacgaccagccgcacgccaagcccagcgaaacaccaggaagacccacccaaacaggggcaaatgaaaaacccgaccgaagaaaaggacgaaaggcagacaacagaaggcacaacaacacaagggggaagcaaacaggcacacaagcgcaaggaccgggagaacaaacaaacaacaaacccagggaccaccgaggggagacacgaggaccgacagaacgaacgaaaaaacaaaaaaaagaaccacccgcacaacacaagaagaaaagagccgagaaagcacgcgcaacagccaaaaacaccgagaaccacgagaaccaacgaagagcgacgacaccaaaccacaccacccagcgcgaccaaaggacacaaacgcggaaaaaaaacggacaagacaagagccacgcccggaaaccaaaagaaagagcgaagaaaagaaaaaaaaccaacgactgaaggcaccatcaaacgaaccacaacaacggaaacaaaggaaaacaccacaacaanttccaggccggccagaaacggcagacaggaacaaaaacgcacaagcacctacggcgaacgcacaagagcaaaggcaccacagacgaagctagcaacaccaaccagcaggacgacaccacaagacgaccccgaccct

SEQ ID NO: 24995 - DNA, 424 bp, Glycine max
gcctgagatgaggaattgttgaagtgtttaactttttgcttttattggtgaccacagagaggtacctggaaatatgtcgcggggggcaagaaatcttggggacgtcaaggggggtgctattgccccaaaccaagcttgaccaatcccgacccaacccgggcatagtcggtcagtgagaacctgtgatgtacctaagcaagcgagctcctggcagtcaacagataaaaggaacaaagaccacaaagcaaggaggcttgtggtggctggccagctgtgaattttgtgtgatatgtggattatggcccctggtaatcgaattacaggcttaaaagtgaagacaggaggttaaaatggtctctggtaatcgattaccaagggggtaatcgattaccaggcttgaaaacaaatcaggaaacttaaggag

SEQ ID NO: 24996 - DNA, 490 bp, Glycine max
tgtaggattatggggtacccgtcatatgtggtactttttggcgatcgggcgatggtgcaaatcaactctcccacatccacaaattaaacatgaacccaccatccccagttgcccaccttcaactgagctcacgtacccccacgtagcccttatcctcgttcctctcagcaccgggtccccatcaatccctccaagcttccacaatatccaataaattcaatattcaaacatcatgaaccaccctaaaccaagaaaacagggcagaggcagaaaactctgcccaaaacacattccaataccacagctttccctactcaaataccccagtaacattctcttttttctgattcgttaaccggtggatcgactcgaaatttttactggaggtccctagtacataaatctacattttgaccgttgggatctgatagaaaacgtccaagaccccaatatgtactaccttttcataaccagcaatacacaaacattt

SEQ ID NO: 24997 - DNA, 601 bp, Glycine max
agaatgaaccttgaaccctgagaccctgaaacccaaattcccaaggcccccggcggcaacgaattcacaagtgcaggtttcaacccaaccagacccatgaacacaagagacccccgcgaaggggaagaaaaaccaaaaaaacgcggaggcagccagccggccaaagcgaacccacccccgaacaagagcggcaaccacaacgccccgcgaaacgcaagctacccctgacaaaaacagcattgcgcgagaagccctcccacaacactacaagccccaaaggacggccacaacagcccagaggagagccagccggggcggacagaggacccccggccagaggaaccgacaccaggcccggcgacccagagtcgaaacgaccaagccccgacaaccggcgccgccccaggacagaccccgacccccagaaaacacccacgccacgcgggccaaaaaacacgggccggcccgagaaaacgaggggggccaccgggggacaaacagagggaacacctagggacacaccgaaactaacaacacagaggccccacaagcggggggcgggcgccaaagaaggcaccgcccaaccacaagggcgaccccg

SEQ ID NO: 24998 - DNA, 755 bp, Glycine max
  unsure (1)..(755): unsure at all n locations
cgaagcgcggggnnncttgaattgtagtaatccgtagtacncgcgttattnagaatactcccgcgccaacatactttggcattacacaaccaattttcacctccctttnccaggaacacgaaaacacccacaaagggggcgtgggacaaacgaaaggccgcccccgaacaccacagaaaaaaccaacaagaaaaggaggagccgatcaacccgcaaagaccaaggcaacaaagccccaaaaaaaaccaaaaagggaagngacaaaaaaaccgaagaagcgcattggcccaataataccgaaaaaaaagggtttaagttacaagacaaaagctccccatggaattgtgggaccggcaagggagagccaccattcgcaactccattagaaaaacaaaacaaacacttacaagcgaatggtaaaacatatgcatgaagcccgccagaaatacgtatatacaccctgtaacaaaatcctaacaaagttcccaatccaaatcaaatatgggggccacacacattggataaaaggaaagggcggtataagaaaaggatgtaaaaaaactggtaaaacaacgggaaggggaggcctttccatagggaggcgaaggggggcggataagaaaacaaattttccctgccaaacgccaaaaagggggttccggaaaaccccaccggtcccataaaaaccaggaaaaccatgggtcaactcaacacaaaggtgccccccgggggttctattaaaaaaaaacaaaacc

SEQ ID NO: 24999 - DNA, 514 bp, Glycine max
agcttctggtgggacattttgacttgttttccaatctgacattcaccacagattctgccttcttctattttcagattggggatgcctctaacagcacctttgtcaatgattttcttcatgcctcttaagtgcagatgtccaaatctttgatgccatattctgacttcatcttctttggaggatagacatgtggaggagtagcttgtttcttgaggtgtccataggtaacagttgtcctttgatctgctgcccttcattagaacttcactcttctcatttgtcaccaagcattctgactttgtgaagtttacattgaatccttcatcacacagctgactgatgctgatcaagtttgcagtcagtcccttcaccagcagtactttgtccagactaagaagtccatcatgaactagccttcccattccaatgatctttcctttagagccatcttcaaatgtcacatagctagtggagcagggctcaatgttcaccaagaattctttaacttctgtca

SEQ ID NO: 25000 - DNA, 533 bp, Glycine max
tgaaaaccacgtaaagcacaatcaagtgttacaacttattgaaaccccacattacaattcttattgatacttttatatggttagccaagtggacaaaatgacccaataatttgataagaaccttcggacaatgccaccgcactaattaagaacttactaagaagagcaacaaactaaggtagagctcataccttgttaactagcagcgtagaaagctttgagctttgagaacccacgactgttccaagagcagtgtagggttttcttcgacccagaattccaacagcaatgtagggttttcttcaacttttcttcgataggaagttctgtgggttccagcgagcggtttccgacagtattgaaatgaatgtgggtcaatatgggtgtcgaccgagcgtttccggtagatttcaggtgggagaagaaagagagagagagtgcagcatgtttttcagcacacgagttgtgaaatttaacatgttttaacttataacataacaacatcaacatcggttttttaaggataatcaatg

SEQ ID NO: 25001 - DNA, 472 bp, Glycine max
  unsure (1)..(472): unsure at all n locations
agcttgttaatggctattcatgatttttgtcagggtttggnttggntcaaggataaaagggatgccccacattatttccataacacaaatgcaaaaatgatgatttggaaattttatgcaaaactggtcatgcatgcacctatgtggacgctcaagtgtcaaattttcatggtcatgtgatgctagggctcaagattcatttcctctattttaaatcaacccaatgtttccaaaatatgttcttttatcaatttgtgcattcatccaagtccatttcgggcgtccggggaaattttcacagcattcacccttcatgtgtagacacgttttttttttcaaaaatcggttatgatcaatgattttttttcaaagaaaagttggaaatcatctcttttccaaagcatgtcggtttttatctagacaacttattttcttttttccaccttttttcttacttgctttcctttttcct

SEQ ID NO: 25002 - DNA, 424 bp, Glycine max
tgtagggttaaagtctcacgataggcacttgctttttctcaattgtgagccgtggctatacgagacatcttgccaaacaaagtcaggttagccataactcgccagtgctttttcttccatgctatatgtagcaaagtcattgatcctgtcaagtttgatgatctggaaaatgaggctgcaattatattgtgccagttggagatgtattttccccctgcattctttgacatcatgattcacttgattgtgcatctggtcagagaaatcaaatgttgtgcgcctgtttatctacggaggatgtacccagttgagcgatacatgaagatcttaaaagggtatacgaagaatctatatcatccagaagcatctattgttgagagggacattgcagaataagccattgaattttgttcagaatacattg

SEQ ID NO: 25003 - DNA, 379 bp, Glycine max
actcacccgagttatttatccctaaggcctagactccgaagagtccatcagggtctctccttcctgattcaggtccaacccagaaaatattttaacacacaaactctacctataaattatgcaatacacacaactactcaattgtttacaaaatctcaattattttccaaaattattttgactcatcgtgcctcaagtgattaaactcgtcgggttcctaccatggaacccatcacaactcatcgcgcatttaaatgatgtgtcacaaaatttgaagtgcatttaaatgattaattttctcttaccacttatattaagagtttgaaataaattagtttcaattacttacacgtaaaatttaattagaacatagaactac

SEQ ID NO: 25004 - DNA, 190 bp, Glycine max
aatatcgaaaaaattccttcctgattataattaagtatagggcttatgaatagcaacaagtcaaaataaatttcatatactaaaaaagaaactagtatgctgactagaacaagaaccgcatatctatataatggaaacatcccatgagatatgagtattacacacacaccttatccataaaggagaatgt

SEQ ID NO: 25005 - DNA, 435 bp, Glycine max
tgcaagcttctagcgtacccgctattggtgtctataaaattcaaaaacaaatccctcttattactagctattttgaattctttagttcctgaatgtacaaccttcaaattgttgctcgttcccgtatttgttttttgcaaaaaagaaaattaatctgaaacaattcacgctgaatcgttatcgctattattactcgaaccatagggaataacagctcaacaagtaatttaaaatgtaacttttaaattatgtgggatttttttaattacaattttacttcaatatctaattttgttaatctacttaggtcgctttttaaatataaatatgaatgtaaaggtgatctactgataatataaagtacttgctaatcacaaattatgatacctatcattctacaatttaactgaattgtataaatattaataaatttat

SEQ ID NO: 25006 - DNA, 375 bp, Glycine max
aatctatagcaatgtgcttttctcttatgaatatacccagcaatagcaacaacctccattctatccaataggggattatgtatcatttcaacaacatttgtagtgcaaacaaaaagaacttgcaacgcataactgcttaagtaattatggtaaaaacaagcctactttgcctacagggaattgaatgaaagcaatacattcaagaactatttgaccatcctaagaactacctatcagcaataaacacaattaataaaccatgtacaaatgctaactatatcacaatctcactacaaaggctctagattataaattaatacctttgatagatcaatggtaacatcaagatagtggtcaagaaaattagcattctgc

SEQ ID NO: 25007 - DNA, 432 bp, Glycine max
  unsure (1)..(432): unsure at all n locations
agcttaataaattctatttaagtcatatttatagtctatgtgaggttaaaccaccacccttgaggctgcaattaaggcagcccctaaagaggccgcaaccacaactaagaggctggctaggggtgattgcaattaaggtggcttttcaacaaaatgtatatgtctattagtaggaatgttattggaagatggatgagtagtcaagaaatcaaataaatgcttccaaattacagaaaagaaagaatagtggcactatcatgatagaggattcaaaaacccatttttttatccctgaaacaacactgtttaggatttttggggggtaaagttgtgtctcccccattntctaatgtattttttgcttcgtaaacataataggatttgaaacccttcttccttcaacattccgcaaaaagttacctatattctgac

SEQ ID NO: 25008 - DNA, 426 bp, Glycine max
agcttgtagaatggctagacacgatacatgtcagggtttggtttggttcaaggataaaagggatgccccacattatttccatgacacaaatgcaaaaatgatgatttggaaattttatgcaaaactggtcatgcatgcacctatgtggacgctcaagtgtcaaatttttatggtcatgtgatgctagggctcaggattcatttcctctattttaaatcaacccaatgtttccaaaatatgttcttttatcaatttgtgcattcattcgagtccattttgggcgtctgggaaaatcttcacagcattcacccttcaggtgtatacacattttttcaaaaactagttatgatcagtgaatttttccaaagaaaagttggaagtcatctcttttcaaaagcatgttggtttttcagcttgacaacttat

SEQ ID NO: 25009 - DNA, 393 bp, Glycine max
taggttaaattagtctaaccttttgtaagctatttaagttgagtctagtccaacaagagggatctgaggacgaagcttagtttaagttagtctaaacctaggagggctgtctaaattaagcctagtccaacaagagggatttgaggacgaagcttggattgattcagtctaactagggatcgaggtttagtaatttaggctacaacatagaacacaaaagcatgattgattagagaaacatctttatatacatcagctggtttgttagaaaaactcaatacctttacctattgctatcaatcttacttgcatttttactgtttttagcctatacttagtttaattatgttctaaataatcaattatcaatgtttctttcaacaatgctttatt

SEQ ID NO: 25010 - DNA, 423 bp, Glycine max
  unsure (1)..(423): unsure at all n locations
agcttctcgatatattatgtggctgattctgacttccgtnngattagttatgaccatttgaatttctcgggagctctggctgttcaatttcgagcgtctcgatatattatgcccctgaatcggactttcgtgtgacaagttatgaccatttgaattccacgagagcattcgctgttcaatttcgagcatctcgatatattatgcgcctgaatcggacttccgtgtgacaagctatgaccatttgaatttctcgagagcttccggttttcaattcagagcatctcgatacgtgatgcgctagaatcggacttccttgtgaaaagctatgaccattggaatttgtcgagagctttcgatgttcaatttctaccgcctggatatattatgcaccttaatcggacatccgtgtgacagtcatgacca

SEQ ID NO: 25011 - DNA, 205 bp, Glycine max
cttctcgatatatatgcgcctgaatcagactttcgtttttaatgttatgattatatgaaaccctccactgcataccgcgagacagcttatgaccatctgaacatcccgttttcatgagaacctcagtctcgagcgtttcgatataatatgcgccttattttgactctcgggggacaagttctgcctatcttgatctcacgaggga

SEQ ID NO: 25012 - DNA, 303 bp, Glycine max
caatgcacacggtaaatttcattctttggttaaaatgcttatatttggcacttctacgtttggccatatatcacacaaagttttcaactcatttcgaataactaaagtgggttacgatactcttctaatttctctagttctaatagctctggtagtccacttactaaacttagaagataatcctttcctaactccaacaatctatctgatttacctttctgatttactgcactatgatatatatggtccctatgccaaccctacataggacgggaagagattgtcccttacattggcagacga

SEQ ID NO: 25013 - DNA, 367 bp, Glycine max
agcttgctactagaggcttcacgaattatcatctcgcagcagaagacgaacacaaccacccatcatatctcccatatccccataccctctatatttacgagagaaagaagtccacccaaacctgagttttcgaagcgccactcgtagccacgcgctctacgaccacgaaaatgctctgctttcacgatgaggggcagagatgatccccttaggttgaagctttgtgtggagcttgcacggtgaatgagggaggaagaaagaccacgcgcgggtgagggagagagagagcttctgatactgtggggctgagagatgagagagagggttgctctttgggcttaagaagggggttccctgttgtttctat

SEQ ID NO: 25014 - DNA, 311 bp, Glycine max
gtgagaacgagacgacaataccttggtatctatttgaagatgttgcatgtgtgatctgggccatcagtatgtcgtagaagtacgcttttgccctgatcacgttgaatcatgcttcgttcagatcaaccgaccacacgaactgatctgattcttagaactagataggacatgactacaccatcgtgattatcacgatggatcaggggcccgcaaccaagttgattgaatggtcgtcttaatgcggacctggccaagtctactccgcctatagggatctcaggctgatgcttgatcacgattatgctaaatca

SEQ ID NO: 25015 - DNA, 335 bp, Glycine max
agctgtcgacgcataaattaatcaatttctcgcaggcgccagaagcgggtactgaaaggctcattatcatcaggatactttttagctactgtggactcctttgcatagctagcatgtcgctcgggaaggcaaataatgctctactgctacctcgtatatgtatttgaactatcctttctgccaattgaacaagtactaacgagacctacttaactatggtctgttcctgtgtgcaataatcttctcgttcggtttgacatgttattcttgtttctgaacaacccatcaacaggaattttctacataatactattctccttcgttgcatcatatct

SEQ ID NO: 25016 - DNA, 412 bp, Glycine max
gacactgtagacattctcaagctctcgtgcaattactctgatctctttttgtgggaaaagtggaatcttgtacctcgtacaaaccttatagtggcaagtgcatttgggaaaagtcatgaataaaacaaagcatcttggtatataacagaacagagtctatttggctacttactcaatctcaaactaacttttaagatccaaaccagctaaaatgtttacattaatggttaataatgtacttatatatgatggccagctatatattatataaacgatcttatcttagagagcaagaagaaaaccaaagatgtgccattgccaaaatataatctacacagtagtgacagtacacactcttaaagaattaattataaaaaatcgcattttctctaaagttcggatatagtgtgac

SEQ ID NO: 25017 - DNA, 391 bp, Glycine max
  unsure (1)..(391): unsure at all n locations
agcttgtaagtgtaatatgggtcctatttctcgatttttattngcaagacacgggctccgaatgatttatattgtcgcttgattgcagctgcagatattttaccattttttatatagaaaatattcaacatacatttgtgaggaaaaagatatgcactctactcacaccagaaaactaatcttacttttaattttctacagtatatatactaattaacatttttaatttatgaatctctatatttactttctcttctatcgtactttaatcttatttctttcttctatatttctttccatctcattacataatacatctatcattattttttctattatttccgacagagtcagatcttatgttgtctgtcgatggctggttcctatttac

SEQ ID NO: 25018 - DNA, 386 bp, Glycine max
tgaagcttggagaagagcatgaagatgttttgtcttttacatgctcaactcctttgagtggcatttgtattggtttttatattggatgttgcatcttagtccacatcatacaatttgtgcatcaccatgaatgagtgtgaaaaaaatttctaaagttggaaaaattcttcagaaggaaaaactcactattttaatcgataatagccttatcgtaatcaattacacaagttgtcttaagcttgtagatttctgtcttgtatcggtttaatcgattacaaccctctcgtaatcgattataaagttgtttttgatgtagctccacgtggagcttgtaggccttggatcttcttcatcaatggagtcatttgcttcttgaagatcaatag

SEQ ID NO: 25019 - DNA, 365 bp, Glycine max
agctagtataagccatcttcttcagttctccgagaagaacaactgtatgtgaatcctgagatttaacacaacaataggaaggatgatactcaaagaaacagatattatctcaagtgaatgtactaacattaagtaaatctttggtaagggggggaactatcattaaatttttaatggagagtactggttggaaaataaggggatctaaacagatttgagcctatggaagaaattcttgtacctgtgccattagccattaagatatgatcatttactgtaattgtactgctctgaaggagtatatgaggatcatcggctgcatggtgtgaagcacctgaatatggaaaccaatcctgtgaaatgtt

SEQ ID NO: 25020 - DNA, 391 bp, Glycine max
tttgtcttgtgaggtgcattgttatcaccttctactagcggaggtcttggaacctaatcgtccttatcaccattttgctttgaagcttcttgatcatccttttttcgagagaaccttgccattggtccattccaaatcaggtgctctatctattggatcaatgtgaaaaaattctccatatcatgatcgaacatttgatgaaattcataccaatgatctcagtctagctctatctgcctataagttggtgttggaaaatctagcagcctactattgttcacatccttcaagatcactgataattgatatgcttacgtaatttacttatttaaatcatatagcaattatctaattttcctctcttttattgcttcttttgtgttagaacatt

SEQ ID NO: 25021 - DNA, 294 bp, Glycine max
  unsure (1)..(294): unsure at all n locations
agctngtatatgccatcttcttcaagttctcatagaagaagaactatatgagaagcctgggatcaacacaacagatgggaggatgaaactcaaagaaacagctattatctcaagtgaatgtactaacattaactaaagttatggcaagggggggaactagaagctaatctttaacggagagtggcggatgtgaaatacggggatctaaacagatttgagcctatggaagataatcttgtacctgagccattcgccattaggatatgggcattacctgcagttgcactgctctga

SEQ ID NO: 25022 - DNA, 360 bp, Glycine max
  unsure (1)..(360): unsure at all n locations
tgtagaacggctgggcatgatatatgttatggcgtttgcttagccagcggttcacggataaaggaatatcctacattatttccatgacacgcgtgcaacagtgatgattcagaaattttatgcaaaacttgtcatgcatgcacctatgtggacactcaagcatcaagttttgtggtcatgtgacactagggctcaagattcatttttcctatttaagtcaatccagagtttccaaaacatgctcttttatcaattcatgcattcatacgagtccattttgggtgttcgggaaaattntcacagcattcacccttcaggtgtatacatatttcttcaacaaaacacttttgtgttttgatc

SEQ ID NO: 25023 - DNA, 367 bp, Glycine max
  unsure (1)..(367): unsure at all n locations
cttaagcaccgcggctgcagcttatgcagtcaatttagattcatctcggagaggatcttttccaggcatanttgtgcaaaatctcttgaactaggaagatgttgtccatcatctttctgtttttaatgaaggcagtttgagtttccccaataatagtctcaagcactggggctatgcggttggctagaattttagacacaatcttgtataacaaattatagcaagatatgggtctaaaatggttaacctgggaggcctgatcatgcttaggaataagcacaataatagcatggttgatttgctttaaaaattttccagttgtaaagaattcattaaccgccgcaaagatatcatcaccaatgatatt

SEQ ID NO: 25024 - DNA, 379 bp, Glycine max
tggtcaaaacaaacatctaatcattctatgtccacttatttcatacatttgctcattcaagtcattcacaaacactcatttcatatcaaacaaaccactgaaacttgattcaatcatttcactgttcaaacaatctttttgtacaagcaatcaacactaaaataactggaatttaaatgactgaaatttaaataactgaaacataaagcataaactaaataaactgatcaaaataaactgttcaaaatgcaagacaagaagataaagatcctgccaatcctcctgcgggtgatcctctgcatcctcattaagatccaacactggagcagctgatggatcctgaacaataggctggtctggctccgatgctggtgcaaat

SEQ ID NO: 25025 - DNA, 417 bp, Glycine max
  unsure (1)..(417): unsure at all n locations
tctatcattttatattntgtcttttcttcatctctggtaatgatgttttgattcttggatcctaatcccttagtgttagcttagtgctaacattttggtgatttcattgagaaaaatgtcaaacaaaaccaacaaggatttggaggagtccattttggccatgtcttgtcgagcgcaaggctctccaacacaagcaagacaatcaccatgagtagctccaaaacagagtggatgctcataacgataacctccatggtgttctctctatgatcttgtataagttagccaacatttcaatggcactgccaatttcctccactaggcctacacctactgttagagatagggggagcaacatgaagattatgtcttagagcttgaagaagttntgtcttttacatgtccaactcttttgag

SEQ ID NO: 25026 - DNA, 399 bp, Glycine max
  unsure (1)..(399): unsure at all n locations
tgaaatgccttgttttgtgttctctttaaggaagaataccccttagtccacatacttcngaagtgctaagcatatgtgggacacactggccataacatatgaagggacatcatangtaaagagaaacaagttaactctcctcatgtgagaatgaattatttactatggtagaaggtgaaaatatataatgtatgtttggatgcttccaaatcatattaaatgaactaaatctttaggaaaaagttataataattatgatcacattgacaaaattttgagaagtctatctagaaagttgagaccacaggttacaaccttgagagctctaaagaatcttgataccatatccctctaagaacttgttggaaccttaaaggtccatgaacaagaacttcaaca

SEQ ID NO: 25027 - DNA, 449 bp, Glycine max
agacacctgaggcatgcaagcttagcaatcgcccaagggccctcttcactcttattccaatgtcttactatttgcctctgccatcattgctccctccagtccacgcatcccatttaagcaactatcctcgaaggaactggtgttgcaccgcgatcatggcctctactaccactacgaggaaaaatgggtgcaaggccaccattgcaagccccccctccaattgttcatcgctgatgaagacaatgatgttcctgacgaaaacccaaccctagttctgaaccacacctccttgagttcccctgacttgcccacaccccaacttagtttaaacgctctagcatgcatgccggcaccaaaaaccatacatgtatatggtaccatcaaccaccactgtgttcttatcctcgtcgatggtgggagtacccacaattttatacggtcccgcatcg

SEQ ID NO: 25028 - DNA, 406 bp, Glycine max
  unsure (1)..(406): unsure at all n locations
ctaagcttgcgcaaaatttagttacggtcgtgccatcaaattttcaagatataaaaatctacatccaagaaagtatgcgatatgagaatatctaagaagagcacggngaaaataaaatagtaataaaaaaatactattattggtcaagttaggtaaagtggaccgaagaattagcataggaattaacaaggaagctaataatcattgctagatccccctacctaccatcacaaatttccgagtaacttggcagtttcgcagctcaaaatgacatggttgaccagagtgtacagggtgcatgaggattgtaaatcctctcttcaggattatcttcgagttttacggattaaattaaattaatatgtagcggagtgttgacaaacctgcaccaaggagaacaacctgt

SEQ ID NO: 25029 - DNA, 338 bp, Glycine max
agcttccagttctcaatttcgagcgtttttatatattatgcgccttaatcggacctccttgtgataatttatgaccatttgaatttctcgagagctcccattgttcaatttcgagcgtctcgatatatgatgcgcctgaatcggacctccgtgtgataatttatgaccatttgtatttctcgagagatttcgttgtttaatttcgagcgtctccatatataatgtgcttgaataggaccttcgtgtgaaaagttataactatttgaatttctcgagatcttccctggttaaatttccggcgttttcatatgtgatgtgcttgaatcggactctctgtg

SEQ ID NO: 25030 - DNA, 390 bp, Glycine max
ttcacttggatgtccgattcaggcgcatcatatatctatacgctcgaaattgaacaacggaagctctcgagaaattgaaatggtcataacttttcactcagatgtccgattcaggcgcatcatatatcgagacgctcgaaattgaacaatggaagctcccaagaaattcaaatggtcataagttatcacacgaaggtgcgttttaggagcatcacatatcgagacgctcgatattgaacaacggaagctctcgagaaattgaaatggtcataacctttcactcggatgtctgattcaggcgcatcatatatcgagacggtcaagattgaacaacggaagctctcgagaaatagaaatggtcataacttatcactcaaatgtctgattcac

SEQ ID NO: 25031 - DNA, 389 bp, Glycine max
agcttaagctccttcaactgcacaaggctcttaatatttgaagagtatccttgtggaaccttcacccgatgaagacactgacaaaaacttatcttctcctttttggaaaaagtatggcaagctgggggcaagtaaattttcttcccatcagaccttggatgcaactatgatcgtatccccatatcagctagattttgacgggtattcaagccatccttcgtcttgccatgaatgttaaggagcatcccaatcacactgtcacaaacatttttctccaaatgcataacatcaatacaatgtctaacgtctagatcagaccagtacggaagataaaagaaaatggacctcttcttccatatgcaactcttacttttataccttttttgggt

SEQ ID NO: 25032 - DNA, 210 bp, Glycine max
tactaaacacacccctgcccttaactggagattatatcactcgacaagttacagtatctaacgagtcacgttactaaaagtgtttgatagactaaacgtcaccgatccaagcagtttacataaccatcgacttactgacacacagaatgatacgagacccacactatttcatcaccaatgcaatctctgagaatatctgcgaggcactgt

SEQ ID NO: 25033 - DNA, 435 bp, Glycine max
  unsure (1)..(435): unsure at all n locations
agctngccgctcagctcgcccaggcgttcaggttgtttcctccatatgcaacaaccttctggaggaatcttttggagggcccaagtgggcctggttgctatttgcaccccccctttttactaaatgcaccccttctatttttttggtaattcttttttccgtaatgttacgaaactttacgaattttgtaacaatacttatttttcttccgcaaggttacgaatccttacggattatgtatttactcttttttagctttcgaagaagttacggaaacttacggattgcgcaaaaacacctcttttcgatttccgccacattacgaaatttcacggattgcgcaagcctgcttccttttgatttttgacaggcctcgggacttcattcattgtgcaaccaaagatgccaagtgtctcgaagcggccaatcaaaggc

SEQ ID NO: 25034 - DNA, 398 bp, Glycine max
tgttttgaactcatcaaaacacttgctatgttttgctctttgtatatcttttattgtatcatttgtagatcttggatatctttcttgcatatgatgctctgctttgatatagttgtctaatgcaaatggaaggccattgaatgttattcttgtgggaatactttgatgagatggcatgacaaacttgcattccaaacattttaatgtcagcttgttatagcatgttgtgcttgctactatttttgagttctttgacccttcgaatggcctaactagcttttgttttctccataagagttgtatagaattctatcattgacattcaagcactggtctcatgtcatttggaccactacaacataaccaatctttttagcattgtagctgtttatattgtg

SEQ ID NO: 25035 - DNA, 353 bp, Glycine max
tgcttcctccagaagcaacagccttctggaggaatcttctagagggcccaagtgggcctggttgctatttgcacccccatttttactaagtacaccccctgccttttttggtgattcttttttcgtaaagttacggaaacttacgaattttgtaacgatacttgttttctttccgtaatgatacggaaccttgcggattacataatcatccccttttttgacttacggaatgttacggaacctcactaattgtgcaacgatgcttccatttgatttccggtgtgtcacggaaccttacggattgcgcatcaatattttcttttgttttacggcatgtcccggtatttcacaaa

SEQ ID NO: 25036 - DNA, 392 bp, Glycine max
  unsure (1)..(392): unsure at all n locations
gttcatctagccaagattatacaaaggngttacaagttatcctaacgatncctaattatatgggccatcaaatctatcatgtgttgacacgtattgattagcccatgaatctactcgggggccgtacacacttcggccatggcttttgctttggctaattgacgcgggaggtcttgacttccattcaaagtcaaggcgaacctatccatccacatagtcgcttcttgatgcaacgcatcaatcaccctcccccttgcttctttctcggcgtacaattgtgcaaaatcctccactagcttttgttcatgggccacagactggttcaactcttccttgtattgccctatgatagctagcatgctttgctccgtggcttccaagtgttaagccaa

SEQ ID NO: 25037 - DNA, 401 bp, Glycine max
  unsure (1)..(401): unsure at all n locations
agcnttgtaattntatgattcaaattgatcaaaatatggaatcatttaacgaggacgaggacttctaataataatatattagactttgtttttgaagttattgcccaactaaaacagtttatcctactattttgaaattaaaacatattaatatgggtagactttgtttcctcgtcatatctaataagggaatcaattttaatatatccttgctttgtggtacagctgcttggaggccctcttcttacacaacattaataattggcatgactcttgctgtctcagcggcccttttcatgcttttctaactctggccgctattttataatttcttttagaatgtcaagaatgtgcaactggtgccattacttcttctgtgggaattggttnttttgacagat

SEQ ID NO: 25038 - DNA, 441 bp, Glycine max
  unsure (1)..(441): unsure at all n locations
tgaatttgancctagacctcaaccctgtanancngnganacttagactagcctgacctcgaatctgcggccttttatgtgtgcngctttttgactatcacgcagcagggcataatggctttgcgaattaacacgtagagttactcacattctgaatgaccattcgcatttttctgacacatgaatgctaactactgaatcactcactctcgttcttaattactactgggaggacaataaattctcccagctttcactctgtccactatgacaaacatccttgctaatggactttcatgggatgtaataatgggcataggctcaaaagcttggctactaacggcagccgagataacagcttttgccacttgaataccctaatgggtgaatattcctccactcacgataccgctggaccacatcaacatatgactggacgctg

SEQ ID NO: 25039 - DNA, 211 bp, Glycine max
  unsure (1)..(211): unsure at all n locations
agctntagagggctacacgccctcactgtcagaggactacacgtcctcgccatcagagggttgcacgccctcgcaatcagaggactacacgtccaccccatcaaagggctgcacgcccccaccttcagaggactacacgtcgtcacctttagagggctgcacgccctcacctttagaggactacacgtcctcgccttcagaaggctacacg

SEQ ID NO: 25040 - DNA, 387 bp, Glycine max
  unsure (1)..(387): unsure at all n locations
tgtatagttccccaatttatggttattttgtagtctataacactcaatcatccataaaggcaacccctaaatcagccacaaagcctgcctgccgcacatccgataccaaacaccacccttaacacaaaccaaaacaccaaccagggaaggaattttccagaaaagaagcctgtagaattcaccccaatttcggtgtcgtatgctaacttactcccatatctactcaataatgcaatggtagccataatcccagcaaagattccacaacctccattttcttgaggatacaacttgaatgcaacatgtgcttatcatggaggagttccggngcattccattgagcattatatgaccctgaaacataaggtgcaaagtctgattgatgca

SEQ ID NO: 25041 - DNA, 402 bp, Glycine max
  unsure (1)..(402): unsure at all n locations
agctntgagggtgcgtatcccaccattttttcatattatagtatcgataatgtgtctaccatcacgattatcgtctccctttccatcattgggggtaccacttgggccgccagatccctccaccttttgggcgtgttctttgaaagatccgtccccctttttgcaaatgttctgtagttgcatcctatccagaaccatatcaaaattgtactaatactgcctaacaaaggcaaccattaggtccttccaagaatggactcgggaaggttccaagttagtgtaccaggtaacagctaccccagtaagactttcatggaaggaatgtatcaacaattcctcatcttttgcgtattaccccatcttctgacaatacatctttagatggttcttgagacaagtagt

SEQ ID NO: 25042 - DNA, 396 bp, Glycine max
gacactatgaaactcagcttctatataagctgaatcattttatcaatatagacattttgagttttattcagaaaattagagtttatctcttttatcttagtgagagtgattctcctaaattcttgagtgattcaagaacaccctgcctgtatcaaaggactttcacaacctttgtgtgttgccctcgctggaaagagtgattcttcccttcctttcatcttcacccttggtctttcaaccacaattccagaaaatctacctctgcccagaattatctcgtggccataactcccattttacgcactcaaattaagtgattcttgagcctaaattgaatttcaaaacgagacctttcacctcggtttggaatcatctcaattggagccatgtagcttc

SEQ ID NO: 25043 - DNA, 418 bp, Glycine max
agcttgggctaagcaagtttgcccgctaagcccaaggcacttgtgattttttgtatgtcttgccatgcactaagcgtgccctgtcacgttaagcgcaatttactctttgtttctatagttgttggaattgggcttagcgagccttctcgctaaaccatttgatgcaatcctaccccgcaagggcattggatagaagactccaagtagattgggccagagatccaagggaaggccctagggttctcatgagccttagggtagattttaagcccatgggctaagtatgagcccacttatctttgtaaatattagaataggtttttccttcgtttgggccttatattttggccattctagtagtatagggttttagccttgtatttcggagcattttgagtagtctttgtagtaaggactt

SEQ ID NO: 25044 - DNA, 396 bp, Glycine max
tcctccacgttttcctccatacctagaacttcaaaccttcgattctcactcaattcttcaccaaatcacatcccgtaaagcccaatcttcctctttttcactcctctttcacttccaccgatcaaaatccagaaaaacttcatcaaatggcagagccatcaaagaagagaaagggatcatcctccaccgctaccgctgctgcctatcgccgtcacggcccatccggagcacccacagcacctattcctccttctttgtcatctccaagatcatcaacattgttttcatccgatgatcaacgtctacggtacctttctcagttttcttctagaataatcttagaccctaaatacctagacgtagagttctttaatgatgaaacgtttgattgctatc

SEQ ID NO: 25045 - DNA, 418 bp, Glycine max
  unsure (1)..(418): unsure at all n locations
agcttgttgaaattgccatgtttggtttagttaaacatacccattctgttttagggtttttgtgatgatgtttgtgatgtttatatactgaaattgctgatggaaaactgttagagatgaagggtagaactaacctagggttagaaagtgggaatgtgatgttatgagtggaaaaagagtgaggctttgagagttggaaggttaagtatgaattctgtgataaatggaggttaaagtgagttaatactagcttgaaatgtcatttaggacttgggagaaagcttggactgtgctagagagaaaaacaaatgatcaaagtgaacaaagagccatttctagggcaaaattaggtgttgaagactcataatttgagttggtggaattntgggtgtaaatccacgttgaacaagtctaaatt

SEQ ID NO: 25046 - DNA, 387 bp, Glycine max
  unsure (1)..(387): unsure at all n locations
tgtaggattatggngtacctatcacatgtggtactatgtggcggtcgggcgatggtgcanaataactctccacatccacaaatcacgcataaacccagcatccccagttgcccaccttcactgagctcacgtactcccacgtagcccttatcctcgttcctctcaacactgggtccccatcaatctctccaagcttccacaacatccaagaaatacaacatccaatcatcatgaactatcaaagtcaagaaaatagggcaaaggcagaaaactctgcccaaaaacaccaaccaatatcacagcttttcacactcaaataccccagtaacattctcttcgctccaattcgttaaccgttggatcgactcgaaaattttactggaagtc

SEQ ID NO: 25047 - DNA, 326 bp, Glycine max
  unsure (1)..(326): unsure at all n locations
agcttgtacattcaatttcgagcgtttcgatatattacgggactcaatcggacatccgagtaaaaagttattgttgtttgaatntgttcagagcttcaacattcaatttcgagcttttcgatatattacgggacacaatcagacatccgagtaaaaagttattctcgtttgaatttgctcagggcttcggtaatccatttcgagcgtctcgatatattacgggactcaatcagacatccgagtaaaaagttattgtcgtttgaatttgctcagagcttctacattcacattcgagcttttcgatatattacggactcaatcagaca

SEQ ID NO: 25048 - DNA, 383 bp, Glycine max
  unsure (1)..(383): unsure at all n locations
gcttcttataagctgaaccattttatcaataaacacattttgagttttattcagaaaattagagtttatctcttttatcttagtgagagtgattctcctaaattcttgagtgattcaagaacaccctggctgtatcaaaggactttcacaacctttgtgtgttgccctcgctggaaagagtgattctttccttcctatcatctccacccttgttctttcaaaccacaattccagaaaatccacctctgcccagaattatctcgtggccataactcccattttacgcactcaaattaagtgattcttgagcctaaattgactttcaaaacgagacctttcacctcgttntgaaatcacctcatctggagccctgtagcttattg

SEQ ID NO: 25049 - DNA, 381 bp, Glycine max
gcttcaacattcaagtttgagcgtctcgatatatgtcgagactttatcagacatccgagtaaaaagttattttcgttttaattggctcagaggttcaacattcaatttcgagcgtctcgctatattacgggactcaatctaacatccgagtaaaaagttattgtcgtttgaattggctcagggcttcaacattcaattttgagcgtctcgatatatgacgagactcaatcagacatccgcgtaaaaagttattgtcgtttgaattgtctcagaggttaaacattcaatttcgagcgtctcgatatgttacgggactcaatcagacatccgagtaaaaagctattgtcgtttgaattggctcagagattcaacattcaattt

SEQ ID NO: 25050 - DNA, 397 bp, Glycine max
  unsure (1)..(397): unsure at all n locations
aatctcagcttaacatcagaccacttcaggtgctggaactactttacatgtgatntgatggggcctatgcaagttgaaagccttggaggaaagaggtatgcctatgttgttgtggatgatttctccagatttacctgggtaaactttatcagagagaaatcagaaacctttgaagtattcaaagagttgagtctaagacttcaaagagagaaagactgtgtcatcaagagaatcaggagtgaccatggcagagaatttgaaaacagcaggttcactgaattctgcacatctgaaggcatcactcatgagttctctgcagccattacaccacaacagaatgggatagttgagaggaaaaacaggaccttgcaagaggctgctcgggtcatgcttcatg

SEQ ID NO: 25051 - DNA, 308 bp, Glycine max
tgcagaaaattagagcttatctctattatcttactgagagtgacactcctaaattcttgggtgactcaagaacaccctgtctgcaccataggacattcacaacctttgtgagtggacctaagtggacaaagagagtttttcctttctttcatgttcacccttgttctttcaaatcacaatttcttaaaatccacctctggccagaattatctcgtgggcataattcccattctacgcactcaaattaagtgattcttgagcctaaatcgactttcataacgagacctttcacctcgttttggaatcac

SEQ ID NO: 25052 - DNA, 380 bp, Glycine max
tcaccttctcgctaagccaatctggtttcttaccgagcatcggctgagcgcaacactcttgggctaagcacgaggaagaatccagaagatgatgagttgtgcatgttcgctaagcacaccgcttcatctctctaagcgcaccgcttcagttcatccgctaagcgagaaaggcacgctaagccaaaaatcactaacgtgcgctaagcagtccgtacgtgcgctaagcgcacgagcatgaacaaggccacctatttaagcctgaaatcaaattttgtgaggggagcttggactgtgattcacaggtttgcatgtttggggtttctagagagagaaaggtccaagttccacagagtgttgagagattctactgtgtgaagatc

SEQ ID NO: 25053 - DNA, 272 bp, Glycine max
  unsure (1)..(272): unsure at all n locations
agcttctcgatatattatgtggctgattcggacttccgttagattatttatgaccatttgaatttctcgggagctntggttgttcaattccgagcgtctcgatatattatgcccctgaatcggactttcgtgtgacaagtgatgaccatttgaatttcacgagagcattcgttgttcaattccgagcatctcgatatattatgcgcctgaatcggacttccgtgtgacaagttatgaccattcgaatttctccagagcttccggctttaaat

SEQ ID NO: 25054 - DNA, 434 bp, Glycine max
  unsure (1)..(434): unsure at all n locations
agcttgtagaatggctagacatgatatatgtcagggtttggtttggtttaaggataaaagggatgccccacattatttccatgacacaaatgcaaaaatgatgatttggaaactttatgcaaaactggtcatgcatgcacctatgtggacactcaagtgtcaaatttttatggtcatgtgatgctagggctcaggattcatttcctctattttagtcaacccaatgtttccaaaatatgttcttttatccatatgtgcattcatccgagtccattttgggcgtccggggaaattttcacagcattcacccttcaggtgtatacacatttttcaaaaactagttatgattagtgaatttttttcaaagaaaagttggaagtcatctcttttcaaaagcatgttggttnttcagctagacaacttatttttctttt

SEQ ID NO: 25055 - DNA, 382 bp, Glycine max
tgcctgtccgatgcagcagtaatgatggcccgagttatgttgttgaacggttacgaacccggaatgggtttaggcaaagacaacggtggcataactagcctgataaatgccaaaggaaatcgtgggaagtatggtttaggctataagcccactcaggcagatgtaaagagaagcatcgcgggaaggaagagtgggggtcaaagctcgcggttgagacaagaaagtgaaggaagcccgccctgccacataagtagaagctttataagcgcgggtctgggagacgaaggtcaagtggtcgcgatatacgaggatgatgttccgagtacattggatttggtacgacgatgccctcctgatttccagctgagaaattggcgagtgg

SEQ ID NO: 25056 - DNA, 441 bp, Glycine max
  unsure (1)..(441): unsure at all n locations
agcttcgaatntatactttatgacattttcgaactattgcaaatatgcatgccgagaagtgtgacgtgcaaaaagatttcactaaagtgacaatatatatgtaataaattcttacttgctttggttgtatttaggagtaaaagtaggccaagccgctcgttggggcctaagccttagcccgtttaaggcctgacccggcccaggtcatttagcaaaaaggccaagcttgagtttttttaaaaatcatatttagctaaataggagagaccatgaactttaaaaaaaacctattaagtctgatgaaccgacctgtttagcaataatattttatattaaagatattattattaatatgatatatagtataattattatatttaaattataaaattatcttagtagtttgacaattctaattagtggttgaaatatcttaattcg

SEQ ID NO: 25057 - DNA, 412 bp, Glycine max
actaagcttccaaagaaagtggcaaaagaatattcaaaataattttctttcataccatagataaatagtaataaataaaagaagtttaagggaagagagaaatgcaaacttgatttatactggttcggccacttcccgtgcctacgtacagtcctaaagcaacccacttgagattttccactctcttgtaaaatccttttacaagttctgaacacacaaggacaatccttcctttgtatgcagaattcctttacaacaagagaccatcggactattaatcccttttcagaagtgagaagaagagaagaagaaatctctcttgaaagagatagattgtacaatgaagatcaatcacaattccttattgcatatgcaagtgtttgaccaacgaatcttcaagaggataagacat

SEQ ID NO: 25058 - DNA, 423 bp, Glycine max
  unsure (1)..(423): unsure at all n locations
agcttctacttatgtggtatggcgggtttccttcaccttcttgnctccaacgcgaactttgaccattgttcttccttcccgcaatgcttcttttcatgtctgcctgagtgggcttatagcctaaaccatacttcccacgatttccttgagtatttatcaggctagttatgccgccgttgttttttcctaaacccatcccgggttcaaaaccgttccccaacataactcgggccatcattaccgctgcatcggacagacaaggttgcccaaagagggagtccacggaggaaatgctgaccacctcaaaagactggaaagcagtttctaacgattcttctgcggcttccacataaggcatggaggatgggcagcttaccaagatatcttcctcgcctgacacgatgaccaagtgccccttcacta

SEQ ID NO: 25059 - DNA, 392 bp, Glycine max
  unsure (1)..(392): unsure at all n locations
tctggtgactgggaagcacgttattctgttgttttttatatcggntctttcgccaagtatgtgtatatgtgtatatctgtattatattcgttgtttgtatgttgatttgtgcaaaagacaaaagaagaagtagagatgagagtcgtcatcgcaaaaagggcaggacggacgaaatcagtgtcttatctttgctttcctcttatctccgatgagaggtaagtaaagaggggcaactgtcataccctaatttcgtccggggattaattcttgatggcatgcaataaatgaagttccgagacgtctcagaaatcaaaaggaagcaggcttgtgcgatccgtgaaattctgtaatgtggcggaagtcaaaaagaggtgtttttgcgcaatccgtaa

SEQ ID NO: 25060 - DNA, 416 bp, Glycine max
  unsure (1)..(416): unsure at all n locations
agcttcaaccatcgaactacattcacttactaattgtttttgctttgatgtttctgctgccaccattcgtcgaagcaattgagcacagcaaactaaaaaatgtaatcttcacaagtttttttttcgcactttttttcatttgttttgtatatcaatgaaaaaatgtgtctcatcacttttttagttctcttcattgttttattgtatttctttttctttttctcttttcatcatttttatttgttctttgtttattatagggtgttctatactactattttgtttcttttattttatattgactaattntgtgtttaattnttttataacaaattcattattattaaagaaaaatcaaaattgaacaacaccgcatgatgcanactatcatgatagatacaaagaatgtttatagc

SEQ ID NO: 25061 - DNA, 393 bp, Glycine max
  unsure (1)..(393): unsure at all n locations
tggatgtccctgganaaaaaaaagatacaattggagatcaacaatatttggcttgaaatgtcagaaagaattacacatccataacacaccatgtaccaaggaggaaaatgggtgagcaaatacaataaaacatagagaatgtaggacattaggtaagtagaatgaaaaactatcattacaaactacttgattttggtttaggcattctaggataggaattactaatgatttttctgacccagcattgtttaatcattaacgtgtgcaaactcttatgtgtcttgacttctttccacaaaatcagttgtataaaattaacaacataatatcccaagaaaaagctgccaccaccatagccacagctgtcatttctttcacgagacatgactatag

SEQ ID NO: 25062 - DNA, 296 bp, Glycine max
agcttgtaaggattctatcttaaatcattgtgattgaaaggaaaagataatagaaagtaaatatgatgctaggacaacaaatggttgtcattttgagatgattaatacactggcttagtacttcaatttattctttagaaccaataaggagactgtgtattttaaagtaaaaatacagaggacttccatattttggaaacatgaatgttgaaacaccgtggacatagcatggtcatgatgaatggcattgctttttgtaacatgttgaaattataggtactgggtggaaaactgaa

SEQ ID NO: 25063 - DNA, 385 bp, Glycine max
cttggagtttccaagtgccaattcgtcttcttcttttgtccagtcttcttctggcttcaattcattagtgggctttccttctgtgtccagcatcttgggatgttcccagcctttgatgacaactttccaggttctgctatccagtgatttgaggaaggccaccatccttgctttccagtattcatagttggttccatccagaattggtggtctgttcactggtcctccttctttctccatgttcatcagaatttatctccctagatctcactcagtgatttagagtgcccgctctgataccaattgaaattctgataccaatgccagatgtcgtacaggatgtcacgacatcacgcttcagaacatgcagattatatttgagtgt

SEQ ID NO: 25064 - DNA, 421 bp, Glycine max
agcttacaaatctggtttatatccattctccataaataaaataaaatctagataagataagataagatctagatgaaataatatctagatgagatcaaatctaaataataaatagataagataaaatctagataagataaaatttggtagaataaaatagtctgctctcttcaagtccaagcccaattctggatttaagcccaattgcttataattctcctgaaattaaattaaaaatacaaaattaatccagtaggcctaaatgataaaactacataattaatttggcaattaaggctaatcagtaatttaaatggtgacaaaaagggttaagaaatatgagaaaatgatgacacatcagcgaggacgtctagtcctctgaaggtgagggcgtgtagccctctgaaggtgaggacgtgta

SEQ ID NO: 25065 - DNA, 386 bp, Glycine max
  unsure (1)..(386): unsure at all n locations
tgtaggattatggggtacccgtcatatgtggtactatgtagcgattgggcgatggtgaaagtcaactctccacatccacaaatcacacataaatccaccatccccagttgcccaccttcaactgagctcacgtactcccacgtagcccttatcctcgttcctctcaacaccgggtccccatcaattcctccaagcttccacaacatccaaacatcatgaactatccaaaaccaagaaaacatggcagaggcataaaactctacccaaaacacattcaaataccacagttttcttcactcaaataccccagtaacatgctcttcgttttgattcgctaaccgttggattgaatctaaaattntactggaggtccctagtacataagt

SEQ ID NO: 25066 - DNA, 421 bp, Glycine max
agcttgaatcggacatctttgtgaattgttatgaccatttgaatttctcaagagcttccgttgttcaatttcgatcctctcgacatattatgcacccgaatcggacatctgtgtgaaaagtcatgatcatttgaatttctcgagagtttccgatgtttaatttcgagcgtatcgatatattataaccctgaatcggacctcagtgtgaaaagttatgaccatttgaatttgacgagagcttccgttgttcaatttcgaatatcactgtatgtgatgcgcctaaatcggacattcgagttaaatgttatgaccatttgaatttctcaagagcttccgttgttcaattctgagcgtctcgatatgtgatttgcctgaatcggacatccgtgtgaaaagttatgaccatttgaatctctcaaga

SEQ ID NO: 25067 - DNA, 346 bp, Glycine max
cgtgcaaatcaaatcactcctacatctcatctctatcatgcattttctttctttacccactcctcacgtttggttttttagggaaaacaccataactaaacgcgccgcaagggatccctatcgcaccagatccaaatctataacgatgggtgatcaataggagacacaggaacagatgaaagccgacatgtcggctctgaaagaacaaatggcctccatgatggaggccatgtcaagtatgaagcagatcatggagaagaacgcggccactgccgccgctgtcaattcggctgccgaagcatacccgactctattggcaactactcaccattcttccccaaacata

SEQ ID NO: 25068 - DNA, 357 bp, Glycine max
agctttagatgaaaataatgttattttttatataagttcttgatataatccaaacttctccccccttttggcatcaacaaaaagccaaaatgtgtatagagacataaaatcatacattcactcataatcatccaaacaaggaagacaataatgcatacataaactaagcaaggatgataataattcattcataaactataatatatgtcatataatttagagattcatccaagataaccaaattaaaacaactaaattagaaagtaacatactaataagtgtttcaaaaaacagtcataagacatgccaacataaaatagatcatttttctaagtcactagcatctagaagtcttaa

SEQ ID NO: 25069 - DNA, 375 bp, Glycine max
tgttatggaagtcaagagcatgaaagtgttccaattttattaactggtcaatacgttctagagcaggttgatgacatcaatacgatatttggaaagacccataagaaggaaaaaaagtaaaacttgcatactgaagaagaggtcgatattgtttgatcttccatattggtccgatctagatgtcagacattgtattgatgttatgcatgtggagaaaaatgtgtatgatagtgtcatcgacatgtttcttaacattcaaggaaagacaaaggatgatttgaataatcgtcaagatctagatgagatgagtatatgagaccagttatgtacttggtctaatggtgagaaaatatacttggctccaacttgacttac

SEQ ID NO: 25070 - DNA, 297 bp, Glycine max
agcttctttaggaccttgaacaggcttctaactcctctttcaaaaccatgctatgtgctcgcgactggtccctttcttcctttcgcaacttgagttcactattgctaccccatagagctccgcgaaatttgttccggccatactcttccttgcgagccctcttggtctcttgttcaagggctcttgcggtaattgcattctcttcccgtaacccggcacactccttccgaacgtgtgtagcggccaacttgaacttctccttggcaagttttgcctttcctaactcgcttttgagag

SEQ ID NO: 25071 - DNA, 380 bp, Glycine max
tcatcagatgctgcatttcggtatcagctcctcttattgaagaacgatatgcacttcttgcattgtaaatttgctttatcgtggtgtaactgtcggcattgtgttccttcaacgttagcaagatgtttttcggtttcaccatcgactttgtcatatcagcaataattttcttttcttccttagtcaatcgcccggcgtatggatgtccaactaaggacttcgccaattcatgattatgaatcccacagatcaacttcaccatccaaccttcccctccacgcactggtttcccacgaagcctgaagggacaaccacatttcctactcccggtgtcttttctaacgaattctttatttctacacttgtacgtaccactcctt

SEQ ID NO: 25072 - DNA, 416 bp, Glycine max
  unsure (1)..(416): unsure at all n locations
agcttctaaggaagttntctcaagatagcttctcattgaagctacctagtctataaatagaaacatgtgtaacacttgttgtaactttgatgaatgagagtcttgtgagacacaactcaaagttcaacttctctccctttttcttccttcaattccgtgctcccccctctctctttctctccctctttcttttcctccattgaagcatcctctccaagctccttcttccatgacttattccttaatggatggcgcctcctctcacctcttttcctttgtcttccgctacatctccatggtggaaaatcaccattaaaggaccccattgaagctcaaagatccagtctccatagaagccccacaagcaagcttccatcaattagtctattacaaaacacaacaactgaccctacaat

SEQ ID NO: 25073 - DNA, 395 bp, Glycine max
tggacgaataaggtgatgcatctaggaaacacaacatctaacatgtatgaaaattgtaaatatatattggttttagggtttacacacgaatggataaaaataattgtttgtgttttacaaatgcagggttaagtttgcacattgggccttaaagagactactaccgaatagccttggagacctatgtagtgtttgagaagccatgaacaatatgatcactctacaacatattgaaattaaggcatcgtttgagacaactacacatgtggttgggcatgtttttaaagttaccttatacaagaaactatttggcatggtatcaaggtatgtgttaaaccagattgttgctgagtttgagcatgtaaattatgctagcattgatagttctcattata

SEQ ID NO: 25074 - DNA, 422 bp, Glycine max
cttagcaaggcatctgcatactttttgacagtattgttggccggacacctcacggaatctagttcaagcaattttccatggcaagaaagtatgtatctagagaactaccacctctgataaagatgtctcttccaaacataagccattaagacgtgccttgagacgaatgtgtgtttccccctcagttcatataaataatttcaatcttagttataaattcggtataacgacacaagctctacaaccacattactgcattagctgttatataacagagcgttgatagaagatacataatttataatatatactatacacacacaagtactttataaagagaaagatagaagggcttcaatgcctgaattttcaacgtggaccaacagatatacattaatatctaagcacatattgtatgatct

SEQ ID NO: 25075 - DNA, 212 bp, Glycine max
gaggaaatcctcatgatcacattaacaattttaataaactaatatgtgaatcgttgaatgtagatgaaaacatatctgttgattaacaacaatgttactattggcattactaccaagatcctacaaacacttgggtcatacaatgcttgcatggaggacagcaactactggtaatcgattgaccgcgactttaacagaatatgagataatga

SEQ ID NO: 25076 - DNA, 281 bp, Glycine max
agcttgcctgtctgatgcagcagtaatgatggcccgagttatgttggggaacggttacgaacccggaatgggtttaggcaaagacaacggcggcataactagcctgataaatgccaaaggaaatcgtgggaagtatggtttaagctataagcccactcaggcggatatgaagagaagcaccgcgggaaggaaaagcagtggccaaagctcgcagttgagacaagaaagtgaaggaagcccgccctgccacataagcagaagctttataagcgcaggtttgg

SEQ ID NO: 25077 - DNA, 390 bp, Glycine max
tggagaggatgcttcaatgtaggaaaagaaagagggttggaatgagagatgggggagcacgaaattgaaggaataaaagaggtagagaagttgaactttgagttgtgtctcacaagactctcattcatcaaagttacaacaagtgttacacatgcttctatttatagactaggtagcttccttgagaagctttcttgagaaaacttccttgagaagcttctttgagaaaacttccttgagaagctagagcttagctacacacacccctctcataactaagctcacctccttgagaagcttccttaagaagattcctaaagaagctagagcttagctacacatacctctctaatagctaagctcacctccttgagatgagaagctagagct

SEQ ID NO: 25078 - DNA, 435 bp, Glycine max
agcttgtaggattatggggtacccgtcatatgtggtactaggtggcgatcaggcgatggtgcaaatcaactctcccacatccacaaatcaaacatgaacccaccatccccagttgcccaccttcaactgagctcatgtacccccacgtagcccttatcctcgttcctctcagcaccgggtccccatcaacccctccaagcttccacaacatccaagcaattcaatatgtaaacatcataaactatccaaaaccaagaaaacagggcataggcagaaaactttgcccaaaacacattccaatacgacagctttctctacttaaataccccagtaacattttcttcgttccgattcgttaaccgttggatcgacttgaaaattttactggagatccctagtacataaatctacattttgaccgctgggatctactag

SEQ ID NO: 25079 - DNA, 323 bp, Glycine max
aggacaaggcagccgatggaactactttcgctccggagtatgacagtcaccggtttaagagcgctggacaccatctgcgctgtgacgccatcaagggatggtcgtttctcctggagcgacgcgtacagctcaaggactaccagtatactgatttccacgaggaaatatgacgccggccgtgggcatcactggttactcccatggccaagtttgatccataaatagtccttgagttttatgccaatgcttggccaacagatgagggcgtgcgtgacatgagatcctgtgtaaagggtcagaggatcccgtttgatgccgacgct

SEQ ID NO: 25080 - DNA, 443 bp, Glycine max
agcttgtaaaacattgatttgatactgtttccctcatcatgtggttgatgatgtttacaatttaatgatcctttgctaccctgcaatgagacacacacagatacacaaagacacacacatagagacaaacacacgcagacacaaacacaaacacaaacacaaacacaaacacaaacacacacacacacataaagatacacacacacacatacacacacagagtcacacacacataaagagacaaacacaaacacacaaacacactgagccacagacacatacacagacacacacacaaagacacacacactgagtcacagacacacacatacacaaacacactcacacacatagacagacacacacacacacacacataaagagacaaacacacacacacacacagataaagagacaaacacaaacacacaaacacacacaca

SEQ ID NO: 25081 - DNA, 353 bp, Glycine max
agctttctaaacttccatttcaaaactttgtttttctgcatgtggaaattctacttaaaacaaaagtgtgctatcttttcttccttctctctcttgccaaaagaattcaaagaactaaccgcctgagaattcttttgattcttccttctccctttttccaaaagaattcaaaggactaacagcctgagaattcttttgattcttccttctccctgttgccaaaagaattcaaaggactaaccgcctaagatatcttttgtttccccttataaagattcaagggactaaccgcctaagaattctttgtcttaacacattggagcgtgttggatcaagtgacctcggaataatta

SEQ ID NO: 25082 - DNA, 413 bp, Glycine max
  unsure (1)..(413): unsure at all n locations
agcttgaaggcattctttattgaagtttaacaatttttatttgacaagtaaattattgaggggtttggcaatcttagagaaatgttgtatgagctttctatagaaaccagcatgccccaaatgtttttactcctttcatgtctcaaggtggtgggagcttttcaattacttctatcttggcttgatatacttcaataccacttgctgaaattttatgctcgagcactataccttcggttaccttgtagtgcaatttttgccaattaagcacaaggttcttttcaattcatctttctaggactctntccaagtttttgaggcatgacatgaacaatgatccgattatagagaaataatccataaatacctctactcattnttataccatgttagaacagatgacattcatacat

SEQ ID NO: 25083 - DNA, 145 bp, Glycine max
tgttcatgtgaaatctcagcatcacgttttttatgtcttcacaaagcctttactgcttctagctttctcttcttttattcgcaagttgggaattattaacatttactctccaacttgagggggggggggggccttctctccctcc

SEQ ID NO: 25084 - DNA, 423 bp, Glycine max
  unsure (1)..(423): unsure at all n locations
agctntaaagagtggattctctgcatattgatagtacgtgcatttaatgccccaacagccacattcatcatcaagtgaagaaatctacccattgtgagacaacacacacttgaagatgaggcctatataaaccagaggccttgaagacttgcaataagaatattgtgtgaaaaacattcattattctttctataaaaaagattcctatatattcttgtaaatttagaaaaggctctcaaaacaccttgaacatattgagagaaaaagactaagtgttgattgtatatccatctataagatgattctaactttagtctctgagcaaacttcatccacaaatatattctaatttgtttagagccagcaatggcttggtaggacaaagaatactangtttaatcaagcttggggtagagcttgatt

SEQ ID NO: 25085 - DNA, 386 bp, Glycine max
  unsure (1)..(386): unsure at all n locations
nggctaatcccgacccaacccgggcatactcagtccgtgagaacctatgacgtacctaaacaggcgagctcttggcagtcaaccaataaaagaacaaagcccacgaagcaaggaggcttgtgtggcgactagccagctatttatcttgggtgttatatgaaaattagtctctggtaatcgattaccattcgtgggtaatcgattacagggtttaaaaatggagacaagatgttaagtagcttctggtaatcgattaccaattgtgtgtaatcaattacacaatgctacctgctactggtaatcgattaccatttatgtgtaatcgattacacaatgtaatttgtagattccactctgtttttcttggtttagagtagtttcatgac

SEQ ID NO: 25086 - DNA, 366 bp, Glycine max
  unsure (1)..(366): unsure at all n locations
agcttctcccccaattttctataaatatggggagaagtgaagtagaaaagggttcagccccttaggcacttctctctctttcgaatttgcttaggaaaattgtttccgtgaagaaaatccaagccgaggcgcttccgtaacgtttccgtgagtgatttcgtgaaggttttcgaccgttcttcgacgttcttcattcgttcttcatcgttcttcagtcttcaacgggtaagtacctcaaaccaagcttttcgattcattctatgtacccgtggtggtccacattttgtttcatgtatttttattctcgtttcatttattntttatacccccttttgacgtgcttaagccattttatttaagtcattt

SEQ ID NO: 25087 - DNA, 386 bp, Glycine max
tgcttgtggggcttctatggaggctggatctttgttcttcaatgaggttctttaatggtgatttgccaccatggagatgcagcggaagacaaaagagaagaggtgagaggagacgtcatccactagggaataagccatggaagaaggagcttcaccaccaagatgagccttggataagaagcttggagaggatgcttcaatggaggaaaagaaagaggtagagaaagagagagggggagcacgaaattgaaggaagaaaaatggagagaagttgaactttgagttgtgtctcacaagactctcattcatcaaagttacaacaagtgttacacatgcttctatttatagactaggtagcttccttgaaaagctttcttgagaaaact

SEQ ID NO: 25088 - DNA, 420 bp, Glycine max
agcttttggtgggacaacctccaaatttattacatttaaatacagtttggaatgctaaagtaggttcacttttgaagtttgtgatctatgtttttctctctatttgtatcatgttttgcactgaattgaattaaatgctatttattatggttttgttattatatggatcatctaattgttttttcttatttttgtacttcattttgaagcgtttgtttgatatcagcagtaggttttgacatgctgaatttgttgtagttacttagacttagaggactcttaagtgttatagaaagaattgtttttgagttagaggatcaatttcaactctgctaaaattttatcaagatgttcacatataaaatgggtttgtattcttgcttagccttttgtcaataaccttgtgttttgaccatgtta

SEQ ID NO: 25089 - DNA, 387 bp, Glycine max
tgaaggtgtgtaaccccccatttttcacagtaaaatattggtaatgtgtctactattattgtgatcatctctttctccgtcattggaggtgccacttgagctgccaggtctctccacctttgggcgtattctttgaaagatttgtgcccctttttgcacatgttctatagttgcattctatccggagccatatcagaattgtattgatactgcccaacgaaggcaaccattaggtcttcccaagaatggactcgggaaggttccaagttagtgtaccaggtaacagctaccccagtaagactttcttggaagaaatgtatcagcagttcctcgtcttttgcgtatgcccccatcttccgacaatacatctttagatggttcttgggg

SEQ ID NO: 25090 - DNA, 426 bp, Glycine max
  unsure (1)..(426): unsure at all n locations
agcttagatgtgggacacaatgcaacttataaacatctaaacaaggaccacgatgcaatgcaagatttaacataaaatttaaacaaacttatcgattgctcacaatggataattgaatttcagtgtgactggttgaagttagatactcgcctttaattaatgacataaacggatgtatattgccaatttaggcccataaaaagatataaaggatgatatcattgtttttattaaataaaagtttcacaaattaagtaacttttaacgcgtgagtgtgtcattgcttctcccccacttgtcattagaagtagttaattgtttcagcggccgttggttgattntggtggctggaaaatgatagatttataattcctaaattgtttgtgaaatggcaactatgggataattaactattactttctttat

SEQ ID NO: 25091 - DNA, 395 bp, Glycine max
  unsure (1)..(395): unsure at all n locations
tccaagattattttgattatgtcaaagatttttaattagatactttcaaacaagattaaagacatcaagaagattcaatagaagacttaagatatgcaagaacctcaagaaaaacatcaagataagtataaaaagaatttttcaaagaaaatattgaatagcacaatttgtccaaaagaatttttcaaagaaaaatcttttaccagagtttttactctctggtaatcgattaccataagacaatattcgattaccagaagcccaaaatagttttataattattttacaaagtagtaatcaattaccatgagcatgtaatcgattaccaatgtttgtgaacgttgaatntcaaatctcaagagtcacaacttgtgacaaaatattttcaaaatagt

SEQ ID NO: 25092 - DNA, 370 bp, Glycine max
  unsure (1)..(370): unsure at all n locations
agcttaccgctgtgcatgtgctgctgttctaactggacatgctttattgcacactctctatggccaagctatgagacataatacccagttttttgtggaatattttgcattggatcttttaattaatagtgatggtaagttgttgcagaaaacatcttgctttcacttaatttgcaattaattaacctaatgaagtcttagccttcattggtcttgatgagtaaatttcccatgtgcttcacatcacttgttacaaatgtgttatctgtttcaatggtaatttctttattaaacaagcattcaatggtggaaattttntcttttgtcctggtgatgggaaagttaactaatttctttctatattggatat

SEQ ID NO: 25093 - DNA, 384 bp, Glycine max
tagagcaaaggttggaggaggagaaaatacctatgttgaggatgagggcgtgcagccttttggtttcagaatgagattgagaagctgaaaattttcccaatagcgattcacactgtgctgcagtggtcgcaaacatcatgcctttcttcattggatcgttcgtttatacagtggtcgcaaacataatgcctccctgtttgaaccaaagtagtttatcagcaaaatgaaggaacagtgttgaggcattaaacagacaaattgccaaccataaaatgtataaacaaggaagacagtttagtgatataaataacaaaaagcaaatgcaaaataggaagatggtggataaaaaaattgctaataacttaaaagggcgaattcctggga

SEQ ID NO: 25094 - DNA, 345 bp, Glycine max
  unsure (1)..(345): unsure at all n locations
agctntgttgatttggtctttgccatttaaaggattgatgtgggtctgaaaaaaggcaaatttagtcatcctgcttggacgaataagaaaactggggcaaatgaagagggtgaggatgaaggagaaacccgtgctgtgactgccattccaatacagccaagtttcccaccaacgcaacaatgtcattactcagccaataacaaaccttctccttacccaccgcccagttatccacaaaggccatccctaaaatcaaccacaaagcctacctaccgcacttccaatgacaaacaccacctttagcgtaaaccaaaacaccaaccaagaaatgaattttgcagtgag

SEQ ID NO: 25095 - DNA, 380 bp, Glycine max
tcttagtttcagatgatgcagatgggcttgtagctttctcatgcactcctctaatgactatggcatcatttctggcgctaaactgttgggagttggaagccatcttctcaattaaatttctggcttcagcaagagtcatgtctccaagggctccaccactggcagcatctatcatacttctctccatattgttgagtccttcataaagatattagagaagaagctgctccgaaatctgatggtgagggcaactggcacatagtttcttaaatcgctcccagtactcatacaggctctctccactgagttgtctaatacctgagttgtctagtacccacaccttcagagaactacacatcctcgccatcagagggtcgcat

SEQ ID NO: 25096 - DNA, 424 bp, Glycine max
  unsure (1)..(424): unsure at all n locations
agcttggccacggnggagaatgtatctttgaaatctatagccttccatctgagtgtatcccatttctgcgcacgctttgtattaaattttatagtgcagcaaaggcatccgaaaggtccccttaaaaaccggttcataagggagtgtgttgaagattccatgactaatgatgagacaaaattattgttcttatctaaagatggtcaaatactttacttcttattgtgtcctttacttcagtatgtcttttcctagtatttgataaaataatcattcgaaggatggggtgcctgcaaaaggtgcaccattgctcaagttagctcggtcttggcgctaagaataatgagcgtaataaataagagtggatagaataatgggtgatactttgagaacctaactctttatatacacatatttatgggtc

SEQ ID NO: 25097 - DNA, 426 bp, Glycine max
  unsure (1)..(426): unsure at all n locations
gcncgnnaggtggggatgagctcgactcccccttgntacgatcancncnnnnnnngggnnngggggtgggggggttagatttcnttttnggagagggggggggtctttggggaatgatgagactgagaagctgaaattttcccctatgcgattcacactgtgctggagaggtcggaaacatcatgcctttcttcattggatcggccgttcttccagggggcgcaaacataatggcccccctgtgtggaccaaatgcagttatcacgcaaatgaaggaacagcggtggggccctacaccagacacattgcgcaccgtataagggatagtcaaggtagactggttagtgtattaataaccaaagtcaatgcgatatatgaagaggggggataaaaaattgcctaaacttaaaagggcgaatcccgggc

SEQ ID NO: 25098 - DNA, 421 bp, Glycine max
attgaattaaaacgttctgaaagtgttggtaatcgattaccatatatgtgtaattgattacacagtgcaaattttgaattcaaattttaatagctgttgtaaatcatctttggccactggtaatcgattacatcctctggtaatcgattaccagaaagtaaatctcttgaataaagctttttaacttaaatttcttggccaaaccttttgctacttcaaataggaattcccttcctatttaatatacccttcctaagactctagaaactgtcttgatcatccatcttgaatatctttaatttctttgtcttgaataaatctttgagaaacaagtgatcatccattggcataatcaaaacattcagcttgatcctttgtctacacaaaccacaagacaatggaggatatacatggagaataa

SEQ ID NO: 25099 - DNA, 378 bp, Glycine max
  unsure (1)..(378): unsure at all n locations
gctgctcaattgctccaggttgctgcatggattggcaattgtttgtatggnggncagcagaggagcacaaaccacaaacccttgcgacaggtacagaatttctgattcaaggccagctgggttaccaagttaaccaatgcatccagttttccttcaagcttcttagtttcagatgatgcagatgggtgtgtagctacctcatgcactcctctaatgactatggcatcatttctggcgctaaactgctgggagttggaggccatcttctcaattaaaattctggcttcagcaggagtcatgtctccaagggctccaccactggcagcatctatcatacttctctccatattactgagttcttcataaaaatatcggaga

SEQ ID NO: 25100 - DNA, 431 bp, Glycine max
agcttgttgattgcaaggaccattcatttagagaactaaagcactattaggagtatatataaggaaaaaacgccaagacccaacacagctaatttccaatactgccatttcataaaataagacatatcaaatatgatgtagagttttattacaacaacaaaattggggtttgcatgaatatgattttaatcactttggtgacaaaggacagatccactaaggaaaaggattgccaacctattacagccccataacagattcattagcttgtactccctccacccctaattataagacacttttcagaaatttatgtgtccctttttataagatccttttctaatttctagatgcattaattattttttttcatacataccctttcttaattattctctcttcaaacattaatgagaaacaattaagtggat

SEQ ID NO: 25101 - DNA, 395 bp, Glycine max
cttgtcagacttcaaaaatcagacacaagatgaaccagtataaacttttttatgtgtacacaagacatgtcaaaaaatatactagttgcttatgtatgattttcactttcaagaatttaaaaaacaagaatttaagaaaccagaatttaaaaaaacaatattttaaaaaccagaatttcaattttcaataaaagaattaaaaaaaaaccagtatagtatgtaagcttaaaagccagaatagtatgcaacctaaataaacaacattccaaccagtacacaaatcagtacccaacctgcataaaaacacaaaaacatatttgcaccaacatttctaagttgacatatttaaaaccagacatctataacctacaagcagtaatttaaaaacagtaaaa

SEQ ID NO: 25102 - DNA, 436 bp, Glycine max
  unsure (1)..(436): unsure at all n locations
agcttagaaatcaagtgatcatcaatttcaaaacattgggggagtgaacgcaatatatcatgcatatacattacttgtatcttgatttcaggaactaaattgtcatcataaaaaagggggagattgtagaagcaaagcctttgtctttgatgttttgatgatgatcgtgatgatttgatgaaaatgcgcttctcaagtttaattcaagacaatgattcaagaatacaagatacaacatcaagaagatctctagtattttaggaagggaattcctaattgaaattgcaaaaggtttggcaaagaaatttaagttaaaaagtctttttcaagagatttactctttggtaatcgattaccagtggccaaaaatggtttactacagctattaaaanttgaattcaaattttagactgtgtaatcgattacacaatattgg

SEQ ID NO: 25103 - DNA, 394 bp, Glycine max
tgcgcaaatcaaatcactcctacattttatctctagcatgcattgtatgttggtctcgtcctttgtcacgggaagccggaaggtccatatcaccttcttaattgtacacatggggcactgcgcccccaaatgcgcaagtaagaagagataatttttcgggctctcgtgtccgtaaaatgcattcatatcatgcatcgcataagcatcgcttcataacatcataatggacatatcctgcatttgtccgttatcatattccagcctcacattttttgcatgagtcatggcatcatcatgcatatgcgttcaacaaactttttgatctgcaaaactgcgtaccatttgttttcatgtttgctcatccttgcgttttcctctacaaaacaaaaacaaa

SEQ ID NO: 25104 - DNA, 437 bp, Glycine max
  unsure (1)..(437): unsure at all n locations
agcttcaggttgctcattgactccattttgctgcttataaggacagagatctgtatggtgatctgcagaagaacatagaccacagactcttgcaacaggtgcaaatttctgatttatggcgagctaggttactaggttgaccaaggcatcaagttttccctcaagctttttattttcagcagatgaagatgaatctgtggccacctcatggacttctctaaagacaatagcatcatttcttgcactgaattgttgggagttggaagccatcttctcaatcaaattcctagcttcagcaagggtcatatcaccaagagctccaccactggtaacatcaatcatactcttctccatgttactaagttcttaagatgattatgaggttcttcacctgcaagaccatgaaacttgngcagcaaatgtattagtccagtctt

SEQ ID NO: 25105 - DNA, 436 bp, Glycine max
  unsure (1)..(436): unsure at all n locations
ntgaactagagtagcttacntngaaaannnacacctgcttctanaggattattgtgcgacggtcggcgattttttttatatacgtcctngcccaagggaatacattcagaagatactatagagtacttccgtagtgctcgaacctagctatattcttcccgatatgtgtccaaggtatttttctaagagaagttgggatagctcattttgtcccaatgaatatggctaatataaatcttccacctcagcttatgctctttggtacaccattgccctatgacaatattcggtcgccataagcccagaactattggtcagcatcgtacaaagtagtaatcaatcgccatgggcatgttatctatgaccacatgctgctgagcgttgaatttcgcagcccttgagtctcaccttctgccggtgattatcaacttaggcg

SEQ ID NO: 25106 - DNA, 168 bp, Glycine max
  unsure (1)..(168): unsure at all n locations
gagatccctaaggccaccgcggcatgcaagctgcgatagaggagcttagtganttttttgccgcagcaacggaggacagttaccaaggaggagtatggaaatcacagagagctagacaaccctctagcaggttacaagattatgagttgatacatgattcatcaatag

SEQ ID NO: 25107 - DNA, 271 bp, Glycine max
ctgctatggatgattcaaccttttattttaaaactaatttgacaaacaagaaaatatactatttgagaggtagaatctcttacatttttaagataacttctggtcattgctatacgcagtagcagtaggaccaagctattaggtatttgtcagttaacatctctttccttccttctctcaacactctcactgtgcctattaattattggccgcgtctatgcttctacacccatccagttaaaactaaataatatatcgcattatattatta

SEQ ID NO: 25108 - DNA, 413 bp, Glycine max
  unsure (1)..(413): unsure at all n locations
agcttttaccaaagagtttttactctctagtaatcgattaccagtttattgtaattgattaccagtagcaaagattgttttcaaaaagctttcaactgaatttacaacgttccaattgatttcaaaatggtgtaattgattacaatgatttggtaatcgattaccagtgtgtttaaacgttgaaattcaaattcaaatgtgaagagtcacatcctttcacaaaaatgctttgtgtaattgattacaatgatttggtaatcgattaccagtgataagttttgaacaaaaatcaaaagatgtaactcttccaatggttttcaagtttttctaaaggttataactcttctaatggttttcttgaccagacatgaagagtttataaaagtaagaccttaacttgcattntacaacac

SEQ ID NO: 25109 - DNA, 389 bp, Glycine max
ttccctttggcatcatcaaaacattcagcttgatcctttgtctacaatacgttgtgcaattatccttttcctaaattatgaataactttattgcctttgttttaacatgtcatcgcttgggatttttcttaagaaaaaatcgataagtcatattgaaataataccaattttaagtaaaataaggtgcccataaacatcatatctttcaataagaaacaatttaatttgttaaatactaatttccagtaagccattacaaaatattaaaactcatttgtacattttcaataatacctcgttaaacaactacactatataatgataatacatgtttacattcctaaattaaggcacttgatacatctgagtcagataaaaaaaaacaatgg

SEQ ID NO: 25110 - DNA, 421 bp, Glycine max
agcttcatggtgaatctttggtgatttaaggtgttttgatgataaaaatgatgataacaaaagatgatgacaaaggtgatgacaaaaagctcaaagatctatcaaagaacaactcaagtgactcaaagatcaatcaaagaacaactcaagtgaatcaacaacaattcaagagttcaagataagaatcaagaagaattcaagactcaagaagaaagttaagagtcaagaatcaagattcaaggttcaagatctcaaaaatcaagatcaagatttaagaatcaagagaaggcttaatcaagataagtataaaaagtttttctcaaaaattgagtagcatatgattcttctcaaagcatgtttaccaaagagtttttactctctggtaatcgattaccagattgttgtaatcgattaccagtag

SEQ ID NO: 25111 - DNA, 322 bp, Glycine max
tgatgaccatgccagcgtatgaatcagattttggtttttgaaagcctgtgcattatggtttagcaagtctgtttcaggtaaatagggcaggaattcttccaagcccagatggagatggtgttattgttaacatatttttccaggaagcacttatgcagcttttcaaaaagatgctctactatgatgcgtatgtatactcattatttcatatatcgagctatgaaatattctgttagctactatcatggatttaaactgtggctgctttcaggaacgcgatgagtcaaaatgcttacattatcgacaaactctgtgaaatgtg

SEQ ID NO: 25112 - DNA, 426 bp, Glycine max
agcttgtccatccacgatgtctccaatataaaggtctacccctaaccatttgctcacacgaacatgaaattggacatcaccataatcaaatccatgtgtcccacactcaaagataagcttacaaaataattataattaaaacaatttaagaaacatcaattaactatgacataaactctatcatctttagatcatggtatttgaaagtaaataaaaccaataacatccagctcacataagccaaacatctcatattcaactatcatgaaacaattcaagaatcaacatcatgcatcaactatcaagcattatcaacatgagttcatcaatcatcatcaacatgaacaccaaacatcaacaccaacgacagactctactccatggatatttacaccacatgaggaattaaccaaagtacatccctta

SEQ ID NO: 25113 - DNA, 386 bp, Glycine max
tcagataggtactctggttaacaggggaaaaaaattatcatcattgtgagagggctaattaagattcaccccgaacttataccaaacataccccatatagcttcaaaatctaatgatatatggaactgatcaaataataagtaactggttcgtaagacccctacaaattattcagtggcttaatttaaatttgtcttgagtgaatatcccggatattcaaactagactgcagtaaaggagaacatcttatattttaagtaacttcagatacataatatttcctttcatgtctctcagataacaaatactcaactaatttggcaaaaacatggcacacaaaaagttattagatttaatgtttattcagttaattactataatcatct

SEQ ID NO: 25114 - DNA, 421 bp, Glycine max
agctttgtcctcagatccctcttgttggactagacttagaccaaacagcattattgcaacaacatacttaaaaccaaaacttaatctgcagatccctcttgtaaaactaagtttcaattatgcttcattcaagttctaaggcaacaatacattatccaatgttaaaatcacctaactaggcacacaaatggctgataagaccaaaagcatatagagtttaagcaatgaaagaaccattgaacacaagaaacacaatcaattagatatgaaaataattacatcagatgttcagtagaaatccccaacaagggtgtttagatagccattacagaagaaaccctaacaataataagcttacaaaacctaggtatctctgcaaaagctactcctctagctgcctccagagctcttttcccgaaat

SEQ ID NO: 25115 - DNA, 394 bp, Glycine max
tgcctaattaacttgaaattgagagaaaatgattattaaacacacaaaatggaagtactaatgtcgcaacctacccttcggcgggatggcgacgcggggctcacgggtgcatcttgtggcgtccctaaataatgactggtttaatagtaaaaaattaaacagcggaaaccatggaaattttttttttctctttctctcttttttttctctcattgttattcatttcacggtaattaaattcagaaggaaaattatcactatagagtcctgaatggccaattcttaactctattcggattcatttttttctgatcactcataacctctaaactattttgctctttcaaaaatataccagccatcattttaggtcgtcatgtgaaaaaaaaataat

SEQ ID NO: 25116 - DNA, 379 bp, Glycine max
  unsure (1)..(379): unsure at all n locations
agcttatatacagaggtgttgctctgtgtgggagaagaccattntctatggctgccactctatctgttacaataagtatgtagtcaagaaacatcacttcaaccattagacccattctagtgaagacaatagttaaggttctaagggtgctagacatcatggttgcatggtgtatgtaaacatctcactcatgtggatcttcaacacttgaccaatgttaggtggcattttaccacctggtatagtggcttctgttcgcaatgttacagtgtgcattacttgcatagctgttagtgtgaacattccatgagttgtttctccagacaacattattccatcagaaccttctcgaacaacaattagtatatctgatacctct

SEQ ID NO: 25117 - DNA, 378 bp, Glycine max
  unsure (1)..(378): unsure at all n locations
tttgaanagacacatctcttcaaaccattttgattatgcacgaagggcctatatatatgtgtgtctgaattntaaaaaaaagatattccaagagaacttcaatgccaaattctctttcaaaagaaactcttgggcaaacacgtgcaaatccattaagagtttctccatggacttaaattgtaatatccttctcttcaagagagaattcttctttctttcttctcattcaaagagattgattaagggactgaggatctcttaagttgtaaggattactgaacacaagggatgggttgtccctgtgtggttcagactttgtaaacggatttttacaaagggagtggaaaatttcaagtgggttacttgagtactggacgc

SEQ ID NO: 25118 - DNA, 363 bp, Glycine max
  unsure (1)..(363): unsure at all n locations
agctntcataagtgaattcaggtgctttcatctccctaagagtcctctcacgaggtggagattgagccatgttcttagtatgaaaattagcagctgaatgctcaaaatcagaatgtttagaatcaccagcaacaaaatgctcggaatgcacacaatacatggaatgctcagaatgctcaaaatacacagaatgatcaggatgcatactatgcctaactaatctatgaaaggttatatctatttcagtatcaaagggttgtaaatcacctggattgcccctagtcatgtactatatgcagtagatcatgtatttctcanacaagcactaaaaagggggtaaaactacaactatactcaaacata

SEQ ID NO: 25119 - DNA, 380 bp, Glycine max
  unsure (1)..(380): unsure at all n locations
tttatacaagctaccaaacaaactataactataaactgaaatttaaaagttgaactgaaattaaaaactgaaacataaacataaaatgtactaaagacagaataataataaaactgttcaaaatgcaagaaaataaagatcctaatcctgtcaatcatcctgtgcagcgtcattcatgtccagtgttggtgtagatagtggatcttgagaaataggcaagttcggcattggtgcagatggctctggctcaggctgaggagatggctcttgatcaacctaaaaaataaatggctcaggtggagagggctcagagatgtctgcagaagcatcctcctgtgcatgctgaggctcctgngctgcggaggcctcaccccgtcttg

SEQ ID NO: 25120 - DNA, 419 bp, Glycine max
  unsure (1)..(419): unsure at all n locations
agcttatgattagttatttagcatatatattgatttntttatacaaccttttgtttaagataattaagaatgtaagttgatgaatagctgtttaatcagcatataatagtattttttatttaactttttagttttggctgagaatataatcaaacatataagacacaataactaattcacaaatatttaaaaaattagttaatttaattaataaaaataaatttatcctaaatttatgtttttttaaaagttatccttgacattaatgacacgtactcttatgtgttcattttaaagttatccttgacattaatcatgtgtacgtttctattttctcaacccttcttttggttaattgtgatactattctacacttcgacaccaacaatggaatcaaagccagctgggtgttttttttt

SEQ ID NO: 25121 - DNA, 390 bp, Glycine max
tgccgctagagctgccccattaactgccctagctcttttagacaggtgatttctatgctcttgaccttgacttgatagaacctctttttaagcgaaggtgtttgacttgatcccatgttttactaaagtgaaacaaaattggtgcgaatcaaaactccgacatctaacatgggtggaatggatgaatgcatgaagaaatgcatatgatacagatgcaatttatgaacacaggagcccgggaaattgtctccttcttagatacaacgtcttgggatagcaaagtgcccgacatatgtttttaagaaggtgacacggaccctccgttggttttccaaagagaggggatcaagacagaacccatgcgcgatgcatatgcaaaaggcacaacac

SEQ ID NO: 25122 - DNA, 204 bp, Glycine max
caccacttcttgttgaagatgagtctagaagaagcttaccaccataggaagccatggataacaccttgaaggtataacaagatgattgaagggtgaggaagagaaaaacatgaaatttagtgcctttaaagagaactgaattttgtagtgtaattttcaaatgatcgaagctgaaaaaatgcacactgttcacttccggcagtg

SEQ ID NO: 25123 - DNA, 360 bp, Glycine max
  unsure (1)..(360): unsure at all n locations
agctntgcctttagcgcttgcacctcatcactttcttccgaagctttaacctcattgtctctcacagtctttagatttgggagccaatccaatccttgtgtccggactctcagccacttatgatagccaccgatgatcccattactgcttcccctaagctctctgtcctttcttcatgccgcatcccatgccttgcgaactccttggagtacctttgcattggggtcactgaaaccccgtgtaatgaaaggcgtgatgctttcgtctaatggcgctcctctcatggggtagccaagctgtcttatggcgaggacgggattataattaatacaacccctgttcccatccgggaacattgga

SEQ ID NO: 25124 - DNA, 394 bp, Glycine max
  unsure (1)..(394): unsure at all n locations
cttgtggccatataaacactaaggcttagggttggtttttccttattcaaatcaacccagnggttctagacaatgctctttaatcaagttacgcacacatctgagtccattcagggcttcgagaaaaatcttcattgcattcacccttcaggcgcacacatttttttttcaaaaatctttttatttgattcaagagattaggggttctacaaatgttatttgattccttaaattaatcaaacacttacccaaagatacaaaacaattattcaaagctcaaagggtaagaagcttatgcaagaatcaatacaagagtttaaagggtagagaaaagatgcacacataatttatattggtccgatgtcaaagaaatctacatccagttgatccaact

SEQ ID NO: 25125 - DNA, 422 bp, Glycine max
agcttccttgaaaagattcctagagaagctagagcttatctacacacacccctctaatagctaagctcacctccttgagatgaaaagctagagcttagctacacacacccctataatagctaatctcacccccatgtcagaatacatgaaaatacaaacaagtccctactacaaagactactcaaaatgtcctaaaatacatggctaaaaccctatactactagaatggccaaaatacaaggcccaaaagaaggaaaaacctattataatatttacaaagaataatggacccaaccttggcccatgggcaaagaaatctaccctgaagttcatgagaaccctagggccttctttagcagctctagcacaatcctcttggagtcttctatccaatacccttggggggtaggattgcatcatcc

SEQ ID NO: 25126 - DNA, 391 bp, Glycine max
cttcagtcatcaaaagattataaatatgtgaccatggctttatatttgaacaatcaagaaatctatctttcaatcttctctctcaacatcattcaatatctttcaactctttctacagaattttttgattcatttctctttatctttctaaaagatgtttttcaaatactttctcttccaagaaaagttctttgttcaaaaacttgtgttattcatctttttcattctcttctccctttgccaaaagaacgaaggactaaccgcctgaattcttttgtgtctctcttctcccttacaaaagattcaaaggactaaccgcctgagaattcttttgattcttcccttccccttaagcaaaagatttcaaaggactaaccacctaagatatatt

SEQ ID NO: 25127 - DNA, 450 bp, Glycine max
  unsure (1)..(450): unsure at all n locations
gagaccacctgcaggcacgcnagcttggaacgaataaactgaaaaagttttcgaggttagcttttggtgaagatgtcggcgagttgaagatgggaaggaacgaattgagtaatgagccttttggagagaactaactcgtgaacaaagtggtagtcaatatcaacatgattggcacgcttgtgagcaaccggattctgggaaagaaatgtagctcttttgttatcacaaagaagagtagggggagcagagcaaacatgcagattgcgcagcaaatgagtgaaccacattagcttatctgctgtatttgccatagcccaatattcagattcagagctggaacgagcaatagtaggctactttttagcactccaggacacaagattaccttccaagaatatcgagtagccataggtggagtgacgcgtctcaacacaatgagcccattcgaca

SEQ ID NO: 25128 - DNA, 345 bp, Glycine max
gcttccaggatctgctgacttgcccacgaatctgattatgttttttgtaggcctccattgcgtttgataaagagtattttttctgtgactccagtataatgcaactattcggagatgggtttgaatgaatatatagaaaatactcttattgttgatatgtagatgatcctatcttatacggatgcttatggcgtcactatgatattttgagacatttagatgattagtatgtatgagcaacaacactattaggagatattttggatagtacttcaagggcccatgttatgatatgtggccttgatatctaacggctggatctagatatatatctacatatataga

SEQ ID NO: 25129 - DNA, 410 bp, Glycine max
gacacctgaggcatgcaggcgcatgattagttatttagcatatatttgtgtttttttatacgaccttttgggtaagatcattaagaatgttgagtgaggaatagctgcttaatcagcatatagatagtgttttttatgtaactttttagttatggctgagaatataatcaaacatataagacacgatagctaattcacatgtagttaaaagattagttaatttaattaataaaaataaatttatcctaaatttatgttattttaaaagatatccttgacattaatgacacgtactcttatgtgttcattttagagtgatccttgacattaatcatgtgtacgttgctattttctcaacccttcttgtggttaattgtgatactattctacacttcgacaccaacaatgga

SEQ ID NO: 25130 - DNA, 222 bp, Glycine max
ctgattgtagtggaatggagaaggaaaaagatgaatggagacaccacttcaagtagaagatgagtctagaagaagcttaccaccataggaagccatggataagagcttgaaggtagaagaagatgaatgaagggagaggaagagaaaaacatgaaatttagtgcctctaaagagatctgaattttgtagtggtaattttcaatgaatcaagttgaaaaaatg

SEQ ID NO: 25131 - DNA, 386 bp, Glycine max
tgattgatcagtgcatttatattatccagtggttgatacttcattttggaatacagtgtttgtgattggtttgaattgatcaattttatgatgtgagtgaattggaatgcatatatcatatgccttgaatgagcatgcagtcattataagagaaagaacatggaattaggatcatgactgaaaatgttatctggtttgtgaggttgattgtgaatgaacgcattatccgcaacccgatgagagtgtgatctttaattgtgagagaacgactaacgttaagtaatggtttttgcatgaatctttgaatatggaatgaatgcatgagtttgaagatgatgaacgccatgttttaattgatagtagccacttatccaaaaagcttacct

SEQ ID NO: 25132 - DNA, 325 bp, Glycine max
  unsure (1)..(325): unsure at all n locations
agctttntccaggcaaagtgccaatcttatagtctggtgaataaccaaaccatgtacaagttgtcatatttcctccttaccttttccacgaaccatcctctaaaatcaatttcagctcttccacagttgcttgggcctcaacaacatatgaagccatatcataatttgtttgcttaagagaggctattttttattagcatcatatccatagattttctgaacttttctccaaaacgagcaacaagtcttcaatactttgagattgaccaatatttttggttccacaaactgccatagtagtgcacaaaacgtcctgtattggtag

SEQ ID NO: 25133 - DNA, 364 bp, Glycine max
tgagatgaggaagtgttgaagggtgaacttcctgcttttattgttgactacagagtggtacctggagatatgtcgcgggggtcaggagaccttggggacgtcaggtggggtgctattgcccaaaaccaagcttgaccaatcccgacccaacccgggcatagtcggtcagtgagaacctgtgatgtacctaaacaggcgagctcctggcagtcaacagataaaaggaaaacaagaccacaaagcaaggaggcttgtggtggctggccagctgtgaattttgtgtaatatgtggattgtggcctctggtaatcgattaccaagggtggttaatcgattacaaggcttaaaattgaagacaggaggc

SEQ ID NO: 25134 - DNA, 411 bp, Glycine max
  unsure (1)..(411): unsure at all n locations
agctntaagccaattcatacgacaattactctttattctgatgtcnganngagtcccgtaatataacgaaacgctcgaaattgaatgtttaacctatgagccaattctaacgataataactttttactcggatgtccgattgagtctcgtaatatatcgacacgctcgaaattgaatggtgaagctctaagcctattcaaacaacaataacgttttactcggatgtccgattcaatgacgtaatatatcgggacgctcgaaattgaatgttgaacctgtgagccaattcaaacgacaataactttttactcggatgtctgattgagtcccgcaatatatcgagacgctcgaatatgaatggtgaacctctgagccattcaaacgaccataacttttactcggatgtcgatg

SEQ ID NO: 25135 - DNA, 385 bp, Glycine max
aaacattaaatttcgagagtctcgttatattacggtattcaatcagacatccgagtaaaaagttattgtcgtttgagtaggctcataggttcaacattcaatttctagcctcacgatatattaccggactgaatcggacatccgagtaaaaagttattgtcgtttgaattggctcataggttcaacattcaatttcgagcggctcgatatattacgggactcagtcagacaaccgagtaaaaagttattgtcgtttgaattggctcataggttcaacattcaatttcgagccgctcgatatattatgggactcaatcagacatccgagtaacaagttattgtccgttgaattggctcataggttcaacatttcattgccgagcgt

SEQ ID NO: 25136 - DNA, 407 bp, Glycine max
agcttcactccaaatggtcacctgtctgcttctgcatactattatggaggtaaggtaagcagctatgacttcagatggaaggtgttgattgaataacttattattccttctggaaaatcaatgtggtaacgagagtttgtgcaggttatgatgggcaacgtgattggaatatttattcccgatatatgaaccttaatactgggatgaaacaagtacctcttgtttgtgtaactactggactttgttatgttgtgtatgtattttgatattataaaattgggtattatttgcaaattggtgttgagaaaaagctgtctaagttctattgagtgatgactgatttctgctagatgataacttcaaaatcaaatggtgtaggatggatgcttcctacttgctaaaatcac

SEQ ID NO: 25137 - DNA, 397 bp, Glycine max
ttagcggaatatattccgaatgatcatgttgtggtgtttgattattgtctcttaaattcggaggggacgtcacatggctcatgtggcagcattggccacccattggataacgcgttggcattttaattcttgcacttaaccatgctttttggatttggatttagacattttaatcagattgtttatatttaccacctcgtttgcattaatcacggaaaaattgtcaacacgtgtaattttagtgtaaatttagaggatgaaatgaaaaaaaaaaagaaaaaggatttacataatgcgcgaatcacttcacgagtctcagaatttaaaataataataacaaaattttgtgaaaagaaaattcattcactctttagtcttaattcatatatatatatat

SEQ ID NO: 25138 - DNA, 323 bp, Glycine max
  unsure (1)..(323): unsure at all n locations
agcttcttatccaagacactctcttgttggtgaaacttctccttccatgacttattctctagaggataacacatcttctcacctcttcttctttatctttcgctagaattccatggctgaaaatcaccattgaaggaccttattgaagctcatagatccagcctacatagaagcttctcaagcgagcttacatcactatggttttagctaacactactaaaaatagcgtattccacgacgcgcatttagagtcgatcgtcacaaaaccgtctttgtttgtgggcggtgacatttctgtaaatactggcagcattntaaagacg

SEQ ID NO: 25139 - DNA, 509 bp, Glycine max
  unsure (1)..(509): unsure at all n locations
ctcacgccccagcacttcttctgatataattgacccttgcctgtctcgttctctaattaaaccaggancagcaaaacagncggtgacccgagactgcgacctcgaanacaggccactacaaaacncaagcttgccgccagaaataaatttatttttaccacatgtagtaaataacgaactaactcactaaatgccactatacatagagggactacccaccagcaacggatgggcctcgaaaacgcccatctaatccatgaattcaaccaattacccaaaataaaggcccaactcgtatgccaattatacaagagccgagggtctgactaacaaactcaaattaacccgtcaaatggcagaaatggccaaaacttatttgagaaaaaatagaacctcttggtaataacgtttgagggactactcacacgcttcattcggaagtctgtagagccctataagccctgcacaaggcagataggtcaagtatgcacaattatcaattaagctcg

SEQ ID NO: 25140 - DNA, 272 bp, Glycine max
  unsure (1)..(272): unsure at all n locations
agcttgtcaagggaacatttatgcattatttcatagatgagagctttcttgcgtccttccaaacagaatcaaagaagtatgacaacattaacatgagaagttctactgatacactattagaaaatatgttntctacatcggttatttatgactttcaacatcggtttttcaaccgatgttgaaagtaccgacgttgatagtattatcgttaacatcggnttttgaanaaccgatgttaacgtaaaattaccaacatcggttatattaataac

SEQ ID NO: 25141 - DNA, 273 bp, Glycine max
cttgaccagatgtgtcggccaagcaaggaaggtctaaattgcctaccccacttaggaaacctcatgaggggggacaggtactgaagcatcttgatctataacctactccacacttacctttacttggccaggcaacaaaagagtgttatgaacaatactggatccctcattaactcttcccagtgcaaccaggcgggcaggaactacttcgacgtacaagccgtacctatctgagtcacctatctcaggatcggtttctgagggatcaacaca

SEQ ID NO: 25142 - DNA, 433 bp, Glycine max
agcttctcggcattgcaaacaaaatatttattcttgtcactgaaattcctgactctcaaattgttcaaaaaatacttgtaacaattccagaaaaatatgaagccacattgacttccttggagaactcaaaagatctttctactatcaccttggcagagcttttgaccgcacttcaggctctggaacaaagaagactcatgagacaataaggtactactaaagggggtagctaaatcactggacaaaaaaaagaagggcaagtcaggaagtttcaaccacaaaaatggtagcaaatcctctcatgattttccatcatgtcctttttgtaaaaaaaacaatcatccacagacgaagtgttggtggaggccagatgtgaaatgccataaatgtggacaattagggcatgtggagaaaatatgcaagtcatcacaaa

SEQ ID NO: 25143 - DNA, 398 bp, Glycine max
  unsure (1)..(398): unsure at all n locations
cagcttccacgtatatgacctacatgatcacatgataactttttaatttctttacataagtaaaggggcatcatttccaatcatgatatactacagaaatggaatttttaccatcttcttgtaacctccagatgcatgtttcttcttcaagacttcaataaagtccatagcataaaggtatggcatgtttggcatccctacaaaatacaaatcaaataggaaatgactaagttataatgtctttatctaatatgaacatagttctggattgatcatttttacacccttagataattttgttttatacaactatgttcacatattaaactatacctccatgaaccacagaaagaaaaaagtctttaggatgataattnttattttttttacttaaagtc

SEQ ID NO: 25144 - DNA, 424 bp, Glycine max
  unsure (1)..(424): unsure at all n locations
agcttcaacatcagaccacttccagtgttctggatttatcttcacatggacttgatggggcctatgcaagttgaaagccttggaggaaagaggtatgcctatgttgttgtggatgatttctccagatttacctgngtcaactctatcagagagaaatcagacacctttgaagtattcaaagagttgagtctaagacttcaaagagaaaaagactgtgtcatcaagagaattaggagtgaccatggcagagagtttgaaaacagcaagtttactgaattctgcacatctgaaggcatcactcatgagttctctgcagccattacaccacaacaaaatggcatatgtgaaaggaaaaacaggactttgcaagaagctgctanggtcatgcttcatgccaaagaacttccctataatctctgggctg

SEQ ID NO: 25145 - DNA, 401 bp, Glycine max
  unsure (1)..(401): unsure at all n locations
tctaagcttctatataagctgaaccattntatcaataaacacattttgagttttattcagaaaattagagtttatctcttttatcttagtgagagtgattctcctaaattcttgagtgattcaagaacaccctgactgtatcaaaggacattcacaaccgttgtgtgttgccctcgctggaaagagtgattctttccttcctttcatcttcacccttgttctttcaaaccacaattccagaaaatccacctctgcccagaattatctcgtggccataactcccattttacgcactcaaattaagtgattcttgagcctaaattgaatttcaaaacgagacctttcacctcgttttggaatcacctcatttggagccctgtagcttcagttattgccatttc

SEQ ID NO: 25146 - DNA, 360 bp, Glycine max
  unsure (1)..(360): unsure at all n locations
agcttaaataattaacttctcctatcttttatttttttcatgcatatagattcaaaaatcaaacttcaaagcatgtacttacaagaaaaagttaatttgtgaatcatatcacactatcttggtaaaaaaaaaaaaaactatttattcacaaataatgaataaaattagaggcggaaattcagtctgggtcttccagtgtcatttacgacaaaaacgtcccatatatctcactatatttattttcattttttgtttcttgcagggataataccttagtgatcatctctcaatgatctgtcataactcaaattgattttttaaatcttcaatagtncttgaactgataataattaatgcata

SEQ ID NO: 25147 - DNA, 395 bp, Glycine max
tcatgattgaatcaagattgagtcatgaatcaagattgattcttgatgatgaatcaagattgattcatagtgttttgatgataacatagatgatgacaaaaagcccaagagaatgatttcaagattgagtcaagaacaattcaagaatcaagagaaatttgatttcaagattcaagaatcaagtttcaagtttcaagtttcaagtttcaagaatcaagaataatcaagatcaagattcaaaactcaagaaaagactcaatcaagataagtactaaaaagtttttcaaaacattgagtagcacatgaagttttcccaaaagcttttaccaaagagtttttactctctgataatcgattaccaatttactataatcgattaccagtagaaaagtttg

SEQ ID NO: 25148 - DNA, 435 bp, Glycine max
agcttcatccgcagatccctcatataagactaggcttatactaaatagcattattgtaacagcataattaaaaccaaaacttaacccgtaaatccctcatgtaaggctaagtttcaatcctacttcaatcaagttctaaggcaacagtacatttcccaatgctaaagtcacctaactgtgcacacaaatgggtgatcataccaaaagcatacaaatattaagcattgaacacaaaaaacataatcaattagatattaggtatttacatcagttgttcattagaaatccccaactagggtgtttagttagccattacaaagaaaccctaataataaatgagattaaaagcagagaataatagttccttacacaagaagggggattcctcctcctcttctcagcatctcacactcactctctactcaataatctctc

SEQ ID NO: 25149 - DNA, 340 bp, Glycine max
  unsure (1)..(340): unsure at all n locations
nttctttgtgggttgatgggttctgtcgcgcacaatgtcatgttcactggctgacatactctcaattagctcagttgcttcttccggggtcttcagctttatttttccccttgcataagcatctatcagttgcttggcttggggtctcaacccatatatgaacatattcaattgaattggctcaagaaacccatgagtgtgagttcttctcaataaacctctgaacctctccaatgcttcactcagagattcatcacggaattgatgaaatgagaagatagcagctgttcctctcaaagtcttggactctgggaagtatttctttagaaactttttaaca

SEQ ID NO: 25150 - DNA, 438 bp, Glycine max
  unsure (1)..(438): unsure at all n locations
agctcgcctcanagaggtccaggaatgtcatggctttcgaaggaactagttccgctccggagtatgacagtcaccgctttaggagcgctgtacaccagcagcgcttcgaggccatcaagggatggtcgtttctccgggagcgacgcgtccagctcatggacgacgaatatactgatttccaagaggaaatagggcaccggcggtgggcatcactggttactcccatggccaagtttgatccagaaatagtccttgagttttatgccaatgcttggccaacagaggagggcgtgcgtgacatgagatcctgggtaaggggtcagtggatcccgtttgatgccgacgctatcggccaactcctaggatatctgtttgtgttggaagagggccaggaatgtgagtatggccagaggaggaaccggtctgatgggttcgatg

SEQ ID NO: 25151 - DNA, 412 bp, Glycine max
tactcaagctttccgtataacttatggtaaaatctgggacctagccttggtttaagtctccacagagaccattgcctccctcgcccaggattatgatcagccgatgaggtgcttcacctttgggaacttccatctatcacctatggtagaagaatttgaagagatcctaggatgccctctaggggggaggaaaccatacctcttcacagggttctatccctcattagctagaatttccaagatagtccaaatctcggcgcaggaattagaccacaggaagcaagtcgaaaatggggtggttggaataccgagaaaatatttggaggcaaaagcaagaatcttggtaggtaaaggcgagtgggccccgttcatagatattctcgcactggtgattatcagaggagtcctcttt

SEQ ID NO: 25152 - DNA, 401 bp, Glycine max
  unsure (1)..(401): unsure at all n locations
agctttaaaatattatgttttaagtttgntgttcctttaatgtaaatgagctttttagattttttttctcttgcggttgttctcgaggtgattaacaattagtattgcacatctattattgatttttgtggcttcggaaaatggaaaagagtttagatgaattttagtaaaggtatttaaaacttcattctgatattctatcctctaaaatactaaaatcagtaataggatgttcaaaattagttctgtgactctgaaagttgtaaataagatcaaatatcattaggagacatattcataattactcaccacttttaagaagttcctatatattgaaaatgattaaagtgtaactcattctcttaggggagaagtgtttatttagaaaacaacataaaagg

SEQ ID NO: 25153 - DNA, 386 bp, Glycine max
taccactatagtctatacaaagaaattattgtgatttttttacgctttactaaggtataaggggaagtaataattttaggattttgagataattatcattcccttatgtgatgagtgattctagaatgagaagtgtttattgggcttggctcttccaaagtgaataagggtaaagtaattaattttagtcattgatgaaaaaaattagcggttgatatttcaactcattcttgatttgttatgcaagtgcatgtaatatcgactattaattttctcattaatgattgagaatatttaatttactttctagagtgagttgctcacgaggagctaaatctttattgaaatgttttcttctgtttctgtgtctaacagcaactttctcg

SEQ ID NO: 25154 - DNA, 406 bp, Glycine max
  unsure (1)..(406): unsure at all n locations
agcttgtccttcacggcttacatgatttcactggcatgttctgcagcattgcctacaattggaagcaagatgacagaaataaaagccactgacatattcaatgactcagatgctccctgcaagagaccagaaacacaatatgtctatgaatgaacttatgacgcagtgtttatggacaagaacaagaataggaatattagaagctttagttgtacaataatagaaattaatgatcaagaaattctgaaaatgatatagctatacctgtatggcgtctacaaggtatccagacaatatagatacccatgctgtcaagatagcaagccagattattgcctcccattgagttaattcaagatcttcctccacatcagaattntcaccattctctcctccctacattatg

SEQ ID NO: 25155 - DNA, 387 bp, Glycine max
  unsure (1)..(387): unsure at all n locations
ntatttaagtcataaatctagtcgatgtgagactattccaccacacttgaggctgcaattaaggcagtcctgaaagaggccacaactaaggcgagctagagataactgatattaaggcagctttccaacactaaccctcgcgtctagggctactagcctagagtgtgacaaatgcaggtagcccaacaattaatctaggataagctctaacaccgtcttagaatttggatttgtttgggcttaactcagactcatgaaatcaacttgtaaggtgaagactgcccaagttttataagctctattgaagctatatatctggtcaatgtgggactaaaccaccacccttgaggctgcaactaaggtagctnttccaacagaatatcatct

SEQ ID NO: 25156 - DNA, 408 bp, Glycine max
  unsure (1)..(408): unsure at all n locations
agctntactccaaccagatctgctattattagatttcttgtaaccatatttgctgaaacaaatgaacaaaatataattcattaatattataaacattgcagacaaaataaatatgaaaaaaaggtgaaacaaataacaatgtacctgaaagtaataccttaagaagtttcaacagtagtagttccaacacttggagtctcaatattagcaatatatagagtcaaatcaaacaactctaaaaaatttgatcgattcagttctatttttgatcgaatctatatatctaaattcgtgacctaacccatacgtgaacgattttgatcggtttagttcggttttgacccaaatacataaatgacccanagtttagttcaattcggattgcaggtgacctgtatccgtaaacac

SEQ ID NO: 25157 - DNA, 246 bp, Glycine max
ggatttcctttgagtagggaatcttttcttttatgatggagccaaaccttgtccccttcattaagaactagctctcttcttcctctattgcccttagttgaatacacctttttttggttctttatttgggtcttacccttctcatgcaacttttttccaacttctgccttgaatcccctttctttatgtttaaaagaagtgtcaagtggaaggggaagaaggcttatgggttttaaggaatggacc

SEQ ID NO: 25158 - DNA, 403 bp, Glycine max
agcttatacatcttaaagagtaatgttttggaaatatttttgaaataagatattttaatttaataaatgatattaataattttggaaatgaaaaagcatatagatgaaaaattaagtcttaaaaaaagatatttacataaattagcaaaaaaaatgatgattgtttttttacgattttagcagtgatgaaatttgcgtatatttagcatcatctagacgtttccaaattccaagtagggggagtatcggacaaggtgagtaaagaggatgtaagattagattacagcatgagtgtgacactacaaacaaagagacacgtgtcctgttaggtggcaaacgggtgtgaggtgtctgtgtgttctcctgtcacgtgttgccgccgaattacatgcatgtctccacc

SEQ ID NO: 25159 - DNA, 389 bp, Glycine max
  unsure (1)..(389): unsure at all n locations
ntntgagctgtatcaatcaactctattgacaagtttgctctttgcatgaatgtaatgatgaaattttaatgataaatgacgcagttataaaatggtggttagaaaatatgtgatagaggaggagatggaatgcatgtttgttacttcaattgaatcataaatgaatgagaggcttacatcataaagcctaaacaattgatattcatcaattaagatcaaaatttaatccaataattaaacaatgttaacccacaaaattccaactagaacaagaaacttcagttattacctctatttggtcaccgacattaatcaggagagcatcagggattattggaactttaaaccactgatcatctttgaggacttggaggccttctacttctttg

SEQ ID NO: 25160 - DNA, 401 bp, Glycine max
agctagggtgatgttgcgcgtactgttgggtaccatgaggtgtttgctggggtttgacccacgcgggtgttgaagagacggcatgggcatctccttccttcctttttgcccctgttgccccgattcttttggcattcacgtttgtggaggaaacgtaatcaaactttcctcttttcaatccaacctcgattctttccccggcaaacaccagatccgcaaagctggacggcatgtaacccactagcttctcatagtagaacactggcagagtgtctaccatcatggtgatcatctctctctcaaccatgggaggagctacttgtgccgccaaatccctccatcgctgcgcatattctttaaaggtttcaccctctttcttgaacatattctgcagttgagta

SEQ ID NO: 25161 - DNA, 340 bp, Glycine max
tgagatgaggaagtgttgaagggtgaaacttcctgcttttattgttgaccacagagtggtacctggagatatgtcgcgggggtcaggagaccttggggacgtcaggtggggtgctattgcccaaaaccaagcttgaccaatcccgacccaacccgggcatagtcggtcagtgagaacatgtgacgtacctaagcaggcgagctcctggcagtcaacagataaaaggaaaacaagaccacagagcaaggaggcttgtggtggctggccagctgtgaattttgtgtaatatgtggattgtggcctctggtaatcgattaccaagggtgggtaatcgattaca

SEQ ID NO: 25162 - DNA, 382 bp, Glycine max
  unsure (1)..(382): unsure at all n locations
agctngagatgaggaagtgttgaatgttgaaacttcctgcttttattgttgaccacagagtggtacctggagatatgtcgcggnggtcaggagaccttggggacgtcaggtggggtgctattgcccaaaaccaagcttgaccaatcccgacccaacccgggcatagtcggtcagtgagaacatgtgacgtacctaagcaggcgagctcctggcagtcaacagataaaaggaaaacaagaccacagagcaaggaggcttgtggtggctggccagctgtgaattatgtgtaatatgtggattgtggcctctggtaatcgattaccaagggtgggtaatcgattacaaggcttaaaattgaagacagggggctaagatggtctct

SEQ ID NO: 25163 - DNA, 283 bp, Glycine max
ccttttggaccatgaacacgcttttaactttcttttctaaaccatgcgatgtgctcgcgactggtccctttattcctttcgcaactagagttcactattgctaccccatagagctccgcgaaatatgatcctgccatactttgtcttgcgagccctcttggtctattgatcaagggcctctcgcggaaattgcattctcttcccgtaacccggcacacttcttaagaacgtgtgtggctggaaaaattgaacctccctcttggcaagttttgcctttcctaac

SEQ ID NO: 25164 - DNA, 352 bp, Glycine max
agcttgaatcggacattcgtgagaattgttatgactatttgaatttctcaagatcttccgttgttcaatttcgaccttctcgacatattatgcgcccgaatcggacatccgtgtgaaaagttatgactatttgaatttcctgagagtttccgatgtttaatttcgaacgtatcgatatattataagcttgaatcggacatccgcgtgaaaagttataaccatttgaatttctcaagagcttccgttgttcaatatcgaacttctcgatatgtgatttgcctgaatcggacatccgtgtgaaaagttataccacgtgaatttttcaagagcttccggtgttcaattttgagcg

SEQ ID NO: 25165 - DNA, 377 bp, Glycine max
tataatatatcgatacgctcgaaattaatcatcggatactctcatgaaatgtaaatgggcataagttttcacccggatgtccaattcgggcgcataatatgtcaagagtctcgaaattgaacaacggaagctcttgagaaataaaatggtgataactctttacaccgatgttcgatttatgcgaatcacgtatcgagacgctcagaattgaacaacggaagctcttgagaaaatcaaatggtcataaaatttcacaccgatgtccaaattagggcgcataaatatagtgcgctcgaaaatgacaacgggagctttcgtcaaattcaaatggtcataatttttcacactggagtccgattcaggctataatatatcaa

SEQ ID NO: 25166 - DNA, 428 bp, Glycine max
agcttgtgctaaataacttggtatatactatatagttttatattgcacatgttaaatttggtaaattaattgaacaaggtatatatcatctttatgagctagctagagatttatatttatgtaacgaattgaagcaacgcatgtgagtgcctttaaaactggatagcagtagccagcaatgtttaggtttttggacccttctttgatttcttccctttggctataaattattttccattcctagcaggggcaatcatctctctcttttgttttttcttcaatttcagggtcacaagtatctagacaaattagtctggtagctacttgaatcaatatgttccatgcagtgattgtccaaattcactatccggtagtagttgtaatgtgatagtattgacatcaatatgaatgagtaatgatacataaat

SEQ ID NO: 25167 - DNA, 381 bp, Glycine max
tctatataagttgaaccattttatcaataaacacatgttgagttttattcataaaattagagtttatctcttttatcttagtgagagtgattctcctaaattcttgagtgattcaagaacaccctggctgtatcaaaggactttcacaacctttgtgtgttgccctcgctggaaagagtgattctttccttcctttcatcttcaactttgttctttcaaaccacaattccagaaaatccagttctgcctagaattatcttgtggccataactctcgttttacgcactcaaattaagtgattcttgagcctaaattgaatttcaagacgggacctttcacctcgttttggaatcacctcatttggagccctgtagcttgcgt

SEQ ID NO: 25168 - DNA, 413 bp, Glycine max
gcttgaccaacggaatgcaaatgatttactcagttctattaggcaacactcttcagcttttggggatggactccagcgtttggctcattactttgccaatggccttgagacaaggttggctgctgggaccccatcatacatgcccctagaaggaacaacttccgctgatatgttgaaagcttacaaactatatgttacatcctctcctttgcagaggttgacaaattatttggcaacccatacaattgttagtcttgtggaaaatgagggcagtgttcatattattgattttggcatttgctatggttttcagtggccatgccttatcaagaagctctcagaaaggcatggtggtcctccgaggcttcgtataacaggaattgaacttcctcagccgggatttcggcctgcag

SEQ ID NO: 25169 - DNA, 327 bp, Glycine max
gcatcaagcttttccttggcaaccttttcatttttaaagtctacttttcgtaatgctgctacttgcacggtaccctatctaagcacattagcacaaattgtctaacactacgatgtgattgcatctaaattaattctgacttgaactttttacaatcttgctcaaatatgatctcatcaggagggcttcacatgaataaattatgtacttacatagtacatgtctaggtgagcctcattttctcaattcttgttcaaaataacttcatatttaagatcgggataatctccaatttttttatttttggcccaacaatgattgatgaaa

SEQ ID NO: 25170 - DNA, 343 bp, Glycine max
  unsure (1)..(343): unsure at all n locations
agctntgaagtgctgattttcaccctctcactaagcgcaccgcttcagtccatctgctgagtgagaaaagtcgcgctaagctgaaattcactaatgcacgctaagcggttcagaattgcgctaagcgcacgagcacgaacaaagccacctatttaagcctgaaatcagattttggaaagggagtttggccttttcttgaagcttctgcatgtctaaagagttctagagagagaaaggtccaagttccagagagtttgagagattttgttgtgtaaagatctgcaaagaccagagcttgaagtggaagccttcctgagagcttgagatgagtttgtgagtgatt

SEQ ID NO: 25171 - DNA, 274 bp, Glycine max
acccacccagagggaagcccccgaggagcaacaccgaacacaactcggccgggcaggaaatacaacagcaacaaggaaccacccaccgaggccagagccaagagaacaccccactcccaatgacgaacgaaaacccaattgacgcccctcaacgccaaccactaggccgcggcaactcccggaaagggcctccaacccccacagccaaagcggtatgacccaagacacaacccgcacggaccaaggggcgggcccgagggcaaaccacagaaaa

SEQ ID NO: 25172 - DNA, 438 bp, Glycine max
agcttataatatatcgaggcgctcgattttgaacatcggaagctcttgagaaattcaaatggtcataacttttaactcggagttcaattcatgcgcatcacatatagagacgctaaaaaatgaacaacggaagctctccagaagttaaaatggtcataagttttcacactgatgtccgattcaggcttatattatatcgagacgctcaaaattgaacaacgaaagctcttgagaaattcaaatggtcataactttttacactgaggtccgattcaggcttataatatatcaagtcgctcgaaattaaacatcggaagctctcgagaaattcaaatggtcataacttttcacacggatgtccgattcgggcgcatattatgtcgagaggctcgaaactcaacaacggaagctatcgagaaattcaaatggtcataactt

SEQ ID NO: 25173 - DNA, 398 bp, Glycine max
  unsure (1)..(398): unsure at all n locations
ntctggagtagaaacatgggaccaactcattttatttcaaattggaagtcgtatctagtcaaggtcttagagaccatacaagtttcctaacgatttctaattatgtgggccattaagtctatcatatgctgacaatagccgagaagcccatgaatctcttcgggggcggagtaggtgtctgccatcgccttggccttggctaacaatcggggaagttcttgactcccgttcaaggtaagagcaaaccgatccatccacatggttgcctcttggtgtaaagagtcgatcacccttcctctagcctctttttccgcgtatacttgggcatattcatccgcaatcctatgctcgtgggccgcggctagacctaactcttcttggtacttggcgatgatagc

SEQ ID NO: 25174 - DNA, 401 bp, Glycine max
agctctgatcacattcatacgacaattacttattactcggatgtctgattcagtcccgtaatatatcgagacgctcgaaatggaattttgaagctctgagcaaattcaaacgacaatcactttttactcagatgtctgattgagtaccgcaatatgtcgagacgctcaatattgaatactgaagctctgagcaaattcaaacgacaataacttgtcacttagatgtctgattgagtcccgtaatatatcgagttgctcgaaattgaagaccgaagctctgagcaaattcaaacaacaataacgttttactcggatgtctgattgagtcttgtaatatatagagacgctcaatatggaataccgaagctctgagcaaattcaaacgacaataacttctttac

SEQ ID NO: 25175 - DNA, 314 bp, Glycine max
actcagcttagttataatacgactgtttcgatatatttcttattcaaacgacatccgtgtcaaaagttattgtcgcttgattctggtcagagcttctattcagaatttcgagcgtctcgatatattactacacacaattggacatccgtgtaatacgttattgtgctccgaatttggtcataggttttattctgaatcctaggcgccacgatatattataggactcactcggacatatgagttaaaagttattgtcgatgtatctggtacgagcttccgttttaattacgagcatctcgatatattacgggact

SEQ ID NO: 25176 - DNA, 420 bp, Glycine max
agctagcgatttagtattcttaattgtttggtaaaaaaaaagcagcggattcagtagcacgggctgcaataagagctcgatgtgcaaatccagtgctacaaattctaggtgacagcttacatccttagtttttagtgggtgtgcatcaacatctgcaaatcaatgactcttcttcaaaggaatccccattattcactgttgtgtgttcatgacacacatcgtaacactgcagtgcacgtttgcaatccataagttctaactaatgtatgactatctcctatgtagagaaactttcacttgtgtcttcaaaatttcacaatcactgaatcacatgattccaaagttacagcacaaccatccagtctgtgttaccaatcccattcatagcatcaaaagaagaacattcagtctcgaaaacag

SEQ ID NO: 25177 - DNA, 520 bp, Glycine max
  unsure (1)..(520): unsure at all n locations
acaacttcgcaccaaatncacnactaaatgtaatgacagaggagatgaactaagtgnttcgacttaaacacacaggacacggaatttgnnnnnttgacctggactcaggacactaaaaactacactnnaatatgnagggagaagggagaagaggatttaaattaaagaaaanaagagaaggggacaaaggggaaagaaatggaagaaagtagacaaaatgagggagggagtaaatagaaaagtgaagggagtgctaagtaaaaagaagaaagggaggtatgaaaaggcgaaaacaaagaagaagagcgcacgaggggatgacaggaaagaattattgaaaaaggagaaaagggaaaagcaaaggaaggccaaggaaaaaaagagaggaaggaagagaagaagaaaaaaaagaggaaagacgatgaaaaggcaaacatgggagatgagggcaaaaaaggacaaaaaaaggagtaaggggcaagaataaagtgggtgacaagaagaaagaggcaaggagaga

SEQ ID NO: 25178 - DNA, 420 bp, Glycine max
agcttgcatttggaattgcgaaagccttactccatcattaggattagtacctgacatctcaaacaaacaaatcaaacgtaacaagacaattatagttgctggttgaatacctcacccactcaagtgtatcacacaattatggcttttctctaatgaaacactcttgccttttaccactctaattccccttgagttcttaggcaattcaagagattatggccacaacaaagaacaattcaccaatatgtgtaagggaaggctagacaaggaaaaggttaaccaagaaaaaggctaacaatgtttttaggcacaaatgaaggaaataaaattcagaatttaggaattcaagtaacaatccttcatgcaaccaatatattaccttaaagagttttttttttaagttcttcaagcatgaaccat

SEQ ID NO: 25179 - DNA, 386 bp, Glycine max
  unsure (1)..(386): unsure at all n locations
ntgcggatttggtcttcgccagtgaaaggatcgaagtggatcttaaaagaggcaaatttaatcatcctgcttagacgaatgagaaaactggggcaaataaagagggtgaggatgagggagaaacccatgatgtgactgccattcctatacggccaagtttcccaccaaacccaacaatgtcattactcagtcaataacaaaccacctccttacccaccacccagttatccacaaaggccatccctaaatcaaccacaaagcctgtctaccgcacttccaatgacgaagaccacctttagcacaaaccaaaaaaaacaccaaccaagaaatgaattttgcagcgaaaagcctgtaggattcaccccaaattccggtgtcatatgcta

SEQ ID NO: 25180 - DNA, 430 bp, Glycine max
  unsure (1)..(430): unsure at all n locations
agcttgaacagatgtattttttatctttgaaaactcacagcttcaagtgagattatacaaacttctaaagtctctctcatcttgaagcttcaacaactttaacacgtacctgctagctgtatttgcctgtagtgtttgaatacaggttttaatacatggtttagacatatacatgtatatataaaaagtagtaacaatgtgctttacctgtacttgatataatgaaacagcttccacaagaacaccaatggacaaaccaacttcaactacaacaaagtaattcaccttcacctggagttcatataatgagtaatggcattagaagaagtcaaagccaaaccaacttcaagtacaacaaactaattcagctttttctcaaccaaactatgtcanactatttgttgtctattaaaagtgctagttattcatg

SEQ ID NO: 25181 - DNA, 392 bp, Glycine max
tgaaggaaaactggatgcattggttaacttggtaatttaactggccttgaatcagaaatctatacctgttgcaaggtttgtggtttgtgctcctctgctgaccaccatacagacctttgcccttccatgcagcaacctggagcgattgagcagcctgaagcttatgctgcaaatatttacaatagacctcctcaacctcagcagcaaaatcaaccacagcagaaaaattatgacctctccagcaacagatacaaccctggatggaggaatcaccctaacctcagatggtccagccctcagcaacaacaacagcagcctgcttcttccttccaaaatgctgctggcccaagcagaccatacattcctccaccaatccaacaacagcaacaacc

SEQ ID NO: 25182 - DNA, 429 bp, Glycine max
  unsure (1)..(429): unsure at all n locations
agctnttgtccaaccattcttgacttttctttcaattatgcgattattttattaaaatagttaactttatatcggcatttcatattatatatatatataaaatctttataatttttaatttaataaattaaaaattatgtgacaaaataaatttattaacatgacaaaaacatgtttataaagcaatagttgagataaatccaaatcgtgttacattcggtgtttcatataatcaagcgaattattaagtaatgaatggtcagtttaatttttagcttaatataattaaaaaattgatcaatcacaaatgttaaatgggtcaattacaatgtaaaattgctcaattattttaataataatagtcttaaaaaataattaataataaaattagttaataacattatattatggaatggatcaatctactta

SEQ ID NO: 25183 - DNA, 395 bp, Glycine max
  unsure (1)..(395): unsure at all n locations
ntattccccatttaatgtcattttataattaagcattttacaatttgaattatcttaatgttctaaccgtgcttattatttacaaattttatcctcagatatttacactattgaattccaaaaaaagaggtttacctcatgctcacattcttttgttcttacatccttccaacaagtatccaactcctaaagatacagataaaattgtctcaactaagctaccagatcaaaatagagatccaattttacatgagtgcatcaagagtcatatgatacacggtccatgtagaccagctaatagacattcaccatgcaagaaagatggtaaatgttctaaatttttccataaaaggttccaataaaaaaacatttgttgaccaggacaattaccctat

SEQ ID NO: 25184 - DNA, 421 bp, Glycine max
agcttgtcttcatggggaatagagtgtaaactccagtggaagcagtcaagacttatcgtttaaaacttgacattagacatcatttagatttactgggaactttttatgttcctagtttatctaggaatttagtttcattatctaaacttgatgttactagatactcttttaattttggtaatggatgtttctgtttatttaagcataatcatctcattggtactggtgttctttgtgatggcttatataaattgaaatcagatggtttgtatgctgaaacctctttaactctgcatcataatcttggcactaaatgtagtttagtgaatgaacgatctactttcttgtggcataaacgtttaggtcacatttcaagagaaaggatggaaagattaataaagaatgaaattctcactgatct

SEQ ID NO: 25185 - DNA, 391 bp, Glycine max
tgctgtatgctagctatcatgatttcatttgtatttctcaaaatgtattctttgatatccttaataaaatgacatgaatttgtttccttaaaaaaaatttctatagtgccatgtaactaatatgaaagtcacaagaggtaaagaatagtaaagagaaggttaaaaagtggttgttgaaactgaggtttttcacaagaggtttttcattaaagcacaaaaggtgcagtatttgcttgcagtaactagcagaaaacttgtattatactctttggcacttctcatagatttttttcctctttaggttcaactttaaaataagattaaacaggaatccgaacaatttatgttatgggaagcttcacgtgaaaaagaaagtcctccaggtaatgca

SEQ ID NO: 25186 - DNA, 414 bp, Glycine max
agcttgcttggcatgcacatttcctttatcttgatttccaatatgtgcttccctgttgtttatgactctatttttcatcatgatgttgaattcaaacatgatttcttattttcttcaaaatatacgataaaaaggccactgtttccgttgagtattatgcaggattcagccataatcatttgaattcgttttccataatttgttcataagtcatagatcatagtttacaaatctgatttataaaagtttcaagttttccacttaccaattccttcatcgtcgctatggctaaagtttcaagctttcaatatatttggttgcaaacaaggattgtgctagactgctagattattggcgagcttccactcctatgttggagaggagaaggttgagtacattaagtattctgatcct

SEQ ID NO: 25187 - DNA, 376 bp, Glycine max
tgccacccagctcgcccaggctagctaggttggtttttgtgccttctggggaacttcctggaaggcccaagtgggcctggttgctatttgaaccccccatgtttactaaatacaccccctgccttttttttgctgattcttttttccgtaacgttacggaactttacgaatttcgcaacgatgctcgttttctttccataatgttacggaaccttactgattatgtaatcatcccttttttggctttcggaatgttacagaacttcaggaattgcgtattaacacttccttttgacttccggcatgtcacggaactttacggattgtgcagcaatgctttcttttgacttccggcatgtcacggaacttcacggat

SEQ ID NO: 25188 - DNA, 418 bp, Glycine max
  unsure (1)..(418): unsure at all n locations
agctntgttccaaacacttctttggttctgtttcttcctcgttttttatcacaagattgccactgtccaaaagcactactacaggattctgtgcttgtttgtgagagttgttggtgtaccagacaagatacgcattttgggtgagaacaagattgcctgtgttgttgagtgttatgatacccgaggaatcattgatggggttggccttattagcaacccaaacaactgtctggattgggatgttcttgtaccaaatacccacataacgtttatgggaataacctggtgatgtgccatcattttcttctattttctaaaccctttttgcaccattttaattattgattgatcttaattgtcaattaattaggcagttntattatttgggcccattaagctaatttgatgttnttaatct

SEQ ID NO: 25189 - DNA, 384 bp, Glycine max
atagactgacctatatatatatatatatatatatatatatatatatatatatatatatatatatatatatattattttttggtatcagtatataatattattttttggatacaattaattttttttaaaactactagattttgattacacattattgctccataacttatattcctataatcaagtaagactttaattataatttaggtgtaagtcatgtgtccttttatattctttattatttttattgactttcctattcctttaaaaagactatcaagccaggccagatttttaaaaatgtcataccacaaggtctgagtctaacctacgatgaatctttgatgtgtgagccttttaaaaacctttttaactgtgaaacac

SEQ ID NO: 25190 - DNA, 900 bp, Glycine max
  unsure (1)..(900): unsure at all n locations
accggcgcaccacaaacagcccctacgaagccccccaacgaacaacaacaccaaccaaatccccagaccgcgaatctgaacctctaaacacccgaccttaataacctccggcagcagcaaccacctaaggaggcccgggttatatgttacagggatcaccgagaaaccgaagggcgagggagagaaaaaacgaaatcagcgctcaaaaaaagcacctcgaatccgagacaaatcttcaaatgaccaaacttgaaaaaaagcacacgcatgacctctatttatgacctaagtgtcacccaaagtggagggaaattgaaaccaattcaaattccacttgaattagaaatagaaattgtgagagcacaaaatttcccacaacttgatgacctacccgacatctttaggtgatgggaaacgagcgccactgaatcacaaataatcagatntccccaggattgcacacactcaacgcggggcaatttggacgaacaaagaagggccatgtaaaaagccatttaaacggaccatggccacaataagttgtgcaacctatgattgacatgtgggacaaccgaaagctttcttaaccagatatacagatggagaactaaattctccccccctacaccacacatcaaaggacttgcaccatacccggcctggcgaaaattacaaaaacacaacccctaaaaaccgaaacctagtcaagggggccctaagaaacaaaggaccgcacaaatcctataacgtctaggggacccgatccctacggaatgggaccccctaaatacgaggcacccaattgaaggacctggctcggcctaaccacaccccaaaaaaatacgggaccccagccctggcgcaatggggcccaataaaactaaccaagaagagccaccg

SEQ ID NO: 25191 - DNA, 394 bp, Glycine max
gatgacaaatggtccattataatgatgtcaagatcgagtcaacatgttcaagatcaagattaaagaaaagacgtcaagatgaatcaagattcaagagaagatgaattcaagattcaagagaagaaaccaagaagcaacaagtcaagacttcacaagggaagtattgaaaaagatttttcagaaaccaaacatagcacaattttgttttacaagaaaagttttctcaaatttttctaagttaccagagtatttactctctagtaatcaattaccagtttcctgtaatcgattacctgtaatagattttgatttcaaaaagttttaactggaatttcaacgttccaaatggatttataaatggtgtaatcaattacaatatattggtaatcgatta

SEQ ID NO: 25192 - DNA, 413 bp, Glycine max
agcttgtgaaacttctaagctatgttttttttttgatgcaattgctaaagaaaaatctactcttttggaaaactttcaggagttggaaaaaaaactgataggtctacaaaaggatctgaaggagctaaatgaacttcacaatcatcaaagtcaagaaagatatgatctatggacagaatatgcacaagcacacaaatattatgagaaccttaaaataagtaaacataatctttgaggggaatgtgaacaatgtaaaaagatctatgaaattcctgaatgaccaaattttgaaaaatgaataattcaatggtcaaccttagggtgctgcgaaacttcatgaggaaattggaaccctaaaatctacattggccaaatttgttaaaatatggaaaattccccccaattgatctaat

SEQ ID NO: 25193 - DNA, 409 bp, Glycine max
gacaacagggagtgaagattgctgaaaaccctagccttgcaacatgtcctatggaagtagacacggagatggacaagaaaatccgcagtatggtgagtagcattttgaaagaagcctctgtgcctgaagctgatgaagatgttccaacatcttccaccccgaatgtttctatgcctgatgttgagaaagatgttccaacatcttccggcccatatgatgaagtactgtcttcccccagcaaagagagatcaacagaggaagatgatcaagccgcagaggagacccctgcaccaagggcaccagaacctgctccaggtgatctcattgacttagaagaagtcgaatctgatgaagaacccattgccaacaggttggcacctggcattgcggaaagacttcaaaacagaaa

SEQ ID NO: 25194 - DNA, 399 bp, Glycine max
agcttgttgaaagaatgggcatctgttttccttttttggtcaatcaccgaagattgataagtaagtgtttgagttacaaaaggaaaaagtgcatttgataattccattatctctggctaatgaggttctttatgaagtttttgaagaaatgaccggtgttatactttggctcaaattggagaaactcttcatgattaaatcaatttacaacaaagttcttttgaaacatgtttgtttggcctcctaataagggaaggtatttcattgaaagaacatcttgatgaacaaaactttattttgatggagctacccgacattgatgttaagatggaagacaaagatctggcaaagattctgttatcctttcttcctcctcccatgacagttttatgagttttc

SEQ ID NO: 25195 - DNA, 361 bp, Glycine max
  unsure (1)..(361): unsure at all n locations
catgcactggtgcatgtgcgcatcatatgacttggtttggtctgtgaaatgaaattttggatgagccatgttggttctctggtttaggaagtgtcaaatgaaatttgctagtagttttctgctcaggtgttggagcttttatgcaagctttggagcaatttctgctagcaatttcctttgcatctatacaattttcatgacagtaaggaactattgatatggactaggaccactgttaaatcttatagcagtttgtagagtttgaaaaataatcacatgatttaatgtcctgtttcttctctttctcttataaatntattataaatttacacacttgtttggagctggaggttcatgtatt

SEQ ID NO: 25196 - DNA, 555 bp, Glycine max
agctttgtataatgagaatgtgtcctttttttaagctttgaaatttggcatctgaagtctgagagctctgggtagataagtctgctaaagctggaagtggggctaaagtagaagatgcagggatgccagctattggtgcaaagaaagagggaacatcagttgctctgagcttgatcttccttgcctctggaaaattaactgtttggtcattcgtattccaatagttccttatgatataagctaagtcaatggtcagccttaggttttcataggaggtaagagcatcagatcccactcccctcgatctacacaaggctgtgattaaagttgggaagtgtggcgtccctaaattaatgactggtttgatagtaatgatttaaataacaaaaaccatgggaattttttttcttcttttcccttttcatatctttctcgttttcacaataactaggtgtagaaggaaaatcctcactataaagtcctgaatggccagttcacaactctattcggagtcatttcttttttaccgctcataattgtctacattattttgct

SEQ ID NO: 25197 - DNA, 313 bp, Glycine max
tcacggtaaatatagacatcccattcctaggctagacgatatgttggatgaattgcatggagcctgtgttttctctaaaattgatttgaaaggtgggtaccatcaaattaggattagagagggggatgaatgaaaaacaactttcaaaactaagtatgggctgtatgaatcgcttgttatgccctttgtgctaaccaatgctcctaacactttcataagattaatgaaccatgtgttaagggaatttctaggaaaatttgttgtgggtattttgatgatatcttgatttacagcaaattccatgatgaacatc

SEQ ID NO: 25198 - DNA, 337 bp, Glycine max
agcttaaaaagaatccgggatccggttgccgctaaatctcatgatattcccatttatgtgacaaaggtaatgattttctaaaattgtgtttttagttaaacagctatactttgtcataacttttgctaaacaatattctttttgtcttctagacaagttctttggagcatgtagcaaaagccatacgggcattagtaagtgatcatgaagatggtataaaggattctgaactaacggacaatataaaatcctcagataagattgacgctgtgagaggaatataaatatatattagagttagaacatatatcctcttctctctttggggtttgtgtac

SEQ ID NO: 25199 - DNA, 405 bp, Glycine max
catgtggtactaggtggcggtcgggcaatggtgcacaacaagttttccacatccacaatgcgcgcataaacccaccatcccctattgcccacctccaactgagctcacgtactcccacgtagcccgtatcctcgtttctctcaacaccgggtccccatcaatcctcccaagcttccccaacatcaaagtaatacaacattcaaacagcacaagctatcacaaccaagcaaaacagggcaaaggcagaaaattctgcccaaaacaccaaccaaaatcatagcttttctcacttaaagaccccagtaacaattccttcgatccaattcgttaaccgttggatcgactccaaaattttactgaaagtctatagtacataagcctacactttggaccgtgggatctact

SEQ ID NO: 25200 - DNA, 373 bp, Glycine max
catatcaaagaacaaaaaatgttgaaaaaaataaaataataaatatattaattattttaattaatttttatcatttataaatattaaataacaaatacttattaaaaattgaatgtattacattaaatttcgaataattatttatttagagaaaaaataaataaaataaaaattaataatatatgtataaaatatcaaaataaatattaaaaaaaatgttaacaagttggtccgtccgattttttgatgagtaaaaaatggagtggattaaagtgggttgacaggttgaaaatcttcgtataactcaaaaaaaaaagttgattgacggattgactggtcggattaaatccattttgtcactcttactccacac

SEQ ID NO: 25201 - DNA, 407 bp, Glycine max
gtgtcttatgaatccccctgtgcttatgccaccagtacctggaaggcctctcatcttatacatgacaatcttagatgagtcaatggggtgtatgctggggcaacatgacgaatctggaaagaaagagcgcgctgtttactacctgagtaagaagttcacgaactgtgaaatgaattactcattgctcgaaagaacgtgttgtgctttagtatgggcatcccatcgcctaaggcagtacatgctgagccatactacctggttgatatccaagatggacccggttaagtacatctttgaaaagccagctctcacgggacgaatcgcccggtggcaagtcctgctatccaagtttgatatagtttacgtcacccaaaaggcgataaaaggaagcgccttagcagattatt

SEQ ID NO: 25202 - DNA, 592 bp, Glycine max
agcttatccttattgttgtaggtgtggttcatgtctgtgtaaatagacaaataattcatttctagaatagttcatttttctttaaaacgtggtttataaagatcaaaacattttcaaatcttggttttggttcaaaacagatttttttttccctttcatttgttcaccaaaaaatgcacacgtttttaacttcatttaattattattgattaaaacattttcatgttttgatttgattcaacacacgtttgattttatttcttctttcatttactcaccaaaatttggaacatatataatcgtattatataagaagggaaacacatttaaatttttgcattaatttttataaaatattttttattagaaatcaaataaaagtataaattaatatgaaatattgtacatttatttaagaaattttggggttttaatttccatcaagaattcttacattatgctttttattataccagaattttcaggatttaattaaacttactcgagaaacaaaacgattttcaatggaaattttaatatttttgggcatttgtttaacgttaatttaatgggtttgagcaatcatgttttt

SEQ ID NO: 25203 - DNA, 408 bp, Glycine max
tgccccatatatatccacggaggaaatgcttaccacctcgaaagactggaaagcggtttctaatgactcctctgcggcctccacataaggcataaaggatgggcagttcaccaagatgtcttcctcgcctgatacgatgaccagatgcccttccactacgaatttcaaattttggtggagtgtagagggaacaactcccactgagtggatccacggacgccccaacagacaactgtaggggagttaatgtccattatttggaaagtaacttggcatgtgtgagggcctatctgtactgggaggtcgatctctcccctaacctctcggcgggtgtcgtcgaaggcacaaaccaccattgaactcggctataggtgggaggcattgaatggtaatttctccaaagtgctc

SEQ ID NO: 25204 - DNA, 633 bp, Glycine max
  unsure (1)..(633): unsure at all n locations
agcttgctgcagagtacaacatcacttttgaaataggctttagataatttagcaatagtgtttgctttcagagagaaagaacataatcatacaatgagaaaacacaacatccatgctataaatttaccacaaacaaacaaacagatgccaagaggtttgagataacagaatgcatgtaatcatgtattgacctaactatgttcaagcaagacaattatagtgttgttgatcagcataatccagaaaaacccatccaaattaggtccaactgtctcagagacaatactaatcatcaagtttactttgaaagccttttcagtttgccagaatactgctacaggagtcacagattattaaaggcaaaaaaaacttgtaaccataatcaatcaacttaggaataccaagcatcattgaattcatagcataaccctcatttcaattgatctggaacatcctcccaagaccaatggatgtatggatcagcattcatcagcttattgaggccaaaataacttgaataagcccttggaaatgtgtatntcattacatttaattgctaaaaaccaaatatattattgaggttatacaagtaaaaaacactttcagtgaactgtgagaaacctttccttgtac

SEQ ID NO: 25205 - DNA, 362 bp, Glycine max
cttccctatttgatcgaattctgtatattgtggtttttccgctaagcatcacaagggttgactggagaattttttaactatacctgcactgttgctctgtgctgaaacacaaatggttacatgtttcagtcccccttccttagtggatgactagtttcattatctgcacatgcttataattatgtttggtgttgcagtatggtactctagccaagggttacctgtatctttgttgcttggactagtgaatggcctgatccgaaactcaacttatctataaggctttcttttccttttgatctccattagtagaacaagatgagaagagtcttttgtaagctacgctaactaacttttttttt

SEQ ID NO: 25206 - DNA, 548 bp, Glycine max
  unsure (1)..(548): unsure at all n locations
agcttgtgctaagaatgtcatgatccttttcatcatattttaagaaaattgaatgtcatgatccatcacttctctgcatatatatttagtattaagatgtgtaccaacaatcctaaaatgttctgtgcagatattttccattgaaagacactacacaagattagagactccgaaattaattttgttttatgccaattgctattatgctttgttgtgtcttgctaaatgcatatttaatttgaagcaacttcattatttttgtgttatctgttaatggtttaattggataatagtttacaagccaggtaatatataatttagatatatgtgcagagatgtaatattgtcatgtaaattttaatatttaattattgttatgttagagtatgtgcatgcaattgttttagagagggctggtgataagtgaagctagctcacaaacaattcaagatgcagttagctttataagctaggctcatgagtcatgattngagtctgatttgaatttttaccctgtttagtaaatgagctgagcttcagcttttaat

SEQ ID NO: 25207 - DNA, 352 bp, Glycine max
tttccctccttcaaggaatcttcttgaagccctctcacatacgccacaccatacttggcattcatcagagggtcttcccctgcagtctcttgccctctcccccaccgtggatccctgaaaacgtttatgttcggagcccagaacgtcatccccgtcgcttgccccgcattgtacaccgccctcgcttccttcccaatagtcttcagcaacaatgcagtaacataacaccaacatgtcaataatgtaattcgataaagtcccacacccgagtaataaagagaagatgaagtgtatataaagctttgaggtgttggatgttagtgattatgcaactgaccttgctgatttggta

SEQ ID NO: 25208 - DNA, 143 bp, Glycine max
ccggggcggcaagcttggaggaaaccccctcaccgtttttcctataaataagcaaaaggggggtggtacaaataaacctcatccccctggctatgaagatcaacaggtttgggggaaaaaaattggttccgcgaagaaaaaca

SEQ ID NO: 25209 - DNA, 404 bp, Glycine max
tcaattaccacaactctgtaatcgattaaaacaaagagttgttgcctctgaagaaatttttctaacttagaaactttttcttcacacaaaccatgatgatgcatgatgtctgatgcaatgcaaatatcaaatgtactaagatgtcacaaccaagttaacaaccaatacaaatgccactcaagggagttgggcatgtaaaagccaaaacttcttcaaaacttgttcaaacttttccttgagcttcaagctttagcctttaggttgttcaccatgttgctccccttatctctaacaatagtttgtcataattaaaaccaaggatgtggattcaatatgtttaacccacaaatttagagaactagagtagtagtctcgaataacatagatccttgttgataattcgc

SEQ ID NO: 25210 - DNA, 459 bp, Glycine max
agcttgatcctctatttcacgcttgtatatagctgcgacgtcaaagggttctccactggaattggtttgccctagagaacccaccaaacattggacgtgacatcaaagagcaagaagagacgaccaaggcagtgagacagcactgtgttgagtgtacgagtttgcctttgggagaagagaaagtgtttcattttgagaggcaaaggaaaatatgttgggcgcattggtttgacaaaattttagacggatttagggaaattaaaattgatttattttttattttttaaaatataattcctaactctacgatagtttcttatacctgccgcaaacactactcaaaattatgaaatttaattaaaatttccgcagtgctcacttgaacctccacaatcaaagagcaacatacgatacttttaagaaaccaccacatttgccgtaataatcaagcgacgacga

SEQ ID NO: 25211 - DNA, 404 bp, Glycine max
gagcttagttatgagaggggtgtgtgtagctaagctctagcttctcaaggaagttttctcaaagaagcttctcaaggaagtttcctcaagaaagcttctcaaggaagctacctagtctataaatacaagcatgtgtaacacttgttgtaactatggatgaatgaaagtcttatgagatacacttcaaagttccacttctttccctcttttattccttcaatttcgtgctccccccttctctctttcttttcctccattaaagcatcctcttcaagcttcttatccaaggcaattcttggtggtaaagctccttcttccttggcttattccctagtggatggtgcctcccctctcctcttctcctttgccttccgctgcatctccatggtgaaaaatcaccattg

SEQ ID NO: 25212 - DNA, 464 bp, Glycine max
ccatcatcatgaactaacaaaaccaagcaaaacagggcaaaagcaaaaaactctggccaaaacacaactcaaaatcacagcttttcacatacaaataccccagtaacatttccttcgttccaattcgataaccggtggatcgactcgaaaattttactggaagtctctattacataagtctacattttgactgttgggatctgcaagaaaatgtccagaaccccatatggactacccttttcacaaccagccctacacaagcatttttgtgcacttatacaaaaatctgctgcacatttcaacagcaaaatattgcataaagtgaagaatttcaaaaccactctttccctcatacaattttgcccaaaatgaatcctacaggtcccaaaatatgtacccaatcaggtctaaaccaatggcaagcctcagaccaaggcaacacaaaatctacggatccaaaaccc

SEQ ID NO: 25213 - DNA, 337 bp, Glycine max
accttgaacaagcaatcaactcctctttattaaccatgctatgtgctcgcgactggtccctttgttcccttcgcaacttgagttcattattgctaccccatagagctccgcgaaatttgttccggccatactcttccttgcgagccctcttggtctcttgttcaagggctcttgcggtaattgcattttcttcccgtaacccggcgcactccttccgaacgtgtgtagcagccaacttgaacttctccttggcgagatttgcctttcctaactcgcttttgagagtttggacttcttcgtcctcttccggtgcttcaaaatactcttcgctgacgac

SEQ ID NO: 25214 - DNA, 397 bp, Glycine max
aacatttctaaatgcaagttcacattcttgttctttctttatctaacatacacacttgctcaaactcatgataagaaacacaaactccatcacaatcatgcactcaattcaaaataaagacatacacccatattcataagtcaataaaagtgcttcactgctatatcataaaaaaaccaagttaaactgttcaaaattcttcagaataagcataccaaccattcataaataaaactagcagtgtatgtaaatataaaggaaatattgtacgagaaccataattataataataacccaaaaagtaaaaagtgacatcaagaatcaataatgtcacaagtgttttaaactggggattccgtgagagcaacaacttctctagatgacgaattagaaagat

SEQ ID NO: 25215 - DNA, 430 bp, Glycine max
tctagggaagagagataccatcacgagcacatagcatgtgtcttgaaagaggagttagctgcttgctcaaggtccaaaagaaacttgtctcagcatttatgcgagacagagaccaacatgttagccatcgtcagcaagtaccaagatgaactaaatctagccatggcccacgagcatagagtggcggacgagtatgcccaagtgtacgcggataaagaggctagaggaagggtgattgactcgttacatcaagaggcaacaatgtggatagactgattttctcttaccttgaacgggagtcaagaacttcaccgattgctagccaaggccaaagcaatggcggacacctactccgcccccaaggagatccatagacttctcagctattgtcagcatatgatagacttaatggcccatataattagaaact

SEQ ID NO: 25216 - DNA, 375 bp, Glycine max
aacccaccattttttctatagggttgtggttgggggcaaaattgaagcccctccaaagtgttttgcaggggtataccaccaactgcttgccctttagtggcatatccgaagcaaggctcgaaatccgctaaattggggtggggaatttcatgtgtctcaatgagtatacgagtggagttattgacattatcactgggagtttacgacacattgggtggtgtataattgggaggcaagccatatggcgggaaggcatgcttgttttgaatttgcacataatgggggtcgcccgtacttcccaaatctttgcctaccatatctaaggatgaatgattcatttggttgaggccacaagggggcgtttggttcacctta

SEQ ID NO: 25217 - DNA, 424 bp, Glycine max
  unsure (1)..(424): unsure at all n locations
gagtagatacatggataaactcattcttgtcttatagttataactagncaagatctgagcgacaatacaaacttcctagcggtttctaatcatatggtccattaagtctatcatatgctgacaatagctgagaagtccgtggatctcctcgggggcggaataggtgtccgccactgctttggccttggctagcaatgggggaagttcttgactcctgttcaaagtaagagcaaatcggtccgtccacattgttgcctcttggtgcaatgaatcaattatcctttcccttgcttccctttctgctgatatcttggcgtactcatcctctagcctttgctcgtgagtcgccgctagacttagcttctctttgcacttatcgatgatggcccacatattcccttcagtctcgcttaactgttgggac

SEQ ID NO: 25218 - DNA, 350 bp, Glycine max
agcttaatctcatagaagggaagcgtttgttcaccatgagtcatgggcgtttatatcagaaaagagtgaagaacgcttttgacaagaaggtacatatgcgccggtttagcaaaggggacttggtgttgaagaaggtctcccaagctctgaaagacaacagagggaagtgggacccgaactacgaagggcctttcgctgtaaaagggctttctccggaggggctctggtgctcaccaacatggatggcgaggagctaccttcacccgtgaactccgatggtttcaagcgatactacgcttaggatctggggcaattgaggaagtcgctgcatgttcttttatttttgggtg

SEQ ID NO: 25219 - DNA, 336 bp, Glycine max
atctcgcctaataaatgataaaatgaatttcaaccgatcatttgtgttgtaatgtcgttttatcactgttaaagcaaaatctaaccgattgttcacattgtatcctcggttaaataaaaaaaggaaaataataataaaataatcaaaatatcttgaaaaaaataataataaaataatcaaaatatcttgaaaaaaataataataaaataatcaaaaaaatcaatcggacgtttttctttgaaaatttccttgaatgaattgactaataatcaaagtgaaactaaagctaaaatcaactcacaaaccaagctttgtccgcaaaagtcactcaaaact

SEQ ID NO: 25220 - DNA, 650 bp, Glycine max
agcttatatatttatttatctctatttattaataaactaaaatagtaattacattgtatttttagtttttactattttttaatacaagtaacaaaatattctacaaattaagagaaaactattaaaaaaattagctaaatttattaaagtaaaaaggaaaatatacatataatgcaatttctattatttataaatagatataaatagtttttgttatcttttattgtttaatttctacgtttgaaagtaaaagcattaagttactgtttatttagttgattttttaattcttaactaataatatatttaactaattagacattgtacaaaaaaattgtgttcaaaataaaaattatttttcataattaatttttaagaaaatggtaaattttatatcaataaaatggagaataattatgaacaagtcatcgatctatttatagcacatatattgataatataaataatgaaaaataaacaaacattataaaatattcattatgattttaacataatccattttggtattatcctaattggaaattggtgaattttttaaggataatataatattttttaaatatttttttaatcaattatggataatttttaaatattcaaaaataattgggattcaattaataaaaaaa

SEQ ID NO: 25221 - DNA, 285 bp, Glycine max
atgatttgagatatgacttgaattagtcatgtgtgaatttcttgatgtggatgttgagttaggtggagttttgttgagcaaagttgaaattatgagattttagattttaccaaaacctagttccgtaaaatccagatactggattcgttaaccgttggatcgtcttccaattttttctgaagcttcataagacatgtttctagagtctgaccgttgcgattttggaaaaaaaacaacatatgatatcccgctaagcgcaattccaatagagaggaagttgcgctc

SEQ ID NO: 25222 - DNA, 477 bp, Glycine max
agcttcccagatggttcctaacgaagattttttatgagaattatgaaaaagaattattcaagaaacatagaaggactatgtatatcaaagtattaaagccacaaccagaaatgataaaaaaggcaacaacattgattaaaaaacctaacacagttgattagaaagataattctattgaactgaaaagctaatacaccttattagaaagaataaataatgattaaattgtaagtatttcagaaccaaatatttgcaaatttattcccaaacaatgacaacaatgcataattataacaataatcctagtgatttcagtggggtggcaactctctgttgttcaacatggatggttgcgatgttcctgggttatgaatgatgtgaaagtgagtacataggtgcagggaaacaacaaaaaactgaatgcaacatagatgcaatgtggcattttttaattcttctctttttaacttttttttt

SEQ ID NO: 25223 - DNA, 325 bp, Glycine max
gtccttttgttgttactaatgttcttccttatgggacagctgagatcaaaagagactccacaaacaagagctttcaatgtcaatggacatctacttaagccattcctcacaaacccttctttaatggacgtagtggtgaaagagacttccttactccaccctactcttcctctaccatgacttagggagtttttctttcttatctcctttaattttattacatttgtctgattctattagatggtttaattgcttttaatcttttaattgtgccacattgaggacaatgtgttgtttaagtatgggggggagtgtgttttggttt

SEQ ID NO: 25224 - DNA, 446 bp, Glycine max
agcttggttttgggcaatggcaccctttctgacatccccaaggtctcctaacccccgcgacatatctccaggtaccactctgtggtcaacaaacaaaagtaggaagactgactcttccacgctttctcacatcaagcttagtggattatggggcacctgtcatatgtggtactaggtggcgatcaggtgatggtgcaaatcaactctcccacttacacaaatcaaacattaacgtaccatccccagttgcccaccttcaaattgaggtcacgcactcccacgtagcccgtatcctcgttcctctcaacaccgggtccccattaacccctccaagctttcacaatatcgaagcaattcaatttcaaaatatcatgaactatcctaaaccaagaaaacagagtagaggcagaaaactctgcccaaaacacattcaaatatcacagctt

SEQ ID NO: 25225 - DNA, 385 bp, Glycine max
  unsure (1)..(385): unsure at all n locations
gacttgatggggcctatgcacaatgcaaagccttgtaggaaagaggtatgcctatgttgatgtggatgatttctccagatttacctgggtcaactttatcagagagaaatcagacacctatgaagtattcacagagttgagtctaagacttcaaagagaaaaagactgtgtcatcatgagaattangagtgaccatggcacggagtttgaaaacagcaagtttactgaattctgcacatctgaaggcatcactcatgagttctctgcagccattacaccacaacaaaatggcatagttgaaaggaaaaacaggactntgcaagaagctgctanggtcatgcttcatgccaaagaacttccctataatctctgggctgaagccatg

SEQ ID NO: 25226 - DNA, 419 bp, Glycine max
ttaaacctccaataattttttgctttaccttctcttccattggtggttcttcattttttctccatgtatcttcacacatgtcttgtgctaaatgtttttaacatgattctttataagttccaccgattaaacttgctataaaagctaaatttgatttcctatggatcaaatttcttgttcttgttcttgaaccatgaattttgttgagtttaagttcctttgagttttgtctttgtattttttgtggctgaaaaataaatcataaaattcttacaaaaatattaaagtagaagaaaaccctcaaaaatctagagtgacttgttcacctattgtatgtatgtcacaaaaatcatgtctaaccatgaaaactgccacataagatttcttatgcggtgctgaaattaatttcttgtttcttt

SEQ ID NO: 25227 - DNA, 415 bp, Glycine max
  unsure (1)..(415): unsure at all n locations
ntaagcccaacatagatcgattaaaatgatgtcttaatcatttaaaacaacaaatcttgaaccataacaccacaaacacataaattgtaatcgattaaaccatgaggtaatcgactaaaatggaatatttcaaaaattgataaatgtcataccctaatttcatccggggaccattgtttggtggcatgaaaccttcgcttgaccacctcgaggtacttaacacccatcgttaggcaatccgtgaagttccacaaacatgctggaagtcgaaaggaagtattgttgcacaatccgtgaagttccgcaacattccagaagtcaaaaagggcattgtggtgtgatccgtaaagtttcgcgacattccggagagaaaataggtgtcgttacgtaatccgtaaagttccgtaatgtttcg

SEQ ID NO: 25228 - DNA, 426 bp, Glycine max
agcttgtccaaaataaagaagcagggttcttcttccactccagtgctcataatcaagtattgtcatttgagagcaaaacttaatgccttgggctaatgagcttcctgacaggttgacacggcatcatcattcttgaagccaaaacttaggttgactaacattaaaaatgttacgaatgttgttcataatccaataacaaatgagaaagaatgcttactaattccatagaaacaagaaaaagaatacacattcgttcatatttcaaaatctcaataaaaaaacttgccttcccataatatccattttcagttgtattttagtataccagattatacacaatgcaataatttccaaaaatacaaagagaaacccctttgtttttacagacctataccatacccataaagagaacttacattctattag

SEQ ID NO: 25229 - DNA, 322 bp, Glycine max
aagaagctgctgctcatgttcaacaatatccggtggagattaatttatcccagcctaatttgtcacaagatagtgacatggagttggtggtaaatatttttcacaaaaaagtatttttatctcaacctaatttgttgcaacattccatttttatatattacaagtgttattcatgtttggcatttgcatgtatgtccttgcaactattgttccaccagtagcaaggaataaactaaacataacaagagccaaacaaatgaaggttgctgataaagataatgcaatataaaaaatgaagaaaactgaagacccacttctttgt

SEQ ID NO: 25230 - DNA, 911 bp, Glycine max
  unsure (1)..(911): unsure at all n locations
accgcaccgacaactaggcaanaacgaacgaaaccaaacacaacacggaacgaaaacagaatcaaagataactaaagacacaagccgccacaccaacacatcgacacganaagaagaacattgaaccctgcaagacccccgacctcaaaaacccccgcggcaggcagccgacaccccagaaggaaacttttctaaaaaaacaaaaaaaaggaagggggggagcacccaaaaaaaggggcacagccccaggccacagaaaaaacgaaacaacgaacaagaccacaacagaaacgcacaaaacaagaagacccacaaaagaacaacaacacacaaccgggcctccaaaaagaaacaagccaaaggaggcaaagcccacgataaaagaaacagggcaacgcgcaaccaaagaaaaacagggaagagggagcagcagccaaccccccacgaggccaagcgggacaacaaaaccaaccaaaggcgaaacgaacccccggaggcaaaccaaacagaggggcccacagagcaacccggagaacagagaagaaaccaaaaagggacacaaaagggcacagcggacaagggaaaggcccacgcgcggaaatcaccaaccagcaaaaaacaaccaaaaacagcaaaacaggaaacactaaaaccaagtggcgatacccaaccagacgaacgaaccccgaccggaagaaacaaggcaacacgacgagcaagaacaaaacggcacgcccaggcgcaaagaacgacaaacaaacggggaaaacccccaaacccggagcaacggagggaaaacccgcggaaaaaccgcccacggaccaggggaaagagaaaaaacggacgggcgaaagacgcnaccaacagacaaacacaaggacagacccagacgaaagaggcgccccaacacc

SEQ ID NO: 25231 - DNA, 228 bp, Glycine max
tggtgaaatggaaagaccttccagactttgaaaattcctgtgagccagtggaaaagctcagatcagaatttcctggatttcttcttgagggcaagaagagttttgaaggcgggggaattgataagcaacagatagtatacacgaggaaacatggtaagggaagtgtaggggatcatcccactataggagtaactaacttattggggaatgtgtgatgggacatgtggc

SEQ ID NO: 25232 - DNA, 372 bp, Glycine max
agcttgtagcacggctggacatgatttatttcatggtttggtttaattaaaggataaaaatggaatgtcccacattattttcatgacacaaatgccacaatgatgatttggaaattttatgcaaaactagtcatgcatgcacctatgtcgacattcaagtgtcaaacttttatggtcatgtgatgtcagggctcaagattcatttcctctattttagtcaacccagtgtttccaaaatatgttcttttatcaatttgtgcattcatccaaatctattttgggtgttcaaaaaactttcacggcatttacccttcaggcgtacacattttttttcaaaaactgggtatgatcagtgaattctttaaagaaaag

SEQ ID NO: 25233 - DNA, 372 bp, Glycine max
tattccctaggggatggggcctcccttctcctcttctactttgccttccggtgcatctccatggtgaaaaatcaccattgaaggacctcattgaagctcaaagatccagcctccatagaagctccacaagcaagcttccatcagaacggtcggaatttattttaaccgaagttaatggataatacaattcaaacgttcgggggaaatttattttgtttttaagttaagcgagaaatgacttaagtaaaatggcttaagcacgtcaacagggggtataaaaagtgaacaaaacgagaataaaaatgcacgaaacacaatgtggaccactacgggtacatagaatgaatcgaaaagcttggttcgaggtactta

SEQ ID NO: 25234 - DNA, 430 bp, Glycine max
tgggcggacgggtccgcaacctaaactgatgtttgacaatttatggtggcgttttagcattcattacattattatcagcaattaagctgtactaacacccttttaatggcacatgtcactgtcacctaaaagaaaaatccctcacatcctctgtttagtacagagactttatacaattaaaatttttgtgttcttggagaacatcatatatctgttcattgacctaaatatctcgccgggtaaaggcttaaaatctctctggccataaatttccccccaagtaaaaatatgtgcgtaaaaaaatccctaattggccacgcaaaattttaaagatgaattctatgccaagcttttcttttcactaaagaattctctaaaaactgccctatggcaaaagccccagttgtttccctgactatacctttcacta

SEQ ID NO: 25235 - DNA, 402 bp, Glycine max
agcttgggtcgagggacttaccttttgtttatcgaagaacgatgaagaacgaatgaagaacgtcgaagaacggttgaaacctttgcgagattcctcacggaaaacgttacggaaacgtttccgaagcgcctcggcttagattttcttcacggaaaccatttttcccagcctattcgaaagagagagaagtgcctaaggggctgaacccttttcttcttcacttcctcccctatttatagcaaaataggggaggtggttgccgcccagctcgcccaggcgagccaggttgcttcctccagaagcaacagtcttctggaggaatattctggagggccccaaggggcctgggggctatttgcacccccctttttaataagtacacccccctctgctgttttgggt

SEQ ID NO: 25236 - DNA, 310 bp, Glycine max
cgcccttgacattaatggtttgaggaagtatctcaatcacatcgatctttgccttgcccacctctattccccttactgagatgttatgccccaacattattccttcttgaaccataaaatggcatttctcccaattgagaactatattggactcttcatatctctgtaatactctttcaagattggataagcacccttcaaaagatggcacacaaacagagaaatcttccatgaaaacttcaatgcatttttcccccatattagaaaaaataaccatcgtacacctctaaaatgatgtcggggcgttgca

SEQ ID NO: 25237 - DNA, 431 bp, Glycine max
  unsure (1)..(431): unsure at all n locations
gcttgtgtttgctgaatatgaaatttttttactaaaattcgaaggatcatatgttttaactcttgggaatggggaattatttatatcatacaaacaggccatgattcaatacctctatcaaaagcattgatttgtatagtttgagtgttttttttcttggttttagatagtagatactaaacaaaaaaatactaataccaagggggtctagctcagttggttgagcagggtgtgtaaatgttgtaaatctcctgataccatgttcaattcctatggattaaaaaaaataccaatgagacgctntaagttatgaattatagcataagggaagtctactaatgccagtgtggtttgtgtggtcctttaagtttgtccgtgctaagataattcctaaaccttttttgttatttaaaaaatgaccttgattccat

SEQ ID NO: 25238 - DNA, 331 bp, Glycine max
  unsure (1)..(331): unsure at all n locations
tgtactgtggttctntnatntagtttgaataaggccccatttggatcctcgtattgggagggggcaaaacgaatttgcagggcatggaggaaactctgccaggaggagagttggccattaccagccatccactggtaccaggccaaagctctgccgtccatgtaaaaggacgcaatggtgagtcggtcttggtccggggtgtgatggtattcgaaatactgagtgattntgaatatccagcctaatgggtccgacccatcgaaccggggaacatcgagcttgacgcgagggtgaggggatgagggtgaaatctgggaaacgtgtgggggtg

SEQ ID NO: 25239 - DNA, 259 bp, Glycine max
agcttaatgaaacaaacaaaagcatattttctaatccataacaattcaaaatttaatgagaagaaaaagaaattaatgaagaattggttaacctgtgatgctaacaaaggaagaagaagggatgacaaaggatgattggaagagaaataaagaaaatggaagagagattgacgaacggaggaaggcacaaaaacacgtatattatgaggaacaagagagagaaattttgagggttgaaatttttttaggacataattgt

SEQ ID NO: 25240 - DNA, 442 bp, Glycine max
  unsure (1)..(442): unsure at all n locations
tctcagcttgtatgagagttntattcaaagatctgtcaaatgtaaaaaaaataaaaaacacttgattgtccatttaaagtaacacatggtaaagcttcatagacactgtaacatgtggattttggaggaagtgggaagcgacacgtgaatgtattgcagaaagaaagtttaaaaaatgtgtaatattttgaattaatctatttttaaagtttacaattcattaaaaaaaatcttttaagaacaattatattgattgctattttaaattgaagtgacatgcatgtggacattaaataaagggtatatttggtgctcaacacaaccaaattgaggttgaaattatcaataaagaggagtagaagaggaattggcatgacatgatacttaaatgaaacaaattgngttgaaattatgttttttataaacaaaattattttataat

SEQ ID NO: 25241 - DNA, 543 bp, Glycine max
agcttctatgggggctagatctttgatcttaataaggtcattcaatggtaatttttagctatggagttgtagcggaagataaaggagaagaggtgagaggaggcaccatccactagagaataagccttggaaggagaagcttcaccaccaagagagtgctttggataagaagcttagagaggaagcttcaatggaggaagagaatgagagagagagagagagagagagtcggggggggggggtgcgaattgatggaaattagggagagaagttgaactttgaagtgtgtctcacaagtttctcatccatcaaagttatgacaagtgttacacatgtttctatttatagcctagcacatgggaaacttccttgagaagcaaggaaggtagcttccttgtgaagctagaggaagatagcttccttgaaaagctagagggaggcaactcacaccccttcaataactaagctcacccccatgcccaaatacatgaaagacattgggaagcttcctttgagaagctagagtgggggggggggggtctc

SEQ ID NO: 25242 - DNA, 309 bp, Glycine max
  unsure (1)..(309): unsure at all n locations
gtagttntgatatttatcaaatatgatgacaaaatgcccaaagaatgatttcaagattgagtcaacaaatcaagagaagtttgatttcaagattcaagagaagatgaattcaggcggttagtccttggcgaattctttttggcaaagggagaagagaatgaaaagatgaatagcacaagttttcaaggtttggaaaaccagaaaacttcagaaagccttttggtacaaagaggaagaagaaattcaaagagattcaaggcttgttaaggattgattgaatgaatgtaaaaagtatattgtaaagcaaat

SEQ ID NO: 25243 - DNA, 503 bp, Glycine max
agcttgttgttcctggatgcatctggtattggactcaacaattgctaagagaattgtctcaactttgtcaaatggagggagaactattttgatgaccatacctcaaccttcaagtaggatgtattgcatgtttcaaaaggtgtttatgctttcagaagggaaccttgtgtattttggaaaaggatctgaagctatggaatatttttctagatttggatatgccccaaccacggtcatgaacccctcagatttccttttgaatcttgcaaatggtatgttgtttgctctttattattttaaaaagtgtgaggtttcctttgttatttatgaaactttgtggacagaagttcaaaatctcatttatctattagtacctacatatatttggataaattcacttattctatttttcatgattgattaaatctataaattagattataagaattactagctttgtgacaagtcattcatttaagttcttttcatctcaatttttcatg

SEQ ID NO: 25244 - DNA, 384 bp, Glycine max
acttcattactgttattcagtattacaaatgagcttgttgcaattcttctagacttagagtgataacatgtaatcctcttgaacccttacctcccactctctcatcatgccgagactccggaaccctaacaggttttgccttttccatgtacttgaaacaaaactcaatagcttctttctcaatgtacctttcaacaatagatgctttaggacggtgtagattatttgtataccattttaagatcttcatgcatcactcaaccgggtacatccaccgcaaataaacgggaccgcaacatttaatttccctcaccatatgaacaatttattgaaccatgatgtcaaaaatgaaagaggaaaatatatcttccactgacatatgat

SEQ ID NO: 25245 - DNA, 468 bp, Glycine max
agcttgaaggtgtgtaacccaccattttttattagaatattggtaatgtgtctaccatcatgattaccatctccctttccatcattgggggtgccacttgggttgccatatccctccacctttgggtgtattctttgaaaaattcatgcccctttttgcacatgttctgtagttgcatcctatccggaaccatatcacaattgtactgatactgcctaacgaaggcaaccattaggtccttccaagaatggactcaggaaggttccaagttagtgtaccaggtaacggctacccccgtaagactttcttggaaggaatgtatcagcaattcctcatcttttgcgtatgcccccatcttccgacaatacatctttagatggttcttggagcaagtagtccccttgtacttgttaaagtccagcaccttgaacttgggaggggtgatgatattgggtactatgaacaact

SEQ ID NO: 25246 - DNA, 385 bp, Glycine max
  unsure (1)..(385): unsure at all n locations
ccttctgttggcagcaacagtcaagtcataagtatcatctgattgagcattttgttaagacttttggcaagtgtacaacttgtcgttgcaggtttcacatttataaaagagttcgtctcctagggacttgagttacttaactcattaggataaaggttattagtttaatagttatgtataaattcaatcgaatgtcattggttntgtcttgattaactaaaggcaacgtaaagtaaaagaaaagtaaaaataatggatttacagaaataacaaaaatacaaaaaatatggaaataacataatttagtgcgacagaaatacgtaaattatggaaataacaataacaacttgaattaatttatgaaaacatagaattggatttcatc

SEQ ID NO: 25247 - DNA, 430 bp, Glycine max
agctttgtatggtagaaggggtatgttctccctatgttggttagagcccggagaaggcctcaccttaggaccagaagtggtacagcaaaccactgagaaagttaagttaattcaggagaggatgagagctgttcagagtagccagaaaagttatcatgataagaggaggaaagatctggaattcaaggttggtgatcatgtattcttgagagtcactccgtggactggggttggtcgagcattgaaatctcgaaaactcacacctcgcttaattggtcctttccaaattcttaagagagttggccctgtggcataccaaattgcattacccctgtctctttctaatcttcacaatgtctttcatatgtctcaactccataagtatatctgggatccatcccatgtgatttgattggatgatggtcaaatg

SEQ ID NO: 25248 - DNA, 405 bp, Glycine max
acatgtggtatctaggtggcggtcgggcgatggtgcacaacaagttttccacatccacaatgcgcgcataaacccaccatcccctgttgcccacctccaactgacctcacgtactcccacgtagcccatatcctcgtttctctcaataccgggtccccatcaatcctcccaagcttccacaacatccaagagaaacaacattcaaacagcacaagctatcacagccaagcaaaacagagcataggcagaaaactctgccaaaacaccaaccaaatcacagcttttctcacttaaagaccccagtaacaattccttcgttccagttcattaaccgttggatcgactcgaaaattatactggaagtctttagtacataagcccacactttgaccgttgggatctact

SEQ ID NO: 25249 - DNA, 435 bp, Glycine max
agcttgttagaaactataaacaacattttttttgttaatactactaaaattaaagggggaaaagagtgagcgtttgaggaagacagtggttgatgacatgccttacctgtacaacaacctaacacgttcaatgcctgctcagctaacaaatggaaaaggggtatcagggagagaatgtatgagggctgctccatttcgatgcggctcactttgaggaagagagtagttgaggtctaacgtcgtaagggcacaacacggaggatggtgcactactagaatttatacatttaacatcgcacggttaacatcggttattgaaaaaaccgatgttaactcaaattatatactcaaaagcttttttccactagcgctcctagtatcgcaaacaacctttctcttcttcctttcacccgtaagaccctgtgaccgttgttt

SEQ ID NO: 25250 - DNA, 429 bp, Glycine max
  unsure (1)..(429): unsure at all n locations
tatccttatntntacctctggacttcactccccgtgccactccggaagatttaagccaagcccctacttttgaggggcaactcccgccttatgacgactatcccaggcaagacgatgaggaaggagatacccatctcggccccctgctccacctcaaagatccgtccccacatgaactaccccaaccgaacatagtccgccatatcccggcctcacccacacccgtaaaagaatctgttcccttcgcggaagataagggaaagattgaggcgctcgaagagaagttaagagcagtcgagggccttggcaattacccattctcggatttagcggatttatgtcttgtgcccaatatcgtcattcctcccaagttcaaagtactggactttgataagtacaaggggacgacatgtccgaaggggcatcttc

SEQ ID NO: 25251 - DNA, 504 bp, Glycine max
agctttttggagtagaaacatgggattttactcattttatttcaaaaaggaagtcgtatccagtcaaggtctgagagaccatacaagtttcctaacgatttctaattatgtgggccattaagtctatcatatgctgacaatagccgagaagcccatgaatctcttcgggggtggagtaggcgtctgccatcgccttggccttggctaacaagcggggaagttcttgactcccgttcaaggtaagagcaaaccggtccatccacatggttgcctcttggtgtaaagagtcgatcacccttcctctagcctctttttccgcatatacttgagcatactcatccgcgattctatgctcgtgggccgtggctagacctaactcttcttggtacttggcgatgatagctagcatgttggtctccgtctcacataaacgctgagacaagcttcttttggaccctggacaaacaataaacttctttttcagaaccatgctatgtgctcgcg

SEQ ID NO: 25252 - DNA, 294 bp, Glycine max
cagcaaattccttatttccagattggaattctatcaatagacctccaatctttaatggagagggttaccactactggaaaacccgaatgcaaatttttattgaggcaatagatctaaatatctgggaagccatagaaatagggccttatatacccaccacagtagaaagagtttcaatagatggtagttcatcaagtgaaagcataactatagaaaaacctagagatagatggtctgaagaggatagaaaacgagtacaatacaacttaaaagccaaaaacataataacatctg

SEQ ID NO: 25253 - DNA, 300 bp, Glycine max
agcttctgaacttttgggctgagttttttatagagaacatggctttgtgttttaagaaaaggcttttctttttttttttaaaaaaaaaaaagatgtgctacatgtcttcttttgaggggaacaaaaaggggcccactttttctcttgatgtgactcatacccagccacaaaaaaaaaaatatctgaccttttgaaacgctaaattcctgccctggttttgcgtgcctgtttctctgggtaccaatccctcgcgtttcttctggacccgtgcggggccagttttccccaaagtaggaaata

SEQ ID NO: 25254 - DNA, 321 bp, Glycine max
aatggagaatgagggaggaagaaattcaacgttagggagagagaaagctgtctgaaaaaaaatgagggctgagtgaagagagagaaaagctttttggttttaaataaaaggttttcctctttttctattattttattcaagctctgccacatgtccctatttgattggagcaaaaagggcccactttctctttttgactgtgacccatactcagtcacaaaagtgagaaaaatctgacctttgaaacgctaaaatcctgcctcggtttgcgtgctgtttctctgattccagattctcgcgtttctctgcgttcgccggggc

SEQ ID NO: 25255 - DNA, 377 bp, Glycine max
agcttgaccaatcccgaccccacccttttatatgtagacagggaaaacctgtgatgtacctaaacaggcgagctcctggcagttaacagataaaaggaaaacaagaccccaaagcaaggaggcttgtggtggctggccaactgtgaattttgtgtaatatgtggattgtggcctctggtaatcgattaccaagggtgggtaatcgattacaaggcttaaaaatgaaaacaggaggctaagatggtctcttggaatccaataccacggggtgtaatcgattaccaagcttgaaaacgaggtcaagaagcttaagaagcctctggtaatcgattaccaaggggtgtaatcgactaccaggcttaaaaagggaattggaa

SEQ ID NO: 25256 - DNA, 414 bp, Glycine max
  unsure (1)..(414): unsure at all n locations
ctatggaggctggatctttgagctttttggggtcctttaatggtgattttccaccatggagatgcagcggaagacaaaggaaaataggtgagaggaggcgccatccattaaggaataagccatggaagaaggagcttcaccaccaagatgagccttggataagaagcttggagaagatgcttcaatggaggaaaagaaagagggagagaaagagagaggggggagcacgaaattgaaggaataaaagaggtatagaagtggaactttgaagtatgtctcacaagactctcattcatcaaagttacaacaagtgttacacatgcttctatttatagactangtagcttccttgagaagctntcttgagaaagcttctttgagaaaacttncttgagaagctagagcttagctaca

SEQ ID NO: 25257 - DNA, 490 bp, Glycine max
ctgcacgcatgcacgcttattaaaggatgtgcaccagtacttttctaataattgcatgattgcgtgtgactgtaatatacaattttcattgataattcatcaaaaatccaaccattgaactataaaaacgtctcaccgtgtatctcttctcttcatatattttgtgccactcccaaccaaaaaaaatgtcgagcactttcgtctatatgaggcctataattcattatctggtgcaggaatatgctctaagtcctcaaggagctgcatcgatgacaactccccatgcacttctgcggcacatgcaaagccattcaatacaatgcattgcatccagtggtcactctccccaacttcaagttctttttctttgctcacaaagcagaagcagcattcatgaatcttgtagaatgtataatcaacacatcgtccaccaagtcaccagattaaaattaagctgatgaccaaaattcatcccacgcattctctactt

SEQ ID NO: 25258 - DNA, 369 bp, Glycine max
  unsure (1)..(369): unsure at all n locations
ccatgatacgtatcccataattgctagttattcacccactgggcacaatttccatctagagagctttgttcttgttattctacagtgtttgcagttgatacttgatactatatactantctcaattttatatttctgatcaggtgtgggaccgaattgctcccggtttagcttcccaatatgattcaccttattcagttccaactatcgcaccacgtcctttgcttattgataatggtaagacccttgtatatatagtacattaaacattttcaaattgaatcgtgctatcttattcatatacaactgcatgtattgacaattcagggtaaccactctgctgcaacgtaagttttttgcttcttaggat

SEQ ID NO: 25259 - DNA, 647 bp, Glycine max
aaaaaaaacactcgcggcggggaacggggattaccttggtagaaaaaagggaactccctataaaaagaccttacatactctccaggggacctttttggaaccccttaattacccccggaggcttccctcggaaggcgctccttattttcttgaaatttagagaccgggtcccaccaaaaaaggggacctggggcactttatactttttcctcggaaaaaaaaaaagaaattctcaccctaatacaaatccctctttttaaggggggtcctaaaacccgtaccctttggaaaaataaaaaggacccaggattaatgtttggtacttactttggccacaaacaaacggagaaaaatctttatcaaactcccttccttcaaaagagaaaaaaatccgggtgttatcgtgaaaaaaaaagggctcttgacccttgaaaaacatggagaacccccctttaacgaaggcggggaagtcaaaagagaagggggggggccacacactttattgcccccgaacacaccaaaaactgagggcgtggctctttacctaataaaggggggggaaagcctcacacacagggcgacaacaacggtgctccccaccgctcccacgaaaaattgtttttctcacacggcgggtgaaaactacc

SEQ ID NO: 25260 - DNA, 335 bp, Glycine max
tcgatacaagaagctgttattgattatagctcatatcctgcctataaaaagctgcactttcgcagaaccctcactctcctcttctccttgacggtgtccaacctcctctaaacttcaaatcctcataactttctcgtttcttggccaaattacttcaaacaaagctcaaacttcttctttttttaattctccaaaaatcctacctatcagaattagctgaaacaagctccaatggcagaatcttcaaagaaacgaaagggatcctcctccaccaccactactgtatgccaccgtcaccatggaacattctatgacccaccagcatccattccttc

SEQ ID NO: 25261 - DNA, 250 bp, Glycine max
aaagaaaaataagaaagggaaaaaaaaaggagagggagatttatggaaagaagaatgaataaacaaaaaaaaaaaaaaaaggaaggaaaaaaaaaaagggggagaaaaaggaggaaaaaaggagaagaaaaagaaaaaaatcaaaaagagaaaagggagaaaaagaaagaaggaagtagacaaagagaaagaaaagagaaggggaaaggaaaagaaaaagggaagaagaaaaaaggggggaaagaagaag

SEQ ID NO: 25262 - DNA, 405 bp, Glycine max
agcttctatataagctgaaccattttatttataaacacaagttgagttttattcagaaaattagagtttatctcttttatcttagtgagagtgattctcctaaattcttgagtgattcaagaacaccctggctgtatcaaaggactttcacaacctttgtgtgttgccctcgctggaaagagtgattctttccttcctatcatctccacccttgttctttcaaaccacaattccagaaaatccacctctgcccaaaattatctcgtgaccataactcccatttcacacactcaaattaagtgattcttgagcctaaattgaatttcaaaacgagacctttcacctcgttttggaatcacctcattggagctctgtagcttccgttattgcctttctatatttctg

SEQ ID NO: 25263 - DNA, 376 bp, Glycine max
tatgacgattcgaatttctctatagcttccgttgatcaatttcgagcttctcgatatgtgattagcctgaatcggacatccgtgtgaaaagttataccagttgaatttctcaagagcttccgttgttcagttttgagcgtctcgatatgtgatttgcctgaatctgacatccgtgtgaaaagttatgaccatttgaatttctcaagaccttacgttggtcaatttcgagcctctcgacatattatgcgaccgaatcggacatccgtgtgataagttatggccatttgaatttctcgagagtttccgatgtttaatttcgagcgtatcgatatattataagcatgaatcggacatacgtgtgaaaagctatgaccat

SEQ ID NO: 25264 - DNA, 304 bp, Glycine max
caagcttcttaagtctcaccttgaggaagatttttttcatggctacttcatgcactcctcttatgacaatagcatcatttctggcactaaattgctaggagttggaagccatcttctcaaataaatttttggcttcagcaggggtcatgtctccaagggctctgatcgaagtcgtacccgaatcaaataaacattaaaatgtagtaactaggaagtgatcctaggtcatttcccaacgagcagtgaataaccaaaagttcattacagatagtaggaaatagtaacaaattgggggggggggggg

SEQ ID NO: 25265 - DNA, 350 bp, Glycine max
tcaattacactgcatgagtgaggcaatgactaatttattcaggagtctctgctttaatcgattaccaggtggattaatcgattacttttctcttgttcaagtgtttagaggtgaacaagaacactttaatcaattacttaggtcatctaatcgattacatagttcttgagttgttttctagatgttggatgtacactctattcgattacttagataatctaatagattactttgttaatataatcgaataccttatagatttaatcgattacagacgggtttcactgtgttctctattaataaccaacttgagttcacatgtatacatcatgagattattagagaatatt

SEQ ID NO: 25266 - DNA, 449 bp, Glycine max
  unsure (1)..(449): unsure at all n locations
agcttgtagaattcaccccaattccaattgcatatgttgacttactcccctatctgctcgataatgcaatggaagttataagcccaacaaagatttctcaaccttcttttcctagaggatacaaccccaacgtgacatgtgcttatcatgggggagttccggggcattccattgagcattgtatgaccctgaaacataaggtgcaaagtctgattgatgcaggctggttgagattcgaggaggaaaatcactcgggagttttgatgtcgttgtgatgcaatcctaccccccaagggcattggataaaagactccaagaagattgggccaaagatgcaagagaaggccctagggttctcatgagccttanggtagatttcgggcccatgggctaagtatgagcccacttatctttgtacatattagattaagatttcattaaattgggcc

SEQ ID NO: 25267 - DNA, 363 bp, Glycine max
gagagaagtgaagtgtaaaattgtttagccccttaggcacttctctctctttcgaatttgcttagaaaaattgtttccgtgaagaaaatccaagccgaggcgcttccgtaacgtttcggtgaggaatttcgcgaaggtttttgaccgttctttgacgttcttcattcgttcttcatcgttcttcagtcttcaacgggtaagtacctcaaaccaagcttttcaattcattctgtgtacccgtggtggtccacacttggtttcatgtatttttattctcgtttcattcactttttatacccccttttgacgtgcttaagccattttatttaagtcatttctcgcttaacctacaaataaaataaa

SEQ ID NO: 25268 - DNA, 433 bp, Glycine max
agctttaactaactcagaatagaccgtttatttcagagacatgaatggaataagattggagttttcaaatgcttggaagcattcaaaattttcattagagaagaactccatatctatgaattttggctctacaatggaacgagaggaaaagaggtttgtgtaccgtgtacgctgttcctctgatgagaataatgacccagagggaatggagggaggaattggagcttcctgtgacccggaatgccgctgactccgactcgaagttcctttccgctttttcgatggttcctccatttgaagagtttttttgggatttcaatcggttcaaatgaaagagattgaaaaaaaatatgaagtttgggctttgtggggagtgatttggacaagaaatgagtgagatatggatggaagaaaaattgggggcgagggtttt

SEQ ID NO: 25269 - DNA, 409 bp, Glycine max
ttaagagaatgcaatttttgttgcaatctttaggggttgattgctcttaagagagtagtttggaagttctcatggatgagaggcagttaataggtttagaaaatggtggtgcttctaacccagatggccatgattaggctcttagtctaacgataaattccctattattgatagggaaatagagacagatcaaggtactcgggtatgaggcacttcattggattgataaaaaggcttaggagatctaatcattgataactccaagcgtgattggtcatttgggggtcttcttttcctatcacacaagctatgaatgttaggggttcgacagctgaggcccctagtggcgatggcaagatatgctcctaaggtcagaaggaaaatgtggggtgagtcttttgatgatgtc

SEQ ID NO: 25270 - DNA, 473 bp, Glycine max
agctttattgagaaactctttgtgggagaactcgttgttgagtgccaggccaatgtggaggcatcttgataatgtttggttgcgctagacgagtccattgtgggagtggtagattaactatggcatttgttggtagagccttgaaggccttagatggcgtgtgctcctagtcaaacttcttccatataggagcttggacattgatggtttccctttgaacaagttcaagaaagatgaattcagagtaaggagatttaggtgtaggattaccattaatgaatgctaaaggaaacctttgtgcatctgtcaagggttcccttggagaaactcttttgaatttctctagatggatgggggatggaggtggacatggttgtgtaaatggaacatgtttgcagagaggagagataggagtatcgtccatcgactcactatctggtgatgatgaagattgatcctctttgtttcctatg

SEQ ID NO: 25271 - DNA, 402 bp, Glycine max
  unsure (1)..(402): unsure at all n locations
acttaccaccctcttattgatggccagactaaacactccattcagtcgctgaaggatcttttgagggcatgtgtcttagaacaaaagggaagttgggagagttttctgccattgatagagtttagctataacaatagttttcattctaccattggaatggctccctattaagccctgtatgatagaagatgtangacactcctgtgttggctagaacctggagacaacctcaccttaggacctaaagtggtacaacaaaccactaagaaggtcaagttaatccaagagaggataaggactactcagagtaggcagaagagttatcatgacaagaggaggaaagacctgaaattcgaggttggtgatcatgtattcttgggagtcacttcgtggactggggtt

SEQ ID NO: 25272 - DNA, 567 bp, Glycine max
  unsure (1)..(567): unsure at all n locations
agctttaaatacaattcacatatgattgatgaaaatttcacacgatagactttgtatttagaagtagaggtgaccacaaattcaaaccaatctaataatttagtaaactcaatcaattcaaaccaaaaaaatttgattggtttagaccattggtttaaattggattgaagatgcaaatttgattattttgggtaggatctcaaattttgattttgataatccaatctatttcgtatttaatccacccaattacttatcatattttattatatatatatatattaaaacttttagagttcgggccttttggcctagctagtccaattttttttaccctaaattcaagataaaataaccattaaataatcaaataaaatataataatcaaaccacaatctttaagaagaagacaaaaaactangtaacttaattatgtaattttttaattacaaacgtaagaagggtattaccctttgcgaagctcaaattttttcaaagtaaccattttatattcaaaaaaaaaaaaactttctttttaaaaaaaaaaaaattttccaaaattttaac

SEQ ID NO: 25273 - DNA, 402 bp, Glycine max
cttccttcgaagtttacagtctcaatccattggcaatatgtttcggtggttaccatatggttgtgatagaatccacgagtttactactataccagattggaacgaccatagagttgttaataagtttcttttatatacttgccaaaatagaagagttcttaagagtgaaatttggtttatgaatgtagttgttgtggagccagcataggcaaggttccatgactaaaaccaggtttacttttgcttctattttaacagcaaaattatactcctgtttagtgaaatcatagggaataatagaggtaattctctcaaaaagttgtggttgattgttgttggaatagaaatagatctaaacaagggcttttttaaggtctaacatttgaactttgaacaacttga

SEQ ID NO: 25274 - DNA, 377 bp, Glycine max
ctcaatagggaatttttaacatacatccgcttatttatccttattaaggcgtaacaaccccctcggtgtaaggcacccactactggcttataaaagtactcgcgctacttgcaactcattgttattttgttgaaattaaaaaacatttttgtcacttgggactcttattaagggtcttataaacgtgaagggtcccttaaaaatgaaatttttaccccccttttattttgggcccctgaacaaatttgggcaaacggggttactttaatctccctgtctataaaaaatgtttaacttctcctgtgaataataaatatatataacatttttctattctcacctttatgatatttgcccgggttttccccccccctccc

SEQ ID NO: 25275 - DNA, 455 bp, Glycine max
agcttggcctctttcaataaaatcttttttatgaacataatttataaataaactttcatcaacctagttaaagaattcaatactttagtaactgtgccaagttttattgatacaagcttttaacattttaattatcttctcttttattttttattttttgctttatctattgataattaaactgcgaagattcaattgtctattgattctatatacatattagattatattggattttaccagacgaaaaagagaaccaaaaccaatgatttagtaaaagggattagtctttcataacatgatgaactataattcaatgatatgttaaaaaagtacttacatttaatattcattaatactttcaataagatttcttttgaaaaaagatatttgtaggaaaaaaaaaagaaaaattaagaataagggaaaaaattgaagagtttaaatgatgtttc

SEQ ID NO: 25276 - DNA, 355 bp, Glycine max
acatggatgtgtgctatgatcatttttgcatgaatttctaatcatcattatcatatgcgtgtcatggaaatgatttggggcattcccttattcctaagatacttgctaaacaaacatcccgacatacatcatgtccaccatttgcaggcccgttaagccaaaactcaaccctttttagccagaaccttgacctaggattaggcatggcaacagggtgaaatgggaacgggtattgcatttctcaccctcgccccgactttgtgaccgatccccgaccccgcctctgatccccaccgggattaaaaaatacgtacccatccccatccctgttggggggtgggtttccccgcccccg

SEQ ID NO: 25277 - DNA, 515 bp, Glycine max
agcttgtatactgaattgagtatggcttttatcattgcatgtctgatatgcctttcagaggcttgaaaagtgcgagaaaacgggctgtgttttctgcattttctggaaaacacaatgaactcactaaacgagcatgcggtgctaagcaagttcatcaatactcattgtgtataagcattatctgaagaactcgctaagtgcgcttaccgcgctaagcgagttcatcctttgaggatgaacactcatcctcttgctgaactacctatggctaagcgaggctgaaccgctaagcccaggtaactcaaccaaattttgtgttgtaagccttgcgctaagccaagtttacttgagctaatcgtatttcatcactacaacttttaagctaagcgagcttagcttcagctaagccaacatgttatgtttcttaaggcgcgctgagtgagctttattccgctaaacatctattgttaaatttaacccttattggtgttgttaacttgaacgattttgggcta

SEQ ID NO: 25278 - DNA, 356 bp, Glycine max
catgtttaaaaccgagctctatggtggtgcgggcctttgatggtactcggcgggaagtaatgggggaaatcgacattcccattcagataggcccccacacttgcaatgtggtgtttcaagtaatggatataaatccttcctatagctgcctcttgggaagaccgtggattcatgccctgggagtggtcccatcaacgcttcaccagaaattgaagttcgcagtgggtggacttttagtgatagtgtcgggtgaagaggacatgttagtgagctgcccttcctccgcaccgtacgtagaagcggtggaggaatcgttggaaacggctttccaatcctttgaggttgtgagctacgcc

SEQ ID NO: 25279 - DNA, 351 bp, Glycine max
agcatataagaagaaggacacgttttatgcatgaatccctgcctttataaagaaaaaaaaggggtaaatgaaaaagaaaaaactggcacagatctgccggtttaacagattacccggcgcaagccctcagaacgaaaatctcaacagatggaaagaaaaggatccaagaaccccacttacggagggctctacacagcattacaaaaactatgcaacggaaatagactctataagtatgaagaacccttccttagcatactctatatacaagcataacatcggtgattaagataatccatttccgggagcctccatggatgacacaaagaaggaacaacgagtgaacacatc

SEQ ID NO: 25280 - DNA, 357 bp, Glycine max
attcgcaatgcttatggtgtataggacatatgattactcctcagtcacaattgaggaaacgcttggaagtcaaatgaaagcgttcaataataacttttatgcgtattatatatttacaaatgcaaccaatgaaaatttaagactaatattaagatcattatttctagacatcttagaggtttgatcaattatacgtataaacattatgttcgtacgaaattactttcttaaaaaaataatatgcagtacgaagaaaggggtaagcacatgaaattctaagaattaatattgtgtttatgaaaaatacaacacttatgtatggtattatattcagcgataattcttattgagtgatga

SEQ ID NO: 25281 - DNA, 487 bp, Glycine max
agctttttatgaagtttgaatgttttttttaaaaagatgtaatcgattaccatctttatgtcatcgattactagtaacggaatttttgaaattcaaaatgaaaagacatgacttctcattaaataaatgtgtaatcgattaccaaaaatctgtaattgattaccaatgaggaaatttcaacgataactctgaaaagtcacatttcttcatgagttttttgaaaagccaccaaaggcctataaatatgtgacttggctttaaaaaatcttcagagtttttcggaacctcattgtcttattctctcaaaaacaaaaatttggccaaacacttgcgaatcaattaagggattcttattagttcttcaaattggattattcttctctaaaaagagagaaaaaattgtgtacattaaaaagtaaaactgttgttgagatgaagaagctgtgaaatctcttgatttgggagtttttttgaacacaaaggaaag

SEQ ID NO: 25282 - DNA, 363 bp, Glycine max
  unsure (1)..(363): unsure at all n locations
aagaagtattgcgcccccaggcntgtgcatggttatgacacaacagcagccagggaatggccaacagcgggcaacagatgcaccgtcgccacctccagagcccctcagcccatctacaaaggctggagcattgcctacgacccgtggccgactagcaggcgaccaagtccaaagccaaaggtaagaaaaagtactaagcttgtgatcaacaagtaaccatgcgttcggctccagacgttaaagaagcgctactaggaggcaaccaagaattttctacgaagaagctccctgcgaagtggtctaggaagggcaccattaaagaggattctagtgtgttcccacaagctgacacaggctttgaca

SEQ ID NO: 25283 - DNA, 428 bp, Glycine max
agcttaaagagttaaggctcgtatcggttttattgattatggtagtattttaattgattacaatgttgtttaagacaatgactaattttttaggagtctctgctttaatttattaccaggtgcattaatcgattacttttctctcatttgagtgttcagaggtgaacaaagaacactttaattgattacctagagcatctaatcaattacattgttcttgagttattttccaaatgttggatgaacactttaattgattacttagataatctaatcgattaccttgtagatttaatcgattacaagtggttataattgttttctctatatataaacaacttgtgttcacatctatgcatatcaaaatatcaagagatcattagagaatactcaatacatctcaaaaataatatcttagtctcagaatg

SEQ ID NO: 25284 - DNA, 432 bp, Glycine max
  unsure (1)..(432): unsure at all n locations
ntggccaattctgccaantnnaggtcaaattgagcttttatgttagaacctttgcacttgaataattggactgcgagtttgggcttttgttttctgtaattagtttaattaggtagttaggtaggtagttaggtagttagttagttatttactaacactctatatattagtgttagttagttagtgacttcacttgaacttcattttgtacaaaagtacttgtgtaagctgatgcaatcctccctaaagggaccagtcactaagtgaatatttgatgtgtgtgttgagaaataaatttaattgaattggtagaagccgtatccaattaaattttagagggggaggtgagcatttacttgctacaccccattgccacatcatatagtcacactntgtgcatgtccttcatgctttacatgcctcatgacacct

SEQ ID NO: 25285 - DNA, 402 bp, Glycine max
agcttcccgcatccgtacttggaaggatctgattattgctttcctaaggcaatatcagtataattccgatatggctcccgatcgcactcagctacaaaatatgttcaagaaggaagatgagacctttaaagaatacgcgcagcgatggagagacctggcagcacaagtggcacctcccatggtcgaaagggagatgatcaccatgatggtagacaccttgccagtatttgatgcaatcctaccccgtaagggcattggatagaaaactccaagtagattgggccaaagatgcaagagaaggccctagggttcttatgagccttagggtagatttcgggcccatgggctaagtacgagcccacttatctttgtaaatattaaattaaggtttcattatttttg

SEQ ID NO: 25286 - DNA, 430 bp, Glycine max
  unsure (1)..(430): unsure at all n locations
tctccccattttcttatnttagggggagaagtgaagaggaaatgtgttcagccctccgtgtaattcgagaatcacttgaaattagtgaaaaaaatcgtttccgtgaagaaaatccaagctgaggcgcttccgtaactcgtccgtgacgtttccttaagcaaattcgtggaggttttccgccgtctttcgttcgttcttcgcgttcttcggtcttcaaccggtaagttcccgaaaccgaacttttcaatttattctatgtactcttagtggtcctcatttgtttttacgtgcttttattttcatttcatttactttccgtacccccttttgacgtgctttagtcatttgcttacgtcattttctcatctaatcaaaaaataaaataaattttcaccgatcatttgaattgtaacatccgttaatttctgtt

SEQ ID NO: 25287 - DNA, 459 bp, Glycine max
agcttgctcgtcttgctgatatttatcatgctgacttttctgatgatgaccgaggaacaattagggatcaacttgaaacttatgtgcttcaagtgagaagaaatgcttctttttccacttgtgaagatgttcaaagtttggctatgaagatggttcaaactgagaaacatttggtatttccattggtttataaacttattgagctagctttgatattgccggtgtcgacaacatccgttgaaagagctttttcagcaatgaagattatcaagtctaaattgcgcaataagatcaacgatgtgtggttcaatgacttgatggtatgttacaccgagcgggagatattcaagtcacttgatgatattgatattattcgaacatctaccgcaaagaagtctcggaaaagacacttgcctcgtaattttatttaaccccctattggaaggataatgttaatct

SEQ ID NO: 25288 - DNA, 376 bp, Glycine max
gaagatcgaagaacgatgaagaacgaatgaataacgtcgaagaacggtcgaaacctttgcgaaattcctcacggaaacattacggaaacgtttcggaagcgcctcggcttagattttcatcacggaaataatttttccatgcaaattcgaaagagagagaagtgcctaaggggctgaaccctttttcacttcacttctccccctatttataggaaattgggggagaagcttgccacccagctcgcccaggcgagctcagctcgcccaggcgagcagggttgcttcctccagaagcaacagccttctggaggaatcttctggagggccaagtgggcctcggtgctatttgcactcccatctttactaagtacacccc

SEQ ID NO: 25289 - DNA, 455 bp, Glycine max
agcttggttcgaggtaattacccgttgtttatcgaagaacgatgaagaacgaatgaagaacgtcgaagaacggttgaaacctttgcgagattcctcacggaaaacgttacggaaacgtttcggaagcgcctcggcttagattttcttcacggaaacaatttttccaagcaaattcgaaagagagagaagtgccaaaggggctgaacccctttcttcttcacttcctcccctatttatagcaaaataggggaggtggttgccgcccagctcgcccaggcgagccaggttgcttcctccagaagcaacagccttctggaggaatattctggagggcccaagtgggcctgggtgctatttgcacccccatttttactaagtacacccccctctgctgtttttggtgattcttttttcgtaagttacggaaacttacaaatttcgcacgatacttggtt

SEQ ID NO: 25290 - DNA, 321 bp, Glycine max
attgagaggaaaaatatatgttatgtctaacaagccaacaaagggagaaagaaggttgtcttcgaacccggagattgggtttgggtgcacatgagaaaagaaaggtttccggaacaaaggaaatcaaagcttcaaccaaggggagatggaccatttcaagtgcttgaaagaatcaatgacaatgcttacaaagttgagctgcccggtgagtataatgttagttccaccttcaatgtctctgatttatctctttttgatgcagatggagaatccgatttgaggacaaatccttctcaagagggagagaatgatgaggacatg

SEQ ID NO: 25291 - DNA, 482 bp, Glycine max
agcttgtatactgaattgagtatggctcacacattgcatgtctgatatgcctttcagaggcttgaaaagtgcgagaaaacgggctgtgttttctgcattttctggaaaacacaatgaactcactaaacgagcatgcggtgctaagcaagttcatcaatactcattgtgtataagcattatctgaagaactcgctaagtgcgcttaccgcgctaagcgagttcatcctttgaggatgaacactcatcctcttgctgaactacctatggctaagcgaggctgaaccgctaagcccaggtaactcaaccaaattttgtgttgtaagccttgcgctaagccaagtttacttgagctaatcgtatttcatcactacaacttttaggctaagcgagcttagcttcagctaagccaacatgttatgtttcttaaggcgcgctgagtgagctttatcccgctaagcatctattgttaattttagccttta

SEQ ID NO: 25292 - DNA, 381 bp, Glycine max
aaccgagctcgatggtgtgtgcgggcctttgatggtactcggcgggaagtaatgggggaaatcgacattcccattcagataggcccccacacttgcaatgtggtgtttcaagtaatggatataaatccttcctatagctgcctcttgggaagaccgtggattcatgccctgggagtggtcccatcaacgcttcaccagaaattgaagttcgcagtgggtggacttttaatgatagtgtcgggtgaagaggacatgttagtgagctgcccttcctccgcaccgtacgtagaagcggtggaggaatcgttggaaacggctttccaatcctttgaggttgtgagctacgcctctgtggaaccaagtacgtcgctgccttctctc

SEQ ID NO: 25293 - DNA, 511 bp, Glycine max
agcttgccacccagctcgcccaggcgatctagttgcttcctccagaagcaacagccttctggaggaatcttctggagggcccaagtgggcctggttgctatttgcacccccatttttgataaatacaccccctgtcttttttggtgattcttttttcgtaaagttacggaaactcacggatttcgcaacgatacttgttttctttccgtaatgttacggaaccttgcggattacataatcatcccctttttgacttacggaatgttacggaacctcactaattgtgcaacgatgcttccttttgatttccggtgcgtcacggaaccttacggattgtgcatcaataccttcttttgatttccggcatgtcccggaacttcacaaatttcctaatgatgggtgccaagcacctcacaaggaccaaacaaaagttacatgccaccaagcaaaggtccccggacgaaatatggtatgacagttgcccctctttacttgcttttattggagataa

SEQ ID NO: 25294 - DNA, 403 bp, Glycine max
  unsure (1)..(403): unsure at all n locations
nttataccantnaaggctctccccctttggctacatcttaaagccaaagtgcgttgcaattaatacaagatgatataactaaagtttacataatcaatcataagtcacaactaaatataagtcaagcatccataagtgaaaaaaaaatataatccaagcaaaaataagtcataaccaaatataatccaagcaataaaagactatgtgcgaaataccgaaagataatgaaagttcagaaaatgataacagaaagaaaaaaaatatagccaaatacacggcttataagaaatgataataataatctaaacctaagaaggtggtggaagttcgaaggatcgacgaagaaaagtcacatcctcttcaagctgagtgatgtaggtatccatgccttcaaagcgacaat

SEQ ID NO: 25295 - DNA, 458 bp, Glycine max
agcttaaggagatttagctttttcatttctaacttttgcatctcaggatcaagtacctaagtccccatatcaaccttatttatctagactttgttccaagtttgccatgccaagatttgatgtcatctaaacataaggtagaatttgacattaacatttggtttagcaagaatattcttgtagggaatagatggaggcaatgaccttgaaggaagtagtcactcagtagcttgttgttgatcctttctttttagacattgatcaatattttctaagagagttaatggtctaataagttctgtagtggcttgcatcactctcctttggtctagccctgcttatatatccacaatataatcaatggttaatgggccttatatatccttcaagcgattgatgttgccttatttaatatttctaataagacaacattaattttcttttattagcatcaaaca

SEQ ID NO: 25296 - DNA, 411 bp, Glycine max
tgttccaaatgttttttaaatgtgtgtaattgattacaatatattggtaatcgattaccagtgtatctgaacgttgaaattcaaattcaattgtgaagagtcacatcttttcataaaatgctttgtgtaattgattacaaggttatggaaatcgattaccagtgacaagttctgaataaaaagtcaagagatgtaactcttccaatggttttctcaagattttctcaaggttataactcttctaatggttttcttgaccagacatgaagagtctataaaagcaagaccttgacttgcatttcaataatttttacaacttttgaacttctttgaacaacttttgagatatcttgaaaccttcgcttctaatctttcttcttcttcctttgccaaaaagctttctaagttttt

SEQ ID NO: 25297 - DNA, 832 bp, Glycine max
  unsure (1)..(832): unsure at all n locations
gccaccaccaccgaacgcgaaccgaaagccgaccgaccaccacacgaaaaagccggagaccaaagcagagacacccccncccagcaaagagnnaatgaaccctgtaaccccggaccnaagaaacaccggggcaccaagcggaaaaggagaggaacacatattaaggccgacccaaagaagcgacgggcaacacggggaaaaaggagaaacacgaaacaaaaagcacagcaaaaaccacggacacaaaagcgaccccgaaccggaaaaccgaaacgacacaaacaaccggggcaagcgaaacgaaaaaagaaaggagacgaagacaccaagcacaccgggaggcgggacaggcacaaaaaaggaaacggaaaacggcagcgaacaacgaaacacaacgaacagaacagcccaaacagcaaaaaacgacaaacaaaacgcgcgcggagcaacaaacaggagggccgccaaggaaccacaccaacgaacggaacaccaaacggccgggcaaaagcccccccgcagcaaagaccgcaacgaagcaaacaaccacaaggaggaacaaacacacgaaaaacaccaaccaaaacggcggggacccagggccaaaagacgagaacaacagcccaaaaacagcgagggactcccccacggaaaagaaggaaaggcccaacacgaaacaacgaaaaaggacgagcggggcagccacgcaacaggaaccccggccaacaaggcaaaacgggccgcgaaaaagcgcagaacggcgagcacaaaacgaacagacccggccaacaaaaccgcgggacccagcgaacagaccccgaccaccccaccg

SEQ ID NO: 25298 - DNA, 1053 bp, Glycine max
  unsure (1)..(1053): unsure at all n locations
cgacacaaactacaaggacaacgaaccgactccccacgtaacacgcacgagcaccgcagaaggaagaaagagagaaaaatcaccacaacctaagaacagagagaagagtttgaagaccctggaaacaccccgccgacctccanaancaccctgggcgcgngcaagccgcacaagaaggagaggagcaaattttgttctggccaaccaacgaccaccaaaatgaacgaaaggcgcactacacagcaccgccctcctaccacgagagaccaccaaccgaacagaaggaatcagaaagacgtaagacgaaaacaccccctgcacaaacaataagctccggaaaggcccacgaaagacaacaagcctaaagaacgaaaccacaaacaaaagcgacacaaggaggacagaaagcacaaaagaggggcaaccgaagaccgaccacgaatgaaaacggcaccaaaccggggacgagaaagagacacacacggtcgacagaaaagaaagacggccgttcgcgaaacaaaagcgaacgaccacgaaccctgcactggagggaaaaggaaggaagaaggacgccacccaaaacgcacgtcgcagacgcacgacgaaagccccaacaccgaaaaaaaagggaaagcgcggcgggaccgagccagatcaaacggggagagtcaacgtgcatagagcaagactgacaagaacaccatacaaataacgcgaccggccgaacaccacgccccaccaagaagtcaccggacaacacatcgccaataaacacccccaacgaggacatatacaacgtcgtaattggcgcggntggcacgaaaaattacaaaaggctacacaaaccaacctcgaacaccaaaacaacacgcgacacacgaaaagatgcgtctacaaccaagaaacagagagagcggcacaccgccaaccagcaaggcacaacgcggcaacaggcaaggaccaaaagggacttacacncgcgtagcgcccacaaggcaatgaccagagacaacaccgcctaataaggaagcagccacacaacacacctatacg

SEQ ID NO: 25299 - DNA, 538 bp, Glycine max
  unsure (1)..(538): unsure at all n locations
ccgcactctcgaaactggaatccggaatggaataggtaatcaggagagaatcgaaacactaatgtgaatagcgtacgaaattgaaactaattcctgtatcgcactgtaccagaaccaattagagaccgnnnaagacggagccgcacagtgtttctattctacactttccanaacacgagtgaaggctacactatgataaacatcggtgtgtaccaaacccaaacacagagggtctaaacaccacatacaaaacactgctagattactacactgagtcaaaagaccacctcacgctgggaaagcaacctacgccagggcgagcatctaactgcgcgcatctgagaatcaatgcaccgactcggagcacactacatccctacgttactaacaacgagatagaaattccatcccaccccacaacgccaattggcacggagaaaattaaatgggacacacagcagacacaccccagagggaaccccttgcactaacccggacctcttctactggcatatgaaagatgctaaccatgaaaccc

SEQ ID NO: 25300 - DNA, 753 bp, Glycine max
  unsure (1)..(753): unsure at all n locations
ccgccacagacagcacaccgaccacaagccacgacacccggacacgcaccgcaaacacacccccccccaaggacaattgagacccgagccncncaanacaaaaacccccagggcccccccagaacgacagagacttgtgtccgccaagacaaacagggagcccacagagcaaccccacaaaaaccaccaacgagacaccacaacgcgaccgacggcgggccacaaccgccacaaggaaaccgacgaacacccacaaagcccaacgccagagacaaggacccgcagcacagggccccacgaacacagacaggccgccaccagggacccccggacgaggaggaacagggtgcccaaaacgcgcgcgggccaaaaccaggggacaggcacagggcccaaaaagagcacacaagacaaacccaaggcacgaaggaccaccacacaggacaccgcccccaaggcaccccacccggggaaaacagccgcaccacccggcccgagaggggaccccaacagcccacgcccacaaggccacaacacgaagcagcaaagaaaaaaaacccacaggaccccaaccggggccggacaaacacccaaaacgcagaccacgcacccgacaaggccccaccgaacacgccacccggaaacccaaaagaccacgcccagcccgcaccacaaccaaggggagcgcgcggccacgaaacgcacgaacgcggccccacccgcaaccacccccccaccaacccaccccccccg

SEQ ID NO: 25301 - DNA, 572 bp, Glycine max
  unsure (1)..(572): unsure at all n locations
ccgccgcccacacatacacanagaaaccactaaaggataagtgaataataacgtgtctcaacactaacgaagttacagacacgacagcacgtcacaacattcatactgagaacactctagaaacgctactacaacatgataaagaacacgcaaccctnnnnacgagccaccgcaggcccacatcactatgtagtaagtgttggacaacnaccagacgcaaacattatagaaaacaacaagacgacgcccgacaaggcataacacaacaaaaacacccaacaccgacacatgagttgttaacacaaggcgaaaggaggaaatcgaacaccctagacaaggcgcgaaggcacggctacagcaaacttcagaacaaactgggcagaagattgaccccacgtgagaaagaactcttacattaaaacagcacgaggggagcgaatcgtataccatgccttgatagacactggataagaccctagaatgcctaagaaatgccctattctctctgaacaatacagtctggtcgaatggaagggatctaaacagtagaatgcaaactctgcggaaaaatg

SEQ ID NO: 25302 - DNA, 284 bp, Glycine max
agcttgcgtacgacaaaactgttttttttaattaagcaaatcaagacgaattcataactctttaatacgatgcttctagctagcaacttagaacatgcatgtcggatcgagagaatgcgtgcaagcaaagcttgctggctaatgtgtacttgagcacctgctaaacgagacccttctgcatgggactaaaggtagcaaagaccttactggaataacccacatatctactggccgcacgttccttctttatccaccttgattaataattcctaagagagtaaatg

SEQ ID NO: 25303 - DNA, 345 bp, Glycine max
aagaaattggtttatatgcatccctcattctaaatctttcatcttatggcgtctatttcacaacaagcttcctactgacaataacctttggtgtataggatgcttggttgtctacatgtgcaacctgtgtggttattcttaacaaaccattgaacacctctttatgaattgtgtatttgctaaaaggctgtggagttggctgaataatgttagcaaatctattgactgctattcatttgttaatatcatttctctttgcactagcaattgggctcttcaagtctatgatattatcttcgtcttcaattataatcattgaatgcgctattaggaaatcttaaaatc

SEQ ID NO: 25304 - DNA, 342 bp, Glycine max
agcttgctgccgagaactcaacttgctatgcaccataacctcagttttattagtcagctcagaaattacatcctttttaacacgtcgcagcatgaaaggttttagtattgaatgctgttagaagagtaaacaaaagataagtcaaaagtactaaaaggaaaaaaattataagtcttcaaaaacaagctaaaatgggcattaataaaataagggtcacaggttgacacacgttatggctttaatcatcacatccccgggacatgtatcatggaaataacaaatgttaagaattaacaaagacaagaacaacattatgagaatgaggaatgatttggaaaccta

SEQ ID NO: 25305 - DNA, 361 bp, Glycine max
agctcatgaagctttcttggtaaaacgctgcccagcgtttgttaaccgttggatcgtctcgaaatttggtgtgtagctttacgagacacttgtccacgatctgaccggtgggatctttgagaagatgtctgtagtgtgctcgaagcttccgttcccgagagcatttcttatttaagcatttcagcctttgctttcatgtagcttaggaaaaatgccatttcttctcctttctttcttccaaagtcatttctaacattccaagcactttctccatcacccacaaccaccattagccaccacaaaccgccattgttcttcgttgagacccacaccgagaggaacccttcaaccgaagcggaat

SEQ ID NO: 25306 - DNA, 289 bp, Glycine max
acctcaatgtatccacaatgcaaagaacaaacgtgaagattgtcaacattacattcaaacatgggtcaaggaatcacaacgagaagtgtacttgagaccttacctaaattagtaagttgaattgatgttgtagaatgtggatattatgtgaattattgtttcctaactaatgttttttgtcttcagggcacattggcaacttgttgttctgtgtccacgggacaatattgctgtttggttttgttctttgcgtaagaagcccgatgtttacatcaaaactgcagtgaac

SEQ ID NO: 25307 - DNA, 427 bp, Glycine max
  unsure (1)..(427): unsure at all n locations
tcttagtctcagatnannnnatgagtttgtagctaccttatgcactcctctaatgactatggcatcatttctggcgctaaactgctaggagttggaagccatcttctcaattaaatttctaacttcagcaggagtcatgtctccaagggcttcaccactggcagcatctatcatacttatctccatattactgagtcctttataaaaatattggagaagaagctgctctgaaatctgatggtgagggcaactggcacataattttttaaatcgctcccagtactcatacaggctctctccactgagttgtctaatacctgagatatctttcctgatggctgtggtcctggaagcagggaaaattttttctaagaatactctcttaaggccatcccagctcgtgatggaccttggagcaaggtaatac

SEQ ID NO: 25308 - DNA, 489 bp, Glycine max
agcttgcacttgccgggaaaataaaggtttttgacctgacaaacatataaacccaatgcgcaataatgtttcttagataagttaaaagaagcacaccctaattgaataaaaatatgtaaaagcagttttctctattccttttttgttaattccccccgtagattttcaacataaaattgctcgttaagtgtagccttaaaagaatctaaattaggtagacaaaattgtttgagtggacttaatagtaaccgtgcatcgcatttaacacgagtaagacaggaaactgtaaatcctttattacaatatatatttttttcttctgaaacctgtatggcttaagaaaattattgattgagttagctacggaaaagaatcattactgtaaaacgcattttttattttaaatcggcctccattaatttggataaaaaaatatatctgtttgtattccaaaaaaaaagtttttttatggagtacatatattctcaa

SEQ ID NO: 25309 - DNA, 408 bp, Glycine max
ataactacgatgctagcatattatatgtaaacctttgtattaaacattgaaccaaactcttccctccatgaattggtctaggacaatctccccacatactcctgcaaacttagccccttgacgtgtcaataatttttacatcaaacctaaatggccgacccataactaacactagtgacaagaggtcccttgaatcataatactcaatatactaggactaggaaaatttatttgaatcaagattctatcaattgttacatttggcaaaaccaaatttgggaccctttttctaactacaagatagtggaaaggaaaaaaattccaggtccctacctatgacttaacttgtctccctctctatccaagtcaaatttaaccatgtaagaacccacattgactatatcaatg

SEQ ID NO: 25310 - DNA, 435 bp, Glycine max
gcttagcctaagtcgacaattttcaaaatcgaagaaagttggagcttagtgcaacatggcgcgcttagctcagcctcatcagaatgacactcaagcttagcgcacagggcgcgcttagcctaaatacaaaaacttaaaagacagtgagagagttgagcttagtgcagcagggcacttagctcaacacataacaagggcttagtgcacagacacgcctagccttaatcaaaggaaaacttacaaaagcaaagtggcgcttagcctgacatgttaggcttagcgctgaatgttcgcttccgacaagtgcaccgaatcgcgcaagtagtataaaatggtaagaaccaagtatcgaactctcggagaacttgtgttacttggtaaagctacttcagtaaataggtgtctagtgtgaaaatagatgtgtttactatgaac

SEQ ID NO: 25311 - DNA, 377 bp, Glycine max
attgatttaaaatgttgtaatcgattacaatgttttggtaatccattaccagtgtgcttgaacgtcgaaattcaaattcaaattcaattgatctttggttgtaaaaggatttttacaaggttgaaagaaatctcaaggaccgcaggtcgcttatggactggatgtaggtacgggttgttgtcgaaccagtataaaaactcttgtgtgtttgtctcctttttccctagtcttttactttccgctgtgcattttattttctgcttttacttttggttaagtttctcttctactctttattcacttaacaacatagtaaaagccttagaagagtaattttttaattagtaaaggtttaggaataattaattcaacccccc

SEQ ID NO: 25312 - DNA, 420 bp, Glycine max
agcttggtatgaaaaactaagtttacttctcttaaaaaatggctttgagcgaggaaaggttgagaaaacacttttttgcaaaaactatgaatctcagtttttatcagtgcaagtatatatggacgacattatatttggtgctattaataaaatgctttgtgaagatttttctaagctaatgcaaacagagtttgaaatgagtatgatgggagaattgaaattctttcttggactacaaataaagcaaacacccaaaggtatctatattcaccaaaccaagtatgtgaaataattgttgaaaaaagtcaacatgaacaatgcaaaagaaacgaagactccaatgcatcctacaacatacctaggtggttgaaagcccacatgcaagatttggattggctcccaagtttgagaactactaaa

SEQ ID NO: 25313 - DNA, 401 bp, Glycine max
ggaaaatattgtatctttgggtgtcttccagtggctgcatctgactttccaacagctttctcaccaataacatatcaccttgcatagcttccttctcaagctcttcttttacttcttcattgatttcagattcactggtgatttctccatctgccttcatgattatggtcctcctggttggacattcaaaagcaatatgtcttctgcctaagcatttgaagcattttatgtttctggtaccagtgttggacgaggtagaattatgtttggttctagcattggacactgctgactttccatgacgggacgctgctgatggattggatgagttgcctcccttcttcttcgatctgttggtccagttctagttgaaagtatcggatgagttccttcttgatgcc

SEQ ID NO: 25314 - DNA, 465 bp, Glycine max
agcttcactcagaattaattataatatatattacttcctgaaaaagaagatcgaccaccagcatgaatcacacacttaatatatatgatgatcgatttcccaataaattgaaggaccattcaatctggataacacatgcatgagtatcagtttttatcccataaaatcacaatgcaactataaaaaagtaaaaaacaactatttattgctttatcttcacttgaaaaattaattaattatttgttcccatgaagctaatccaaacatactgtttgttcgattttatagttgatttctatttatttatagctaaagtgaagattatgtactagtactagtattacatatagacgctggattccctgctcaaagggtaattttgggataaaatttttgtactctgctggtcaaaagattatggaaaagtggaagccaattgaaaaatgtatatttactgatttccaa

SEQ ID NO: 25315 - DNA, 338 bp, Glycine max
gagtctgtcagaaacaaacttaatttatgcatatgataaagaccataatatacgttaatatagcataaaacagaacttgagctgcttccttaaggcattctaacgggttaatgctctaactatgaaacgacaggccactccgaatggatctcttgtacaataatcaggtccaagagaagtgtcgaatatgagagaacactgaaaaacatattacatctctttctactattagaaaatatgtttatacatcgattatctatgatttttgactgatgttgagagtattatcattaacatcagatgttcaaaatccatggtaacgcaaaattgacaacatc

SEQ ID NO: 25316 - DNA, 484 bp, Glycine max
agcttggagaggatgcttcaatggtggtatttgaaagagggagagaaagagagataggggagcacgaaattgaaggaagaaaaagggagagaagttgaactttgagttgtgtctcacaaaactctcattcatcaaagttacaacaagtgttacacatgtttctatttatagactaggtagcttccttgagaagctttcttgagaaaacttccttgagaagcttctttgagaaaacttccttgagaagctagagtttagctacacacacccctctcataactaagctcacctccttgagaagcttccttaagaagattcctaaagaagctagagcttagttacacacacctctctaatagctaagctcacctccttgagatgagaagctagagcttagctacacaccccctataatagctaaactcacccccattccaaaaatacatgtaaatacaaaaaaaaagtccctactacaaagactact

SEQ ID NO: 25317 - DNA, 400 bp, Glycine max
  unsure (1)..(400): unsure at all n locations
agttttggaagtataattactaagtctttcctaactagatgattgacatgagacatgtttatttgtgcaatcctacgatgccataactaagaatcatctatcttacttaccaaatagctaagctcatgaaatgatgcatgttcaatgttcaaaggagatgatatggactaagatgcaaaattcaatataacaaccaataaaaatgccactcaaaggagttgggcatgtaaaaaacaaaacatcttcaagcttttctccaagcttcaagctttagtcttcatgttgcttcccttatctctaacagttctcggttagttntaccccaatataagggagttcattagaaacactctgagatagatagatagatatatatagagagagagagagtttccttgtt

SEQ ID NO: 25318 - DNA, 325 bp, Glycine max
agcttcggaagaaagtgatgaggttcttgttctaaaggcagagcttgaaagagcctgggtagtcgaagagaagttcaagtccatagccatcaaagtctgaaaagagtatgatgaactaagggatgtcaatatggccaccgatgaagccttggaatgagaacacccgaaggcccgaaaggaagaacacgaccaatgcgaagtttccaggggctttatagggcagcactagtgagctcaagctcccacgaggtgaatggaatcatcacgggtcaaaggcatgatcttgaaagacgagctgaaggacttccttaggtcgaaaagaaat

SEQ ID NO: 25319 - DNA, 408 bp, Glycine max
tttctcaatgcaatctcacctgtcttagatggcatagaacattcggttccttattcttcatttggtcctcctgcttttgcttcgtatcacgtgcgtagccctcgttccacgtacaacaatcatatttaaacattcaaatgacaagaaaagaagacgaggttcaagcatatgtacgactgttaggaaaatcactctcaaactctcaagtaataaaacaatattgcgttgacttagaaagacaacacaacagctaaaaacacagtcaactaatatttaaagtaaataattttctgagtgtcggacactccagagcccaatcctagagtgctacataaaagataaacaatatataaatatcaaaatataattttacacaccacagatatattttgtcggggttcacactct

SEQ ID NO: 25320 - DNA, 554 bp, Glycine max
agctttgcggtacttgtgcaagttttttatcaaaccgagagtgaaaagaaggaatatcatggatgaggcattgatagaactcgttatcccccttttgcctcaagaagcacatatgcctatcattgaatctataaatcttggttggatgcaacatctgcaccatgcacatatgattggaggtgtcttggtatactctaaggtggatacaaaacgagagttttcatacatgtctttaaaataaaagagaatgatgtcgttttgattgaactcaacgtttggcttaagagaaaccgtcttcttagtagcatccctggtgaagttcatgttccaactatatggaaatgggcgcaaggcaacatagtcctttgggcttggatgaggcatgggtttgctatgaggaggaacctttaccttcttctttctgagggccaatggaaggcaaccctcaaacaattcaatctggcatgaacttgatggttgtgggtggtctgaagtgaatgtcaagaggattttttggccactgatcagttaaccccttatgcattctgatcatt

SEQ ID NO: 25321 - DNA, 364 bp, Glycine max
taaggctcattaataattaattcaaccccccttcttaattattccgaggccacttgatccaacaagtgaaaggtaatgcagacatcttgtagtattgtttcacatttgttgcatgatgccactttctttgtttaagcttaggggcaggtacggactggtgataggcccatgatcgattgatcatcaacccgcgttcggctaaagacattaaagcagcgctcctaggaggcagcctagtatctctaatttttctttttaaaattcttgctttttacttgtatgttttcttgaattatatcttgaattcaccttagtttatatgcaactatgggattttagaaaaaaatatacataacaatgaaca

SEQ ID NO: 25322 - DNA, 432 bp, Glycine max
agcttctgcatgtctagagagttcttttttttaaaggtccaagttccagagagtttgagagattttgttgtgtgaagatctgcaaagaccagagcttgaagaggaagccatccttagagcttgagatgagtttgtgagtgattgtgaggtcctagagggggaggagacatcttcactacttgtatttctgcaatctttcatctttctcttctctttgttgtaaaggaagcttcccagttatggaaagctaaatcctctattggatcttccttgtaggtacttgatgtaaatatctttttttttatctatttaatggatgttttgggtgttcactgtggtattagaactttattctaccatgcttttgccttgatcatgttaatgcatgtgtttttatgatcattcaacaatgggaacttgtgtgattcttta

SEQ ID NO: 25323 - DNA, 375 bp, Glycine max
gaaagccccactccatctttaggttttgtacctaacatctcaaacaaacaaatcaaacgttacaagacaattatagttgctgtttgaatacctcacccactcaagtgtatcacacaattatggcttttctctaatgaaaacactctttcctcttaccactctaattccccttgagttcttaggcaattcaagagattatggccacaaccaagaacaaattcccaatattgtgtatgtaaggctacagagacaaggaaaatggtaaccaagataaagctaacaatgtttttaggcacaattgatggaaaaaaactcaaaattatgaattcaagtacatccttcttcaaccatattttcctaaaaaggttttttaaa

SEQ ID NO: 25324 - DNA, 391 bp, Glycine max
agcttttgttagatgtctctaatgattcatcaggattttcaagtttgtaccattattgtaaaccacagttacaatgctaaataaaatggataaatttgatatctttgtccctcatcctctcacaaatgcatctttgcttattcaattttcaccggaatgtgggtgcaagccattggtctgtttgcttaagcgacctgcgctcctgagtgttgacttccaagacctttcaatcagagattactcgtcttgcacgttggtgggggtgccgtaaaacaacgagtaaagtccaaaacaaataagtttcaaaataaaaaaaaagttcaaaaagaaaaagaaaaaaaaacatttgattaactgtgtttccaaaaatgtcatgtgaccttattttatc

SEQ ID NO: 25325 - DNA, 377 bp, Glycine max
aacattccaattgatttcaaaatgtgtgtatcgattacaagatattggtaatcgattaccagtgtatctgaatgttgaaattcaaaatcaattgtgaatagtcatatcctttcataaaaagctttgtgtaatcgattacatggttttggtaatcgattaccagtgacaagttttgaataaaaatcaaaagatgtaactcttccaatggttttcaggttttctcgaggtcataactcttccaatggttttcttgaccagacatgaaaggtctataaaagcaagatcttgacttgcatttaacagaacaattacttacaacttttttatatactcttttacaacctttgaatctctttgaacatcttcttgaacttctt

SEQ ID NO: 25326 - DNA, 508 bp, Glycine max
agcttttgtcttgcaaaggaagatcatttctcaaccacaattaaataaggttgaggaacacaaaaaaattcaatcttttgtaccaacagaacccagaaatcaaatatatcacaatgaacacgttggagaaggcttaaaaacacaaaataaaggcataacacccaaaaaaaatcaaatccaaatcaaatagtatttgtacatgacaaaaaggggagagaaaagcactgaaaaaataaaaaaaacgcttcaatcatacacaatagatgtgaaaaaaacatagaagacaagaagtgaaatgaaaactaattaaggattattatgcgtatgcagctacagtgggaaatgaaaatataaaaatggagagaacgaacagaagagagaatgtgagataccaattggggtgaaagaactgagggagaacgagaaaagagaatgaacaaatggtcattgcgggaatgaaaaatgcaaatattttggggaaaaaagacatgcactaaataaattaaaa

SEQ ID NO: 25327 - DNA, 379 bp, Glycine max
atatctagagggaacatcaaatatggaagctgtatatgagtggctaaaggaacgggatcaaattcttactagcttagcaaggaaattgacgaaggcacaacgaatgaaagagtttgccgataaacaacgtcgtgatgtgaattttgaagtaagagactgggtgttagttaatttacgaccccaccagcagacaaccgccaccgaaagaaaatactctaagctcgcaaaaatacgtacccttttgagttatccaacgaataggggcaatttcgtacaagctggaattgccgccaacttcaaagattcatcccgtgtttcattgctccttattaaaaccattccagtccaccatgataaacacttctctggaattacgagc

SEQ ID NO: 25328 - DNA, 385 bp, Glycine max
agctttattcaagacaaagaaattttttttttcaagatggatgatcaaaactgtctatatagtcttaaaaagggtatattaaataggaagggaattccaattgaagtagcaaaaggtttggccaagaattttaagttaaaaagtcttttacaagaaatttactctctggtaatcgattaccagaggatgttatcgattaccagtggccaaaactgatttacaaacagctattaaaatttcaattcaaaatttgccctgtgtaatcgattacacatatatggtaatcgattaccagtagttttctgaacgttttaattcaaatttttagagcttgtaattccatttcacatatactgtattcgattaccagagcagaatttcagaa

SEQ ID NO: 25329 - DNA, 269 bp, Glycine max
ataaggcatgcgaagtgggtggaattcctagagtctttcccttatgttatcaaacataaaacgggaaaaggaaatattgtagccgatgctctttctcggcgtcatgcattactttctatgcttgaaacaaaattgattggtcttgaatgtttgaaaagcatgtatgaaaatgatgaaacttttggagaaattttaaaaatgtgaaaaatttcagaaatggttctttgacatgaagctttctttcaaagaaacaaattggtgtcctaatg

SEQ ID NO: 25330 - DNA, 320 bp, Glycine max
cagcatgcaagctccacactggagaatggagaacatattattagcgctaggcaaaaacactcagggggctccgaacaaaagtagaggatggacgaatgccaagaaggaccgcacttaggcaaacatgaaactcagctccaaactcgaaagtggaggacacaagaatgacaacgcggcacccgaaaaggatgagaaaggaggattgccgtgagggacctcacttaggcaatcatggaacacagatccaaactcgaaagtggaggacacacgaatgacaacgcaaaggatccacggggccccagaaaaggaagataatggag

SEQ ID NO: 25331 - DNA, 300 bp, Glycine max
  unsure (1)..(300): unsure at all n locations
gacgngtcttcttttggagaaggggtaaatactctactttcaaatttgtttttaatgtacaattacagtatgaagaagtctaattctgatgctcaaaaaggcaagtttgtcaaactctacatcctataaagaatttgccaaggtgaactgaagatatgaatcacgcataaggtcctgtctcctttggaaaagcaaaactctgaagattcaatatgcacattttttacagatattatggtgggaataacccaattagagcatgacgagtctagtatatgaacatgatatgttactacttac

SEQ ID NO: 25332 - DNA, 496 bp, Glycine max
gcttcatcttcgatccaagaagagagttttttgaggacttaattgaaatagacgaagatgatgatcttagtctatttgtaaaaagattcaaccaattcttgagagtaagaggaaatcaaagaagatcaaactttaaaccaaaaaaagggtagaagattcatcctctactctaagatgttatgaatgcaatcaacttggacatctgagggttgatttcccaatgctcaagaaaagaatagacaaatctgaaaagaaagtctttaatgaaaagaaggctaaaaaggcctacattacatgggatgataatgatatggactcttttgaagaatcagaaaatgaagttgtaaacctgagtctaaggccaagagttatgaaagtgatgaagaggtatccttgaagaagagttggtacatatatatcggatgctctaaacatatgatagaagatgcatcatagttcactcagaatcattagaattcttggagtgggaaaaata

SEQ ID NO: 25333 - DNA, 403 bp, Glycine max
ccttttccggtgtatgaattgtagattgattattattgcttgtaagaattattgatgcatagtggaaatctaattcaagttgtggattagataactggattagcttatctaaaaatagagagtgaaccagtataaaagattgtgtctttttctctcttgctcacatctttcactcattcaaggtttaatcaactcattcaagttttattcaaggtttgaaaacattcaagttttatgattttgaaataaaggatgttaatgaaggatcatgtgtaaggaaggattgattaagtattgattacatttttcatggaatgccatcattaaaggttcttttattcccattaaagaagtgaacagtgaattaatacctaaagaatgggatgaaataaaaaatgatgag

SEQ ID NO: 25334 - DNA, 597 bp, Glycine max
accaacccacatgaaatgcggagagctcaacgcccgcaaaacagacaggaaaccaggacggccaccagcataaacgaaacggccaaagcgaaccccacgcggcagcacgggacgacaaacaaaacacaaggatgacagactagcagcgaaaaaacgatacgacaacaccaaaaaatcaaccaaaacacgggaagacaacaacgcagaaaaaggcacgccaaaaaccgccacaaaaaaaaaaaagcaccacgcggggcacacaacaagagaaaagggggggaacccacaaaaacaaaacaccccgagaatggaaatgcagtcgaacaaacgaaaccaaagtaaacccgcacaagccagaaacggaaagggagcgagagtaggcaaccgcagacggggcaaagaaaaaccacgcacaggaggcgacaatggggggaagaacacaagcacccaaactaaaaaggcgaacctacaacaaaagaaacaacaggcgagaaactcgaagcccggcggacagaacggcgaacgacaaaagacaaacagcaatacgcaccgcccggggaaaaccagcaaggaatgaaaccaaaacacaagaagcgc

SEQ ID NO: 25335 - DNA, 241 bp, Glycine max
agcttgaggttttcattatggtgggcttgttctttagtggatgatgttggattacggcctcttgaaaaaggatgtcccactacttaaaggaatttattttttcataacttgtaagctatggcattattggttgagaaataaataaagttgaccccacggattctgtggaccataaccctaaaatattcccttgcatggcaggcaatggaggtactaagggggaatgggttaacccaatccg

SEQ ID NO: 25336 - DNA, 317 bp, Glycine max
atttgacgtcgttgtaattgttggattggactttgagcaatcgggatctgagtttttttttagcgaacgatatgattcatgaacgcttgttttgtgatgatggtgattatatgcttgcaattgtggcaacgatgttactggattaatctgcttttatgtatatgatatgctagattttatgtttttttgctgtagtggtggcattttattttcaacgatgtcgttttgaataagcttgatggtgcttgtttgattcagctgtatgtattgaattgaattcaaaatctgaaaatacgttcctctgttgatggaaaggg

SEQ ID NO: 25337 - DNA, 912 bp, Glycine max
  unsure (1)..(912): unsure at all n locations
ccccaccaaaccaggtgaacacacccacgaagacggccacacagagacgccaccaccncccacgcgccagaaanattgagccttgaaaccccgggacccaagaacccgggagcgcacacncggcaccgaaagaacaacccttttataacaaagcggaaagcacgcccgagaacaccaacaggcgcaaccgggcggcaagcagacagaaacaagggagatatcggaacacacgccgcccacgggaagggcggcgtgggcagaactgcgccaaaatcacgaagaaagcagggcgaaaacagccaaggagcggcctgcaggggaaccaaaccccgggggagcacacagagtccaccgggtcctaaaaggacaacagagaggcagaagacggggaccggggaaataagaggacacactgggaaggaaccggtccacacacgcacgcaaaccaaaggaggcgaaaacggaggaaagccaccgggggaacaaatccccccaggggatggaagccgaactaccagggaaaaaacaaacgcgcacaagggaaaccgagaggaaatcgcccgcggacaaacggaaaaaacaacccagaagggaggctggatggaaacggaccacacagggcccaacggacactcaggaataccaacgcctagaaaaaaaggcccacagggcacagccaccaccaacacaataccgacccaccggaagcaactgcgggaaaaacacgaagaacaagggggcgaaagagacggacgaaaaagaacaaaccctgaagccgatacaacccacaagcgccggagaccagaagacacaccccaacaggcgacaacgcacgacacgcgacaaaaaacacaagggggggaagaaaacaaggcacggaagcccaccccccgcctggacgacgccacaacg

SEQ ID NO: 25338 - DNA, 197 bp, Glycine max
  unsure (1)..(197): unsure at all n locations
ggggtccatcaaaggngagactccaccatggagacgcancggaagacaaaagaaaatacgcgagaggaggcgccattcatccaagaataaaccacgggagaaagagctgccccgcccacaggaacccaggaccacaaacacggagagaatgcaaacatggaggaaaaaaagagggaaagaaaagagaagggggagca

SEQ ID NO: 25339 - DNA, 580 bp, Glycine max
  unsure (1)..(580): unsure at all n locations
agcttgaaggtgtgtgatgtgccattattttcttatattttctaaacacttttagcaccattttaattactgattggtcttaattgtcaattaattaggcagttttgttatttgggctcatttagctaatttgatgtttttaatctaatttcaggaattaatgaaacattgggcttaatccggattttggttgtggacttgaagacgacaaataaagtagcgcttaccttagttaatttctaattaggaaatttcgcaattttattttatgtggtttagtgtttatttcgttttgggccaaagtattgtaatagggcctagtaattttgagtgactctttttaaatagcagccttgggattcgtgcaaggctattctgttatgttattcattattcaaagctttgttgagggttttacatttttctacttgaatgctactgtttcgttcttaatgcaattttccattttctgcttctaattacaattttgntcttgtttcttcttctactttcatttacgtttctgcttttagatgcatttgcgttttctgtttgaatctatggaaagctagattttctg

SEQ ID NO: 25340 - DNA, 426 bp, Glycine max
  unsure (1)..(426): unsure at all n locations
actcagcttgtccnnnncctcttgtggactgactttatcttcaacattattgtaacagcttatttaaaaccaaaacttaatccacagatccctcatttaagactaagtttcaatcctacttcaatcaagttctaaggcaacagtacatttcccaatgctaaagtcacctaactatgcacacaaatgggtgataagaccaagagcatacaggatttaagcactgaaagaagcattgaacacaataaacacaaccaattagatattaaaggaattacatcagttgttctttagaaatccctaacaagggtgtttagccagccattacagaaaaaccctaacaataatgagattaagagtagagaatgactactccttacacaagaagggggatccatcctcctcctctcagcatctcataatcactct

SEQ ID NO: 25341 - DNA, 614 bp, Glycine max
  unsure (1)..(614): unsure at all n locations
agctttgaaggtgcgtagcccaccatttttcatagtagaatactggtaatgtgtctactatcattgtcatcgttttttcgtcattgaggtgccacttgagctgccaggttctccacctttgggcgtattcttagaaagatccgtgcccctttttcttttttttttttcacatgttttgtagttgcatcctatccgaagacattatactgacactgcctaacgaaggcaaccactaggtccttccaagaatggactcgggaaggttccaagttagtgtatcaggtaacagctaccccagtaagactttcttggaaggaatgtatcagcaattcctcatcttttgcgtatgcccccatcttccgacaatacatctttagatggttcttgtggcaagtattccccttgtacttgtcaaagtccgacaccttgaacttgggaggggtgatgatattgggttctaagaacaactctnttaagttagcaaaggcataatcttcacctccttcaatggccctgagtctttcctctatatgatccaactcttccatttctgccatagcacaaggttttttactttgtgtggaatgcaagaggtgtaacttggggtgatactg

SEQ ID NO: 25342 - DNA, 355 bp, Glycine max
  unsure (1)..(355): unsure at all n locations
gtacccgtggaggtctatcattttgtttcatgtatttttgntctcgttttcattcactttttatacccccttttgacatgcttaaaccatttatttaagtcatttctcgcctaatctaaaaataaaataaatttccaccgatcgtttgaattgtatcatccgttaactttggttaaaatgaattccgaccgttcggtcgtgccgtaaccacgttggaaatcaaaaaagaggtaaaaaaataatataataataaaaaaatacccttttagtaaaataaagcgaaaaatcaatcggacgttttctctttgggatttctcattcttaatcgagttgactgataactaaagtgaaacta

SEQ ID NO: 25343 - DNA, 485 bp, Glycine max
agcttttcaagcaagcttccatcacattataccttcacaaaccaaattcaatctcaattctatgacattcttgggagaaaaaagcacttagaccattgctaacttgaaattagcattcatttttccaaatggatcaataaaaaacaaccaaattggtgtttattttcaatgtcctactccaataccaatgcgagttcttaatgagtgttcttttgagacacttaagagtagaatgcacaacacccttcgactaactaatgaccagtttgtacatgaaatctattaccaatagtcatctatagatgcaggtcaacaatctttttttcattctctgcaattgaaaaatgatgatgatgtttgctcaatgttaaagttcaatgagcaataaccgtgtgctggccctatagaattattatgtaccatcaatagaataccgatgatatactcaacctatttcgatccaccatcactcttactcatgatgc

SEQ ID NO: 25344 - DNA, 390 bp, Glycine max
  unsure (1)..(390): unsure at all n locations
ctacaggcgtgtgttgttatcacttattgcggcaagtgctccacgtaggcaagccgccaacagaaatggcgagacatgctaacaaaagcaatcccgccattgcttcctgtgagataggttagggcactgttcatgatgcatggtaaagctgaaccattgttcgtgatgcagactatggcagaaaggctagagttgtagatgtgttgacatgcattgcagctgtgcaaggatcacatgcatacaatgtggcttgcagagggttacatgtatggttaaatggcagacgacttcggggaaatttgcatgctttaataatggccagactgtgtgtagnttttgtttaaattggagcatgatataacttcaaatttcataacattctgaagcaag

SEQ ID NO: 25345 - DNA, 229 bp, Glycine max
agcttaaagtatgcccgagtcattcatctcttatgagatgttgttgaagtattggcgatcagaatttccattccttggattacggggttgaaccaagctcaagcttttacaaaaaggttcatcaagtcaagttgaaatatggaagtaaccatcctgcaaaattggggcaaaagatgaatcgagtcacatcactgcttcgtctactgccaaacatatttaggattattga

SEQ ID NO: 25346 - DNA, 381 bp, Glycine max
tatcaataaacacaagttgttttttatttagaaaattagagtttttctcttttatcttagtgagagtgattctcctaaattcttgagtgattcaagaacaccctggctgtatcaaaggactttcacaacctttgtgtgttgccctcgctggaaagagtgagtctttccttcctttcatcttcacccttgttctttcaaaccacaattccagaaaatccacctctacccagaattatctcgtggccgtaactcccattttacgcactcaaattaagtgattcttgagcctaaattgactttcaaaacgagacctttcacctcgttttggaatcacctcatttggagccctgtagcttcagttattgccatttctatatttct

SEQ ID NO: 25347 - DNA, 400 bp, Glycine max
  unsure (1)..(400): unsure at all n locations
agcnnnaaacgcaccagggctatgattttcgtgggaaagaagagcgcatgactgacaggagagaaaaccgcaattccaccagcaagggcaaaggcctgacaacactcaaaacataccagccaaaaacaagccaacaacgaccccccaacacgcccttgaatcaccaaggactgagcttctcaaacgacaaagacatgagctgaagaaaacaacatgacctcaacttgaacagccacagcctgataatacgggtcagtgtcgcactcaaagcatagctttttaacatgcaaccgaaaggagcaacaagcagaaaaaaaagaactagcgtaaactttgcaaacaatagaagggaaagaggattaaatggatggtgataacgggcaccaccttcaagcatcga

SEQ ID NO: 25348 - DNA, 268 bp, Glycine max
ttagtttttctatgatcatatcttacagaacgtgactaactcaagataacttgaccatatggagttgcaatgaaagtcataagatacatgtaagtatgaaaactatcatctattaaaatattactcacacaaagtgacacatggaatatacagactttattaagagtgatcgatgcctataatgattctcatacaatagtctctgaaacttattatttatacttcagatatatatatgagtagcttcttacaacatgacaacatgata

SEQ ID NO: 25349 - DNA, 631 bp, Glycine max
agcttgtatgagtactggaaaatattttttaaattgtgtgcaagctgccctcaccaccagatttctgagcaacttcttcttcaatacttctatgagggacttaccaacatggagaggagtatgattgatgctgccaacaattcaattcaagaaatgatgttattgttcttagaggagtccatgaggtggccacagattcatcttcatctactgaaaataaaaagcttgaaggaaaacttgatgccttggtcaaactagtaactcagcttgccatgaatcagaaatctacacctgttgcaagagcctgtggtctatgttcttctgtagatcaccattcagatctttgtccttctttgcagcaatctggagtcaatgagcaacctaaagcttatgctgcaaacatttataatagacctccacagcagcaaaaccaacaacagcaaaataattatgacctttcaagcaacagatacaatccaggttggaggaatcatccaaatttgagatggacaagcccttcactacaacaatagtctatcccttcctttcagaataccgctagtccaagcatgccttatgttcctcctccaatgcggcaacaacaacggcagctacaacaaatacaacaagc

SEQ ID NO: 25350 - DNA, 397 bp, Glycine max
acctaaaaaccattttatggtccatcgccttgaatggtcctctttgcttttattggttaaacgtggacttttgaaagcctaaaatcaacacataactttgtcacccctttcaaaaaaccaagagatcattaatggtcctatgccttaatgttttctctcctttcaaaagaatcaaaatatcgtttaatggtccaacgccttaaatgacccttttattcagttaaaatatatcttgcaaaaaaacagataaaaacaacttaaccaacgtttaattctcgaagaactacgtaggtctaatttcctcaccacaattgaagaatacgtatgagcaagggaaacacccttgtcaaccacaaaaaaataaaaatacataaggcttcataagacattaaaacat

SEQ ID NO: 25351 - DNA, 321 bp, Glycine max
atttcagaggccaagctcccaaaagacaatttgtaccattggctattgcttaagtgaaataatcacttaaaattgttaaccagtatactaaatacattgattataaaatttaaaatagaaatattttattaaaattatcattaataaacttttgttatgattttcaatacagtcctaacatgaattacaataaaaaaaatctattttaaatctctttactattgtacttaagatactgaagatccataatcacattaaagatatttagtgcatattctaggcccacaaactatttcaaacttagtctaatttatctttcta

SEQ ID NO: 25352 - DNA, 618 bp, Glycine max
  unsure (1)..(618): unsure at all n locations
cgacgccgaacgaggaaaaaaccgacgaacaacaaagcgattaggagaacgacaaagaaaaaaaccagagcaacagganatgaacctgaaaccgcgatgaaaaaaacaccagggagaaggtaaaaaggggagacgtataagaacgcaaggagaggaggcgaaaaaaagacaccacacgaaaagggacaagaggaaaaaagaggagaaacagagcgaaagcaaacaaaaaagaaaaacggataaaaagagagaagaaaagagccaagaagaaagaggatgaaaaagaagcaaaagaaaagagactggaaaacgcgaagaacagaaggaaaagacaaaacgacgggagaaaaaaaaaaggaagcgacacaaaaaaagaaaagccaagcgaaagagaaaagtcgagcaaaaaaagaggaggaaaagaaatgaaagccagagcaaaagagaaaggaaggaacggcaaaaaaaaagggtacaaaagggggaggaaaaatgccgaaaaaaaaaacaaggagaaaaagaaaggggagacaaaacaagaaccaaggggaaaaaaaggaagaggtagagaaggaaacagggggaaaaaaaagaaagtgcagaaaccagagaagagca

SEQ ID NO: 25353 - DNA, 127 bp, Glycine max
agagcacaacctgaaaaagcacgcaagaaggaagcaaactatgaagccaaacatccgcagacctcctgcaaaaacccagagagacaacacgaggtaagggccaaccggcacccctaaacccaagcaa

SEQ ID NO: 25354 - DNA, 572 bp, Glycine max
  unsure (1)..(572): unsure at all n locations
agccttataatcacccaaaccaactcctttttctggttaaaaaacaaaaaaatgctcactacttcatccaaagctaccttttcaaactatggcattaaatgggttaaatcaacatattttgtcacttacaaaaggaaaagcctaaggaaaaaaaagaaactaatgaaggggaattatgcacactaaataaaaaaggacttgtaagggaagatattgacagagcatgatcatctcaaaccattactcaaaaatcgtaattccataagagggtaatcataggtaaatgaaatgtatattcgttataagggtaatcacacacagatgcctgatatatattggtcactgcataatacaagaaaaatatgcatttatgtaaagaaccaaaaaatgctcataccatcttcaacctctctcagcttcttctttacaaaattacaagatatatttanggctgcccatcccccaaaaactaagctattaaacacaaccttaaatatgccaaaccctatacaaattcaccctgtaaaataccccaaaattaaccgatgtaattaatttaaagaaagagagag

SEQ ID NO: 25355 - DNA, 352 bp, Glycine max
ttattgggaacttcaagagaaaagtgctaagacctctttatttggaggaatataaccattgagttttgccacactgaaaaagtctggatgattcacatcgatctcttaatttccgcacacaatgaatatatgtataaagctccattttagaaagtatagatgaaaaagtctgcagtttttcagcttctctgtgcggaaaggatacaaacggacagataggaagtaagaataatgaaatatgacaaatgcaggaattaaaaacttgtataacagataccaagggcacaccggaattcggcttacaaattccaagttttcgaaaacaaagaaaccgaagcggcgacagaaccgc

SEQ ID NO: 25356 - DNA, 422 bp, Glycine max
tggggctgaaaaaaggcaaatttgatcattctactaggaacaatgagaaaactggggccaattaaaaaggtgaggatgagggagaaacccatgctgggactgccattcctgtaccgccaaatttcccacccaccccacaatatctttactcagccaataacaaacttttttcttacccaccacccagttatccacaaaggccatccctaaatctaccacaaagtctgtctaccgcacttccaatgacgaacaccacctttagcacaaaccaaaaacaccaaccaagaagtgaattttgcaacgagaaagcctgttgaattcaccccaattccagtgtcctatgctgacttgctcccatatctacttgataattcaatggtagccctaaccccaaccaatgttcctcaacctccatttttctg

SEQ ID NO: 25357 - DNA, 408 bp, Glycine max
  unsure (1)..(408): unsure at all n locations
tcatttccaaatatgcatgtgaattatgacgtcttaacaagaatcaagccaaggctattgtgcaagcaatcaatggggcaaaacacaccaaatgattataatgatggatggctcaaattctcacaaaggtaaaaccatcactttcaaattgagctttcaaaactatcatgacatgtagagaagaatcaaggatttcaagtcacaaaatgtcaagaacttttattttcaaaacaattacccatttcttgaacctatcctataattcaaagaaaaacatgcaaagtcgtacgtgcacacganattgacccaaaatattaaactgaaaatccgacgaaactaacaacatttacaaattaacacaactaacaaattaacaaaaccatcaaaactagcaaaaccaaagaacac

SEQ ID NO: 25358 - DNA, 499 bp, Glycine max
agcttgcctggttttattttgtgataattatgaagaatgattttatttatttttattttaaaacttagtacactacttataagttataatcatacactaaaaaattactatcaagcttggcattattttcaagaactttattgtttctttggtttgtcattttccatttaccattgtctgttttcaataagtaggcatgttattgaattgaattgaattcttaagaatctaggcattgtaatcgattaccagagacagaatacttagaggtttttcaaaaagaagtttgaaatttgaattttaaatactgtaatcgattaccatttaactgtaatcgattcccagtaacgaaaattttagaaatttgaaatgaaaagtcatgacccctcaatgtataactgtgtaatcgattaccagtgagggaattctaaaattgttctgaaaagtcacatctcttcaaaagttttgaaaaaccacaaagggcctatatatatgtgag

SEQ ID NO: 25359 - DNA, 395 bp, Glycine max
gttgccttggtttagtgtaagtctttatgttctacatttggattcagattgcacgtatttgatttttttgttaaaataaggattacgggtaacaagtttattattaaacttatttatgtgcaatacttaaattgcacttaaggacttcaattgatatctttaaagacttaagttaaaccagttggaaatagacatgtttgagatcatattgcatacaatttccatgttgctcattcatattgatatatatcattgagtgtattgacgaaagccatggcgattccattattgcatgtaattttcaagtgaacgtctaaagataaataacatacaaatgtgtgcctaaggaattgtgatacaattgttacactactagaaaaatgcaatttcacgaa

SEQ ID NO: 25360 - DNA, 565 bp, Glycine max
agcttaactacacttaaggttctttgctccttcaaaactatgtgttcaactaagcaatgcattaaagacatgttaatttaattgaataataaatgcgagtctttattaggaggtgtgattaattcatttaatataataaatgggcagattattcaaggagtagttgaagatttgatttattctagactattactttttgttggacaagtgacctcaataacttaagagggggtgaattaattaagttttaaaatttccccgctaacaaattttaacccctttttaaatgatacatgataaactcaaaatgcagaagaagaagaagaaacaatcaatttaataattttcttttaaatgcacaagacaaagtaaactgcaataaaataactgagataagggaagagagaattgcaaactcgatttatcctggtttggccactccccgtgcctatgtccagtccttaagcaacccacttgagattttccactatctttgtaaactctttacaacttctgaacacatcttgggattcttctctcttgtgttcaggattctcataagtca

SEQ ID NO: 25361 - DNA, 399 bp, Glycine max
ccaatggactaccttgttttatttctttgatagcccttttgagccttgtttccctttccttgttttgaagctcactacaagccttaaatgaaaaaccatgatatcaccatatctttaaggaattttggagctttggaactgttttgggaataagtgtggggggttttttgtttcattggataacttgttttgttggctatgcttcgtgatgtactttgggccatacttgatgtacattgtatattggttaaatgttggacatgctgaatgaaatgttgtttctcaaaggctatagagtaaaaaaaaaaaattcacaaaaaaagaagaagaaaaagaacagccttaaagttgagtgaataagatcttaaatggcacaagaatgatttttttatctatact

SEQ ID NO: 25362 - DNA, 473 bp, Glycine max
agcttccatcacttttgacgactgttttttgagattccttagcattggcctgataccttgcacataagtaagcacttagcatgacatatggtctatttttagttaagtagaggagtgatccaatcatacctctatatcttaactcatccactgatttacctttctcatctaagtcaaggtaggttaaagttgccattggagtagatgcttctttgcatttttccatgccaaatttcttaattagttttgtacaatatttcgtttgatttaggaaggttccatgtttcatttgcttgacttggagtccaagaaagaagttcaactctcccgtcatagacatctcaaattccttttgcatacaactagaaatttccttacacaaaatttcatttgtagcaccaaatataatatcattaacatatattttaacaattagcaactcactgtttacttttcttaataaacaatgtttt

SEQ ID NO: 25363 - DNA, 392 bp, Glycine max
acccatcacatgtggtactatgttgcggtcgggcgatggtgcacaacaagttttccacgtccacaaatcgcgcataaacccaccatcccctgttgcccacctccaactgagctcacgtactcccacgtagctcatatcctcgtttctctcaacaccgggtccccatcaatcctcccaagcttccccaacatccaagtaactcaacattcaaacagcaaaaattatcacagccaaacaaaacagggcaaaggcataaaactctgcccaaaacaccaaccaaaatcacagcttttctcatttaaagaccccagtaataattccttcgttccacttcgttaaccgttggatcgactcgaaaagtttactggaagtctctagtacttaaacctaca

SEQ ID NO: 25364 - DNA, 146 bp, Glycine max
agcttagagcttattcaaaccgacaatttttttttactcggatgtctgattgagccccggaatacattgagacgctcaaaattgaatggtgaagctcgcagcaaattcaaacgacaataaccttttactcggatgtctgattgagt

SEQ ID NO: 25365 - DNA, 254 bp, Glycine max
gcgtctcaatagattacgggactcattcagacatccgagcaaaacgttattgtcgtttggattagttcagagcttcagaattcaatttcgatcgtctcgatatattacgggactcaatcagacatctgaggaaaaaagttattgtcgtttgaatttgctgagagctcaacattcaattttgagcggctcgatgtattaccggacctaatcaaacctcccaggtaaaaagtattggtggttggatttgctgagaa

SEQ ID NO: 25366 - DNA, 488 bp, Glycine max
agcttttcaaatgggtaaaaggctctcattcactttcttctacatcatattcaaacttgtccaaataaataataaagtcatctcgactcaaagaaagtcatataagtctcatacaattaatatagaacctatatcctaatgtcacatcctatcagagcgtggtgttcccgtgttctctagcatgaggttcttcatagtcatccacctattcatctgctcccccgaacacaagttcaagatcatcacaggatccaaacacaacaacacacagggagtgagttatcacattcctagctaatagagaaacaagacaattaaatatatatattatataaatgagataccacttgcttaaacatagctcacgtaacttcaccacttcgtcattcaaatttacttttcaattatcaatcacattacacgagaatcccacacttcgatcaagatataatacacatcaattagcaagcctatgccataagtatgct

SEQ ID NO: 25367 - DNA, 387 bp, Glycine max
cttcatatttaagtatccattgtctctcaatagttggattcttcactatattcttcgtttgatgtcttgagtccgtttgagcatttaatgcacgtctcttttcatgcaaagaccatgatgataggataacatgttttatacttaaatgaggaagtcacttctttcatcatagtaggtctacaacaatagagagcgccctttgatgaggatcaacatctccaaagtgtgggtttcatttattctttataggactttgatagatcctaggagaatggtggtaggagagatcgtctaaagcacatctagatgtaacaacaatggtggtaggagagatcaccacttgagtctcagcaacagtccccttgatgctgactccatcttgtcttg

SEQ ID NO: 25368 - DNA, 324 bp, Glycine max
aataaccaaatgcacatttggccaaccctcaggcaagtacctgggacatgtgggttcttctcgcgggggcgaaacagtgctaaccaaggttcacgctatttaacagtggccggaacctctatcggggcatgcactcttaaactttttgggactcgcgggattctacaaaagattcattttcggctatgcgacaattgctgcaccttaacccaacttctaacactggaaccttttcaatgggcccaagaagctcgtgcaatttttgctgctcttaagcagatgctgacctcaacccctgttctccggttgtcggactttactctt

SEQ ID NO: 25369 - DNA, 397 bp, Glycine max
tggaggaaaagaaagagggagagaaagagagaggggggagcacgaaattgaaggaataaaagagggagagaagtggaactttgaagtgtgtctcacaagactctcattcatcaaagttacaacaagtgttacacatgcttctatttatagactaggtagcttccttgagaagctttcttgagaaaacttccttgagaagcttctttgagaaaacttccttgagaagctagagcttagctacacacacccctctcataactaagctcacctccttgagaagcttccttaagaagattcctaaagaagctagagcttagctacacatacctctctaatagctaagctcacctccttgagatgagaagctagaacttagctacacatcccctataatagc

SEQ ID NO: 25370 - DNA, 558 bp, Glycine max
agcttgttcatcttgagataatttgtgttcatcctcatttgaagttgatggtgcaacatatttctttggcctaacaggaactccaatatttttacagcttttaatgttatgattggtttggccacaccttccacatgtaaactcaggcaatttcctctttagcttatgtcctgtgacattgtcctcatttacaggtctccttctatttttctttggccttcctctttggacccttttatgtggtggaacagggtgtgtatactgtgtctgggcccaatattgtggtccttggactggttcaataaaatgctagtatgtcttattataagcttctattgacagccactcatgacacatgtcctcaggcttccctcctttgtgagttattgttgcaatgacatgtccgcatggcatccctacatcaaagttgtaaaatcagcacacatgtaggttaggaatgaaaaaaaaactattaagaacacaacctgttagttgccatactccacaagtgcatgtccattcacctaaattgacctcaaccttatttccccacatgtg

SEQ ID NO: 25371 - DNA, 410 bp, Glycine max
aacatagaattcccatgtatatgtagatagtttctgcattctaccagacaatttttttttagaaataagcaataggatgcttgttttggcttaacacaacaccaactcccctccctgaagcatcagtttctaatacaaaaagtttattgaaattaggaatagccaagacaggtgcagaagtcatggctatcttaagtttttggaaagcctgtgcagtagcttgaccccatttgaaagagtccttcttcaatagaacagtcagaggtgttgcaatggtagcataggtcttaacaaatcttctataataacctgtaagtcctaggaagccccttaatttctttagattcataggctctggccaattctgaattgcctctaatttgtttgcatccatagctatgcctgatcct

SEQ ID NO: 25372 - DNA, 117 bp, Glycine max
agcttcaacatcagacgcctttctttgtgttggaactacttctcatggacttgatgggggctatgcaagtcgtgagccttggatgaataaggtctgcctatgatgaagcggatgatt

SEQ ID NO: 25373 - DNA, 299 bp, Glycine max
ttgatcgtatctaatgacattcgcgaagatgtgatgctaaattctctagagtccttctctattgcggacgtgtaaaggatatctttcgaagaggtcgccatgatggacactaatggtgatccagtggctgcatatatgattgtcgagaccattcaatagcagtgttaacataagccattatgattagaagtggagatcctcaagagttcaatctacattggaccatggtgttgcacttctatttgtagagattgcttaacgacaagctaaaatatacttggctatgtttcttaatactt

SEQ ID NO: 25374 - DNA, 619 bp, Glycine max
  unsure (1)..(619): unsure at all n locations
agcttcgaagggaagagagagattctttcacgagcacatagcatggtcttgaaagaggagttagctgcttgctcaaggtccaaaagaaccttgtctcaacgtttatgcgagacagagaccaacatgttatccatcgtaagcaagtaccaagaagaactaaatctagccacggcccacgagcacaaagtggcggacgagtatgcccaagtgtatgcggaaaaggaggctagaggaagggtgatcgacgcattacatcaagaggcaacaatgtggatggaccgatttgctcttactttgaacgggagtcaagaactttcccgattgctagccaaggccaaagcaatggcggacacctactccgcccccgaggagatccatggacttcttagctcttgtcagcatatgatagatttaattgcccatataattagaaaccgctaggaagctttgtactgtcactcatatcctgactagntataactttttggatataatgagattattccatgtttttactcccacagataaagccgaatcaaatcattcccggattttatctctaacatggatttcatttttttacctacctcccacgtgtgggtttttaaggaaaaaattc

SEQ ID NO: 25375 - DNA, 399 bp, Glycine max
  unsure (1)..(399): unsure at all n locations
ccactcatgacacatgtcctcaggctttcctcctttgtgagttattgttgcaatggcatgtcaacatggcatcccttcatcaaagttgtaaaatcagcacacatgtaggttaggaatgaaaaaaaaaaactataaagaacacaacctgttagttgccatactccacaagtgcatgtccattcagctaaattgacctcaaccttattcccccacatgtggacctcatatctcaggcccatgttatcaccacaccaaataggagtccattgattagcaaaatgaaattctttttctagtcttttatactgcactggacataatggtccaggctttccagaaagattaatcttgcgggcagccatggttctcatgatataacttctaattncttcaagcatt

SEQ ID NO: 25376 - DNA, 408 bp, Glycine max
tgtttcatgctacaacttatactcttggctagtggattattcagcagtttctcattcagagcaaactctttgtttatgtgagcaaacaagagctccttccatcgccgaccccataagaaaagaaactcgaatctcgtactatgctgaagcacacgatggtatgcaaagcaatgggtcctctgaggacacatcatacagctatgatatggggccatgaatgtagacttagttattgctaaccgatgctcgacattaacaaactagaattgagttcctctgttggtggggaaagcgatggcgcgaatatcaaaacacgtgtaagaaatggtataaggctgcagctcaattattgtaacgaaagtcactatgttgaattgagctcacctaccatcggttttttttcaataa

SEQ ID NO: 25377 - DNA, 437 bp, Glycine max
cttacttaatattttccaaatcatcaagaatcttgttgtaatcagccaattgttcagtggctgttcttgactgtcatcttgaaggtgtacagttgttgcttcaagcatagctgatatgcaagggactattgcatatacaatgactccagttttagccacattgaggttgatgtcctttctcttgcaacttctcttaaaagctttatctccaaggcatagaatgattgtacttctagctttagcaatcatctctgatttctcctttgagcttagagattcagacatcttttcttctcctttaagagcttctgcacagccatgttgaatcaagattgcttccatcttgattctccataacccgaagtcattttcccctgaaaacttctctatatcgtactttgttgttcccatctatcttgatcttgatcctgtcccac

SEQ ID NO: 25378 - DNA, 442 bp, Glycine max
  unsure (1)..(442): unsure at all n locations
agctntctccactaagttgcctgatgcctgaaatgtcttttctgatggcagtggtcctagatgcagggaagattttctccaagaacaccctcttaaggtcatcccagctgaaaacggacctgggagcaaggtagtatagccaatcttttgtcactccctccagagaatgaggaaaagcctttagaaagatatgatcttcttggacatcagggggcttcatggtggaacaaaaaatatggaactccttaagatgcttatgaggatcttcacctgcaagaccatgaaactttggcagcaaatgtattagtccagtcttgagaacatatgaaacaccctcatcaggatattgaatgcacaagctctcataagtgaaatcaggtgtagccatctccctaagagtcctcttacgaggtggagggtgagccatgttctcagtatgaaa

SEQ ID NO: 25379 - DNA, 406 bp, Glycine max
  unsure (1)..(406): unsure at all n locations
ntgagccaaaatcctgactcaccatataccttgacccatggtgagaatgccaatccttaccctcggaagcaaaaaaaaggagagagagagagagagaagagaaggaaaatttccgatcaaaggaaaaaggagaaggaaaatttccaatcaaaggaaaaaggaaaggaaattcccaatcaaagagtgggggaaagcaaaaagaaaagaaagaaaattcccaatcaaagaatgggagaaagaaaaaaagagagaagtaaaaaagaagaaatctcctggtcagagaaaccataagaaatgtgccgagaggtccttggaccagacaatatctgaacaatacagaattgtcaccaaatgaataaaaaagaaggaaaggaaaccacgacctaaaatggtcttccccctttaa

SEQ ID NO: 25380 - DNA, 432 bp, Glycine max
  unsure (1)..(432): unsure at all n locations
agcttgtaggattatggggtacccatcacatgtggtactaggtggtggtcgggcgatggtgcacaacaagttttccacatccacaatgcgcgcataaacccaccatcccctgttgcccacctccaactgagctcacgtactcccacgtagcccatatcctcgtttctctcaacaccgggtccccatcaatcctcccaagcttccacagcatccaagcaaaacaacattcaaacagcacaagctatcatagccaagcaaaacagagcaaaggcagaaaactctgctcaacacatcaaccaaaatcacagcttttctcacttaaagaccacagtaacaattccttcgatccaattcgttaaccgttggatcgactccaaaattntactggaagtctatagtgcataagcctacattttgaccggctggatctac

SEQ ID NO: 25381 - DNA, 421 bp, Glycine max
tctagccaaatggacttaccttgaattaattcctttgatagcccttttgagccttgtttccctttccttgttttgaagctcactacaagccttaaatgaaaaaccatgatatcaccatatccttaaggaattttggagctttggaattgttttatgaataagtgtggggggtttttgtttcattggataacttgttttgttggctatgcttcatgatgtattttgggccatacttgatgtacattgtatattggttaaatgttggacatgctgaatgaaatgttgtttctcaaaggctatagagtaaaaaaaaaatcgaaaaaaaaaattcgaaaaaaaagaaaaagaaaagcaataaagttgagtgaataagatcttaaatggcacaagaatgatgaaactctcggttctactctttatg

SEQ ID NO: 25382 - DNA, 430 bp, Glycine max
agcttcattcttagaatgaagtaagtagatatacatatatcgtgaataatcatctataaaggttatgaagtatttcggactatttgcatccatgtctggacaacatatgtctgtatgtatgatttccaataaattagaactcctctttgcaccctttttagacttgttagttttcttacccttaatgcaatctacacaagtctcaaaatcatcgaaatccaaagtactaagtactccttcatttactaattgcttgattctctcaatagagatatgtcctaatctctggtgccacaacatagaggattcttcattcacattacatcgttttaacccaatagaaacatgcatagaagtagcatcgtttttcaattcaatcgaataaagaccatcaaccaattgaccacaaccaataatttcagaattattt

SEQ ID NO: 25383 - DNA, 389 bp, Glycine max
tcataaggttatatatggcctcaaataagctcctaatgcttggtttgataaactaaatgagactctactaatgtttgaattcaaatccaacaagtttgatccttcactatttgtttattttaaggcttcatccataatctacattccggtatatgttgatgacatcataaaaacatgaaatgatattcctttattacatcaactcatttctaagctaaatatagtattttctctcaaagatcttggatcctcagattatttcttgggaatgaaagtaaagcatctatctgatggttccattgctttaacttaaaccaaatatattatagacttaatgggcaaaaccaacatgttagatgtcaaacctatatcttccccaatggtaactg

SEQ ID NO: 25384 - DNA, 445 bp, Glycine max
  unsure (1)..(445): unsure at all n locations
agcttataaagtggtaactgaaatctcttttgattctgnntaatattcttggatcttgattattctattttctcattgggccacatntcgtggctgttattatttatacaagtttcgttggtctttaaaaaaaacatttgtgataaaattacaaaggattagtaaacttaagtaatgttttttgacttttgagagaagcaatgtttgaaagagaaaaaacttaagtgcatgcatattgacaaaaatatctaaatacattattaatgttgtatcattatttttaaaatatttatatatcattattaacaaaattaatttatatctaaaagtgatttttattaacgtattcaaataacattacttttatttaaattactgtttcacttcaaattcacttttaactaaaattaatcttacaaaatcaaaataatctaaactcgagtta

SEQ ID NO: 25385 - DNA, 431 bp, Glycine max
  unsure (1)..(431): unsure at all n locations
cagtctaacatcctgtttgcaattttgtcatttaaacttcttctttccacctatttgattgtgatctataaattttcgtgccttatacccaaatgtctattatcattaatcaatcgtcaagtgtaatagttgactaatgatgtaacaacattgactacaaacttgagactctgatgttgtagtgataatatatatggcattgtcataatttngtaatcgtacaatcaaggataaaatgcataaactttttaaaataaggtaataaaacatgtgaaaaataatatatgataaaaatgacgtgttaaaggtggaataagaacctatgtccccttctttatcctacaatcctcaaccactcactattacaaatgttatttttatgatactatttctaaagtgattcttttcatagtgacaactttgtaattagt

SEQ ID NO: 25386 - DNA, 419 bp, Glycine max
agcttgaaattgaacaacagatgctctcgagaaattcaaatggtcataacttatcacacgtaggtccgattctggcggatagtatatcgagaagctcataattgaacaacgaaagctctcaagaaattcaaatggtcataacttatcacacggaagtccgattaaggcgcataatgtatcgagacgctcgaaattgaacaacggaagcactcgagaaattcaaatggtcataacttatcacacggaagtccgattaaggcgcatagtatatcgagaagctcataattgaacaacgaaagctctcaagaaattcaaattgtcataacttatcacacggaagtccgattcaggcacataatatatcgagacgctcgaaattgaacaacgaaagctctcgagaaattcaagtggtcataact

SEQ ID NO: 25387 - DNA, 266 bp, Glycine max
  unsure (1)..(266): unsure at all n locations
gctctcgagaaactcaaatggtcataacttatcacacagacgtccgattcatgcgcataatatatcgagacgctcgaaattgaacaacgtatggtgtcgagaaattcaaatggtcataactngtcacacggaagtccgattcatgcgcataatatatcgagacgctcgaaattgaacatcgcaagctctcgagaaattccaatggtcataacttgtcacacggaagtccgattctggcgcataatatattgagaagcttgaaattg

SEQ ID NO: 25388 - DNA, 423 bp, Glycine max
  unsure (1)..(423): unsure at all n locations
agctngaaggagtttcatgcaccatggaactatttcactctataagttgattccaattggcttcctagttttcagcttacctatttggatgtgggatcatggcagttaggtcccagctttccatcgtggattcagtcacaaaaaaaacttaaatatttaggcatgtctaacacagggattattgattctattcctacacagatgtgggaagcacaatctcaggttttgtatttaaaccactctcataatcatatccatggtgagcttgtgactacattaaaaaatccaatatctatcccaactgttgatctaagcacaaatcacttatgtggtaaattaccctatctttcaaatgatgtgtatgggttagacctttcaaccaattcattctctgaatccatgcacgattgtttatgtaacaat

SEQ ID NO: 25389 - DNA, 425 bp, Glycine max
  unsure (1)..(425): unsure at all n locations
tagcanttgccaattgccatgatgtatatctccttcttgacagtctctcatcaagttggagtggtatcagagcattgaactaagttgatcgttccaatgggatgatggttttgattgctgcagataaagtgtcattgtgagtttctggtcccatgagttaaactacaacgactaaaaaaaatattgtcgtaactttaagggtcaaaagcataattaaaccttttatttttttattactttttttaacaacgggttatatatatgtagcagtttattctaaacaatggactacgtgtgaaatctttgaattctatgtaagaaatgttatttcaaacttctcatcagtcttcatgtcaatgatggcatgctccatttgaattctatgtctaattaagctctcngtcttccgtttctgaaactttatt

SEQ ID NO: 25390 - DNA, 433 bp, Glycine max
agcttgccacccagctcgcccaggtgagcatggttgcttcctccagaagcaacagccttctagaggaatcttctggagggcccaagtgggcctggttgctatttgcacccccatttttactaagtacaccccctgcctttttttggtgattcttttttcgtaaagttacggaaacttacgaatttcgtaacgatacttgttttctttccgtaatgctacagaaccttgtggattacataatcatcccctttttgacttacggaatattacggaacctcactaattgtgcaacgatgcttccatttgatttccggtgtgtcacggaaccttacggattgtgcatcaatattttcttttgttttccggcatgccccggaatttcacaaattgcctaatgatgggtgccaagcacctcacaaggaccaaacaaaag

SEQ ID NO: 25391 - DNA, 388 bp, Glycine max
  unsure (1)..(388): unsure at all n locations
tgcatccactagaagagaaagaacatgagattagaactttgactgaaaatgttagtcagcttgtcagattgattatgaaggaatgcattgactgtatcccagtgagagtgtgatccttaaattttgagagaaactactatcatttagtactgatttttgcatgaatctcggaagtatggactgaatgcatgaattgaggatgatgaaggccatgtttgattatgatagccacttggccaaaaagctgaccatgtgctttaatgattatcccttgcacccagtttgagttgaatgaattattgattgagtgaaccttgagcctatacagtgttatctcttgctactttgtcttanggtgtaggagagtatcatccataggaagcttggt

SEQ ID NO: 25392 - DNA, 424 bp, Glycine max
  unsure (1)..(424): unsure at all n locations
agcttcttaagatagttggttccattaatgaacctccttaccgaattgagtagcaaaaggattcttgattgttcagatctcaagcaactcttaaagtcctaaagcctcacattttttaaagttcaaaactgaattgtgtaaaatgtgatgttcttaccttgttgtggagtaagttcatccttagttcttagattgggagcatctaaggtgcttttgtcaggctgttctgcaagtaccacctcaccttcataaacaacttgacgatcctcaaaatttccagttcttgtatccaacacacattgacatttgtcattttcaatagtgacgacatgttaacaacaaattgtaagttagggtttaattgaattttggaaataaagatatacaaaaattanaaccttaacatcaacttacatgggtctga

SEQ ID NO: 25393 - DNA, 422 bp, Glycine max
tattgcaaaagaaacagttgtcaccttgattttgtttcttttgtgctagacccttagcagcttcattcttgggctcctcggttctttttcttttgcccttgtctttagaggtacttacaacatgagcacttttaatcctttctagcttcagtctttcctcttcttgcacacagtatgaaataagatcattaagagatcatttctccttcttacagttatatgagatcttaatctaactaaactgtgaaggtagaaaaattagtactaaatgaataagcaagtcttctgatagctcaagctttagtgcccttaattttgaagcaatatttgacattcccataatgtattcactgacatttcctttgccttgatacttcaaggaaattaagttctgaagaatagtacttggttctgccttatca

SEQ ID NO: 25394 - DNA, 405 bp, Glycine max
actttaatagtcgttttatagattcggcgttgtcaagtggagaacgtaacttttccaagaattcatttttttatggatactgtctcattttctgcataaaaatttgtagagattctgataggtctagattaatctgataattcaaatcataccacttaaatgtattcgaatcttttttattcatatcagattcgaattaatctaattgaaaatcgatgttgatagactttaattattatatatagatagaatttttatgatttaatccattaatcatgtgttattttctataatttgctattatttagttggttctaagtcaataataacattcatatatatcgcttacattataatggtaagtatggcattattatttgtcaacaatggaataaaattatgtta

SEQ ID NO: 25395 - DNA, 407 bp, Glycine max
agcttgaagaggatgctttaatggaggaaaagaaagagagcacggggagaatgaaattgaaggaataaaagagggagagaagaggaactttgaagtgtgtctcataagactttcattcatcaaagttacaacaagtgttacacatgcttctatttatagactacgtagcttccttgagaagttttcttgagaaccttctttgagaaaactttcttgagaaactagagtttagctacacacacccctttaataactaagctcacctccttgagaagcttccttgagaagattcctaaagaagctagagcttagctacacacacctctcttatagctaagctcacctccttgagatgagaagctagagcttatctacacaccccttataatagctaagctcaccccatg

SEQ ID NO: 25396 - DNA, 513 bp, Glycine max
  unsure (1)..(513): unsure at all n locations
cggggatgagaaggttgagncnttttgannatagaanacgctccgcgtgcacgtgacactatccaatgctacatgctgggtcatgacaatgaatgggactctgagtatggagggactgacattgaagacctgtggctatggattattctcagtgccgcgcgctcccagtggaatacagtcggagggtgttcatgcaatgagtcatgcatcacatctatagagaacatggagcaacgttcacgttggcgccctacatacatgaggatgttgtgatgctcatctcatacacgcatggacgaagtacctgtttcgcaagggtgcttgacattgcatggatattatatctgctggcttcagtggttgtgaacttaaaatgatcgacacgatctatctctctcgagagataatgtgcctatacaccgtgtgtgtcacagcacctatcgcatatctattgaccctctccactcacgaggagtnattgactgtggtgagcgattgacgatttcttcactn

SEQ ID NO: 25397 - DNA, 435 bp, Glycine max
  unsure (1)..(435): unsure at all n locations
tccataagtggttcacataattntttttttatttttttttcaaaaatgtttttcaaatttatttaaaattaatgacccaagcaagaatcaaaccttcgagttttgtgttattagcacaacactctaaccaactaaactaataaatcaattatattataaaataattaatgtcactatatgtaacactaaaatttttaatatttaatgcgcatgaaaatttagataataaattttgtaacaattaattttgatctaacaaataatttgtttacacatgttcgtagaaaaacaaccactagaccacatgtcattcacttattggataattcaacactgcagaagttgagtgttgactagcaacatagtaacaatgaggtgaaacaagagcctaatagaaatagagaacaaaaacaacacccgtggcgagtcggagct

SEQ ID NO: 25398 - DNA, 448 bp, Glycine max
  unsure (1)..(448): unsure at all n locations
ctattacgtgacactcattaatactcaagcttggcgataaactttgttgtgagagctaaaagtaacagtgacaaatacttgtaacttttgtgaaattagtgaaacttgattgctaaccaaaaactgaacttagtctgaatggtagagacaaaccaatataaatatgggtcttactttctttatagttatctnttgtcttaaactgacatagagtttgaatatgatcttgtttgaaaaacatattctattatttaaaatatgtttccatcgtctaaacttgtttttgcgcaaatttgttatctcgttttattaagttatacttcaaatgataactttaatgttcacgaaaaaagacttaagaaaattctaaaattacaagttaaccccttatgatatttctaattgtagttactatttttaagactttactttngatcactgaataaca

SEQ ID NO: 25399 - DNA, 518 bp, Glycine max
  unsure (1)..(518): unsure at all n locations
nttgaacccatgctcgattgagggccctgntagagccgacttgtangcttgctcgctcccggtgatcctctagagagcacctgcatgcgtgccagctccttattacagactgaggtggtgtattagatgcatcaccacctcaatccgtgtgttgagaagactccttaaagtgttacacgtctgctatgctgatgtaataacacgcccatttgattatgacatgcgtcctggcgtgataatgatgtgagacattgatttgatgtcatgcatgactagaaagcatgaatagtattagagacatgggacgcttattatcttttaagcaagactaaggatgactcgctttcccgacgagatctagatagtatggagattcgatctcctactcgttcacagtatgatgggaatagatgagacaagcgactcacctaccatactttgtcctagaaggagaagatagacgttgtcatagtcttcgaaggtgcaacgatctacttagatacggttaatacataaan

SEQ ID NO: 25400 - DNA, 414 bp, Glycine max
  unsure (1)..(414): unsure at all n locations
ntgtgtaatcgattacactgatatggtaatcgattaccagtgtttgtttctgaataaatcanaagatgtaactcttcaaatggttnttgactntttcaaattggttttaagtttttctaanagttataactcttctaaatggttgtcttgaccagacatgaagagtctataaaagcaaggctttgttttgcatttccacaatcttgaatactttttcaatcaatctcttacaatcctttacaagccttgaatctctntgaacttcttcttcttctttgtaccaaaagctatctgaagttttctggttttctaaaccttgaaaacttgtgctattcatcttttcattctcttctccctctgccaaaaagaattcgtcaaggactaaccgcctaaattctttttgtgtctctcttc

SEQ ID NO: 25401 - DNA, 431 bp, Glycine max
agctctcatagttcaatttctagcgtctcgatatattatgcgcctaatacggacatccgagttaaatgttatgaccatttgaatttctcgagagcttccgttgttcaattacgagcgtctctatatgtgatgcgcctaaatcggacatccgagttaaaagttatgtccatttgaatttctcgagagcttccgttgttaaattttgagcgtctctatatgtgatgggcctgaatcggacatccgagttaaaagttatgtcaatttgaatttctcgagagcttccgttgttgaatttcgagagtctcgatatattatgcgcctaaatcagacatccgagtgaaaagttatgaccatttgaatttctcgagagcttccgttggtcaatttcgagcgtctcgatatattatgcacctgaatcggacatccgaatg

SEQ ID NO: 25402 - DNA, 448 bp, Glycine max
  unsure (1)..(448): unsure at all n locations
ggtaggattatggggtacccatcacatgtggtactaggtggcggtcgggcgatggtgcacaacaagttttccacatccacaatgcgcgcataaacccaccatcccctgttgcccacctccaactgagctcacgtactcccacgtagcccatatcctcgtttctctcaacaccgggtccccatcaatcctcccaagcttccacagcatccaagcaaaacaacattcaaacagcacaagctatcatagccaagcaaaacagagcaaaggcagaaaactctgctcaacacatcaaccaaaatcacagcttttctcacttaaagaccacagtaacaattccttcgatccaattcgttaaccgttggatcgactccaaaattttactggaagtctatagtgcataagcctacattttgacacgtgggatctactagcaaacatncagaactca

SEQ ID NO: 25403 - DNA, 445 bp, Glycine max
  unsure (1)..(445): unsure at all n locations
ctctaagccacctgcggcatgcaagcttataatgaaggtatctattnttattgttccttaggaccatattgccatttattgattgaatcgttgcagtggttggcactgtaggatttgcaattgctaaattattttcttaagaatattgtgttgtaattcaattttgtatcttaataattgactattattttaaaatgctggcgatctgttgtaaccacattgttttatggtatgattccttgtcttcagagatacagaaaatacagttaagtgccagggatcacttccaaaggatttttactgaccatgaaaagctcaaattgcaactggaatctcacaaaaatgagcttgagttgcggaaagttgaattggaaaaacgcgaagcacataacgaaagtgaaaggaaaaagttggcagaggaaattgaggaggtatagtgcttttc

SEQ ID NO: 25404 - DNA, 379 bp, Glycine max
  unsure (1)..(379): unsure at all n locations
agttattnttatctntaagctgactctgatcttgatacaaaacattattatatatcttttgcaaaatcttgaacaaataaattagaaaagaatttctagtgctggccattttgctttcacatttattagaatgacaatttcaacagcaaagtaattatctcagtagtaaatttgcttcttggtctgaaatgccctcaccaaccctagctgagttgtccccactcattcgtggagccatgatgtgcaacactatccgtattggacttgcgtggttaagtgacttgtaagatccacaaaccgaaaggattttttcgatgggcaattgctttctgcatttttcatatttcgaaatgatgattccagaagtaatatgaaaact

SEQ ID NO: 25405 - DNA, 438 bp, Glycine max
  unsure (1)..(438): unsure at all n locations
agctcggtgtcgcaacctacccttcggcggtagggcgacgcgtgactcgcgggatgcgtgttccacgaaaggaatacgcgcggagtcgccaccaacgtttatttgaggaaaacgtcggaaaaaccggaaaagacgcgatctacgaacttttaagtgaaaggttcgggagttgtatttacgcacggggaaggtattagcaccccacacgtccgccctaagggacggcagcctttaatcgaatgtgcaaacatgactttgattttttatgttccctttttatgtctctatatcctttataccctttttatattttctctttntgtggtcgacaagggtgtttccctttgctcctacgtattcctcaatttgggatgagaaaatcagacctacgtagttcttttttatcaagtgattcttttntactttaagaggtgatca

SEQ ID NO: 25406 - DNA, 445 bp, Glycine max
tctgggtgaatggaaatgcctaagtcgtttccttttaagcaaaattcgtattgctcgcttagcgcacaactacgcttagagagtcaatatgaagtttggttttaacaaagccttgtgcttagcccaacctcgccctaagcccaattttaaaattttcaaattccagacagttttggggcttagcccagtaggcctgcacttagcgctgtctgcaactcaagattgttctataatttgcgcttagcctgagatgttaggcttagcgctaaatcaagctctaacttacagggatagtccaggcttagcgcaattctatgagtttcaaaaatagtgaaggattggcgcttagcgcatcctatcgctaagcctaattcatgaaagttcaaatccagagaggaaattgagcttatcacagggtgatgcttagtgctgctacaataatttt

SEQ ID NO: 25407 - DNA, 408 bp, Glycine max
  unsure (1)..(408): unsure at all n locations
agcttgtatgctctctcattaaatngtctttatgcacaattgcatactttacacaacttgttggtgactatgctaggaatagaaaatagaaaatnttatgcaaatgggttgaaaggggctggctgctcatactagattagaggcacaagaagggttgatggattgagggggatccgtacgtccttaatcctatgcactcaaaccatacataaaaccatccatatacattgacacttgaagaaatatcagaacagaactaatgtaaccttatagttatcacaagttatttactgaatcatattctgactagacaaccctaacaattcctatacatgtgcttatatgaaatcatgattgctggctgtgaaaaatattttcaagaatcgaggatgcttattccatatgtgc

SEQ ID NO: 25408 - DNA, 384 bp, Glycine max
tattcttgaaaagttcattggtcagaaacctgtactattttttttcttcattccctcttcctcttgcttaaagatttaaaggactaaccgcttaagaattcttttgatttttccttctccttcttgccaaaagattcaaaggactaatcgcctgagaattcttttgattcttccttctccctttaaacaaaagatttcaaaggactaaccgcctgagatatcttttatttccccttacaaagattcatgggactaaccgcttaagaattctttgtcttaacacattggagggtacatcctttgtggtacaagtagagtgtacatctacttgtgttgtgatactacgaacaagagagggtacatctcttgtggatcagttcaagt

SEQ ID NO: 25409 - DNA, 369 bp, Glycine max
  unsure (1)..(369): unsure at all n locations
agctngatgtgaggaagtgcggaagagtctgtcttcctactttngtttgttgaccacagagtggtatctggagatatgtcgcgggggtcaggagaccttgtggacgtcaggtggggtgctattgcccaaaaccaagcttgaccaatcccgacccaacccgggcatagtcagtcagtgaggacctgtgacgtacctaaacaggcgagctcctggcagtcaaccaataaaagaacaaagaccacaaagcaaggaggcttgtgtggtggctggccagctatggatcttgagtggtatcaggaatttggcctttggtaatcgattaccaagggtgtgtaatcgattacaaggcttaaaaatgaagacaggaag

SEQ ID NO: 25410 - DNA, 434 bp, Glycine max
  unsure (1)..(434): unsure at all n locations
ntntaagtataaaaataaaacgaacacattttataatgattaaaagaaatcacagggacaaaaatgaaaaaaaatactaaattgtaagaacgaaaaatatatttaaatatattttttatgttatgaaaaattcagaaagatatattttatatatattgntattgtaattaatgttttataatatatagattaataatatttcgtataaatttatatatgtatacattccccccgggaggggggttggctcagaccctggttgctagctttttcttgttttactctctcgtgtacaaagcaagcggtattaaagtaggcaaggatcaaattaacatagcacctaatagcgtacaaaatttagaccactacactgtatggatatgttgatatatattntggggggaaaaagtgtatcgtctagatcataaaattca

SEQ ID NO: 25411 - DNA, 436 bp, Glycine max
agcttcggaagattgtgatgaggtacaagtcctaaaggcagagcttgaaagagcctgtgtagtcgaagagaagttcaagtccatagccatcaaagtctgaaaagagtatgatgaactaagggatgtcaatatggccaccgatgaagccttggaatgagaaaccaagaaggcccgaaaggaagaacacgaccaaagcaaagttttgaggggctttatagggcagcaatagtgagctcaagctccgaagaggtgaaaggaatcatcacgggtcaaaggcatgatcttgaaggacgagctaaaggtttgccttatgtcgaaaagaaatttgtcccaacagttaagcgagactgaagggaatatgtgggccatcatcgataagtgcaaagagaagctaaatctagcggcgactcacgagcaaaggctagaggatgagtac

SEQ ID NO: 25412 - DNA, 429 bp, Glycine max
  unsure (1)..(429): unsure at all n locations
ntgccaatgaattatgaggcttttcacccaattcaaggaggttacttatgatgggaacacgggatggtcccgatggcagcttatggtttgcttttgtggccattgcaaggaatgaaccaagaagtgcatgaaccatggtgcatggcaagacaataatgagtagtgaacaacttgcaatgtccttaaattttcttaatatataaacttagtactctatttgaaaactcacatgttttcttgggtttttctagagttatcctgtcatgcaactgcaatatctttagaatatagtttgtacatcatggcttaattacataggatgggtatttttccacttcaaatatgatttaagttctaaaatcatgttaagttacatgtaaacataatcaataataattttctcattaccaaaaaaaatctcaaatacta

SEQ ID NO: 25413 - DNA, 428 bp, Glycine max
  unsure (1)..(428): unsure at all n locations
agcttgagtatctcttatatggaaaccctctatctatgtccattatcccattctcttcctctatccatcccttttcttcaatccagctcagcctctaaagtataaagtctctcatgataatgagaggctaaaaccccattgttgggagcctagcaaccaaatctctttgtaatgtaatctttccttactatgtatttaatgcaatgcaaatttttattgtttctttcccatgctttattgttattgtgtggcctgatcatccacgcatttttttaggggttatacattgggaaatgataatttctagagaactaggaaatatcatctaaacaattcattgctgaggatagagtgactntgtttttcctcagcatacatctccaaatttcatacaatntactattttatctctacaaagggatttgaga

SEQ ID NO: 25414 - DNA, 391 bp, Glycine max
  unsure (1)..(391): unsure at all n locations
tgtaaaaaaatgaagcaggttaaaactcttttcaaagaataaattttgtttgtattagaaaaccccttgaacaacttcacattgatttatttggtccctttagaactatgagtttgggtggaaattactatggcttagtaatagtagatgattactcaaggttcacttggacttagttnttgaaaaccaaaaatgaagcttttgatgcttttcgcaaacttacaaggtgattcaaaatgaaaaaggtctcaacattgtttcaattaaaagtgatcatggaggtgaatttcaaaatgagtcttttgaaaacttttgtgaagaaaatggaatttaccataatttttttgccccaagaacacctcaacataatggtgttgtagagaggaaaaat

SEQ ID NO: 25415 - DNA, 429 bp, Glycine max
agcttgtcgcctacctgtttaagggatgattcagcagtttctataagtagactgaagaaaaatactgtaaacaagtttctaatattatgatgagtgatgacaagaaaaaatgtaaaccaccagcaactaataatcttgtaactatttgatcatgcaagcattagaaattggcagtctgcagataaatcccaaaataaatcatgatcactcacaaacagctaataaaaacatgagaatgagaaagaaacaggaaatggagagcttactgtttcggaaccataatactgcactatatttggatgtcgtaaccggctcaacaaggtaatttcctgccagaatctaggagttagatttgaaagctacactaaatttgaaacagaaatagatactagcattttgcacaaagaatgaggattattcagccccaca

SEQ ID NO: 25416 - DNA, 430 bp, Glycine max
  unsure (1)..(430): unsure at all n locations
tctgcctcaaaacaaagtatttccaatgcatccaaggctctggtaatcgattaccataagacaattttgaaaaatcagcttttagaagggttttgaaatttgaatttaaaagttgtacataatcaattaccattgatgtgtaattgattaccagcaacggaactcttgaaattcaatttgaaaagtcatgacccttcaaaatataactgtacatgtaatcgattatcaaaaacctgttatcaattaccagtgaagaattttagaaaaagctttttgaaaaaataaatctcttcaaactattttgaaaaggtacgaagggcatatatatatgtgttcgacttcgaaaagtaagagagaaatattctaagagaacttaatttgcgaatgctctctcaacatctcttgngcaaacacttgcaaatctattgag

SEQ ID NO: 25417 - DNA, 555 bp, Glycine max
tcgcatccagcgctcgctcaacgcatatcgaacagtgattgttaatcctcaaaacagacttcaaggttgacgcttggggtgaggcctggaaaccctcgcggcaagcaaccagaacaacaacaaaatgatttctagagaattttctcacaacagaggtatttggaacttactagcaactaaaacaatccatgtgggaggaagaatcctagccggggataggacgaggcgtaacaacaacaacaaactaggacctccttctgaaaaagccgctggtacaaaaatacatatgacctcttccaatgcaacagaagcaacaacatgcaagacaacaagcaactgaggctccacctcaaccttcctaagatagagtggtgagggacaaacccgtgcacaagatgggaattcagcagtaagaccagtggccttagtcatactacgacaaagcaaatggggcagatggctactcagaagaatcgagctcagccaccaatttggacatagtgcctcacagactgggcaaaatacgaagaatgagagtggcatcaccttaaagcg

SEQ ID NO: 25418 - DNA, 417 bp, Glycine max
  unsure (1)..(417): unsure at all n locations
tcttggtttcagctgctgaagatgaatccgtggctacttcatgcactcctctaatgactatagcatcatttctgccactaaactgttgggagttggaagccatcttctcaattaaatttctggctttagcaggggtcatgtctccaagggctctaccactggtagcatctatcatacttctgtccatgttactgagtccttcataaaaatattggagaagaagcagctctgaaatctgatggtgagggcaactggcacatagttttttaaatctctcccaatattcatacaggctctctccacagagttgtctaatacctgaaatatcttttctgatggccatggtcctggaagcagggaaattnttttataagaatactctcttgaggtcatcccagctcgtgatggaccttggag

SEQ ID NO: 25419 - DNA, 413 bp, Glycine max
  unsure (1)..(413): unsure at all n locations
ncaagcttgccttttgtagtgggtttttttgtgtatanttgctntgtactgaaaaaaaaaatatatacttgagctttttgtctcatttttattgtcatttaatttcgttgtatttgggtgtatattgtttaggaatgaaaacaaatgttgcctcattttggtttttgctttggactaaaaataaatgtaacctttgtctcattgtcattctcattntgattagtactgtttgacttcttctatatccaatcgtgaagctgtcatttgattcttctttttccaggtttgtgtatggttattgagtttctgtccgttttcattgttgggttaaaatctattattactcgttgacttggttttttttatttcctctgctattgaccattatttttcctgttaccctttactttttt

SEQ ID NO: 25420 - DNA, 408 bp, Glycine max
  unsure (1)..(408): unsure at all n locations
taatgatgattcaacccctaagcacttatgggctgaagcagtgaatactacatgttatcttaaaaacataatttacataagacctatccttaaaaagactctatatgaattgtggaagggatgaaaatccaacatatcatattttcatccatttggatgcaaatattttattctcaccacacaggataacttgggaataattgattcaaaaagtgataatgggatatttcttggatactctaaaaattcaaaggcattcagagtttataactcaggaaccttggtagttgaagaaactattcatataagatttgacgaaaataagtctgacaaagatttattagagctacacgatttgcagatntaagactcgatggtgactctatagcacgtagcttgtaaagaaag

SEQ ID NO: 25421 - DNA, 469 bp, Glycine max
  unsure (1)..(469): unsure at all n locations
acctgcggcatgcaagcttatgtntcaaacatntataatagaccccctcagcagcaaaaccaacaacaacagaataattatgatctttcaagcaacaaatacaatccatgttggaggaatcatccaaacctgtgaaggacaagtcctccacaacaacaacaacttgtccctccttttcagaatgctgctggcccaagcaagccatatgttcctccccaatgcagcagtagcaacaacaacaaagacaacaagcaactgaggctcctcctcaaccttccttagaagagttagtgaggcaaataaccatccagaatatgcaatttcagcaagagacaagtgccttcattcagattctgacaaatcaaatggggtagatggctactcagatgaatcaagctcagtcccacaattatgacaaattgctttcacaaactgtgcagaatccgaanaatgtgagtgccatcacctt

SEQ ID NO: 25422 - DNA, 364 bp, Glycine max
tgacacttcaatctaagctttatggggttgatctttggcttaatgaggtccttcttttgaaccatggcggaagataaaggagaagatgtgagaggaggcgccatccactagggaataagccatggaaggaggagcttaaccaccaaaagagtgtcttggataagaagcttatagaggaaacttcaatggaggaaaagaatgagaaagagagagaagggggggggggggctctaaattgaatgagaaaaagagggagagaagttgaactttgaagtgtgtctcacaagtttcacattcatcaaagttatgacaaatgttacacatgcttctatttatagcctaggtcactaactaaatgaaaact

SEQ ID NO: 25423 - DNA, 427 bp, Glycine max
tgcaagctctaacgaatgatctatctatcatcagtactctaattagtatgttaactgacacatataatggcattagagacctgataatgataatggaatgatatagttagttagttccaatcacatttttgtcgaagttatttgggggcaaagaattaagagctttctatcaaacttcttcagaatgacaaagcctatatcagtaccctaagcacgtaatcaaaagggtcccaaggaagacttaacgcagcatggtgccaatattaaaaaaacgcattaatgatagcctaattatattattaatttgtgggatcacgttacgtctccatttacatccataaattcaccagaccaatcgtgctataccaagatgcatcgaataagttacattttacacaccaccatacatacatacaaaatgctagat

SEQ ID NO: 25424 - DNA, 440 bp, Glycine max
  unsure (1)..(440): unsure at all n locations
tgaagaggtcttttgaacacgaatggaacatggatggagagccaccatctacagcaaacatagaccagatggaataagaagcgaaagacgaagctcagctagagctagcacaccaatgaagtccttntgagtctcttatgatttataagatggatgtcttgcttcacctccatcaagagcactcggccaatgtttacaacaccttataaagcatcaccactaggctagagaacatagaaactaggctaacccttggtaaccttcttaacccagatgaggatgaagcgtagttatgttcttatgcttggttatactggttgttgatatgtttcgttatgtcttggtttgtttgtctttgtcttataatgataagttaagtttttgtgttctatgattaatgaattgtaatgtttcgtgattaatgaaatgctatgatgtta

SEQ ID NO: 25425 - DNA, 447 bp, Glycine max
  unsure (1)..(447): unsure at all n locations
agcttcaagaaaaagatggcctcagcaaactccttatttccagaagggaattctatcaatagacctccaatctttaatggagagggttaccattactggaaaacccgaatgcaaatttttattgaggcaatagatctaaatatttgggaagccatagaaatagggccttatatacccaccacagtggaaagagtttcaatagatggtagttcatcaagtgaaagaataactatagaaaaacctagagatagatggtctgaagaggatagaaaacgagtacaatacaacttaaaagccaaaaatataataacatctgccctgggaatggatgaatatttcagggtttcaaattgtaagagtgctaaggaaatgtggaacactcttcgattaacacatgaaggaactacngatgttaaaagatctatgataaatgcactaactcatgag

SEQ ID NO: 25426 - DNA, 434 bp, Glycine max
  unsure (1)..(434): unsure at all n locations
tgcctcatagaggtccaggaaggacaaggcggccgaatgaactagttccgccccggagtatgacagtcaccgctttaggagcgttgcacaccagcagcgcttcgaagccatcaagggatggtcgtttctccgggagcgacgcgtccagctcagggacgatgagtatactgattttcaggaggaaatagggcgccggcggtgggcaccactggttactcctatggccaagtttgatccagaaatagtccttgaattttacgccaatgcttggccaacagaggaaggcgtgcgtgacatgagatcctgngttaggggtcagtggatcccgttcgatgccgacgctatcagccagctcctgggatatccgatggtattggaagagggccaggaatgcaagtatggccagaggaggaaccggtctgatgggttcgatg

SEQ ID NO: 25427 - DNA, 449 bp, Glycine max
  unsure (1)..(449): unsure at all n locations
agcttagattntccaccttattaaaccttaatttcttcaaattaaaacaagctcattggtggtgcaaatccaaagagaattgacaatcactttaacacaagttttgacctttatttcaactaacaaaattataaaatcactcaacaaaggtggcgccctctactcttcttggaacatgatgcaattgacaatctgaagtttcgccacttgtaacttaggcctaaattcaaatagcatggttaacacttgttgaagatcttcctttgccttctttgttctagctcttgccataggtcctccaagtctttctaaaggttccttacccttagtccttgtcatgccctcatcagaagtgatatagtgaaattaatccaaactctnttattctctattattttatctttttttatcgcttcataaaagtactatnntttatttatttatgctat

SEQ ID NO: 25428 - DNA, 445 bp, Glycine max
  unsure (1)..(445): unsure at all n locations
ctagtcgatttgggacaaacaacttggttctctaatgtcgaccttgcttagggttttcatcaaatccatatggcggatgctggtatctccaaaatggcttttcgtacccataaggggcactacgagtatgtcatcatgtcgtttgggctctataatgtcttgtcaacatttcaagccacgatgaatgatttgttccagcctttcatccataaattcgtcttggtgttttttgatgacattttggtgtatagtcataattttgacgaacacttagattttttgaacaaggttcttcatactctacaacagggagaattttatctcaaacttcccaagtgtgctttctgctaacatcacatagactacctgngccacatcatttccacaactggagttgagcctgacccatgaaagatacaacgaggtcaccccatngcttattttn

SEQ ID NO: 25429 - DNA, 197 bp, Glycine max
  unsure (1)..(197): unsure at all n locations
agcctgatacaccctagagcgatanaactttactgatttaaatttagcgtatctgctagtgctccttgacacacgacatgcactaatgtcttagtctcattgttggccatgagaaagcatatctctccgcacgatttcctcattcgacggatcatattctcaaaaaatgtgtgtagttctgatcagttggggatttt

SEQ ID NO: 25430 - DNA, 145 bp, Glycine max
atcccttcaaatctctaactgaaaacacaccaaagaaatggcacacacaatcttcaacgagacatggcatgataaaagaagcactcacttggaaaaaaacatgaacatgggcttccactacgaacaaacaacaacaatgatgtaa

SEQ ID NO: 25431 - DNA, 323 bp, Glycine max
  unsure (1)..(323): unsure at all n locations
agctntaacattcatttacgagcgtctctatatataacgggactcaatcagacatccgagtaaaaagtaattgtcgtttgaatttgctaagagctgcggcattcaatttcgagtgtctcgatatattacgggactctatcagacatccgagtaaaaacttattgtcgattgaatttgctctgagcttcaacattcaatttcgagcatcccgatatattacgggactctatcagacatccgagtaaaaagttattgtcatttgaatttgctctgagcgtcaacattcaatgtcgagcgtctngatatattacgggactcaatca

SEQ ID NO: 25432 - DNA, 424 bp, Glycine max
  unsure (1)..(424): unsure at all n locations
ntgaggaaattcatacgacaataccttttgacacggatgtcggattgagtcacgtaatatctcgagacgcttgaaattgaataccgaagctctgagcaaattcaaacgacaataactttttactcggatgtcggattgagtcacgtaatatgtcaagacgctcgaaatagaataccgaagctctgagcaaattcaaacgacaatacctattgactcggatgtcggattgagtcacgtaatatctcgagacgctcgaaattgaataccgaagctctgagcgaattcaaacgacaataacttattactcggatgtgcgattgagtcccataatatgacgagacactcggaattgaataccgaagttatgagcaaattcaatcgacaattaattttactcggatgtcggattgagtcacgtaatatg

SEQ ID NO: 25433 - DNA, 402 bp, Glycine max
agcttcttgaagttacatgaagttgcctcggtaaaaacactgcccagccttcgttagccattggatcttctcgaaatttggtctgcagcttcacaaaacacttttccacgatctgacgtggggatctttgagaagatatctggagtgtgcttgaagcttccgttcccgagagcatttcttatttaaacacttcagcctttgctttcgtgtaacttaggaaaaacgtcatttcttcttctttctttcttccaaagtcatttctaaagtcccaagaactttctccatcacccacaaccaccattagccaccacaaaccatcgttgttctccattgaaaccccacaccgagaggaacccttcaaacgaggctcctatagagttagctgagcttaagaaacagtta

SEQ ID NO: 25434 - DNA, 385 bp, Glycine max
tgtctcagcgtatatgcgagacggagaccaacatgctagctatcatcgccaagtaccaagaagagttatgtctagccacggaccacgagcataggatcgcggacgagtatgctcaagtatacgcataaaaagaggctagaggaagggtgatcgactctttacaccaagaggcaaccatgtggatggatcggtttgctcttaccttgaacgggagtcaagaacttccccgcttgttagccaaggccaaggcgatggtggacacctactccgcccccgaagagattcatgggcttctcggctattgtcagcatatgatagacttaatggcccacataattagaaatcgttaggaaacttgtatggtctctcagaccttgactagata

SEQ ID NO: 25435 - DNA, 429 bp, Glycine max
agcttaggcaactttgtgtaatcaattactatgatgttgtaatcgattaaaacagagagtttttgcctttgaagaaatttttctaacttagcaaatttcctttatactaaccacgatgatgcaagatgcaaaacagatatcaaatgtactaagatgcaacaaccaagataacaaccaattcaaatgccactcaaaaaggagttgggtttgtaaaagccaaaacttcttcaaatttttccttgagctttaagctgtagccttaggttgttcaccatgttgctccccttatctctaacaatttttgtgagataaaagaatagattgtaaggtaacatgagtgtttcggtaactttttagacttaataaattctgttgtgagtcaaattgattttgactgaattttttttagctcctttgttaaatagattc

SEQ ID NO: 25436 - DNA, 433 bp, Glycine max
  unsure (1)..(433): unsure at all n locations
gtatttgacacacttagtcacacgagttntatcttaataaacctttgtaaaaataccatttttatcaaccactagacgacaatgttttttttttcttccatcaaaactggttttattcattggatgacattgttagcaacttggtttttgcatatctatttgtgaaaaacaactttcgaaaaggatttcattttatctaacacactattcaaccttccttctagtggaatattttttatttcacaagagactaaatggattggagagaaggccaaggagatggatactataggttttaagctttggtacatagggaaaattagaggaaataataatgtaggtattatggtggacaaggtttggaaagaaagtgtggtggagatagaattttagccttataattaatggtggcataagagactatcaatatcat

SEQ ID NO: 25437 - DNA, 428 bp, Glycine max
  unsure (1)..(428): unsure at all n locations
agcttgcctcanagagatccaggaaggatatagcgaccgaaggaaccatttccgctcccgagtatgacacccacctctttaggagcgctgaacaccagcagcgcgtcgaggccatcaagggatggtcatttctccgggagcgacgcgtccagctcagggacgatgagtataccgatttccaggaggagatagttcgccggcggtgggcatcactggttacccccatggccaagttcgacccagacatagtcctcgaattttatgctaatgcttggcctacgaaggagggcgtgcgagatatgagatcctgngtaaggggtcagtggatcccgttcgatgcggatgctatcagccagttcctgggatatcctttattgctggaagagggccacgagtgcgagtatggtcagacgaggaactgggctgat

SEQ ID NO: 25438 - DNA, 424 bp, Glycine max
  unsure (1)..(424): unsure at all n locations
tgcctcaaagaggtccaggaaggacaaggcagccgaatgaactagttccgctccggagtatgacagtcaccgctttaggagcgctgtacaccagcagcgcttcgaggccatcaagggatggtcgtttctccgggagcgacgcgtccagctcatggacgacgagtatactgatttccatgaggaaatatggcgccggcggtgggcaccactggttactcccatggccaagtttgatccagaaatagtccttgagttttatgccaatgcttggccaacagaggagggcgtgcgtgacatgagatcctgngtaaggggtcagtggatcccgtttgatgccgacgctatcggccaactcctaagatatccgttggtgttggaagagggccaggaatgtgagtatggctagaggaggaaccagtctgat

SEQ ID NO: 25439 - DNA, 434 bp, Glycine max
agcttataagaacttaattgcctcaatcatttccaaatatgcatgtgaattaggacgcatcaacaagaatcaagccaaggctattgtgcaagcaatcaatggggcaaaacacaccaaatgattatgatgatggatggctcaaattctcacaaaggtaaaatcatcactttcaaattgagctttcaaaactatcatgacatgtagagaagaatcaaggatttcaagtcacaaaatgtcaagaacttttattttcaaaacaattacccatttcttgaacatatcctataattcaaagaaaaacatgcaaagtcgtacgtgcacacaaaattgacccaaaatattaaactaaaaatccgacgaaactaacaacattaacaaattaacacaactaacaaattaacaaaaccaacaaaactagcaaaaccaaagaacac

SEQ ID NO: 25440 - DNA, 509 bp, Glycine max
  unsure (1)..(509): unsure at all n locations
tggggacggacgatgagacctgctgatacctcgcttttcgtgacactttaatactcaagctttgtcactccacccgaatcgagcctttttgttaaccttagctagcacagcctggtaacctagtaaagcttttgcattccacaatacaatggcngtatgcgcattctgtgttgaagagccttctgaaatattttgcatgacaattcccgaagagcccttcttggcccaagatcacgtatcatgtcttncatgagatcttcgctttgtagatcaaccggatgaaggggacattgtgctgtatgaccaaccaactcaccatgccatattcactttgtgttcgtgggctcaagccttacatatcatatgcgatcttatgttattcaccgaatgagccctctcgtgacacatgtaacacaatggcagaaaaagttggcatctgtggttggtgaatgtattctggcaaatgacaaaaactccttaactccatgtgtgaaaaccttgcttatgcn

SEQ ID NO: 25441 - DNA, 428 bp, Glycine max
  unsure (1)..(428): unsure at all n locations
taccattacaataaatgggtagaataatgacatacgattattgatggtctcgagattgacacaattattgatagttaggccattgataagcaggtgtagtttaattcttcttctatctttaattataagattattgtaattaatttacgtcttttaaaaatagttaatttaattaattgtattaaatatgtcaattatttatcttattattccaaaattatcattcttatctttcaatccccttaattgtttttcattaattntaagagagaataaaaaagtaaatatatttaaaagaaaaaaataattattgcatctaanaatcaaaaaatgatattataaaaagggacaaccaagttttcgaaaatggtttgataattacggaaaaaaaagtgtaagatttataaaactacattttttataattat

SEQ ID NO: 25442 - DNA, 363 bp, Glycine max
  unsure (1)..(363): unsure at all n locations
agctntatatgcgcgggtctgggagacgattgtcaagtggtcgcaatatacaaagatgatgttccaagtacattggatttggtacgacctcgccctcctaatttccagctggggaattggcgagtggaggagcgccccgacatttacgtagcgagcataatgtaaacctttacggtttaaaagctctatagttgggcctaggctttagagtttttcttttggttaagggcttgtgtattttnttttttttataatacaaggatctttcttcatctgttcctacgtctctacccattctcatccatttgcatgtnntacttcttactttttataacggcagatccgatgacgagtccctcgaag

SEQ ID NO: 25443 - DNA, 420 bp, Glycine max
  unsure (1)..(420): unsure at all n locations
tttacttttctaattnttattattataagatattttgtttatttttaatgcttataagtttatgttttttaattttaatttttaaaaacaagaacttatggaaactataaaataaaaaaaaataaaatcttaaaaagattataattaaaaaacgtacaaacttataacttataagaatttataataagcaaaaaaaaattttacaaaaatcaaaactgaaaaattactgacttacaaaaactaaacttatgaataccaaaaacgaaaaaacgttaacttgaaccaaaaatatcatcgtaatgctatgtgcaaaaatttaaaaacatgctccttcctctcactcactcttcctcgctcgctccaggtactataatgcctctntctcttccttccatcacatacttccagcagattaactct

SEQ ID NO: 25444 - DNA, 438 bp, Glycine max
acatcgagtaaaaatgctattaaatttccctataatagatgattggtacaattcttttctgtacttcaagttggtaaaaaaaatttagttactccaatcatttagaatgaagttggtccaccccatttttactcgagcaagttagacaaattcgtatcataaatatactcacaaaactaatgtaaaatgtctattatgtaattatctgttgcatgttatatatcataagtttgttgagttcatctttagttttgttagctcacaccaatatttatgtcaatttacatattgttatatataataagtgtgtaagattttataataaatatctcaaaaattatttgtgagtgattaatagtgcaaaaaatttataacggtaatgcatgaaaattaaattcattaataaattcttgaatgaaaatacacaataaaatgaac

SEQ ID NO: 25445 - DNA, 426 bp, Glycine max
tcttgataagataaaattagcttatgtataagttataatatcatcttatggagaagataatatgagaaaacttgtactagttagctaatggagaagctcatttcattttttttcttattttcttctcctaaaatagatttggaggaagtttattctagtaagcctttaatctccaaagctcctatcattctatttttaatttgaaattgtgatttcatttattttcctaaaatctcactcttaaattatttataaaatctaagactcccactacagtaagttttggatgctccatatcttagcagttattgaactctagctctgttgttcaattcttctgtatatgctatggaattcgatgtgagataaagggagagatgcaaactgtcattataatacttcataggagagaaagaacataaattt

SEQ ID NO: 25446 - DNA, 514 bp, Glycine max
  unsure (1)..(514): unsure at all n locations
ggggntganaccatctcgtttgangccactcgaagagccgattgacaacgctgcaagctngcgagatnctcgnggctgacctgcttgatgaagactgctgtgtggatgcctatcactggcttcacactgacgccatggctatgtcttgcatcatccatttcttgacaaacttattcttgagggagacgccgtgacaactcatgtgtcgacaaagagggcatgatcaatgggtggaaagcaagtagggccgatgaaggccatataaacttgccgctgactaacaatgtggtttaaagtgatgctagatgaaacgccgatctatccctgtgagacccaaaaacctgtgcatggacttgaatgatttaggaaatggccattgtcgtgtagcgtgtatttttgaacagaccagttctactccttgtgatgagaccatatgacccaaatattccacttgcgttagaccgcaggatcacttggatactttatgaacactgtccttctagaagacctaaan

SEQ ID NO: 25447 - DNA, 383 bp, Glycine max
  unsure (1)..(383): unsure at all n locations
taatattntntgttatcataaaaacaatgagatntttatgggcttgagattntccatgtcattggttccaacatatagttgcctcttaattggagggaggttagttttcaccacaagttccttaagacttctcccaatgaagaatcgatctttttgtgttctacaaggtgacttttaagttggaatgtttttaatttgcccttgaggttgctatatgtagtcaatcaagtgaagaaattcctctatagttctttttgtcttagccaaaaatatgtggtaagaaattctaggcaataaactagtttgatgagaagaagtttaactttatgcattatgtcatgtacttatggngcctgctagtaatgtagtcgttcaatggatca

SEQ ID NO: 25448 - DNA, 449 bp, Glycine max
agcttcggaagaaagtcatgaggtacaagccctgaaggcagagcttgaaagagcccgggtagtcgaagagaagttcaagtccatagccatcaaagtctgaaaagagtatgataaactaagggacgtcaatatggccaccgctgaagccttggaacgagaaaccaagaaggcctgaaaggaagaacacaaccaaagcaaagttttgaggggctttatagggcagcaatagtgagctcaagctccgaagaggtgaaaggaatcatcacgggtcaaaggcatgatcttgaaggacgagctaaaggcttgccttatgtcgaaaagaaatttgtcccaacagttaagcgagactgaagggaatatgtgggccatcatcgatgagtgcaaagagaagctaaatctagcggcgactcacgagcaaaggctagaggatgagtacgccaagatatcac

SEQ ID NO: 25449 - DNA, 369 bp, Glycine max
  unsure (1)..(369): unsure at all n locations
tgcttgtggngcttctatggaggctggatctatgagcttcaatgaggtcctttaatggtgattttccaccgtggagatgcagcggaagacaaaggagaagaggtgagaggaggcgccatccactagggaataagccatggaagaaggagcttcaccaccaagataagccttaaataatacgcttggaaggatgcttcaatgggggaaaagaaagagggagagaaagagagagggggggagcacgaaattgaaggaataaatgagggagagaagttgaactttgagttgtgtctcacaagactagtattcatcaaagttacaacaagtgttacacatgcttctatttatagactaagtggcttacttgag

SEQ ID NO: 25450 - DNA, 418 bp, Glycine max
agcttcttttggaccttgaacaagcaatctactcctctttcagaaccatgctatgtgctcgcgactggtccctttcttcctttcgcaacttgagttcactattgctaccccatagagctctgtgaaatttgttccggccatactcttccttgcgagccctcttggtctcttgttcaagggctcttgcggtaattgcattctcttcccgtaacccggcacactccttccgaacgtgtgtagcggccaacttgaacttctccttggcaagttttgcctttcctaactcgcttttgagagcttggacttctttgtcttcttccggtgcttcaaaattctcttcgctgacgacttttaacttggcgagccaatctaaacctcgtatatgaactttcagccattcgtggtacccaccaatgat

SEQ ID NO: 25451 - DNA, 421 bp, Glycine max
taaagtatgcccgagtcattcatccctatgagatgttgttgaagtattggcgatcagaattgccattccttggattatagggttgatccaagctcatgcttttacaaaaaggttcatcaagtcaagttgaaatatggaagtaaccgtcttgcaaaattggggcaaaaaatgaatcgagtcacatcactgcttcgtctactgccaaacatatttaggattattgatgtccttgttacttccagtttcaccttgacaaagatgtcatggaccatgttgaaaatctaaattgattcaaccccatatcttgcgtaaaaattcgcaatacttcaactgtacatcattcgcatgcatccatgcttttcattggttgcattgctcgttgcattctttcctttgaaaataaaataaaatgaacttaatc

SEQ ID NO: 25452 - DNA, 401 bp, Glycine max
  unsure (1)..(401): unsure at all n locations
agctntgagggtgctcatcccaccatcttttcatagtagagtaccgataatgtgtctaccatcacgattatcgtctccctttccattattgggggtaccacctgngccgccagatccctccaccttttgggcgtgttctttgaatgatccgtccccctttttgcacatgttctgtagttgcatcctatccggaaccatatcaaaattgtactgatactgcctaatgaaggcaacccttaggtccttccaagaatggactcaagaaggttcctaagttagtataccaggcaacaggtgtcctagtaagactttctcaggaaaaaatgtatcagaagtttctcatcttttgcgtatgcccctatcttccgacagtacatctttagatggttcttggagcgagt

SEQ ID NO: 25453 - DNA, 381 bp, Glycine max
  unsure (1)..(381): unsure at all n locations
gtttctagacaagcctagactaaattgttgaagaacgatggtgaggaagaagaagcgaaacgctggagggaggagaccaatagctntattaacgaggaataataaaaaatggtgaggaagaagaagcggaacgtgggaggaagagaaagagacgagaatgaatcatttttttaaaataattaagtcatggatacaaatgtattttccccttaagtgctgggtggaccagcaaaaaatgctcaatgcaccagcaaaaatactcagtgcacctagcagcactcttaaaattatgctcttaatgagagagaattgtttgtttttttttttttttttgacaaggattgattatacaatgactccaattcaggccgtggtagcttt

SEQ ID NO: 25454 - DNA, 307 bp, Glycine max
  unsure (1)..(307): unsure at all n locations
agcttgtgacacgtggagatntaggttatcttccacgctcacaagatctgtcatactgacttttgcttcacgctgacggccggaaatacccgagtggctatccgtataaactttttgcattctgtaagacgaaaagcctgataacacgcagagactaacatcgtcttctgcgaccttcgtcaatcgcggccgacaagcccgttgacacgtggagatttacgtcatcttccgcgctcacaagatctgtcatactgactgttgagtcacgctgacgggcggaaatacccgagtgggtatccgtataaac

SEQ ID NO: 25455 - DNA, 431 bp, Glycine max
cttttgtcttacagacagcaaaaagtttatacggataaccactcgggtatttccgcccgtcagcgtgactcaaaagtcagtatgacagatcttgtgagcgcggaagatgacgtaaatctctgcgtgtcaacaggcttgtcacccgcgattgacgaagggtgcagaagacgacattagtctttgcatgttatcaggcttttcgtcttacagacaacaaaaagtttatacggataaccactcgggtgtttccgcccgacagcgtgactcagaagtaagtatgacagatcttgtgagcgcggaagatgacgtaaatctccgcttgtcaacgggcttgtcggccgcgatcgacgaagggcgcagaagacgacgttagtctctgcgtgctatcaggcttttcgtcttacagacagcaaaaagtttataccgataac

SEQ ID NO: 25456 - DNA, 424 bp, Glycine max
agcttgtcgcattgtacgagtaccctgaagacttcttccaggtctgccaattgaagatgtcaactttcgctacaaggtcatgccattcggcctaaaaaatgcaggcacgacataccaacgactaatggactgagtcttcaaacaagagatcgaatgaaacgtcgaggtatatgtggatgacatggatgtcaagtctggaggatgcatactggtcttgttatatccagggtaggcatacaggaagcttaacacctggaacccagacgtcccatcgactaacctgttgatgttgggcagatggtatgtgtctttagagcatgctctagacatatcagagtagtcagtgcatattcgacatttgctattagcctatttgaccatgacgatgttggcgagccaggtagagaacctaacctctctgatg

SEQ ID NO: 25457 - DNA, 389 bp, Glycine max
  unsure (1)..(389): unsure at all n locations
atnctgactccgatagatataagattcttgtgggataactcattctccctaccattactagacctgatatctcctctgctgcgggagtggctgccaatttatgcagaatcctcatttggaccattggaatgctgacatgcctattctgagggatgtatatacagctcctggactagggttgctgtatgaaaacaatggtattacgcaactatcatgatattgtgatgctgattgggctggatgtcccatggataggagaactacatcacgttatagggtcttcactggtggaaatctaaactcttgcaaagcaagaaacagactattgtctctcggtccaccgcacaagccgacgatcgatctatggctatcattacatgtgagctcat

SEQ ID NO: 25458 - DNA, 418 bp, Glycine max
  unsure (1)..(418): unsure at all n locations
agcttcgggtaatactttattctctntgatgtccctttatatggggtttcttgctggaatgttttttgtgtgggtttatatttgtacttgcttgaaaaaatgattggtaaagattgggatttaatggcttggtatattattgcttcctaatttcttaccgctagataatagacgggctttttcaccagcacagctcaactgactttgcttgtgtagagctatctgtttttttcttaaaaactttcgttgacaaactgcagattttttctttaactaatactaatataactgcttagaccttctggatattttctcatacataacatctatggatttaattaatggcatggtagggcttatggagtttataaggtgcacaccttcggaaaagggagagggaatcgatattatggcgatg

SEQ ID NO: 25459 - DNA, 425 bp, Glycine max
ggtgagtatagtaggatgttatgatccccagcatatgtgacattcatacggcgtccttgtcccatgaaattaaaaagcccttatgtgatcgaattgctcttgccctataataacatccaattgtgaccttataaactcatccgtaatcacatgagctgcttcccttatcttttgatgatggctgatgtggcaattcgaatagtgctcgatcaagatatggaatttcattaggggctagatcttctcctcaagtctgctttgcccatctgtgatcgatcatgaagtgaatgatgccggttgcattagtcaatgaatgagagataacaactcctatggctagacattcacctccatggaacctttgttgtaattgcagtagaagtagtaggggaatctactctataggttgagtataatcaactttt

SEQ ID NO: 25460 - DNA, 434 bp, Glycine max
  unsure (1)..(434): unsure at all n locations
agcttgttcatattcttgatcccatttgttctttntggtctttttcagtaagttcatgatcggcctagccttctcagctatccaaggtagaaatcttatcaaagaggctatgcgtcctgtgagtctttgtatctctttgaaagtcttcggactcctcatctcaatgacgactggacatttatctagattagcttgtatgcctctttgggaaagcataaaaccaaaaaattttcctcctccaatcccaagaacacatttttagaggttaagtcgtatgtatgtttttggatttgtgaaatgatctcggctaggtcctcaacatgggacttgactccattggatttgaccactatctcatcaacgtacacctctatatttctacgaattttatctttgaagatcttatccatgaggcattggtacatagctcccac

SEQ ID NO: 25461 - DNA, 430 bp, Glycine max
  unsure (1)..(430): unsure at all n locations
tgttatcatataaacaatcagacgcatactcacatagcataatctaataatgcattagatgcaacttttaacatttgtatctatttacatttaatcaaaattattaagaaccttgattcgtcttaagacataaatgtctttttgaattaacaataagtgttctatcatttttttacaagtcttaagtgtgatggaattggatatgaaaagtctttcaaccttctaaatccccataaaataattatgattgcattataaatggagttttaaatacaaagattgagtagttaacaaaaaaaaatacaaagaatgaatagttcaagtgattcatcaatatcactagagaagatatatgtttgtgtgaaacatgaccaataatttattagaatacaaaactaacatgttttanggagagagagnatattcataa

SEQ ID NO: 25462 - DNA, 549 bp, Glycine max
gacgcgcaagaatcgcacacgaatgctatgaaccgtttaacaaaggaaaggaaatgcactggagtgcagcatgcaaaccaaccgtagctgccactcgacgaacggagaccaccatctattagaagaagattttctgctccatcccagagtatgcacaatgcgctaggatacgcaaagggtgcaaactcgcaccaacgaaggcgtgaagacaatcaatcctgtgctaaatcttggaaagaagagacgaatcattgccaacatggcccgcaccaacatggcaagcacccttgttcacccaaggaaccataaggcactgtttgaagaccacaggatgctgtgacggaagcgcctaaacggaaggaacgttcgattggaacatagggcacagaaccataaggaacgttaaagtggtgaaagacaagggtgactaaaagcaaatatggcaaaggagcattcaatcacgatgccgtacgcaagcgataatctaccaagacgtgcgcaaacaaatcggtaggcacttataaaatagctcacaataaacatagaaag

SEQ ID NO: 25463 - DNA, 422 bp, Glycine max
  unsure (1)..(422): unsure at all n locations
ntaacaatcccatttgtcatacaaaacatgctgataacttactctagcaatcgcaaacaagttgaaacctaactatatgcaatgattaagaaaataaagaaaatgagctgggttgcctcccagtaagcacttctttaacgtcactagcttgatgcatattacctcaagggtctatagcaagcttggctctagccatcagaaccatctcattctcaacttcattcatcttggagtagatatcccggtcaagtgagtgctttgctgcatcaaacaatttgaatgtgatcttctgatcatctattctcattttcaggttacccttccccatatccactacacaattggcggttagcatgaagggatgacccaaaattagtgggatttcaacatcctcttcaatatccatgacaacaaagtccaca

SEQ ID NO: 25464 - DNA, 417 bp, Glycine max
  unsure (1)..(417): unsure at all n locations
agcttgacaatttttcaaatctcaatattctttgccaagtgtgagtatggatcttcatttggtaaaccatgaaacagatatctaaaggcgttgggtcctcctactgagtaagttgatgcaattaaagatgtttttctaattaaagatgttcttgtgttctatgctgaggacaaaaataccaaacactgattcctcgagagtttggactaatttaaatcaaactttgttcacagatccctcttgttgaacttagcctaatttaaacaacattatactcacaacataataaacaaaactaaaaccctgcacattatccttagtgtcgcaacaagcccttttgtatgcgtgcgaggcgaggctcacgggtgcgcttttcanaggaggaaagatgcgcggagtcgccatcaacgtttaatt

SEQ ID NO: 25465 - DNA, 423 bp, Glycine max
  unsure (1)..(423): unsure at all n locations
tgaagcangagtcggtttgagagcttgagatgagtttgtgagtgattgtgagatcctagaggtgaaggagacatgctcaccacttgtatttttgcaatctttcatcttgttcttctctttgttgtaaagaaggcttcctggtatggaaagctaaatcctttgttggatcttctctgtaggtacctgatgtaaatatatttttatctatttaataattttttgtgtgttctctgtgctatctgcttttcactccagtatgcctttaccttgatcacgtagatgcatgctttgttagggtcattcaacagtggaaactggtctaactctaaagtccttgatagtgcagggctaagttgtcgtactttcacgaagaatngnngtgcgataagttagttgtgtatgtgtgtcttaatgcggtcctag

SEQ ID NO: 25466 - DNA, 453 bp, Glycine max
  unsure (1)..(453): unsure at all n locations
agcttgaacgaatgtaagacacatcttcttcaactntggtgattcttgactccatctcattgaagcgcatatccacttgtaattccaaagtgtcaaacctttcaccaacaaaggtttgaagacaatcaaacctgtccaaaatctttgaaagaagagatgaatcttctccatcatgtccttcaccaacatgtcgagcaccctttttcacccaagagccatcatgctctttttgataaccaaaggatgctatgactgaagcgcctataaggaaggatcttttgattggaacatagggttcagaatcaagaggaatgttaaagtgttgaaagaaaagggtgactaaatgtggatatggcaatggagcattcaatcgcaatgccttatgcatgcgatatctaacaagacgtgcccaatcaatttgtaggcctttatgaanagcccacataataatga

SEQ ID NO: 25467 - DNA, 379 bp, Glycine max
tcttatccaaggctcatcttggtggtgaagctccttctttcatggcttattccctagtggatggcgccgcctcttacctcttctcctttgtcttccgctgcatctccatggtggaaaatcaccattaaaggacctcattgaagctcaaagatccagcttccatagaagctccacaagcaagtttccatcatgaatgatgcaatcctaccccgcaagggcattggatagaagactccaagtagattgggctagagatgcaagagaaggccctagggttctcatgagccttaggatagatttcgggcccatgggctaagtatgagcccacttatctttgtacatattaaattaaggtttcattaattttgggtcttttatt

SEQ ID NO: 25468 - DNA, 350 bp, Glycine max
  unsure (1)..(350): unsure at all n locations
agctntattatcgcgggttcgggagacaaatgtcaagcgttcgcgatatgcgaagatgatattccgagtactttggatttggtacgaccatgccctcctgatttccagctgggaaattggcgagtggaggaacgccccggcatttacgcaacaagcataatgtaaacctttacggttttaaaagctctatagttgggcctaggctttagagtttttccttttgttaaggctttgtgtcttttgtttttgaatttataatacaaggatctttcttcatctgttcctggtctctacccattctcattcacttgcatgtttacttctttntctgaaacggcagatccgatgac

SEQ ID NO: 25469 - DNA, 439 bp, Glycine max
  unsure (1)..(439): unsure at all n locations
agctctgagagacttgccaagaatctaattgtagatagagtttttaatacattaatagaaaagatgaaagcaatgagagttgctacagcctacaagtgatgactcattgactttcatgtcactgtgaacaacatatttcttaatgttcctcatgttccttaactgattatttcttctgatctttgtcaacttaatttccattcaatcttaattctcttgacaattattagtactaactattttcaaacaatattttaccaaactatttctagagttccaaaaatatcaatttcgattgtactgtggaagaggcaattctgacaggattataggaaactttaggcaaagccactaaagcaaatgcatcacaacaatagaaagaagacttagagcactaagctaacaccatgaaattnttgaaattctcacccgaactcgc

SEQ ID NO: 25470 - DNA, 446 bp, Glycine max
ctttgaatccatttgacctctatcatttaaagaatcaagatcatcaaaaccttctcttccatccaagaagttggcaaactcaatattcactttcctccttacatccacatcaaggaagaatctcttgaagtattttaatctttcatgagtgagttccatgtcttgatgtggaggaactcgattagaatcttcacttagccattcatgactataatatctacaattaaaaagaaatatatacatgattaaaatttatgtaattctaaaaaaatgtaagtaaaaaagtatagagttaattacctaggatataaggaatgagctaaacaatggagaggagtgctactcttagtccaacagtcaattaatatagagtgcactacctcataaaaggttgatccttcactctcctcctttctctcatattgataattgcattcttcaccttt

SEQ ID NO: 25471 - DNA, 447 bp, Glycine max
  unsure (1)..(447): unsure at all n locations
agctntataaactatagtgtaatttttaatataattattataaaaattaacaaaattatcatgtataatagtttgtattaagatgtcattatacatttatttttactttttcaatgaatcgataatttattcttaagtatttaattttgttagcacactataaaaatgataaattactttctttttcaaatattagaggagagatgaaagcaaattgaaaggggaagaaattaagctctaccattttccctctttttcaaatttttaaatcaattatcaatataacttttttttgggccaagttcaacatttataaattataaactaatgtacttcaatacgttttcatttaaatattacccttcaaaaaatataatgaacagaaaatgattcgctccattctatctggctcatttgaattatgattntattcctttgctaggaaac

SEQ ID NO: 25472 - DNA, 425 bp, Glycine max
  unsure (1)..(425): unsure at all n locations
tgtagctactgtataagctaaatttagcaaacaggtgatggttaaaagatgttgtattgatcaataacacgttgaaagggagtgagaacctgtatatatattctataataaatttttttaaaatatattaagcatttttattcaataaatttggtttttataaattattataaaaacaaattttttaacaaaaataagttgaaaaaataacaaataaataaaattgttaaagtcttaagaggaataagtttgtattaaaagaaagacataaataatatttttgtccctataagacaaagtgttaagtaacaacgtcattctgtgacatacgttgataacttattaagttataatattatcaataacttcttggtaatatatgtttttaaatctctcgttaactaatgcanattctgattctagaa

SEQ ID NO: 25473 - DNA, 404 bp, Glycine max
  unsure (1)..(404): unsure at all n locations
agcttgngttcctaagcttggggttgcatttgggcgcctattttaattccctacgctgtccctatatatatataaaccagccccacaatcctaattttacaaaatcacattcatacgtcattggggcatttcaccgagcacttggtgggcgcatgtttagacataaattgcaagagaatgggggcaatgtggcatgccccattgcttcagaatacaccataggcctaaggccttctcacacaaatccttaactcaacaaatcaagcataaaaagcaacccaaaactgccccacaagcatgagcatgttctcacaatttagagcaccaaaatgaacaaaatgcaccaacgaaaagcaaaaaactcaaggattgaatacttacttgttggagtgagtagaaacaac

SEQ ID NO: 25474 - DNA, 440 bp, Glycine max
  unsure (1)..(440): unsure at all n locations
tattaagaacatcattcagcaatgaagaggagggatcccttggtggtggagatggagtgcattcatcgggagcattaggcaggaggtcttgtttaagaacccattgaccatccagatccttcctatacctaaaggacgcaactgcagtggctccaatggcaaaggaacgtttaaccttgacaaaaggttcattaaccgggggaatattgaagtgctgcagaatcagagtaataaggtggggataagggagaggtgcatttgcccgtaatgccttatgcataaggtagcgaacaagatggatccaatcaatttgacggccagtttgcaaggcccataataggattaaatcttcctcanaagcttgagcaagatttgtggaacgaggaagtaatactcgacacaaaatataatgcatgatgcaacactcaaaggaaaaagaa

SEQ ID NO: 25475 - DNA, 429 bp, Glycine max
  unsure (1)..(429): unsure at all n locations
agcttctcccncattttcctataaataggtggagaagtgaaaggaaaaaatgttcatccctcctggtaattcgagaatcacttgaaataagtgaaaaaaattgtttccatgaagaaaatccaagccgaggcgcttccgtaacgttttcgtgggtgatttcncgaagattttcaaccattttttgacgttcttcgtcgttcttcagtcttcaaccagtaagttcccgaaatcgaacttttcaattcattctatgtatccttagtggtcctcatttgcttcgggtgcttttatttttatttcatttactttccgtaccccttttgacgtgctttagtcatttacttaagtcattttctagcctaaatcanaatataaaataaatttccaccgatcatttgaattgtaatatccgctaatttctggtaaact

SEQ ID NO: 25476 - DNA, 438 bp, Glycine max
  unsure (1)..(438): unsure at all n locations
tcaagcgaacctatgggcaaacaagatgtcctcaccctataggttgaaaacccaaaagggcggcctaggcaacaattaggataataataaaaaaataaaaagaagaaagaataaggagcgtgtttatcaaaggttttgtcccaaaatccaaactgcaaaagtatctaatcaagatttgaaatgacacatggtcgtctttcaacatcccaaacactaacttatcctttgctaccccctccgagccaaagcatatttgttttctaaaaaaaatacaaaaaataacaaaaacaaaatcaattgtgtcacataaacattctagggatcttggacaattatgtttcactcaaaccttacatggcttaaatctaggtcaactgtgtgtcacataagccttatgtggatcttggacggttatgtntcacttaaaccttacttggc

SEQ ID NO: 25477 - DNA, 421 bp, Glycine max
  unsure (1)..(421): unsure at all n locations
agcttgcctcanagtgatctaggaaggataaagcggctgaaggaaccagttagccaccgttttaggagcgctgagcaccagcagcgcttcgaggccatcaagggatggtcatttctccaggagcgacgcgtccagctcagggatgatgagtataccgacttccaggaggagatagttcgccggcagtgggcatcacaagttaaccccatggcaaagttcgacccagacatagtcctcgaattttatgctaatgcttggcctacagaggagggcgtgcaagatatgcgatcctgggtgaggggtcagtggatcccgttcgatgcggatgctctcagccagttcctgtgataccctttagtgctggaagagggccaggaatgcgagtatggccagaggaggaaccggtccgatgggtttgatg

SEQ ID NO: 25478 - DNA, 408 bp, Glycine max
  unsure (1)..(408): unsure at all n locations
tgtaggattatggggtacccatcacatgtggtactaggtggcggtcgggcgatggtgtacaacaagttttccacatccacaatgcgcgcataaacccaccatcccctgttgcccacctccaactgagctcacgtactcccacgtagcccatatcctcgtttctctcaacaccgggtccccatcaatcctcccaagcttccacaacatccaagcaaaacaacattcaaacagcacaagctatcacagccaagcaaaacagagcaaaggcagaaaactctgctcaacacatcaaccaaaatcacaggttttctcacttaaagaccacagtaaaaattccttcgatccaattcgttaaccgttggatcgactccaaaattntactggaagtctatagtgcataagcctaca

SEQ ID NO: 25479 - DNA, 432 bp, Glycine max
agcttcgctaacttgttcatttcccaacgtactcacgggaaagcttacacaggctgacatgcacacagaaccacacatgcaatagacaaagaaaaacagagaaaataattaaaaagatgctatggcaatattgcatgactttgtatacaaggcagatcagaaaattatgtagtttgaacaagtataccaatattggccctcatagagtcatagtacaattatgttgtccttggcctttgggtatacaacaacttgatgaaagagaaacgaaagaccattccttcactacatcgatcttctcaacttgtttttattcatgcatgagttatgcaattcctgtgaacattaagttagagaatactgttattacatacatacataaatacatagctttgaatctttaaggaaaattagtaaaaagcataaaaccct

SEQ ID NO: 25480 - DNA, 423 bp, Glycine max
  unsure (1)..(423): unsure at all n locations
tcatggtgaatcaaaggtgaattgattataacaatgatgataacaaaatatgatgacaaaggtgatgacaaaaagctcaaagatcattcaaagaacaactcaagtgaatcaaagatcaatcaaagagcaactcaagtgaatcaagaacaattctagagttcaagataagaatcaagaagaattcaagactcaagaagaaattctagagtcaagaatcaagattcaaggttcaagatctcaagaatcaagatcaagattcaagactcaagattcaagaatgaagagaaaactcaatcaagataagtattaaaaagttttttcaaaactttgaatagcacatgagtttttgacaaaaccttntaccaaagagtttttactctctggtaatcgattaccagattggtgtaatcgattaccagtagc

SEQ ID NO: 25481 - DNA, 436 bp, Glycine max
  unsure (1)..(436): unsure at all n locations
agctngccaccacggagttttccgactattctcttgtgtggtggaacaagctacaaaaggagagagcaagaaatgaagagccaatggttgatacatggacggagatgaaaaagatcatgaggaagcggtatgtgccggctagttactcaagggacttgaaattcaagctccaaaaactaacccaaggcaacaagggggttgaggagtatttcaaggaaatggatgtgctcatgattcaagcaaatattgaagaagatgaggaggtaactatggctcgatttcttaatggtttgactaatgatatccgtgatattgttgagctgcaggagtttgttgaaatggatgatttgcttcacaaagcaatccaagtggagcaacaattaaaaaggaagggagtggctaagaggagttttaccaactttggttcttctagttg

SEQ ID NO: 25482 - DNA, 284 bp, Glycine max
  unsure (1)..(284): unsure at all n locations
tcaacattcaatatcgagcgtctcgatatattacgggtctcaatcatacattagagtaaaaatttattatcgtttgaacttgcttagagcttcgataatcaatttcgagcgtctcgatatatgaccggactcagtcagtcaaccgagtaaaaagttattgacagttgaatttgctcatagcttcggaattcaatttctagcgtatctatatattacgggactcattcatacatataagttcgaataaatgaccgccagaactagtataaagcattngaaaataa

SEQ ID NO: 25483 - DNA, 434 bp, Glycine max
  unsure (1)..(434): unsure at all n locations
agctngagatgaggaagtgttgaagggtgttacttcctgcttttattgttgaccacagagtggtacctgcagatatgtcgcgggggtcaggagaccttggggacgtcaggtggggtgctattgcccaaaaccaagcttgaccaatcccgacccaacccgggcatagtcggtcagtgagaacctgtgatgtacctaagcaggcgagctcctggcagtcaacagataaaaggaacatataccacaaagcaaggaggcttgtggtggctggccagctgcgaactttgattgatatgtgggttatggcctctggtaatcgattaccaagggtgggtaatcgattacaaggcttaaaaatgaagacagggggctaagatggtctctggtaatcgattaccagcggatgtaatcgattaccaggcttgaaaacggagtca

SEQ ID NO: 25484 - DNA, 320 bp, Glycine max
cgggaaagattctatgagttgataatgagttgcccacatcatgggtttaatcagcaaaggatgcatatattctatggaggataagagaatcatgaagagggcagtcaaccaggtggaggatcaagcaattacttttggacttggacaacaaattcaagctttatacaagcaaatcgagactctaataaaggcctaatctctatctcgggtttctaactccacaccttcataccttgtgataggtgtggatgtgtccatggttcaagagaataaataatggaaggcgagatggctcaagccatggatgagttcaaatatgt

SEQ ID NO: 25485 - DNA, 525 bp, Glycine max
tccgccacgtctaccgcagcgaaataacgggagcgcacaacaaggaaaagaatgaacctgcatccgcatgaacaccacgagcgcatgccaaccgcaacgccaaccaacccaatatatagcgaatggttaaaaggccaaagaccatgaatccccgctgagagagcccacaccaaagcgcaacaagccaagagagataggcatttctgcaacagccgacacaaaaactcaggagagaaaaagatggacatcatcactagagcacaccccagatgaaatacgccaaaagaaataaccgaccggctcaaatcacacacaacataagacgcgaattatacgctacggcgcagcacacggatgaagacgcccgcgacatacatacccgtgtgcatggacaacggagaccgcactcagccgagcatcatcacacgtacgagcaagccaaaaaagcacgaaaagcgcccgcgagctaccgggacaaaaggtagaccatgttagagagacctacccagaggccggacccaaccc

SEQ ID NO: 25486 - DNA, 434 bp, Glycine max
  unsure (1)..(434): unsure at all n locations
tgttgtgcaagccttagaatcttcttctacaagtttgtgttgcttgctctgcaagtcacacagttctatataaactacagtgtaactgaaaacagttgggaaaataatatccttctcacaaattctctctctctttctcttttcgattatccttctctaatttggtatccaaagccaaaaagatccttcaatggcagaatctcctccttttgctactccttgaaaacctcactttctttatgacatttgccctttatggcttgcctccggagtactctgctacccgtgaccaaattntagggtcttcgatagttcctactatgactaggcatcttctgctcttctacgggttccacccaaacatactagagcctcantcttggcttcggtaggtgatacttatgcccttgcccctccgagcagtgggttgtcac

SEQ ID NO: 25487 - DNA, 409 bp, Glycine max
  unsure (1)..(409): unsure at all n locations
agctataaaccatctttcatttatttatttttgtgatgttgtaagacaacttaattatcttacatctttatgtttattaggtctctgattctaatggtggtcgtgaacgagcaccgcgagtaccacattagtcatgtcactcgcatagtatgggggaaatactacagattatcatggtattaaacttgtactactggattatacatgaacctatgttattttttaacttgcggtgtgaattatgtatatntgaatgacacattctttttattttatcctttcangcactnttgatttcagaaatccacttcactangattataaaccgaagtggaatattttgtttatagacactacttttgtatggtaaatgtgattagacttgttattggagaattggcactatata

SEQ ID NO: 25488 - DNA, 282 bp, Glycine max
  unsure (1)..(282): unsure at all n locations
tataaaacgaagtgactacacagtgatggaccaactctatcgcacccctgccaaaatatcacttttgtccttgatgttgaactctgaaccccatangaaggtattgttgaagatattgaatgaggctcatgtcattcatgacatctctgaggagaaatttgaaggtattgttggtaatgtcatcgcaagcaatttacattcactgatgaggagatgctagtagaaggagtagggcataataaagccctacaaatatcattgaaatgcatggaccatgttttg

SEQ ID NO: 25489 - DNA, 481 bp, Glycine max
  unsure (1)..(481): unsure at all n locations
gggattcttaagtcacctgcggcatgcaagcttggaaggactaaccaaaatccatgttctatgcgagattgtcaaaattgtcaaaattaaacgaaatctgtactgaggcaagcccagcaatattttttaattaatattaaattatatttgtatttttggaacagttgaagaaaataaatgtaaagaaaaatttggccatcattacttgatttcagctcatatgagatacatcattaaaaatttcggacctgttcgaataaataacttaattaagtgtttattatattagtgtttggataaacaggatttagagtctgtttagatatatagtcgttttcatttatatcgaagaagtcacttattcaagccatcatcacacgtaacgtgcatgttcaaataaatacttattcacgctctgatctttcggtataattntttgtacgattttgtttatataatcacgtttgttggtatcaatccc

SEQ ID NO: 25490 - DNA, 453 bp, Glycine max
  unsure (1)..(453): unsure at all n locations
cttggttacatacatcatgcaaactaccctnttccccaagggtagttgtgatgatattgataaggcttgtaggaattntattttgggacatgattcgagtgaaaggaaaatccacctagtatcttggaacaccatttgttcagataaaaataatggtggtttgggcctgtgcaagaagaggtatgtaaatcangcctttatgttgagagctaattggcagttttgtcaaatggaagctcctatttgggcttctattttacgaaacaagtacagatgtggtgcagattcgttccctacagttgatagtaaaagggccggtagcaatatttggcgtgggatttgctttacgtgggattttttttttgtaagaatgtggtttggagggctggggatggtactacaatgaaattttggcgtgattgctggatccctagaagctttcctctgattgat

SEQ ID NO: 25491 - DNA, 356 bp, Glycine max
  unsure (1)..(356): unsure at all n locations
aactttgagttgtgtctcacaagactctcattcgtgcgcggttcaacacgtgttacacatgctgtctatttatagactaggcagcttccttgagaagctctcttgagaaaacttccttgagaagcttctttgagaaaacttccttgagaagctagagcttagctacgtacacccctctcatatctaagctcacctccttgagaagcttccttaagaagattcctaaagaagctagagcttagctacacatacctctctaatagctaagctcacctccttgagatgagaagcgagaacttagctacacaccccctataatagctaagctcacccccatgacaaanaacatgaaaata

SEQ ID NO: 25492 - DNA, 424 bp, Glycine max
  unsure (1)..(424): unsure at all n locations
agcaactcanaatctatgtatctaaaacccctcaatttattggattttcaagctttgagaagtgaaaatgagaatggggtaaatatggagcatactctcacctcacacaagtctataaccttaatctaaactcgctcaaactgccaccgaatcaaaatttgactcctcaacacccaatttaccctagaaatggctctagtcttcactttggtcactcattttcctcctttgcacaacccaagctttctcacagtcctaaatgacatttcaaactatgattacctcactctaacctccaattaccactaaatccagatttggcttttcaaatcctcaaagcatcacactgttccactcatatcactacattgtcactctttaaccctaggcttactcgacccttcatctctatcagttctccatc

SEQ ID NO: 25493 - DNA, 447 bp, Glycine max
agctcttcacggaaggaactgttattcactggcatggaatcagacaggtttgttcacttttgtttttcatgccattttggcctatcataatccattgacataaataacaacaatttgtgtttcttaacgaagtgatttaaaattcaaattttcattaatttttagatataaaataaatcgtattagaaaaaaatatttatttttatacgctcaagatttttaataaagatttatcactatgacaaaaacaatttcgtatcactatcatagttgcaaaaaaaaatcattttaaccttattttctaatcacatcaattaatataattttatatttataaggtctaaataaaaagtatgaattagtcattttgacctcatgcatattactcccaaaccccttattactaagcccgatccaattgacttttagttagtcatattatttgat

SEQ ID NO: 25494 - DNA, 445 bp, Glycine max
  unsure (1)..(445): unsure at all n locations
ngaagtggttaaactttctacaagatacctgctctgataccatttgttggatcaagtggcctcggaataattaagaaggggggttgaattaattattaatgaacctttactaattaaaaatttatccttcttaatgttactagattcaattaggcttttactataatgttaagaaagtaaataacagaaaaagaaacttaaccaaaagtaaaagcgataattaaagtgcacagcggaaattaaagagtgtagggaagaagaagacaaacacaagaatttatactggttcggcaacaacccgtgcctacatccagtccccaagcaaccaccggttcttgagatttctttcaaccttgtaaaatcctttacaagcaaagatccacaagggatgtacccttccttgttctctttgaacaaccaagtggatgtaccctccacttgaact

SEQ ID NO: 25495 - DNA, 437 bp, Glycine max
  unsure (1)..(437): unsure at all n locations
agctggcttgtggngcttctatagaggctggatatttgagcttcaatgaggtcctttaattgtgagtttccaccatggagatgcagcggaagacaaaggagaagaggtgagaggaggcgccatccactagggaataagccatggcagaaggagcttcaccaccaagatgagccttggataagaagcttggagtggatgcttcaatggaggaaaagaaagagggagagaaagagagaggggggagcacaaaattgaaagaagaaaaagggagagaagttgaaatttgagttgtgtctcacaagactctcattcattaaagttacaacaagtgttacacatgcttctatttatagactaggtagcttccttgagaagctttcttgagaaaatttccttgagaagcttctttgagaaaacttccttgagaaactagagct

SEQ ID NO: 25496 - DNA, 422 bp, Glycine max
  unsure (1)..(422): unsure at all n locations
ntagattcatcacttaccccaagcaatacacactgcatgctcttgtcatccagctttgttcttttctgatcaggtacatggacatgagttaggcacccaaatactttaaagtaatctactttaggtttgattccactccacatctcttctggagttttatctttcactgtcaatgtaggactcctgttgagaacatgaactgtccattttgcagcttctggccaaaaaacctttggtacttgtttgtcacaaagcatgcaccggaccatattcataatggttcgatttttacactccgctacgccgttttgttgtggagtgtaagatgttgtgagttgcctgcttatgccattaattttacaaaattcattaaactcatttgaggtgaattcacccccccctatctgtgcgtaaacaacata

SEQ ID NO: 25497 - DNA, 427 bp, Glycine max
  unsure (1)..(427): unsure at all n locations
cctgccgcatgcaagcttgttgaccaatatcatgccacatgaggaaaaacaataagtttgtccagacaacaaggcctgattgtagactttaactccccttccatttcttggtgttcttactttatctttgcccgacttggcattttccaagtcatgatgttcttcattgggagaagaaggcttcattttcatgtgatccagttatggcgtaagctgaattgacacacggaaacaaaagaaaaggagcaacaaagttcacagttccacagcgtttcaagctatggagctcacgatcgatgacaagtgaagcgacgcgtggaaaggaaaaacctttttcacaaacccgggtatgtttatgatcgacgagaaaaacccatcaaggatcaacaccgtgatcgttgaaacagcgagaatnggatggaatatg

SEQ ID NO: 25498 - DNA, 407 bp, Glycine max
agaggtaattagtaataaaacttttattatttgcataaaaaagcagtaatcaactcatgataggtaacaataggattcaagagatttttaatagacttttgcaacataaatattttcaacttcaatccactcaacaatgaagtactatatgaatgttttgttacaataggagtattatgcatacatacttgtataaaaatacagcatacatgagaagcttgttttatttggtacaaacgcatgagatttacaagagatacaataacttccctatgaaatttaaagcaaaactcaagaatgttttgttacagtgaccacaactacatacatgctcaagtatatttcattgtaatttaatttatttccaatactcaaagtagttggttatataaattctattcagtcat

SEQ ID NO: 25499 - DNA, 440 bp, Glycine max
  unsure (1)..(440): unsure at all n locations
agcttccgttcccgagagcatctcttatttaagcatttcagcctttgctttcttgtagcttaggaaaaatgccatttcttcttctttctttcttccaaatccatttctaaagttccaagtactttctccatcacccacatccaccattagccaccacaaaccatcattgttctccgttgaaaacccacaccgagaggaacccttcaaccgaagtagaatttccaacttggcttgcggtttcggtagagaacgaaaaccctaatctgatctttcattttctttcgaggtaaccatggttctatgcttgtttcttgttagtttcatcttgtctttgcatcttttctgactttggaaccgccattgcatgtcttatgcttcctttgaacaaccttagagaaagagactntgtaaacgttatcctttcatgaaatgcatgttat

SEQ ID NO: 25500 - DNA, 474 bp, Glycine max
  unsure (1)..(474): unsure at all n locations
atgatatggtgtgtacctctgaacgctcgctttacggacctatgaaactcaagcttaccccataattccccaattgggaaaattgctttgaaccaaaatttccttttatgaatgatgctctcttacaacctatgacagggtaaagggatttaacttttccgggccaaggtgtaatcaaacaatcatacttttagcttaaaatggggggcagggaataatcaatcatgttcaaggtaagctttttaactaagtggctatctttaaataaaacatggcccttaatattttatttttcacgctttcttttcctctcaaagattgctgcaacaccattatataacattagtggtctctcataaaaaagacccactctcaccggttgngactaagcgtccttacaatcacatggcaaccaactaactttccagcatgacctaattcatgtttttctctttaatgattgctgctccttag

SEQ ID NO: 25501 - DNA, 434 bp, Glycine max
agcttgccacccagctcgcctaggcgagctatgttgcttcctccagatagcggtgccttctggggaactttctggaaggcccaagtgggcctggttgctatttgcaccccctgtttactaaatacaccccttgctttttttgctgttatttttccgtaacgttatggaattttacgaattacgtaacgatacttgttttctttccgtaatgtcacgaaaccttatggattatgtaatcatcccttctttggcttccgggatgttacagaactttacggattgcacattaacacttccttttgacttccggcatgtcacggaacttcatggattgtgcaacaatgctttcttttgacttccggcatgtcacgagacttcacgaattgcctaacgatgggtgccatgtacctcgaagtggtcaaacgagggtcgca

SEQ ID NO: 25502 - DNA, 388 bp, Glycine max
tccttaagaagattcctaaagaagcttgagcttagctacacatacctctctaatagctaagctcacctccttgagatgagaagctagagcttagctacacaccccctataatagctaagctcaccccatgacaaaaaatatgaaaatacaaaaaaatgtccttactacaaagactactcaaaatgccccaaaatacaaggctaaaaccctatactactagaatggccaaaatacaaggcccagacgaaggaaatacctattctaatatttacaaagataaacgggctcatacttagcccatgggctcgaaatctaccctaaggctcatgagaaccctagggccttcccttggatctctagccaatctacttggagtcttctacccaat

SEQ ID NO: 25503 - DNA, 433 bp, Glycine max
  unsure (1)..(433): unsure at all n locations
agcttctattctattaaggcaaaaattttgtatagttctttagatactgttggtgctattgtccaatcataattagagtttcacataatcatcatctatgttcacatttaacgcaaattttttaatattcagattaacaaggtgaaactccaaattctgaaaggataatagcaccaaaaactcctaaagaactaactgcatgtatggtttgtcctttctcaaaaataattcgaagagaagttcaatacctaatgctgtacaagtgtacaatgcacattcaaactccaaagaactatactcgcaaattcctaacatatatattntaattacacagtccataccaatcaaacaaaagtaaacgacaaaaaccccattcataaacatcaanattgcatatacataccataagcatacgctagggacgagttatact

SEQ ID NO: 25504 - DNA, 163 bp, Glycine max
ccttatccactgggctctgtagacctggtacatggacgtgaatctcgcaccacagtactcttaagtaaattacattatggccgattacactccacatatctaatggagttttatctttcacatggaatgaatgacttctgctgagaacataaactgttcattt

SEQ ID NO: 25505 - DNA, 432 bp, Glycine max
  unsure (1)..(432): unsure at all n locations
agcttcctcggtgccattcctgcgaaggtttacatttggaaagttagttttagtgggacattactcttaaagcaaaaatggcatgtaacctcctcccatcaatacaaacatcaatgtaaatttagagcaagcttatgcgcatatttccctacgaacgttcacttgcacaagacatcctattaactaagaaaaatgcacccatatacaatcaaggtagcttccttacctagattatttacatgtacttccaaagtgtatttgttatttacatcatacacgccatcttgtcaaaatttacacacatgcatactcaaagcatttcggggtaccaaaaattgcacatgcgctcatcttggtatttctaatatctatacatatacaaacttcatgatgaatcttgactatctacacaatanagtgctacatttcatg

SEQ ID NO: 25506 - DNA, 412 bp, Glycine max
tcatcaaagtaaggagggggggtttccacttcttgaacctggatcttgttatctttggaagctagacttcgctgcatgttgtgttaatgttcaaaattttgtagctacttccttggctgaactgtatgatatgtttttttgtcttgagattttaaggttaaaaataagttctttgggtgtcaaaacttagggttagcttgaaaattcacttaaatagaagttttctagcaaaaagttatgaacaaaaacaagtttaaggatatttataggattaaattgatcttgaaactaaaatgattgttatgaatatatggattgtttttctaacagatttgacttcaaattttaggtgtgaaaatatagggtatcatataaaattcatgaaaaaccgattcttggagcacttataaaa

SEQ ID NO: 25507 - DNA, 431 bp, Glycine max
agcttgatgtaattctgaggtggaggagaccaacgaacatagataggctaattggtagcatccaacgcagaaaaaaaaaaggaagcagcagcatcatgcataggttttgctttcttgacgataatccacaaggaccagacgttgtcatcaaagatcttagagttacgaactttccaaatccacagcaaggttgtggcaaagaaagaacctgtctcaactgctcccgttaggaaggattaaatgaataaaattgtttatagctcaattcttactcagatttaagtcattcaattcatgaatcatgttgaacaaattaattattgaattgaattttaaggtaattttgaattaattcaattcattgtaaattaatcatcttttaaaagtacctagttcaagcccttttctttaattggttaatagagattacc

SEQ ID NO: 25508 - DNA, 426 bp, Glycine max
tccagcacccgcgattttgtttataaaacatggtatattgattgccttgggcttactttcaaccttcctatgtaagttgaactcactagtattgtttaccacagttttaggagttcaatattcacttaggagcaacatttcagccagcaattcaatcaccaaaactcaaattcacaatagacacaatcataaggaaacctaaaagttcaagaaaaggttcacaatcaaagactctaagaattttgcatgaacatgttaaggactaattaacatgaaagatttgactcagatcaaataataggctaaaataatttcatacactcatgaacaaatgagttagacaaagaaacaagaaaatataattcagcacaacataagaaatcttatgtgacaagtttcatgactagacatgacttctatgacaaa

SEQ ID NO: 25509 - DNA, 578 bp, Glycine max
  unsure (1)..(578): unsure at all n locations
gcagcatacagcccacgcttcgacacaccaagcncanacacgtttgtcaatnacccaacangagggcacatacgacatggagcccntgagatgcagngcctcgatagacccgtgagccgacatgccagccggcaggcatgcaagcaagccaaccattcgattccgcgagctatggctgaccgcgtccaaaatgcaggtaccgaagtggggaacatctcggaacgcccacgcgggcctggttgctatatgcacaccctgacacaaaatacaccccttgcgtcgctggctgctaattctccgcaacgtagaggaatctcacgaactacggcacgagactggctcgctatccgaatgtcacgaaaccttatggagcatgcaatcatcccttctttggctcccgggaggcgacagaacttcacggagcgcacatcaacaccctcttatgacctccggcacgacacggtactacaaggatagagcacacaatgctctcatctgacttgcggatgtcacgaaacatcacgatgtgccaccgacgggaccacgaccccgaagaggtcatacgacggcacaccccg

SEQ ID NO: 25510 - DNA, 420 bp, Glycine max
  unsure (1)..(420): unsure at all n locations
tgatagcacgcagagactaacgtcgtcttctgcgaccttcgtcaatcgcggccgacaagcccatttaaaagcggtgatttacgtcatcttccgtgctcacaagatctgtcatactgacttttgagtcacgctgacgggcgcaaatacccgagtggttatcctaataaaatttttgctgtctgtaagacgaaaagcatgatagcacgcagagactaacgtcgtcttttgtgcccttcgtcaattgtggccgacaagcccgttgacatgcggtgatttatgtcatcttccgcgctcacaagatctgtcatacagacatttgagtcacgctgacgggcggaaatacccgagtggttatccgtattaacattttgctgtctgtaagacgaanagcctgataacacgcagagactaacttcgtct

SEQ ID NO: 25511 - DNA, 379 bp, Glycine max
  unsure (1)..(379): unsure at all n locations
agctttatatcagttcatgaataaacaatttatagaactttatgagaaagagagaaaaaanaagaagggaaattcacttttttttcaatactttattttcataattcacttttactttctcttttatgtaattgcatagaaaatttggcatggaagttggagaagcctgattgattgagttggtgccagtgtgccaccaaggttaattaacatgcttgattaactttgtggaactgtacatatacacggtcacaacaagtattgcaataaaattatatatttaactgatttatttcaaatctattcaaagtacttagtatattttctcagtgagaggggtcctaaagggggtgtggtgcttttgatgcaaaatatgtta

SEQ ID NO: 25512 - DNA, 387 bp, Glycine max
  unsure (1)..(387): unsure at all n locations
tgtgttntaatgtttcaatgctgattgcaccggttccccattctgttatagatgtaattttttcgtaattggtattctgaataactgattgaaatgattaaaacatcctgaaggcttacaatgactactatattttacacaggatactgtagttggatttttgttggctggagtgggaaatgttgacatacgtaggaagacaaattacctcattgtggattcaagtatgccactgaactatattttacttactattctgtagtctgagtatgtttggtattaatcccctaaaaactacaatgtttttcttgtgaaattgtacatcatgaagtgactccctgcctcttttatctaccatccaaattgtgatacccaataaacaatata

SEQ ID NO: 25513 - DNA, 81 bp, Glycine max
  unsure (1)..(81): unsure at all n locations
agcttctaaactntatacaagaatgaagctctgataccacttgttggacaagtggcctcagatatcttaagataggggggg

SEQ ID NO: 25514 - DNA, 453 bp, Glycine max
ctaagctttggtatttatggtcttcctcttcaagtaactattatcactaaatggatataattttcacttgagcttgtgtctgaaacttgtggttgttggagcattcaatgcttgcattaaatacacgtcctcttcatgctggaaaaccactctcttaagctttcatgttgagcacttcggcaggaaaccacttttgttgcgttagagtaagtctgccacaacaaagcacgccttttgatgatgtttggtgtaacgacccactgccgttacatgaaaataagaactaactttagaggaagactttattttaactcttttaaaactcttcaattaatttaattatgaaatacttatgaactttccacatctcatatgccaaagggtaaactgtacaacaaggaaataaaacatcacgtgcatataaacataatccacattattaggataaactac

SEQ ID NO: 25515 - DNA, 387 bp, Glycine max
ttacacctccatttatcatctgctacaccttctcttccattggtcttcttcattctctcccatgtctctcctcacacgtcttgtgctaaatgttgttaacatgattctttagagttttcactgattaaacttgctatataagttagattttattttctatggctcaaatttcttgttcttgctcttgaaccatgaattgtgttgagtttaggttcctttgagttttggtttgttattttttttggctgaaacctaaaccataaaattcttacaaaaatattaaagtagaagaaaacctcacaaatctagagtgacttgttcacctattgtagttttgtcatagaagtcatgtctagtcatgaaacttgtcacataagatttcttatg

SEQ ID NO: 25516 - DNA, 410 bp, Glycine max
cactccacagttttgttacctcttgataattccctccaacggtagcatacccggttaccagaaagtttgcgcatttggcgactggcctaagcttctcatattctttaaagctatttctgcatcttgcatcagtctcttcttgctaaagaagtggattacattattccagtcatgaactgcacattccactctctgccattccttcatttcctgcaacagcttggtcaccaacccagcttcatctgtctctgcaccacttttagccattattccaaagttttgttgagtgacttctggaattctagcctcttttctccctttaaatagttgcagtgctccctgtgtgtcttgctggaaaacctggattggatcattgacaatggaactttcaaaccaaatgtgggagcatg

SEQ ID NO: 25517 - DNA, 446 bp, Glycine max
caagctctacaccatctagcgtgaatgccactcgcttcttcaaactttgatgattattctctatcacgatgagattctgaccctattctaggacgatcacctactctatgatatgcactcagattctacatgtaaatacttatctagtccatgaactagacctatctcctacactgaaataatatcatatatgatgatgaagacatacataacgatgagagttaggaataatgcgctcttctgctctctgctagaccaatcacacttctggattcacgccctactgcttctctttctcttgatctactattaaaaacacaagatgaccccggcttgcccaaattacacctctgtattatgctatggactattcttgcttatcagcattgacaatggtgaccttcagggtctatgattagacaaattgatgacacatcggcgagagt

SEQ ID NO: 25518 - DNA, 145 bp, Glycine max
ctaagcttactataactagagcgggactaatcatatcgggatattccagcggaatatgtgccttgagataaccaccattcctagctcgtcgagggtttcttatcgatcattaacacatccatagcttaattgatatctcatctct

SEQ ID NO: 25519 - DNA, 443 bp, Glycine max
  unsure (1)..(443): unsure at all n locations
agctntaacaccattaagggtaaagactcttcccgtggcctttggatgtccagtttgaccattcgggcctccaccatttcgctctttcttgggtcgtgaacaatctctttgagtgtgtcccttttgtccataattaaaacatgttgcgcctatatcaggacaattcgaggagatgtgccctggcttaccacatctgtaacaaatgatatgagtggagaaagtattgggcttgctaccactaccacctgcaaatcccctagcaacagtcctctgattgtcatggcggttaccatattgcttagggggtttcgaatatggttttcctcaatgttgaggcccattctttntgttcctcattggacctgtactccaataataggccgccctatctcgggagtcttcatcccaaatccggcacatgttaaccaaaagtgggaactgac

SEQ ID NO: 25520 - DNA, 381 bp, Glycine max
caagcgagctaggctgcttactccagaggcaaccggctcatggaggaatatgctggaatgcccatgagggccaggttactatctgaaccccaatttttactaaatacaccccctgacatctattggtgattctttgtgcgtaacgctactaaacattgcgaattccgtaacagaagcttggattctttccgaaatgttactaaaccttacggattatgtaatcatccatttttttgccttactgaacgttacagaactataccgattgcgcactaacactttctttgaatttccggcgtgtcacggaacttaacggattgtgctacaatgctttcttttgacttccggcatgtaacggaacttgacgaattgactaacgat

SEQ ID NO: 25521 - DNA, 438 bp, Glycine max
catgcaagcttgtaggtaaactagatgccttagttatacctggtaacccaactggccatgaataaaaaatctgcacttgtcgccagactctgtggtttatgctcatttgtcgaccaccacacagacctttgcccttctatgcaacaatctgaagcaattgaacagcctgaagcttatgctgcaaacatctacaacagaccttctcaacctgagcagcaaaatcaaccacaatagaacaattatgacctctacagcaacaggtacaatcatgggtggaggaatcatcctaaccttagatggtcgaatccttcacaacagccgcaacaacaaccttattttcaaaatgttgctggcccaagcagaccatacgttcgtccaccaatccagcagcaacaacagcaacagccgcagaaacagcaaacagttgatgctcctccg

SEQ ID NO: 25522 - DNA, 336 bp, Glycine max
tacggaaaataaacttaatgaaaataaaagtacacataaaaagtagggaccactaagggtgcatagaatgaattgaaagattcgatttcgggaacttaccagttgaagaccgaaggacgacgaagaacgaacgaagaacggtgaagaacaatgaagaacggtgaagaatctccacgaaatcgcttacggaaacgtctcgaaagcattatggaaccacctcggcttggatttttttcacggaaacaatttttctcactaatttcgagagatttctcgataccagatgggctgaacccatttgctctaccctccttcccctatttataggagaaaaga

SEQ ID NO: 25523 - DNA, 434 bp, Glycine max
agcttccatcatgtgtgtctcccaagcagtacgttgtatgaggtgtatgtgtctaccaacatatatgggaccacaaaggattgagagagatttctcattccaaaagtggtcaacaaatccactttgcctctggtatagatatgttcacctacaaaacctatcactagtttctcgttaggttgtataaaatcgagcgagacatctatttttcaaacatagactgatacaaaatatcagctccacttccctggtcgataagtgttttttggactgtccaactagcaataacaattgatatcaccataggatcatcctggatgggatcacttccaatgaagtcagcgtctataaacataatgggtggtagatatcagcatggtgttttctcagtttgtacagcattgacacttttgagtgctcgaaggtgacattcc

SEQ ID NO: 25524 - DNA, 188 bp, Glycine max
tctagccaaatggacttaccttgaattaattcctttgatatgccccttgagcctatgttcccctttctttctttagaagctcattacaagccttaagtgaaaaaccatgatatcaccttacccttaaggaattttggagctttggaattgttttggaaataagctaggaataagtgtggggggggggg

SEQ ID NO: 25525 - DNA, 428 bp, Glycine max
  unsure (1)..(428): unsure at all n locations
agcttcaattttttgcgtcttctgtctttctttngtgttatgatgacttttcccaggataaaaggttagatttttttgtgttcctgagccttccccgacgtaaagttgtcaccgagagcaacaaagaagacaacaaatagtgtccggcatttggaggacaggttagtgatgtatttcatttctccttttgatttctgggttctattggtacaaaagattgaatctttttgtgttcctcagtcttttttgtgttcctcgggcttatctgatcgtggctggctattgttcttcctttgcaacacaaaagctttaattttttttgtgtcttcttcctttgttttgtcgtatgatgatttttcacaggataaaaaggttaaatttttttgtgttcctgagcttcccccgatgtaaagttgtcaccgagagca

SEQ ID NO: 25526 - DNA, 429 bp, Glycine max
tgtgttatgaaatttatgattctccaagaataatttaatttctcccaattatgcatgaaccctacttatgaaatttagggataatttaatttctttcaattatgcatcaaccctgatcatgaaatttagggatttttttttcctgctgaaagtatgaaatcttatattgaaaagggtatcaattaagttggcctagaaggaaattttgaaattgctatttgcaaaccccattttgctattctcagtcccacttgcttttttttcccaaaaattattattaaacatgattaaaggattgaaagtttataccctgcaattaaattaatgtgaatgctttgaaattattggtagcaataaatatatatatatgctacatatttcttttgaaagtgttgaatgcaaatcacaactaaatgtgaatattattta

SEQ ID NO: 25527 - DNA, 566 bp, Glycine max
  unsure (1)..(566): unsure at all n locations
agcatcccagacagacggagaatgaacagatntagttaatatnggtacggaaaacaaaggannnaaagaaattgacaccttgaagatcaagagcatcgcagacccaggagccgcaaacanacctgacgcctgcaagcgtacccccatctgtcaagagggcacgctccgcatcaggggcacctttcagacccacgcagacgaagaatacaatgcgactggcaacaaaaccatgcaactcaaccttctaaccgccctgaaaacttccacgacaacccagatggcccatgtaacggtccaaaccggaaccaaacactacatgggcccaaggatcgacccggttcactccacgcaacacatcgggcaccagccaccctttgacgagaacatgccacggcacccttatccaaacttctactacgcgctcgaggaccaggaagcttcatacaccccctcgctgacgcactcagtgcatcgcgcaaccaatataataggcgcgacgccacgagcgtaacaacgcgcagctactctggcgacctacgccgaataatgccccacgcaggatagcg

SEQ ID NO: 25528 - DNA, 414 bp, Glycine max
  unsure (1)..(414): unsure at all n locations
ntactttgtttaaggaagtaatcatctcttttaaaaattagaaaaaaattattaaagaattaatttgttgaaaaattaccaacacattgttatgttcattgttctgagttgattctagtaatatagaattcggttcatttaagcaaagttttgaatttaagttttgtaaatgaaaaaaaaaatataacattaagttgctatgagacttacctttttttataagattaagttagtacaagatttacttttttaggaattaatcatctcttaaaaaaagagaaaaatattaaaaaatttaattgttcaaaaattaccaacaagatgttagtcaaagtttcagattcaaagattcaagttttatggatgaaaaaaaaaaatataaaattaaattgttacgagacttaccttttttta

SEQ ID NO: 25529 - DNA, 409 bp, Glycine max
agcttatttaaaagttctgcttaaagacgtttttgattaattaattattttaaaacctagtgaaatactaactaaaaaaagaaacttataaaattttgtataagtaatgtacaaatccaaaaataattgataaacaaaatcatattgaattcaagtcgttaaagcatagagtatattaaaagaaaataaaaaaaacataatagtaaaaaatgtatggattagagatgatttgcaaaaaatgaattctattctatgtgaacagtgtgcatggacagtaataaaaattggaatactaaaatcctagaattattctcctttccgaaaaaaaattccctaaactaaaaccttggtgcttgtatataagtacttggccccaaagcttacaaatctattttaagtccaagcccat

SEQ ID NO: 25530 - DNA, 424 bp, Glycine max
tataatgtcttgaaaaagattgattatccatatgaggtcagcgttatttctaaattctaattctatcaaataagccaattatcattatttattattgaatttataattgacattcctctcatatgcatctgaaacaaaccttgatcctagacattcttactctcatttctttacttttgtgttacgcattggaattcatttttatccaagatttacattcactcaaaattttattggttaaatacgtgtgtcaagaggggacataaatagaatttatttcacttaagatttctcacttatttgacattgtaatcataatttttttccagcacatattgcacagcatgaaagatcccagtattgctgcattttggttgactacatttcctcagattatgggtggatttacctatgacgatgatgt

SEQ ID NO: 25531 - DNA, 214 bp, Glycine max
cgcttcatgttgatgaatcaagattgattcaagtagatgtgatgatcacaccgatgatgacatacagcccaagagaattcatgagaatggtttcgcgaacaagattcacgattcatgagatggttgatttccagactcacgagatgatgaactcacgggtcatgaatagaaatcaagatgactgcccagtggggtattgaaaagatcttttcaa

SEQ ID NO: 25532 - DNA, 431 bp, Glycine max
  unsure (1)..(431): unsure at all n locations
agaattatacaataacactttttgcccgaccatgaagtccttcttaattatcatgctatcatggaacttcttggtcttttctttgtagaactaggcattctcgtaggcttctaggcggatctcatctaactcactcagttgcaactttctttcctcaccagcttgatccatagagaagttgcaggtcttcactgcctagtatgctttgtgctcaatctccattggaagatgacatgcctttccaaagacaatccgataaggagacattcctatgggtgctntgtaggcagtcctatgtgcccaaagagcatcatcaagcctggtactccaatctttcctgcttcgctgcacaatcttctctaaaattctcttgatcatcctgttagagatatatgcctgtccattagattgggggtggtatggtgtggaan

SEQ ID NO: 25533 - DNA, 378 bp, Glycine max
  unsure (1)..(378): unsure at all n locations
catgcaagcttcaatcttattgcgtctcctgtcttttttntgagtcatgacgacttttcccaggataaaaggtcagatttttttgtgttcctgagccttccacgacgtatagttgtcaccgatagcaacatagaagacaacaaatagtgtccggcatttggaggacaggttagtgatgtattacatttctccttttgattactgggttctattggtacaaaagattgaatccttctgcgcacctcagtcttttttgtgttcctcgggcttatctgatcgtggctggctatagaccttcctttgcaacacaaaagctataattattattgagccttcttcctccgttttgtcgcatgatgaacctccacaggataaaaa

SEQ ID NO: 25534 - DNA, 422 bp, Glycine max
tcttatggaccttgaacaagcaatcaattcctctatcataaccatgctatgtgctcgcgactggtccctttcttcccttcgcaacttgagttcattattgctaccccatatagctccgtgaaatttgttccggccatactcttacttgcgagccctcttggtctcttgatcaagggctcttgcggtaattgcattctcttcccgtaacccggcgcactccttccgaacgtgtgtagcagccaacttgaacttctccttggcgagttttgcctttcctaactcgactttgagagcttggacttcctcgtcctcttccggtgcttcaaaattctcttcgctgacgactattaacttggcgagccaatctaaacctcgtatgcgaactttcagccattcgtggatgatgcaagctccattggagc

SEQ ID NO: 25535 - DNA, 356 bp, Glycine max
  unsure (1)..(356): unsure at all n locations
agcttgcttgtggagattctatggaggctggatctttgagcttcaatgaggtcctttaatggtgattttccaccatggagatacagcggaagacaaaggagaagaggtaagaggcggcgccatccactagggaataagccatggaagaaggagcttcatcaccaagatgagccttggataagaagcttggagaggatgcttcaatggaggaaaagaaagagggagagaaagagagaggggggagcacgaaattgaaggaagaaaaagggagagaagttgaactttgagttgtgtctcacaagactctcattcatcanagttacaacaagtgttacacatgcttctatttatagact

SEQ ID NO: 25536 - DNA, 368 bp, Glycine max
actaagcttatgctgaaatattacaatagacctcctcaacctcatcagcaaaatcaaccacagcagaacaattatgacctttccagcaacagataccaccctggatggaggaatcaccctaacctcagatggtccagccctcagcaacaatagcagcctgcttcttccttccaaaatgctgctggcccaagcagaccatacattcctccaccaatccaacaacagcaacaaccccagaaacagccaacaattgaggcccctccacaaccttccctcgaagaacttgtgaggcaaatgactatgcagaacatgcagtttcagcaagagaccagaagcctcattcagagcttaaccaatcagatgggaca

SEQ ID NO: 25537 - DNA, 324 bp, Glycine max
agctccatgtttgtgaatctagtgagtgtgatgatgacaaatagcctcatatgaatgacttcatgattgagtcagcatgttcacgatcaagagttaattcgcgattcgttagaagaaatcaagaatgttcatgattcaagaggaggtgctttcaagattcaagagaagttgagttcatgattcaacagaagaagtcatgatgacttcccacgggaagtattgactaggatctttcaagaaccaaacatagcacagttttgttatacggaagagttttctcaaccttttctaagatactagagcatctactgtctggtaatcgat

SEQ ID NO: 25538 - DNA, 413 bp, Glycine max
ttcattagattgaactgccttggatttattatttgtattcacagacttgtacaaatcaacttcaagctcacataaatcttcaacccaccagtcttttggcaccagtcgagttctgagtccattctggtttgactcaattccattttcctctggaagcttcttccggttataggtgtaggaccaatctactttggatacatcaacacatgccttatttgctatagattcaatgcaatggctgacaacctttatgtcctcaaccaagggtaacatatactttgaagtctgaagaaggatgattgaatccttccaactacggaaaatgctagagctaatgaaaacatcaatcttgtcaatgaggttccctttctcaatggcctcatgcattccaagatactctgctgcacatcgag

SEQ ID NO: 25539 - DNA, 441 bp, Glycine max
  unsure (1)..(441): unsure at all n locations
agctctgagcaaattgaaatgacaataactttatacacggatgttcggttgagtcccgtaatatatcgagacgctcaaaattgagatccgaagctctgagaaaattgaatcgacaataactttatacacggatgtccggttgagtcctgtaatatatcgagacgctccaaattgaaaacggaaactcttacgaaattcaaacgacaataactttttactcggatgcccgacagagtgtggtaatatatcgagggatgctccacattgataacgagcgctcggatgaaatacaaacgacaatatcttttcactcagatgtctgattgagtcccgttatatatcgagacgctcaaattttagatccgaagctctgagaanattgaatagacaataactttatacacggatgtcgggttgagtcctgatatatatcgagacact

SEQ ID NO: 25540 - DNA, 421 bp, Glycine max
ttgttttcaatttcgaccatctcgatatattaccggactcatccggacttccgtgtataaacttattgtcaattcaattttctccgagctttggatcaaaattttgagcgtattgatatattacgggactcattcagacatccgagtaaaaaattattgtcgttagaatttgatacgagcttccgttttcaatttggagcatctctcgctaaattgcgacagtctgtcgggcatccaagaaaaaatttattgtcgtttcatatttctaagagtttccgttttcaatttggagtgtctcgatatattacgggactcaaccggacatccgtgtataaagttattgtcatttcaaattgctcagagcttctagtctcaatattgagcgtctcaatatattacccgattcaatcggacatgcgag

SEQ ID NO: 25541 - DNA, 443 bp, Glycine max
agcttgtgcaatccactgggaaccatcctctgagcaagcatacaaatggaaaaatatgagtcccaaagtaccaaaatccctgcggatatatgaagctcatgttggaattagtggttctgagccaaaaatatcctcattcaatgatttcacagacaaggtttcccccctcatttctttgggttggaatttgtaactaatcaattatacatatcttccatgtctatatattgtaatgggctccattgaatttttacttttattatatgcacaatgcaggtgcttccttacattaaggaagctggatacaatgccatccagttgattggaattgttgaacacaaggattattttactgttggttacagagtaagttaaatgttgtaattcttaacttattttctcactgtaattatattgtgattgagattctttagaagttcttc

SEQ ID NO: 25542 - DNA, 428 bp, Glycine max
tgccataactcggttgtgcttattcttcaatgccatatgtagcaaagtccttgatcctgtcaagttagatgagctgaaaaacgaggcttccattatattgtattagttggagatgtatttttctcttgctttctttgacatcatggttcacttaattattcatctagtcagaaaaatcaaatgttgtggtcctatttatttgccatggatgtacccggataagcaatacgtgaagatcttaaaagggtatacaaagaatccacaccgtctggaagcatctattgtggaaaggtacattacagaagaagctattgaattttattcagagtacattgaaaagacaaaatctgttgggcttcccgagtctcaacatgacgaaagagtgggaggtaagggttcaagaggactgtatgttatcactccaagta

SEQ ID NO: 25543 - DNA, 365 bp, Glycine max
  unsure (1)..(365): unsure at all n locations
agctttgataaggctgttttcaccttctcactaagccaatctgctggcttagcgagtatccgctaagcgtaacactcttgggctaagcgcgaggatgaatccaaaataagatgagttgtacaggttcgctaaacgcaccgcttcatctctctaagcgcaccgcttcagttcatccgctaagcgagagaggcgcactaagccaaaaatcactaacgtgcgctaagcggtctatatgtgcgctaagcgcacgagcacaaacaaggccacctatttaagcctgaaaccagattttgtgaagagagtttggacagggattcagagctntgcatgtctagagtttctagagagagaaagggccaagttct

SEQ ID NO: 25544 - DNA, 404 bp, Glycine max
  unsure (1)..(404): unsure at all n locations
ngaggtaatctactcaaatgtgtatggaccatccaaattggatctcttggtgcaaatatgcattgtgtttccttcattgatgatttaactagaaaagtgtggatttatttgattaaatgaagagtgatgtgtttgatgtgttcaaaaagttcaaaaggttgatttagaaacaaaataacaaacagataaaagtgttaagaacaaacgaaggtggtgagtatgtattagatgtgtttcgaaacttctatgaggtagaagtgatagtgcatgaaataacattatcctatactccacaacacaaaggaactattgagagaaagtgtaacgacccgcctcgtcgctacgatatcacttactataaaatatgacatttcaatttagaagtaaaagcctcattaatttga

SEQ ID NO: 25545 - DNA, 433 bp, Glycine max
  unsure (1)..(433): unsure at all n locations
agcttggactcatgtattggaagttgaggtctaagtggatnggtccttttgttgatactaatgtttttccttatggtacagttgagatcaaaagcgactccacacacaagagcttcaaggtcaatggacaccgacttaagccattcctcacaaacccttctttagtggacgtagtggtggaagagacttccttactccaccctactcttcctccaccataacttagggagtttttcttttcctatctccttctttacttntattacatttgtccgattctatgtgatggtttaattgcttttaatcttttaattgtgctacattgaggacaatgtgttgtttaagtatggggcggagtgttctttggttttgggtttgctagttttggtagctttgctaattttgctagatttgctagacttgttgggtttct

SEQ ID NO: 25546 - DNA, 439 bp, Glycine max
  unsure (1)..(439): unsure at all n locations
ntacataaaggcgaaagatatgaaacattaatacttgtatgaacaacatcttgtcttgttccctttggtatgactgaaagtatttgtctgaaagtattttattatatcccttaacgttctatcaacaacttcaaaacaatgtatgagtcatagcagcttcaccccaaattatgagtttaggcattgagattaactcagctaaaggagtaccttgttttatgttggaagtagaatcttaattgacatttattggaatatgaaatctcgaatgggatgcttttccgcctagaatcaacaaagcatccattccatcagatgccacagttaaaacaatttctcctttagatctaaatgtggcaaagaaaagctcttcaaagaagacttatgtgtccctccataaccataaagaataaacaatattgcattatttaaattttca

SEQ ID NO: 25547 - DNA, 318 bp, Glycine max
agcttgagaatggagaattgcactaggcgatcactacgcatagctccaaactcgatagtggaggacacatgaacgagaacacaactcatgcggctccgaaaaaggggttgtcaatggagagtcacacttagcaatcactacgcttcgctacgaactcgcaggtggtggacacatgaacaatgccgcatttcatgctgctcccatatgattgagaatggtgaattgctctactcaatgactacgcatagctacgaacacgaacgtggaggacacgtgtacgacaacacgtttcgtgcggctccgaaaatatcgagaatg

SEQ ID NO: 25548 - DNA, 335 bp, Glycine max
ttaatgcacagcaacacagaatctacgtgtgcaacacccctccattcaatggctgttctaggtttgagaggcgaaatctataatgacgtgaatatgatgcaaactctcacctcacaccagtccataacgtcaatctaaacttgcccaaactggaattacacctaacattccaccaagtcaaaatatgactcttcaacacccaattatgccctagaaatggctcttggatcactttggtcatacatttttctctctagctcaggctaacctttctcacatgttctaaatgacatttcaagctaccattgactcactctaacctccatttaccacag

SEQ ID NO: 25549 - DNA, 424 bp, Glycine max
agcttgggaaagttttggcagtagatggatctagttcaacgtcagtcttttaacaaggtatatagaaagatcttggatctgtcaatgatagaagtgccacttgaggccatcgcagctctcgcctaatactatcaccaacggcttagatgtttcactttttgggaatttcagttggaaccgaccataaaggagtttgagggaatcttacgatgccaatgagagaaaggaagccatacatcttttctgggtactacccttttatggcgaaagtggcaagagtagtcaagatctcgaagcgagaatttgatcgagtgaagtaaagtaggaatggagtggtgggtataccgaggaagtgtttggaggagaaggtgaaagctctggcaaaccaaggagagtaggcaccattcgtggatgtgttaacatt

SEQ ID NO: 25550 - DNA, 435 bp, Glycine max
  unsure (1)..(435): unsure at all n locations
tatacgcatatttccctacgaacgttcacttgcacaagacatcctattaactaagaaaaatgcacccatatacaatcaaggtagcttcattacctagattatttacatgtacttccaaggtgtatttgttatttacatcacacacgcctccttggctgaatttacacacatgcctactcaaagcattttggggtaccaaaaaaaattgcacatgcgctcctcttggtatttctaatacctatacatatacaaacttcacgatgaatcttgactacctacacaataaggtgctacatttcatgcctttnttttcaagtttttgctacctaaagccgcatgcaaattcaagcatattttcctttgctgactaaaattgtattcaaattaaaaggtatatatttttggtaataatggttcttcacataacatgcaacg

SEQ ID NO: 25551 - DNA, 433 bp, Glycine max
  unsure (1)..(433): unsure at all n locations
agcttggagaggatgcttcaatggaggatattaaagagggagagaaagagagaggggggagcacgaaattgaaggaagaaaaagggagagaagttgaactttgagttgtgtctcacaagactctcattcatcaaagttacaacaagtgttacacatgtttctatttatagactaggtagcttccttgagaagcttttcttgagaaaacttccttgagaagcttctttgagaaaacttccttgagatgctagagcttagctacacacacccctctaataactattctcacctccttgagaagcttccttgaaaagattcctaaagaagctagagcttagctacacacacctctctaatagctaagctcacctccttgagatgagaagctagaacttagctacatgcnccctataacagctaagctcacccccat

SEQ ID NO: 25552 - DNA, 281 bp, Glycine max
  unsure (1)..(281): unsure at all n locations
ngtcaaagctctatatggatngaaacaagctccaagagcttggtatgaaaggctaagctcattcctagttcataatggattcactagaggaataatggacactacactattcataaaggccgaaaaaggaaaacttcttattgttcaaatctatatagatgacataatctttggtgcaacctcaaaaaggatgtgcaaggatttttctgagctaatgaaaggtgaatttgaaatgagtatgatgggtgagctaaatttattccaaaggctttaaattattt

SEQ ID NO: 25553 - DNA, 392 bp, Glycine max
  unsure (1)..(392): unsure at all n locations
agcttctaaatatgaaaatgaaattntggaaccataaatgagaagcttgcacgaatttggtaaggaaaagaagataaggaagattaagagccccttaccaaagcttttatggaagaaacctcaagagcacttgtatgaagcttgtaagaagaaagaaatagactcatctctcctttggttgagcttgtgcaaaatggagaagaaagagcntccaattgttttttaaagagacatgatgatgaggtttaaggcttaagttgacagcttaattgacaacatgaatgactaataaccagcccatggtaacgtgccagccatgcaatntagtgcatatgcctttgaattttaacaaaatgctaaagaggttaaacaaaaatgaaatttctgtttgt

SEQ ID NO: 25554 - DNA, 325 bp, Glycine max
  unsure (1)..(325): unsure at all n locations
ntcttaagaaaacttccttgagaagtttctttgagaaaacttccttgagaagctagagtttagctacacacacccatctaaaaactaagctcacctccttgagaagcttccttgagaagctagagcttatctacacacacccatctaaaaactaagctcacctccttgagaagctttcttgagaagctagagcttagcttcacacccctataatagctaagctcacccccatgacaaaaaaacatgaaaatacaaaaaaaaatcttcttccaagactactcaaaatgccctgaaatacaaggcttaaaccctatactactagaat

SEQ ID NO: 25555 - DNA, 541 bp, Glycine max
agcctttcgcgccaagactatgttgttgcaataacacggtaataattactacgccagcaccagagaggttgaacccatgaatttgaaggcattgccagacccgatgagccgcatacaagacctgcagcgtacaagctcacgagtcatgtttagtccacagcttttgctacggcacaagatacatggaaggaggtcgccaacagcaccacaactcaagtcatgccacctcaaaacggacctgggaacgtggcagtaataccgatcatcagccactcccttcagagaatgacgagaagccgtcacacagacattatcttcttggacatggcggggctacaagggggaacaaaaaatatcgaactcaaagaatgctacgacgatctccacctggagaccaagatactttgaagcaaatgactaggccgtctagaaacatatgagcacccttccaagacttgatgccaagcttcataagacaagcggagaaccatacctaacaacctctacgagtgaggatgaccatgtctcacataaattacag

SEQ ID NO: 25556 - DNA, 312 bp, Glycine max
tgcctgtccgatgcagctgtaatgatggcccgagttatgttggggaacggttacgaacccgggatgggtttatgcaaagacaacggtggcataactagcctgataaaccccaaaggaaatcgtgggaagtataggttaggctataagcccactcacgcagatataaagagaagcatcgcgggaaggaagagcggtagtcaaaactcgtggttgaaacaagaaggtgaaggaagcccaccctgccacataagtaggagctttataagcgctggtctggggaacgaaggtcaagtggtcgcgatatacgaagat

SEQ ID NO: 25557 - DNA, 405 bp, Glycine max
agcttctgaagttcaggtgtgagttcataaccttcttgtagaatctctatgagcctatgcaacttccaaccatgcttttatattaaaaatcattgtcaatgtctataacaatgattccctttctcacccacatctgtttcaaccttgactccaaggccttaaagccaatctttcttcccaaaagctttaaatcaatgtactcttccatggtctatgtaattcattacttcttcttctttgaatgaataaaggatgggcaatcatattatcccaacgtcctttcctctgctcaaatatttgtactctccatatctaattcctcttcttcatttgtgtcaaatcacactcctttgatgagtgaagactaaaatctgagttgtttccccccaaaaaagtgtccttata

SEQ ID NO: 25558 - DNA, 288 bp, Glycine max
tacaaggtgtctctatatataacactaatgaaacacaagtttttaccaaccaagcgatgtgggacttagacctccaaacctttaccattccagccgaggtgggattaaaaccccaaacttttacccctgttgtggtgggaaaggaaattaaggctgtgaatttaatccatggacacccgccttctcaaatttaaaactgggaataatttgtaataaaagacttgacccttactacaaatccattttcgaaacttatcttatatatcttctcacaaaaatttcattttt

SEQ ID NO: 25559 - DNA, 382 bp, Glycine max
agcttaagagaaaatatggaagtgagtagtggagttctctagggttaggggttcagattctggaggatcatgggcaatgagtttaaggaagttgatcaaggtcgtacctgaatcaaataaacattaaaaatgcagcatctatgaagtaatcctaggtcgtctcccgacgagcaatggtcaaccaaacgttcataacagatagtaataaaatagtaacgaattgggggggggggtgtttatttttataaattaaacaacaagctaatttgaattataaaataacagaattaaaacatgttgtttccccttgattcacaagcaagtctcttatcctaggttacgagaatttattcttaatcagttcaaccacttaattcaaccc

SEQ ID NO: 25560 - DNA, 380 bp, Glycine max
gagcttggcgatggagctgacccaataactgccctaacttctttagactagcgatccctaggctcttgaccttgacttgatagaacctctttttaagcgaaagaattttacttgatcccatgttttactaaagtgaaacaaaatctgtgcaaatcaaaactccgacatctatcatgggtggaatagatgaatgcatgaagaaatgcatatgatacagatgcaatttatgaatacgggagcccgggaaattgtctccttcttagatacaacgtcttggggtagcacagtgcccgacccatgtatttaagaaggtgacacggaccctccgctggtttgccaaagagaggggatcaagacagaacccgtgcatgatgcatatg

SEQ ID NO: 25561 - DNA, 399 bp, Glycine max
acactcatgaatactcaagcatctctgaggtaatcttgatttctaagccattctcctagttagttatagttcctctcggtgtctcttgtgtgttgggtactgcaatagggtgtttctacacttcctttgaaaaacccttgaaaatgagacattgtgaaagttatctatttataacattgatgttactttcgtgaccttcactgaaccccggtcacattggcgtgagcggaatttcaaaatgatgtctccttttagtagaatctgaaacaccccttagccctgtatgttttgatagggtatttgactccaaatgttgctattaaccatgtgtaaaaacactatattaaatttccttcaaattggcatatagaaccttgtgtttggactaacgagcgtgaa

SEQ ID NO: 25562 - DNA, 255 bp, Glycine max
agcttataatatatcaatacgctcgatattaaacaacggaaactctcgcgaaattcaaatagtcataactattcacacggatgtccggttcgggcgcttaatatgtcgagaggctcgaaattgaacaacggaagctcttgagaaattcaactggtataacttttcacacggatgtccgattcaggcgaatcacatattgagacgctcaaaaatgaacaacggaagctcctgagaaaatcaaaagggcataacttt

SEQ ID NO: 25563 - DNA, 245 bp, Glycine max
aactcaagcttgaatcggacctcagtgtgaaaagttgtgaccattttaatttctcgagagcttttgttcggcaatttcaggcgtgtatatatgtgagtcgcccgaatcggacatccgagttaaaagtgatgtgcatttaaatatgtcaagagctaccgtggctcaattgcgagcatctcgatatgcgatgcgtctgaattggagatccctgtaaaaagtattgaccatttgaattggtccagagc

SEQ ID NO: 25564 - DNA, 345 bp, Glycine max
agcttgcttcatgaaaggaaggattgatatgatatattaatattctcatgtaaacatgacccacaataaggttttaaacttcttgaccatcttgggcttgagatggatcttcctgtcattagtcaattttctatccataatatatttaattttttagttatatgatatcaatgtaagcctttgatctcattgattgaaactccaagctctgacaagtcacactttacaatgttgctttgtgatgtctgtggatggggaagcaagcaaggtgatgaaaggtgttcaatatgaagcctgtgattatctctttaagcctataaggatgaaagaactaataaacatatg

SEQ ID NO: 25565 - DNA, 377 bp, Glycine max
tgtatttaaaaatgttttaaaaatacttttaattaatatttgaatttttattactttattaatatatatgtgaggggtagagagtgtcacaattacacattaaattagattttattttattgttaaattcttttgtgagccaattgtatttgtgtgtaaaaggtataagctagaagtgatggtgtatcacaagaaacaaagttctaattttgtactctgggaccgtgagtgcatataacttatagggaaatctacacaagaattaaacgacatgatgtttgttgtatgtgtttatatgtttcacttactcctatctttctttttatttatattattatgactgggtccctaatatgataatcgttttgcttatgtct

SEQ ID NO: 25566 - DNA, 371 bp, Glycine max
agctttgcttccacaatctccccctttttgatgatgacaacttctgaaatcaagaaacacacacactttttcctagtcgatcactcttataaattctccccctttgtttttgaatttatgcttatcttaaaattaaattgattactcatgtgagttcttgatttatccctatttctctccccctttggcatcaacaaaaagccaaagtgcgtattaaacttaaagtatgcaaatatatcttaaacattcatacaacattcataaaaaatattaaccacatcatgaagtaaaaaccatgaagcaacaatcataaacagattaacttataaaatccacatagtcaaataacatacttgttcaaccaaaccatg

SEQ ID NO: 25567 - DNA, 400 bp, Glycine max
tgcttctacatcatttgagtgcatttggagagtcttgagagtagagacttctcttgagcacttagagaagtgtcaaatcatatttcatcatcattatggagtagagtaagtatgcaatatactactacttcctaatgcaatgtttctcccctttttggcacaaggccaaaaagtcacaactacaaaaacaaacaaatatatgatgtgaaatgggaaaatatcatagcatttcattcatagaataaccattacaagttaatcagtacaatcattataagaaaatataaccatgcaatcaaacatcacataacaacttatcagagacatagaaacaaaactaaatatgatcagaaaggacaatcaaacaactgaaacaagcacttaaaacacaactaagctt

SEQ ID NO: 25568 - DNA, 353 bp, Glycine max
acctgtttttctttgctaacttgtctttaatgaatgcatcaacatgagagagtgagctattgctaactccgacattactgataatcttgtcagttttgttatgcaagaatttcttaaatactacacatgcactttgtgccgtttctctattggaagaaataatagtgttaggcaaagtataatcgtgaatactagaataaaagcctatgctagtgtgagctttcatcccatcttcaatttccattaatgatgaaaatgaactaccaccaccaagagaagaaaccatttttatcaaaggttgcgcttctacaaatttaggtgttgttgtcccacgactgctgatatcattttct

SEQ ID NO: 25569 - DNA, 385 bp, Glycine max
  unsure (1)..(385): unsure at all n locations
tactcaagctnaggcaatcggtcggctgacttaaattaatcaaatgaaattgatggaaaatttgatttctaatgaatttcaatctataataaagaccatgtaacttttacttttgtttctgtatataatataataatgatggatgactatttgatgggttcttaaagcctgatgaagttgcagctttctatttgttttattgaatagttatacagaaataatccttcaatttctctgtctctctctttgaactcttctagtgtgtattagttatagctagatttaatcaatctgtcagcattgaagaattgtaatttcagactttgatctttgaactgaaaatcatctgcattgtttgtttgtttgttaaatgcacgtgttattg

SEQ ID NO: 25570 - DNA, 295 bp, Glycine max
taaacgtgatgcctaagagcactttggagaaaataccattcaatgcttcccacttaaagccaaattcaatggtgggtcgtgccttcaacggcacccgccgagaagttaggggaaagatcaatctcccagtacaaataggccctcacacctgtcaagtcaccttccaaataatggatattaaccccccctacagctgtctgttggggcgcccgtggatccactcagtggaagttgttccctctacactccaccaaaagttgaaattcgtagtggaggggcatttggtcatcgtgtc

SEQ ID NO: 25571 - DNA, 378 bp, Glycine max
ataccttgtgccactattgctactgctggttgtggttagttttggcactgtcaattgcacctcctttacctaacatctttctttgtgggtctctcttactcagtcactctcatctcattctctgtattatctttcttttcttttctttggctttcctcacagtctatagaattccttttgagtcatagatgcttctctcacagaggttgaaccactgaatagaatattttaattagcttgtatgtaatgtcttatgacttgttaatatgttattagaatttcttatgaatttttaatcaggcttaattgcttctctcatcatgacatatgaactttctaataagttttgttgtttattatgtatttgactatttggat

SEQ ID NO: 25572 - DNA, 303 bp, Glycine max
agcttggttcgaggtacttacccgttgaagatcgaagaacgatgaagaacgaatgaagaacgtcgaagaacggttgaaacctttgcgagattcctcacggaaaacgttacggaaacgtttcggaagcgcctcggcttagattttcttcacggaaacaatttttccaagcaaattcgaaagagagagaagtgccaaaggggctgaacccttttcttcttcacttcctcccctatttatagcaaaataagggaggtggttgccgctcagctcgcccaggcgagctcagctcgcccaggcgagcca

SEQ ID NO: 25573 - DNA, 394 bp, Glycine max
tcagaccaaagcaattcaaaatctatgtatctaaaacccctcaatttagtggattttcaaggtttgagaagtgaaaatgagaatggggtgattttggagcaaactctcatctcaaacaagtctataacattaatataaacttgctcaaactggttttacgacaaaaactccaccgaatcaaaatttgacccctcaacacccaatttaccctagaaatggctcttgctttcaccttagtcactcatttttctcctttgcttagcccaagctttcccacaaaaatgacattttaaactaggattaactcactttagactccaatttacactaaacctagatttagcttttcaaaccctcaaagcctcacacttttccactcatatcactaccattc

SEQ ID NO: 25574 - DNA, 358 bp, Glycine max
  unsure (1)..(358): unsure at all n locations
agcttgctctaaatttacattggtgtttgtatttatgggaggaggttatatgccatttttgctttaagagtaatgtcccactggtaaaactaactttccaaatgtttgccttcgcaggaatggccccgaggaagcttgcctcaaagaggtccaggaagggcaaggcggccgaaagaactagttccgccccggagtacgacagtcaccgctttaagagcattgtgcaccagcagcgcttctaagccatcaagggatggtcgtttctccgggagcgacgcgtccagctcatggacgacgagtatactgatttccaggaggaaatanggcgccggcggtgggcaccactggttactcccat

SEQ ID NO: 25575 - DNA, 392 bp, Glycine max
  unsure (1)..(392): unsure at all n locations
ttattcaagacaaagcaattaaagatattcaagatggatgatcaagacagtctatagagtcttagaaagggtatattaaataggaagggaattccaattgaagtagcaaaaggtttggccaagaattttaagttaaaaagtcttttacaagaaatttactctctggtaatcgattaccagaggatgtaatcgattaccagtagccaaaactgatttacaaacagctattaaaatttgaattcaaaatttggcctgtgtaatcgattaccatatatggtaattcaaattttaaagcttgtaatcgattacacatatactgtaatcgattaccagagcagattttcagaaaatattctcaactgtcacatctntttatgtggttcttgaatggc

SEQ ID NO: 25576 - DNA, 361 bp, Glycine max
agctttttgaaaaccattttgctactggtaatcaattaccagagtaaaaactttttggtaaaaggttttgagaaaaattcatgtgctactcagtttttgaaaaaactttttaatacttatcttgattgagtcttctcttgattcttgaatcttgagtcttgatcttgattcttggaacttgaatcttgaaacttgattcttgattcttgaaatcaaatttccttttgaaccttgaagtgtttttgattcaatcttgaactcattctttgattcttgagatcatcatctttgttatcatgatgtgttcttgacttttgagctttttgtcatcatctttgttatcatcgaaactctttgaatc

SEQ ID NO: 25577 - DNA, 381 bp, Glycine max
tgtctaagtattctttaaagcctaacattgacactgcgttgacacaagttttatatatattaaattgttctcaaatcattcgtttattaatcactagacaatagctcttgttactcgacgacaaaactaaaactctttatatatatatatatatatatatatatatatatatatatatatattatccttttcaattccaaaagtgtcataaatttatctaacacactactcaacctcctttgagtgtgatatactgcattttcattattgagagtggtttgtgttgtctataggggtagaggaaagggaaagaaggggaaatggtgtgggaattttttgccgaaacggcaatacatctctgtattggatgggggtggggat

SEQ ID NO: 25578 - DNA, 346 bp, Glycine max
agcttgccttatagaggtccaggaaggacaaggcggccgaaggaactagttccgctcctgagtatgacagtcaccgctttaagagcgccgtacaccagcagtgcttcgaggccatcaagggatggtcatttctccgggagcgacgcgttcagctcagggacgacgagtatacggatttccaggaggagataggtagccggcggtgggcatcactagttacccccatggccaagttcgatccagaaatagtcctctaattttatgccaatgcttggccaacagaggagggcgtgcgtgacatgacgtcctgcgtaaggggtcagtggatcccgtttgatgccgatgc

SEQ ID NO: 25579 - DNA, 377 bp, Glycine max
  unsure (1)..(377): unsure at all n locations
tctatggagactggatctttgagcttcactaaggtcctttaatggtgatcctcaaccatggaatagcagtggaagataaacgacaaatggggagaggacgcgccatacactanggaataatccttggaagatgaaggttcaccaccaatagagtgtcttggataacaatcttacagaggaagcttcaatggacgaagagaatgatacagagagagagagagagagagagatagaacgtggcgtgttaaaatgaagaaagaaaggtagagaatttgaacttagaagtgtgtcttacnagattctcattcatcaaagttgtgacaagtgttacacatgtttctatttatagcctagccaatgactaaatgaaattttat

SEQ ID NO: 25580 - DNA, 359 bp, Glycine max
agcttccacttattagtgcacaactccttcaagaatttagcatatcttggaatttgctttattgcatccagcagaggtatgtttacctctacttttctaaatgtttccaagatctccttctctgcctcttccatttttttgttggaaattgctcttggagggaatggaagaaggatatgctgcttctctttagattcacctgcatagaaattcttaggtaacttactctttaaatttttgtcatcatctttttctggagtagagagaaattgggcacgttcatttgtggatgaggaagatgttgctggttgaggtccttgacactgctttcccgacctcaatgtaatggcactcatatt

SEQ ID NO: 25581 - DNA, 378 bp, Glycine max
tcgagaattgcccaatctcctctccaaaatctgatttcaggcttaaataggtggcttggtttgtgctatcgcgcttagcgtgactatggactgctcaacgtgcgttagtggatttcggcttagcacgtgcttttctcgctcagtggatggactgaagcggtgtgcttaacgggatgacgtttcactcagcgccaatgcacagctcatccttcttccagattcttcctcgtgctcagccgaggagtgttgcgcccatcggttggctcgctaatccagttgattggcttagcgagaggatgaaaattagcgcttcacaaactctcctaattaacctgaaatagtgaggaaatgattattaatcacacaaaatggaaatac

SEQ ID NO: 25582 - DNA, 369 bp, Glycine max
agcttacaaggtgtctctatatataacactaatgagacacaagtttttacaaaccaagtgaggtgggactaagactacaaaactctaacaatccaagcaatgtgggactaagaccacaaaattctaacaattctctcacttggggtctaagttctaaattctagcaactccttgtaagcgatgagttcatcgactctttacctagtgtagcgccttcatcttcaattatccttgaaggccaaatgaggcaatgcaaagcctcagcttatcagttgtaacagctttagtcaacatatctactggattctctgatcctaagatcttcaacaaagataagtctccatcatttatcaactccctgataaaatg

SEQ ID NO: 25583 - DNA, 388 bp, Glycine max
  unsure (1)..(388): unsure at all n locations
ntatacaagggagcaaaagatacaagtatcattcattgttagctaagtggtcaaaagagcttgcgtctatacaattcatggccttcatcatgttctgattaattcaaagatttatgcaaagatcattattcacagttagtcatttactcacagagtaaggtcacactctcatcggtttttggttcatgcttttctttcacaaccagtctatgtagtgactaaccattatattataagttcacactcttgttctttctttgttcaacatgcacatttgctcaaattcatgaaaggaaacacacatctcatcttaagcatgcattcaatttaaaacaatgcataccaccattttcacaaaacaaataaactacttcactgccataccatc

SEQ ID NO: 25584 - DNA, 381 bp, Glycine max
agcttcttcttgtttctctccccatttgaaaccaatatttttcttgagcacttcattgagaggtgctgccaatgtgctaaaatccttcacaaatcgtctataaaaacttgctaagccatgaaaactcctcacctcggtcacagacttaggtgtatgccattcttgaatagccctaaccttctcctgatcaacttgcactccttttgaactcacaacaaaaccaagaaacacaacatggttagtacaaaagatgcatttttcaagattggcatacaattgttcttttctaagcgcagtcaagacagattttaaatgatcaatatgcaaatcaagtgaagtgctcttgataataatatcatctaacgtcaccacaacaaactt

SEQ ID NO: 25585 - DNA, 451 bp, Glycine max
  unsure (1)..(451): unsure at all n locations
ccttgagccaaatttaaaccgacaatagacgtttttacgtcgtgtatgtccgtatttgagtcccgnnaataacatcgaggacggctcgctcattgataaaacagaaagctctcgtgcaaaattcaacacgacaatataccttttgagctcaagatgtttcgcattggcgtttccgtaatatcatcttaggacgctccgctcattgaaagagggaaagcctcttatgtataataataacgaacattactcctttaaacttgattgttggataatggccccccgtagaatatttagacacctctgaaattgacaacacggaactttttggcaaatttagaaccaaaataaaatttttactctcgaagtttcggccttgataccgctatataattgagactctccggtattgaaaagcgaaacccttcggaaatacaaacgacaataatttttg

SEQ ID NO: 25586 - DNA, 349 bp, Glycine max
agcttaataaagtccttaggatccacattgtgtatatatgattgtctggaatgagatggagtgaaaaattgggaattgactactagttgtttggatgaattgactttttcctgaaacacttatgtgcttaagagaaacactggtttgtgaggaaaaaagcttagtcaatcttccttcatgcttgtcatgcttgctaactgattttatctctttagctcaattgcacatgcttctatcttgaaatgtgacaaatgctaatttgggggagatattgattgataatgtgcaattatcttaattactgtagttgatacattctgaacaggcccttaacctaacttagcatagt

SEQ ID NO: 25587 - DNA, 339 bp, Glycine max
  unsure (1)..(339): unsure at all n locations
tagacgaccttgtttgagtcgagatgactttattatttatttggacaagtttgaatatgatgtanaagaaattgaatgtgagccttttacccctttgaaaggcttctatttaaaaaatgttttaaaaatacttttaattaatatttgaattcttattcctttattagtatatatgtgatgggtagaggatgtcacaaacataatgccattaagtgcctcgacaacaatattaaaaagaataagtgataatggatctccttgcctaagtcctttctgaggtatgaactcagctgtaagactcccatttaccagaatcgagacagatgctgattttaagca

SEQ ID NO: 25588 - DNA, 359 bp, Glycine max
  unsure (1)..(359): unsure at all n locations
agcttgggaggattgatggggaccctgtgttgagataaacgaggatatgggctacgtgggagtacgtgagctcagttggaggtgggcaacaggggatggtgggtttatgcncncattgtggatgtggaaaacttgttgtgcaccatcgcccgaccgccacctagtaccacatgtgatgggtaccnnataatcctacaagcttgatatgaggaagtgttgaannntnaaacttcctgcttttattgttgaccacaaagtggtacctggaaatatgtcgcgggggtcaagagaccttggggacgtcaagtggggtgctattgcccaaaaccaagcttgaccaatcccgacccaacccgggc

SEQ ID NO: 25589 - DNA, 335 bp, Glycine max
tatagaaaactaaacaaatgttttcaacatcttgaatgagaagattatgatctcaagaaaattcatcaagctcatttagttgattttatcctggaaaccacttcactgggtgatgtacaagacacctttgtttgtatgaggtcaaggcattactagacgaaaaggtatccagtggacgataaattcttcttaaggattttcaagacttagaagaaaggttgaaatccttaaccatgactcttgaaaattcagaagtagaacacaatgaaccccacagacaaatctagtcatggtttcaaaggcaaaaaggttgcgcatggtgaaaaagttactat

SEQ ID NO: 25590 - DNA, 328 bp, Glycine max
ctgcagcttgagagatgatttgaccctgttttgagaaaaaccacgatattggctacctgggaatacatgaactaacattgaagggggcaacaagggaaggtgggtatatgcaccctttggggatgtggaaaacttgttgtgcaccattgcccgaccgccaactattaccacatgtgatgggtaccccataatcctacaagctagagatgaagaagtgtataacggtgaaacttcctgcttttattcgttgaccacaaagtggtacctggagatatgtttggggggtcatgaaaccttggggacgtcacgtggggtgctattgcccaaa

SEQ ID NO: 25591 - DNA, 379 bp, Glycine max
aaactccagcttcttcacatagtccgcctctgcttgttcgtttttattcttaaaaatagaaacattaggcatagccaaaagatcaagaggagttagtgggttaaaaccataaacaacttcaaaaggagaactattagtagtgctatgaacaactctattgtaagaaaactcaacatggggtaaacaagctttccaagtttttaagttcttcctcaaaactgtcctaagcaaagttcccaatgtcctattaacaacttttgtttgcccatcggattgtgggtgacaaatggttgaaaataacattttattgcccaacttgccccacaaagtccttcaaaaaaggcttatgaacttagagtcctatcactaacaatgatcc

SEQ ID NO: 25592 - DNA, 370 bp, Glycine max
agcttcacaaaagtttatatggcttgaaacaagcattgaggcagtggtacaagaagtttaatgagtttatgagcaactcatgattcaaaagatgtgacatagaccattgctgctatgttaagaaatatactaatagttatgttatccttgtcgtgtatgttgatgacatgttgattgcaggatctagtatggcagaaattaacaagttgaagcagcagttggcaaaaaactttgaaatgaaggatcttggtccagctaaacaaatccttggtatgagaattcttagaaacagatcaaaaggaatcttgaagctgtctcaggagaaatatatacacaaattgcttgacagggtttaccttggagattctaa

SEQ ID NO: 25593 - DNA, 379 bp, Glycine max
gcttttctgaaatctgctgaagaacgagagtatagaattttgcttttatttataaaaaaaagattttctctttcctttttctaaaagcaatgccacatatctcattttgagtggagcaaaaggggcccaccttttccccttgatgtgacttcatactcagccacaaggagagaaaaatttgacctttttaatgctaaaatcctgcctcggtttgcatgccgcttctctggttccagttcctcgcgtttctctgcacccatcggggcctgttttcaaaagtaggcaatatatatatcaaaacgctcagaatgagaccctgagcgtggttcagaggttggttttgttaaattttaagttgcacgcaaaatgataattttta

SEQ ID NO: 25594 - DNA, 357 bp, Glycine max
  unsure (1)..(357): unsure at all n locations
agcttgaaattgttcattaactgatttaacaaacaacatgagattcattccttcttctccactcatgattaaaattgttacaagaattgtgttagaacagatgataaatagacaaataaatatcctctcacaaacactttctcacgtgtttacactgtcataccctaatttcgtccggggacctttgcttgatgacatgcgacttttctttggtccttgtgaggtgcttggcacccatcattaggcaatttgtgaaatttcnggacttgccggagaaccaaaaaaatattgatgcacaatccgtatgttttcgtgacacaccggaaatcaaatggaggcattattacataattaagt

SEQ ID NO: 25595 - DNA, 392 bp, Glycine max
  unsure (1)..(392): unsure at all n locations
tgtagactggctagacatgatacatgttagggtttgttttggttcaaggataaaagggatgccccacattatttccatgacacaaatgcaaaaatgatgatttggaaattttatgcaaaactggtcatgcatgcacctatgtggacgctcaagtgtcaaatttttatggtcatgtgatgctagggctcangattcatttcctctattttaaatcaacccaatgtttccaaaatatgttcttttatcaatttgtgcattcatccgagtccatttcgggcgtccggggaaatttcacagcattcacccttcaggtgtagacacattttccaaaaattggttatgatcaatgaattttttttaaagaaaagttggaaatcatctctttttaaaaa

SEQ ID NO: 25596 - DNA, 287 bp, Glycine max
agcttgaaggtttatttctatgaattctaatataagcaacaattaccttgtatgatgtaaatatgagaaaatctaattaatttaatgatactattcttaaaacatccttcatttaattgcgattctatttttaatgactttttttttttcatgatatgaagattacataaaggaaagtttaggaaaataagattttttaattgagattattacaattaaattatgttaagtgactttcttaattagtacaaaattaattatttttacttatatttgaatctggaagg

SEQ ID NO: 25597 - DNA, 339 bp, Glycine max
  unsure (1)..(339): unsure at all n locations
ttgaataaaatcagaatgacctttgtttacttccaatcccatatgtgtccccaattcccataattgcttggcctcttccaacaaatgattattgcaaacaattttactttttaattttccttttgcttctaattgattgtgggttttactttgattttgaataacaggtgtgatggccatatttttgactctttctaccccttgagtttcttctgccacgggttcaagctggggggctttgtagtgagacactctttgtcttctgtagactttggaatatttttcaggcttttcattangggattgggctacataaatgtagccatccttattactctc

SEQ ID NO: 25598 - DNA, 372 bp, Glycine max
agcttgccccaacctttggaatgagctatagaaatagccaaaaagctccctctagttcagctgaaaagaaagaaagatacccacatataaaacatatcctcctaagaaagcaccagagtaatcatgaaataacctaccatagcgaagggaaccatgaaatggttttaccagccttgggttcatgaatattgatgttatacagcttgaagtaagataactggcccacaagcaaaatatgagcaaacataaggatcattgcttgctgctatgagacaaaaagattatgaaagcaggcttgattgtggcaattaaagatcgcccaaaccacaaagaaaaagccagaaagaacaacatctttagcttgcgggcgaa

SEQ ID NO: 25599 - DNA, 395 bp, Glycine max
ttgaagtggcttgacctttcaaataattattttcattgactgattcctcctacttttggaaatttattttatctcaaatatctagacttgtcttcaaacaagtttaaaggttcaattcctccaaaattgggtgctctaaggagcctcaaaacattgaacctttccaataacttgctggttggagagataccaaaggaacttcagggccttgagagtttacatgattttcaaatattcaacaatcacttgatggaagggtattggaccaatctaagagtttttgctgcttatgagaataatttcgatggaagggttccaagtaaacttggattcatttatgagcttaaaacacttaacctgcattcaaaccaccttgaaagccctataccgggaag

SEQ ID NO: 25600 - DNA, 329 bp, Glycine max
  unsure (1)..(329): unsure at all n locations
agcttcttccttatcataccgccggttaatcggtacacttatttacctgacaaacactcgtactgatataacctatgttggtcaacaactcatccaatatatggctcatcctacctcagctcactcccaagccgcctttcgtgtcttacgatacctcaaaagctctccatgtttcagaatatttcttgctgccaacggacctctacaactcaaagctttcaacgactcctactggncctgctgtcgggatacgacgcgttccatcacagggtacttcgaatatctcagaatcttccattatttcttgggcgtcgaaaaaacaacctact

SEQ ID NO: 25601 - DNA, 324 bp, Glycine max
  unsure (1)..(324): unsure at all n locations
tcatatcatacgccatttttaatttttataatngtttattaaaagagaaattttataaatcatattaataataaaaaaatatatctgacagtaatataaaatatatatagtgaaaagaataaaatctaactgtttcacccatctaaagagatttcatattaggattttttcggcgctaaagttttacttatatctcttctttattggtgttcaataataggattattaaatctaatacaataatttatttttgaaattacgttaataccctactagataataggccattaacatcgatgctagagaacattaacaataactttg

SEQ ID NO: 25602 - DNA, 246 bp, Glycine max
agcttcgagctcaaatcttgactcattataaaccttgacccagggtgagaatgtcaatccttaccctcagaagcaaaaaaagaagaagaggaaaatttccaatcaaaggaagaaggagaaggaaaattttcaatcaaagatgaagcataaaaaggaaagaaagaaaattttcaatcaaaggaaaaagagaggaaaggaaattcccaaacaaacagtgggagaaagcaaaaggaaaagaaagaaaat

SEQ ID NO: 25603 - DNA, 169 bp, Glycine max
aatgagaaggtgaaggtgtactccgttttctgtgacccaaggggcctgacatatgcctgggggtcaggacacccttgggacttcacgtggggttctcttggcctaaccgagcttgatccatccccaccccaccccggcattgatggtcattgtgaacccgttattgtcc

SEQ ID NO: 25604 - DNA, 376 bp, Glycine max
agcttgctcgtcttgctgatatttatcatgcagacttttctgatgatgaccgaggaacaattagggatcaacttgaaacttatgtgcttcaagtgagaagaaatgcttctttttccacttgtgaagatgttcaaagtttggctatgaagatggttcaaactgagaaacatttggtatttccattggtttataaacttattgagctagctttgatattgccggtgtcgacaacatccgttgaaagagctttttcagcaatgaagattatcaagtctaaattgcgcaataagatcaacgatgtgtggttcaatgacttgatggtatgttacaccgagcgggagatattcaagtcacttgatgatattgatattattcg

SEQ ID NO: 25605 - DNA, 361 bp, Glycine max
  unsure (1)..(361): unsure at all n locations
tgtgggtggaggacgcatgaacgaaaacacaattctggtgctcctaanaagggttgaggatggagaattgcactaagcaatcactacgcacggctccaagctccagggtggaggacgcatgaacgaaaaagcaattcatggggctccgaaaaagggttgaggatggagaattgcactaagcaatcactacaaacggctccaaactcgtgggtgaaggacgcatgaacgaaaacgccattcatggggctccgaaaaagggttgaggatggagaattgcactaagcaatcactacgcatggctccaaactcctgggtggaagacgcatgaacgaaaatgcaattcatggggctcccaaaaaag

SEQ ID NO: 25606 - DNA, 382 bp, Glycine max
agcttgtctcagcgtttatgcgagacatagaccaacatgttagctatcatcgccaagtacgaagaagagttaggtctagccacggcccacgagcatagaatcgcggatgagtatgctcaagtatatgcggaaaaagaggctagaggaagggtgatcgactctttacaccaagaggcaaccatgtggatggatcggtttgctcttaccttgaacgggagtcaagaacttccccgattgttagccaaggccaaggcgatggcagacacctacttcgcccccgaagagattcatgggcttctcggctattgtcagcatatgatagacttaatggcccacataattagaaatcgttaggaaacttgtatggtctcttagaccttga

SEQ ID NO: 25607 - DNA, 399 bp, Glycine max
cttgagccaaaatcccaacttaccataaaccttgactctggtgagaatatcaatccttgccctcggaagaaaacacaaaaagaaggaaaatccccaatcaaagaaagggagaaagcaaaaagggaaagaaaattcccaattaaaagagggagagaaagcaaaaaaaaaaagaagaagaaagaaaatccccgatccaagatcgaaagaaaatagaagaaatatacagaaaggtctttggaccatataatacctgaacaatacagaattgtcaccaagaaaacattgctaaccaaaatcctgtgcgtcggtgacttctggcttagcgtcagtcatgctcgctcagcctggaggttcaagcagtgcacataactaattgattcttgctaagcgcatcatgac

SEQ ID NO: 25608 - DNA, 357 bp, Glycine max
  unsure (1)..(357): unsure at all n locations
gctcaccatcgctaaaggagaagccttcaggttgtttcatataagccttttcctctaaatcaccattaacaaaggttttttttcacattcatttgatgaaactcaaggtcaaaatgagcaactaatgccaatataatacgaagagaatctttattagatataggagaaaaagtctttgggtaatcgatttcttcgttttgagtaaatcccttancagcgagtcttgccttgtatctttcaatgtttcctaatgaatcctttttggtcttaaagacccatttacagccaatggccttttccctattatacaactttacaaggtttcaaactccattactctgcatggaattcatctag

SEQ ID NO: 25609 - DNA, 389 bp, Glycine max
  unsure (1)..(389): unsure at all n locations
tgtgcaaatcaagtcactcccgcattttatctctagcatgcattgtatgttggtctcatcctttgtcacgggaagccggaaggtccatatcaccttcttaattgtacacatggggcactgcgcccccaaatgcgcaagtaagaagagataattttccgggctctcgtgtccgtaaaatgcattcatatcatgcatcgcataagcatctcttcataacatcataatggacatatcctgcatttgtccgttatcatattccagcctcacattttgcatgagtcatggcatcatcatgcatatgcgttcaacaaactttttgatctgcaaaattgcataccatttgttttcatgtttgctcatccctgcgttntcctctacaaaacaaaaac

SEQ ID NO: 25610 - DNA, 350 bp, Glycine max
  unsure (1)..(350): unsure at all n locations
agcttgcaaactgtacctccgaccgaacaccgtcgggtttctatcctggcccaagtttatcgtgggctgaagcactggttccgcttccctaactgcattggaggcggttgccgtggcattatcctctagagttttctggagttttagcatggcctccgtgatagaagccatttgatcttttaaggccgatagatcggccttcatctgctcttgcacgccctcttcattatccatttttctggattgagtgttataagggggcccttgtgcattcttaantatggtgaactccctaaagaaacatacaacggggagtatgccaccaaaacatgaatatgcaaatgaatgat

SEQ ID NO: 25611 - DNA, 397 bp, Glycine max
ttttctgaatttcttcaccagtaatcgattacacagttatattcttaatggtcatgacttttgaatttgaatttcaagtgttttgttgctgataatcaattacaaacatctggtaattgattacaggttcaaaaatcaaattgaaaacccttttcaacagctatttttcaaacttcccttctgataatcgattacacttactggtaatcgattactagagccttgcatgactttgaaacccttagttttgaggcaaggcttgatcttgaagaaatcttgaagcaaggctttgtttgttgaagcaatcttgtattaatcttgaagcaaatgtagcatcccttgtttgattcttctttggcatcattcaaattatttttacacacatttacatcagccc

SEQ ID NO: 25612 - DNA, 370 bp, Glycine max
agcttgagaaagataaagacagactgtttaactggtaagaataccttaacacatatacatatggcttgttatgaacgatcttcttatactttctttggatctggcgactagttgatctatctgagaaacagaataaagcatattaactattaaaatgaaaaggtgaaagaactaacaaaaggtcacaattctagattaactttggcgtgaagagtaaagtgttagttaagcaggtaaagactaagaatgttgaagctttgtctgttttctggttaaactatgccgactgcagttaatatatatatatagtaatgaggcggatacctggtagtttcgcatggtgcagtcacaaacattgtaaaacctttct

SEQ ID NO: 25613 - DNA, 396 bp, Glycine max
  unsure (1)..(396): unsure at all n locations
cactccagtaaactcacgcttgccggcaatgaccactccaacaacatgctctcctttttacgttatctcagaggattgttttagggattntctgctcaagaggtcttacttgtttggatttgaacggaatctggcgtcggagaggatggtgatggaatcatcaacgacgtcgatgtggcggtaccgaatagggagtagtatgttctggagcaagaggccttcgccattcggatcaatggagaagtcgagggtgttttcgttcaggtattatagagggatgaagtcaccgttcttcctgaggaggggtttttccccgttgtcggagtctagtgtgaggtatggcagcgaggggagctcgtcccagcggagcaagtcgatagcgagtccgatgtttct

SEQ ID NO: 25614 - DNA, 361 bp, Glycine max
tagcttgccaccacggagttttccgactattgtcttgtgtgggggaacaagctacaaaaggagagagcaagaaatgaatagcccatggttgatacatggacggagatgaaaaatatcatgaggaaacggtatgtgccggctagttactcaattgacttgaaatttaagctccaaaaactaacccaaggcaacaagggggttgaggagtatttcaaggaaatggatgtgctcatgattcaagcaaatattgaagaagatgaggaggtaactatggctcgatttcttaatggtttgactaatgatatccgtgatattgttgagctgcacgagtttgttgaaatggatgatttgcttacaaagc

SEQ ID NO: 25615 - DNA, 384 bp, Glycine max
  unsure (1)..(384): unsure at all n locations
tgggcaaattctacgacaataacattttactcggttgtccgactgagtcacgtaatatattgagtcgctcgaaatagaatacagaagctgtgagcaaattctaacgtcaataactnttttctcggatgtccgattgagtcacgtaatatatcgagacgctcgaaattcaatacagaagctatgagcaaattcaaacgacaataacttttaactcagatgtctgatcgagtctcgtaatatatacagacgctcgaaattgaatacaaaagctttgagcaaattcaaacgacgataacttttaactcaaatgtccgatcgagtcccgcaatataacgagatgctagacatagaatacagaagttgggagctaattctaaagacaat

SEQ ID NO: 25616 - DNA, 253 bp, Glycine max
ggggtatggctaccattgccttatcaagtagatataggtgcaagttaccatatgacaccggaattttagggtgaatcctacatgctttttgctacaaaattcctttttggttggtgttttggcacccgatgtgcggcgggcaggctttgtggttgatttaaggatggcctttgtggatgactacgtggtgggtaatgagaagggctgatattggctgaataatgacattgttggactgatgggaaatttgacc

SEQ ID NO: 25617 - DNA, 378 bp, Glycine max
tgaagggacaaccacatttccgactcttaatgtctcttctaacaaattctttcttcctatacttatactgaccactcctttcacaaccaattaacacaaatgaacttcgtcctctactaccagtatgtgtgtcagacctcataatgactaccacaaattcattttcatggacaactgatcgagctcactgcaaaacattatcttaggtaccaaagacttacaacacaacccagacaatttatgttttctacgacacaaacatttcatcaaatgactcaaaataaagaacattattacctgagaagtattaaaagcatccgaacaatcaacatgtggttcattcacaccacattcttgttcattttcataatccatatc

SEQ ID NO: 25618 - DNA, 166 bp, Glycine max
tgagcagaactattcgctaatttcatgcttgttatggctcctttcccatactattaccctgcaatgccttatgtgccaaatgctggaattcaaaccaccattgctcctttacctacttcttaactaaccataactatctgttattttagcaccttaaaacatatgg

SEQ ID NO: 25619 - DNA, 372 bp, Glycine max
atggaaagtgttgtttttcaccttctcactaagcctatctgttggcttagagagcgtccgctaagcgcaacgctcatgggctaagcgcaaggaagactctggaagaagatgagttgtacaggttcgctaagtgcaccgcttcatctcactaagtgcactgcttcagttcatccgctaagtgagaaaggcacgcgctaagccaaaattcactaatgtgcgctaagcggtcctggttgagtttagtcttacaagaggaatctactgacgatgcttgattaggattaggctcaactatcatgaggaatcggggtttagtatctcatgagacatcataagaacacatgaagccttgtagatagagaatatcttttt

SEQ ID NO: 25620 - DNA, 337 bp, Glycine max
atggaatgccccagagcaccatcgtgataggcgcaagttgcattaggattgtaccatcagggaaaaggagactgatagactttcctagggctcaccatagccatttggctgctgagcaaagatggtagtaggccggcataaggcatcggcatcagggtgaactctgagggctttattttcgggaaattcctcctcgggtttgcgtttgagttgggattggtgtttccaattggtcgaggtcgtacgagaaatgggtcttgtgggggaagactttgtggtagagtgcgaaatatttctttgaggggcgccgatatgtgaggaattctgattttggctt

SEQ ID NO: 25621 - DNA, 554 bp, Glycine max
  unsure (1)..(554): unsure at all n locations
agcacgccgttgagacgctgattacatggacctctagaaactcagctttgagccanananccaactcaccgagaagcacaggacgttctatgtgtttatgcnncacnacctcgcacctgcggaactattgtcgaaatataatacgaacaanagtaatagtcctctccgcatncataacgaatctggctatgatgacaaatcaatgagagagatcattcccgcatcacaagcattcgcggatgaatagcatagatagagagaagaaaatattgctccgatctaaacgatcgggtacgcaaatacacgaatgacaactattcgtatcatcggtctttatgtgaccatcagcgactgatctcgtaacacattgcaacaatccgtgctcacagtgtaacactgacaaacggaatggagaacacactgcacttgtgagctggtntcctcttcctgttgacctcccagccaagagagctgtgcgctagcgactttctcgccctgcactaaacagaaacagaaaaggagaagaccacaccctcagagctaattcctcaccc

SEQ ID NO: 25622 - DNA, 328 bp, Glycine max
agctagaacctatgaatatttttattttcactccaaatgatcaaaacttgtatgaataccttatgatcttattgaagggccaaaagccctaattatgatgatttaaccagaaaaaactaattcgtttactatagaaaggtgatttatagtaataattaattgaattcttttcataaaataacacaatgtaaactcattgtcatagagcttaatacaccggataaaattgagttcacagtttgcaattgaataacccctaagattgacatagtggtgtaagggttcgatacattcacgacatatggggagtgattgatttaaaaaaaaa

SEQ ID NO: 25623 - DNA, 362 bp, Glycine max
gtgtctcagcgcttatgtctataccgttatcaacatgttatctatcatcgccaggcaccaccaagagttgggtctagctcccgcccacgaacatagaattgctgacgagtctgctcaagtatacgcggcaaatgaagctttaagaagggtgatcgactctttacaccgagaggcaaccatgtggatggatcggattgatctctccttgaatgggagtccagaactttcccgcttgttacccattgcctaggcgatggcggacgcctactccgtccccgaagagattcacgggctacgtcggtatcggcagcatatgatagacttaatggtccacttaattagaaatcatttggaaacttgta

SEQ ID NO: 25624 - DNA, 374 bp, Glycine max
agcttaacaaaaggcatgcgaagtgggtggaattcctagagcaattcccttatgttatcaaacataaaaagggaaaaggtaatattgtagccgatgctctttctcggcgtcatgcattactttctatgcttgaaacaaaattgattggtcttgaatgtttgaaaagcatgtatgaaaatgatgaaacttttggagaaatttttaaaaattgtgaaaaattttcagaaaatggtttctttagacatgaaggctttcttttcaaagaaaacaaattgtgtgtgcctaaatgttctactagaaatttgcttgtttgtgaagcacatgaaggaggtttaatggggcattttggggtccaaaagactctataaacatta

SEQ ID NO: 25625 - DNA, 388 bp, Glycine max
tctgttttcaatttcgagcgtctcgatatattccattactcaatccggcatccgagtaaaaagttattgtccttttgaattgctaggagcttctgttttcaatttcgagcgtatcgatatattaggggactcaatcggacatccgagtaaaaaattattgtcgtttgaatttgatatgggcttccgttttcaatttcgagcgtgtcgatatattacaagacataatcggagtaccgagtaagaagttattgttgtttgcattaggtacgagcttccgttttcaattttgagtatctcgatatattacgggaatcaatcagacatccgagaaagaagttattgttgtttgcattttgttcgagcttccgttttcaatttcgagcgtctc

SEQ ID NO: 25626 - DNA, 378 bp, Glycine max
agcttcttatccaaggctcatcttggtggtgaagctccttcttccatggcttattccctagtggatggcgccgcctgttacctcttctcccttgtcttccactgcatctccatggtggaaaatcaccattaaaggacctcattgaagctcaaagatccagcctccatagaagctccacaagcaagcttccatcaagtggtaatcagagcacaagagcttcaagtaggtgctccttaaacctccattaatttttttttctttaccttctcttccattgttgtttcttcatttttctccatgtatctcctcacatgtcttgttctaaatgttgttaacatgattctttagagtttccaccgattaaacttgctatagaag

SEQ ID NO: 25627 - DNA, 397 bp, Glycine max
tcttgaagaagcctcttaatgaagcttcttgaggattctacatgaagctgcctcggtaaaaatgttgtccagcctttgtttactgttggatcttctcgaaatttggtctgcagcttcacaagacaattgtcaacgatctgaccgttgggatctttcagaagatgtctggagtgtgctcgaagcgtcagttcccgagagcatttcttatttaagcacttcagcctttgctttcgcgtagcttacaaaaaatgtcatttcttcttctttctttcttccaaagccatttctaaagtcccaagaactttctccatcacccacagccaccacaaaccatcgttgttctccattgaaaccccacaccgagaggaacccttcaatcgaagcagaatctttcaac

SEQ ID NO: 25628 - DNA, 374 bp, Glycine max
  unsure (1)..(374): unsure at all n locations
agcttctcaaggaggtgagcttagtttttagatgggtgtgtgtagctaaactctagcttctcaaggaagttttctcaaagaaacttctcaaggaagttttcttaagaaagcttctcaaggaagctacctagtctataaatagaagcatgtgtaacacttgttgtaactttgatgaatgaaagtcttatgagatacacttcaaagttccacttctttccctcttttattccttcaatttcgtgctccccccttctctctttcttttcctccattaaagcatcctcttcaagcttcttatccaaggcaattcttggtggngaagctccttcttccttggcttattccctagtggatggtgcctcccctctcctctt

SEQ ID NO: 25629 - DNA, 357 bp, Glycine max
gcttacaaggaaaatcatcttgatatgattgctttgatattaacctcaagctagcatgaccaaacttattatgacatacccagtgatgctttttgattgaaagtatgcatgataccttttgactggacagatcaccaagtttaatcttataaagatttccttgtctcttagcagagaagagtggtattgtatctactgtcacataattgacttatgctcaatagattatgtttcaatcctttaacaagcaaaacattatcaatagaagaatagggtggaataccctctgaaggaagagaagagcacaaaaggggggggggggttgaaattattatttaagtacctttactaaataaa

SEQ ID NO: 25630 - DNA, 362 bp, Glycine max
agcttaaaagcatcaatccaattcacaaaaccaataaaaatcaaattattagagttttctacgaatgatgttcagtgtaaaagttcactcaaatgcatttgagaaagttcaatcgaatcaatctcgctaaattgtttgagaccacaagttatgttggagaatcaccaaattaatctgtgattaaatttagaaattaggaaatgaatccataacctaatccattttcaatcctaagcataatcataatcatgaaaaatcgaaaataggattgaagagaaagatgaacattcacaaagattagagatactaaaccagaactcaaattcagccttgcttggagtggatccttggattgattaatt

SEQ ID NO: 25631 - DNA, 340 bp, Glycine max
tccttaagaagattcctaaagaagctagagcttagctacacatacctctctaatagctaagctctcctccttgagatgagaagctagaacttagctacacaccccctataatagctaagctcacccccatgacaaaaaacatgaaaataccaaaaaaagtccttactacaaagactactcaaaatgccttgaaatacaaggctaaaaccctatactactagaatggccaaaatacaaggcccaaacgaaggaaaaacctattctaatatttacaaagataagcgggcttatacttagcccatgggctcaaaatctaccctaaggctcatgagaaccctac

SEQ ID NO: 25632 - DNA, 189 bp, Glycine max
ccccacggagaaaagttcggggacgagagctattggatacccgttgagctgggggcgagagtatgaagttagggagccggttcgggggcgcgggcagccaagccaaaagcgcatgggaaacagtgaaaagtggaaggattcgggtggcatccatgatccatgcgagggctggatattttgactggaacg

SEQ ID NO: 25633 - DNA, 290 bp, Glycine max
aaaaaaacctggggggaccagttgttgagaacagtttgttgggggattagagagaccccccccaaacaaaaggaagagtttcaggagaagggagggccaagggaaacccgggcaaggcaaaaaaaaaagggcaaacaagacaacacaaaggcagggcaaaaaaaccgaagggcaaaagggaagcggaaaaaagaggaacgctcccctataaagaaaaagacgggggcgaaaaacacaaaaagaaaacaaaaacgaaggggggaaaaaggccaggagggggaaaagcaaag

SEQ ID NO: 25634 - DNA, 307 bp, Glycine max
agacggcatgcaacataattgtagatttttaaaacagaattcagatcaagacaaaataatgatgtgcctacacctgtgcgtgcttccacatgtacttgcataaattatttttaggataaaagcaaaaagaatttctaaatattcattttagctctctgtcaaaatttaatatatatatatatttatatatatatatatatatatatttaatttttacatttattcacaaatattcgaccttaagggttgactaagaactaaaactctattgctttataaataagtattggactaaaattatattaaa

SEQ ID NO: 25635 - DNA, 435 bp, Glycine max
  unsure (1)..(435): unsure at all n locations
nccagtatacgtcgattcatggacaccatagaaactcaagcatacgttgcaaagctctgcggaacgaggcatacctgtactccttttcngcacccagtaaaagggaagctcctcgatttgctggacctattgtctataacctctaacgcgggtatttatattggtaaaaaatctgcacaccagtgaaaaattatagtcatttgaatagagctctgcatctgaataaagattaagcgtggtactaactcacatagacattnatcgtagtaccgcgcaaaaaggacctggcggtcgccttatgttctagccaacaatttcaaattttgagattctcgatttattacgggaatcaatcagacatccgagaaagagatattgtcgtttcattcttttccaactacaacctctaatattaaggacccaccttattttgcg

SEQ ID NO: 25636 - DNA, 285 bp, Glycine max
agcttcaccaccaaaagagtgccttgtttaataagcttacagaggaagcttcaatgaaggaaaagaatgagaaagatagagtgatgcaatcctaccccctcatggcgttggaaaaataccttcttggggacttgtcggagctcatagaaccagcccttctgtaatcttcacccttcaggtttcattcaggggcaatcacagcgcatgagctctaactagttgtttcttatacctccattaatgcctcttcttttccgtctcttccattggtggttcttcattttg

SEQ ID NO: 25637 - DNA, 368 bp, Glycine max
tctaccccctgatatttttttgtcatttctccattctctcttcatgaacttttcacactgcaacagtgtgctccactagagagacactgaatttgggtccaacaccgcattaaaagtcatcgttgtgactcactgatgcaatcctacccccccaagggcattggatagaagactccaaaaatattggaccagagatgcaagagaaggccctaaggttctcatgagccttagggtagattttgggcccatgggctaagtatgagcccacttgtctttgtacatattagattaggatttcattatttttgggccttgtatataaggcttcataatgtatgtagggtacccctaaaatgaaagatttttct

SEQ ID NO: 25638 - DNA, 353 bp, Glycine max
agcttgtctcagcgtttatgcgagactgagaccaacatgctagctatcatcgccaagtaccaagaagagttaggtctagccacggcccacgagcatagaatcgcggatgagtatgcccaagtatacgcggaaaaagaggctagaggaagggtgatcgactctttacaccaagaggcaaccatgtggatggatcggtttgcccttaccttgaacgggagtcaagaactttcccgattgttagccaaggccaaggcgatggcagacacctactccgcccccgaagagattcatgggcttctcggctattgtcagcatatgatagacttaatggcccacataattagaaatcgtta

SEQ ID NO: 25639 - DNA, 242 bp, Glycine max
tggatggattcggtctgacgagggatcaaggtttattaatttaggctacagcctttatcactaaaacatgagtgatcagagaaatatatttatatgcactcacttgtttgagacagacacccaaccttagtgcctactgctgacacttttacttactttgcattggatagatacatcttgctcatttagtctaataactgtgtgaacttataagtcacacatgtcatctcctcactgcttta

SEQ ID NO: 25640 - DNA, 332 bp, Glycine max
agcttgtaattcgtgttaagggaggtgtataataatacgcagataaccactttctctctttttctctctttctctctctctctctctctctctctctctgggggaggacccttgggcctcgaataccaagcatagcagtttcctacctagtaggaagttttcgtgcatttctttcgtgtttctcttgcctgtatcaacacgaaaattgaggacgtataagataaggagttagtttttgcaaatgatgttgttactaagatgtgcttgaattatcctttgtgtctagtgagaagggttctcacaaataaaacaatttgagtccatatcatgaa

SEQ ID NO: 25641 - DNA, 281 bp, Glycine max
tcagttcactgcttcatgtagtgcacaatatgctttcagagaaaacactctgccaaaaaagttactatcaagcgaaaaagatattatgtctgatgggtatggggaatcataagattcatgtttgccctaatgattgtatattgtacagacatgagtttgaagagatgaacaaatgccctcggtgtggggtatcacgctacaaaatgaaagatggagatgagtgtagtattgaccaaaactcaaagaaagttcccccagcataggtgatgtggtatcttctg

SEQ ID NO: 25642 - DNA, 365 bp, Glycine max
agcttgccatcccaagatacccttttgtattcttaaatatgaacgttgttaatgtcaattttaaattgaactaaagtaatctttgtcttacccgggggggctctgtattggagaagggatttattttcattttgggctgtatcttttcatcattctggccgcaaaatggcttttctaatttcattgcatttaagtttcttgatgttttaagatggttctcttttatatatgccttatcattacttaaatagtggttgctagggcattttattaatcctattttggtttctcttttgtaattaaatatcttctggcacaaaaaagaagagctttgtgtcttaattatcaaccaccagggatgaatt

SEQ ID NO: 25643 - DNA, 382 bp, Glycine max
ttcagtataattcagataatatagaattctctattttgtatcagtttgcaggtgcagcacagtctcttggtgctggtgctatcttggttaacccatggaacatcacagaggttgctgcttctatcggttatgcgtaggaaatgccaccttatgaaagagaaaaaccacatcagtttaatttcaaacatgttgaaactcacacgtcacaggaatgggcagcaacttttgtgaagttttaatcctataacatagcttgcattctgcttctcttagatcaatgttcttccgcactttatttttcttgtgatatagaacatggcgccttacatgagcatattatatcgaccactaaagctagtttgaaatagagtcaatgggaaaa

SEQ ID NO: 25644 - DNA, 360 bp, Glycine max
agcttaacaaaatagaatatttatgcttttctggaaacaacctactgggccaattgccatcatcattgtttgggctaactcagcttagtgatttagattgttcatacaataaattagttggcccaatgccagacaaaattagtggactttctaatttatgttctctggatttgtcaactaactccatgaatggaacaattccccattggtgcttttctttgtcatcgttgatacaattatctcttcatgggaatcagcttacagggtcaattggtgaattctcttctttttccttgcattattgagatctctcttataacaagctacaaggtaatatccccaactcaatgtttcatctac

SEQ ID NO: 25645 - DNA, 243 bp, Glycine max
tgtgttatctgtttaattacccctctaatatatggtccaagattctttatagatcagttgtgttcattaaaaacacagggtacggtggtaactaacctacttctacgtagtggtgaatttaactggtaggatgagtaatgggtgattcatgagaaactaacctaatgctatcataatcatatctatgtacatatatataagcgtcaatgatcatctgaaatatatgtatggtgtcttgcatat

SEQ ID NO: 25646 - DNA, 360 bp, Glycine max
agcttatcgggttttctaattttcgaattgggctaagcgagcctgtcccgctaagcgaatgaatttaaatcctgaaaaatttaaacatcactgagtgctagctaagcaagtcactcacgctaagcgagtcagtcgaaactgccaaaaataaaacataactccctttggtagttacttttgcacaatcatataacctccttcctctcacttcttgcaatcattggcaattcctgcactgtactcatacttcctttctgcatcttgccttcattttcctcactaatctctgcaatccaagtaagtacttcagttccttgtcattttgaatttaaattttgaaccctaaggtagaagacattt

SEQ ID NO: 25647 - DNA, 213 bp, Glycine max
ttagtaaagagagagaacttccaattaatcagagcttcatatgcttttcggatgaaaaacaatgtgtgtaccggtgaatgggagtatgctgatgaaatcttctcataaccacaaatgagatattggatgttagcatttcgtttctataatgaccacttagaggaaacattgggtctcacctaaatacaagaaaatcacttcaagtgtattaat

SEQ ID NO: 25648 - DNA, 370 bp, Glycine max
  unsure (1)..(370): unsure at all n locations
agcttggtggaattcaaggagaaccatggaaggttcgggctatgatagaagcctacccacgctgatgtgaggaggagtgccctataaagaaagggtaggagcatgggccagcggcaaggatcgtaagtaaaaagaactcccgtatgtgacctcaacgagagttttgtaagtgcgggctggatgtgtgaagggaggatcaccatgatccgcgatgaagttccccaagagaaatcaaactggttgtggtcctgccctcttgagttcaagttgggaaattagcaaattatcgaacaactcggagttttcgtggcaaacataatgtaatttgttagtcttaaccctatagctaggcctangatttaagtttttt

SEQ ID NO: 25649 - DNA, 370 bp, Glycine max
  unsure (1)..(370): unsure at all n locations
ntgatttacacagagggtttcagggacaaagctntgatttacatattgaatttcatccaaatttttgacaagtcattgttacttccatgaatattgatattgtatcatgcttaattatatgcatttgcttattctgatcattgtgtgttgtgtgattatttcttccatgtaggtacatgattcctatttgttgtgagagtgaaatgatgggcagcagcaccaactgaggtgagtttatatttccttttttttgtctttatctttgttagtttgatatatattttttattttatatgtttgagttttaaatgtgtcaaaaataaaaatagaaaggtctgctgattgcttaagaattccttgctgtttcatg

SEQ ID NO: 25650 - DNA, 370 bp, Glycine max
agcttgcacctaatgagaaccgctgaacttaagtctatcctaggtcggcctattaatttcagcccaaaatgaaggatgacgaatggataagtgagctttcctaagttgtagagtgataaaatataatgcaaaaggctaataaaagttggaccagataataaggattagatttatatgacttacaagaaccttgctaatgtacgatcaataaatatctccataatgacattctgagtcctaagacatatcatgtaatgtcctacaaaaagacctaagcatgcacctaatgaaaattgttgaacttaagtctatcctaagttgacctaataatttcggcccaaaatgaaggatgatgaatgtataaatgaac

SEQ ID NO: 25651 - DNA, 396 bp, Glycine max
tggaactagagagaatgagaaaggaaagagaaaaatataaaagttgttgacattaataattaaataatataatatatcctattataatgaaatttataacctaataactcaaattaatcataagtatttctcaaaaaaaagcatggaataagtatttccataaaaaaattatggaaatcaaatttgaacctgaattctcattaaacctgaaaagagacatgtggtttagaagaaaacaaaaacatacacacacacattttacttgtatgggttagaagactttactccgtacaaaggatggatccgctgttcaagtttcataaaagatgtaattgatttgtactgattctacaaaacaccttggaggacaagtttctccgagtatgattaacatat

SEQ ID NO: 25652 - DNA, 367 bp, Glycine max
agctttagtgactgtgtgaaaccacagtattttacatagattgtcctcattgatatgttctacagttgattttgcatgaatttctaattctcataacatatgattcatcgatatgatttaggcattctttctttctttacattttaagccattagccaaaaagctatcccgatttagcactttgtttcctgttagtttcagcttgtctttacatcttttctgactttggaaccacctttgcattttttacgcttcctttgtaaaacccgaaatgctctaagctctttcacgtagtgacgtgggtgtttgacccaaagcattgttgttagctttgtttctgaaaatccatattaagtctccttcattt

SEQ ID NO: 25653 - DNA, 300 bp, Glycine max
acactctacaatactcaaccttcaacctagaggagatcgaccattccaagcgttggacaaaatcgatggctatgcctacaagaatgacttgcctagtgagtataatgtaagtgccactttcaatgtgtctgatctatctctttttgatgcagattgaggagccttatgttttatggcaaatgctttttacgaaggggggattgatcatgacactactgatggcgaggaccatgaatcacttgaagggcccatgaccagaggcagacttaaacatgcccaacacaggtattaggacacaac

SEQ ID NO: 25654 - DNA, 339 bp, Glycine max
agctttactttaaggtatggtttctcactttctctcaaaatcaagagttgtagaagtaggcacaactgtatgctgagctgcacttgttggagagcattggtttcttgcttttctagattctccaacttgaaatagacgaaagcacctgaaagttccatctttgaagtcattaatattgaaggtaaagtaaagagtagtaagctcaattttgcacacaaattctactataaaaaatcattaaccatttcctccttcacttttccatgcatagtttataaatcatgaaataaattctgccaacgtgttttatatgctcaaacttgattgatttgtccagct

SEQ ID NO: 25655 - DNA, 341 bp, Glycine max
ttcatagataagtaccataatgtttaatcgttcaagctttcaaatttaaagtaccaaagtacacaacataaactagtacctactgaatataaattagtcatatccaactacacatcctaataacaaaataaaacaagaaatgggtcttcacttttcttcatttttatactgaatgtttatcagcagccttccttctagtgaactttggtgttggcatgaaaagtgatgcaagctccattggagcttgtaggcctatgatcttcatcatcaatggattcctttgcttcttggaagatgaatggcagcagaatagaaaaggaagagagagaagagacgccact

SEQ ID NO: 25656 - DNA, 377 bp, Glycine max
agctttttggttttaaataaaagggttttctctttttctattattttatttaagcaatgccacatgtctccatttgagtggagcaaaaagggcccactttccctttttgactgtgacccatactcagtcacaaaagtgaggaaaatctgacctttgaaacgctaaaatcctgcctcggtttgcgtgctgtttctctggttccagttcctcgtgtttctctgcgtctgtcagggccagttttcgaaagtacgcaatatatatatatcaaaacgctcagaataaaaccccgagcgtggttcagaggttggtttcgttaaattctaagtcgcacgcaaaacgatgatttttaaactaattaattaggaattaacccataa

SEQ ID NO: 25657 - DNA, 386 bp, Glycine max
tgtctcagcgtttatgcgagacggagaccaatatgctagctatcatcgccaagtaccaagaagagttaggtctagccgcggcccacgagcataggattgcggacgaatatgcccaagtatacgcggaaaaagaggctagaggaagggtgatcgactctttacacccagaggcaaccatgtggatggatcggtttgctcttaccttgaacgggagtcaagaacttccccgattgttagccaaggccaaggcgatggcagacacctactccgcccccgaagagattcatgggcttctcggctattgtcagcatatgatagacttaatggcccacataattagaaatcgttaggaaacttgtatggtctctcagaccttgactagatac

SEQ ID NO: 25658 - DNA, 371 bp, Glycine max
agcttccaaaaaacacatatctctttcaaatcttttcttaccattgcccattgtttttctttgcaaaaactcttgccaaaaagatttctaaactttggtttcaaaactttgtttttctgcaagtgaaaattctacagaaaacaaaagtgtgctattttttcttccttctctctctttccaaaagaattcaaaggactaactgcctgagaattcttttgattcttcctcctccctcttaacaaaagatttcaaaggactaactgcctgagatatcttttgtttccccttacaaagattcaagggattaaccgcctaagaattctttgtcttaacacattggagcgtacatcctttgtggtacaagtagagct

SEQ ID NO: 25659 - DNA, 394 bp, Glycine max
taaaggagaagttggttttctgaactctaaactggataacatgacaaaatcaataaagatgctgaataaaggctcagatacgcttgatgaggtgctgcagcttggaaagaatgttggaaaccagagaggacttggattcaatcctaagtctgctggcagaacaaccatgacagaatttgttcctgccaaaaacagcactagagccacgatgtcacaacatcggtctcgacatcatggaacgcagcagaaaaggagcaaaagaaagaagtggaggtgtcactactgtggcaagtatggtcacataaagcccttttgctatcatctacatggccatccacatcatggaactcaaagtagcaacagcagaaagaagatgatgtgggttccaaaacac

SEQ ID NO: 25660 - DNA, 371 bp, Glycine max
agcttcctcgtggcttctttgagaagctttctcaagaggcttctttgagaagctagatccttatctatccacacccctctattaactaaattaacttccttaaaaataattacggatgaaaataacgcaacaaataatcaaacattaaacataattactaataatatatagatatatatatcagggtgttacaactctcctacccttttagaaatttcgtcctcgaaatttaccttactcaaacaaggatgggtgagcttctcgcatctgactttctaattcccacatggcatcttctcttgatgcacctccccagatcaccttgaccaacggaatctctttccctcttaggtggtttgttcgcctatcct

SEQ ID NO: 25661 - DNA, 388 bp, Glycine max
tgaagtgaaaaagtgtggaagagtcagtcttcctacttttattcgttgaccacagggtggtacctggagatatgttgcgggggtcaggagaccttggggacgtcaggtggggtgctattgccaaaaaccaagcttgatcaatcccgacccaacccgggcatagtccgtcagtgagaacctgtgacgtacctaaagaggcgagctcttggcagtcaaccgataaaaaaacaaagaccccaaagcaaggaggcttgtgtggtggctggccagctatggatcttgagtaatatttggaatatgacctctggcaatcgattaccaagggtgtgtaatcgattacaaggcttataaattctcgaatcgatcaaacagttaatgaaccgaaacg

SEQ ID NO: 25662 - DNA, 340 bp, Glycine max
  unsure (1)..(340): unsure at all n locations
agcttcttccggaagaatttcattgtcttccggaagaagcttcttccggaagttagattttttttttaatacgtatgtaatgaccattttgcccttgtgtaaatttctttaaattaacgtttttacgctgcgttttactgcgctttctttgcttctacttccgtatgctttgtttcttctttccgtatgctttgattcttcttccgcacgctttggttggataattcanatgctgttggttaggcggtggtcccttcacagactggtggtggtcccatgaagtgaagcatttgaagatttggtgcgccccgtgttcgtatttgaaattttataaaggctg

SEQ ID NO: 25663 - DNA, 281 bp, Glycine max
ttacataatacttaatttgtgataggaaccaagtgttgcaaagcctacaaccattgacttgtactatgtgcataatgaaagagcctcctcctatgagtctgaactgtcatgttttgacacaaattgaagagatattatgtttcagggcataatcttattaagaatgatggatagattatgacacttatactggcatggaccttgtttctctaaaaaggcccatgacccatagccgactattagttgatcaactctttctatgagagatatcattgggcata

SEQ ID NO: 25664 - DNA, 332 bp, Glycine max
agctttctcggggccatttcctgcgaatgaaaacatttggaaagttagttttaccaagaaatgctactcttaaaaccaaaatggcgtacaacctcctccaataaacacaaacatcaatgtaaatttagagcaaactcatgcacatacttccttacgagcattcactcgcacaagatattcttctaactaagaaaaatgcacccatgcacaatcaaggcaccttcgttacctagattatttatatgtacttccaaggtgtatttgctacctacatcacatgcacttccttggctaaatttacatacatgcatactcaaagcatcttggctacc

SEQ ID NO: 25665 - DNA, 387 bp, Glycine max
tcaagaattatggcctcatcaaactacttgtttccctagggaaattctataaatagacctcccatctttaatggagtgggttaccactactggaaaacccgcatgcaaatctttatagaggcaatagatttaaatatttgggaagccatagaacaaggaccttatgttccctctataatagccggaagtgcaacaatagaaaaacctagagcagattggactgaggaagaaagaagattagtacaatataatttaaaggccaaaaatattattacatctgccttaggaatagatgaatactttagggtttcaaattgtaaaagtgctaaggatatgtgggatacactacaagtaacacatgaaggcacaacagatgttaaaagatct

SEQ ID NO: 25666 - DNA, 365 bp, Glycine max
agctttgggatgacagtccataccttctgaaacagttacctggaattgggatggttacagcaaaggtaacatttattgattcgttgatgttattaacacataattgttactaatacatatgctctagcaatcagttgcctaatattctaattttgaagttctttccaggcactgcattcaatgggagttagatcgtttgaggaacttgctgatgctgatccgaggagaatagagctagtgactggtcgaaaatacccatttggtaaccatattaaagattctctactgtctctacctccaaaagttgatgtgacgcttgcagagattgaaagccatatacaaggaaattccaagctagtagtaac

SEQ ID NO: 25667 - DNA, 369 bp, Glycine max
tgggggtaaatcttgatgtgtcatagctaaaagtgtctcatgacaaaatacttgtaactttgagaagttagtggaatttggtggtttgtcaagaactagacatagtctcgtagcagagacgaaccaacataatttgatgtgtctgatacatgcttatttctcttttgttttaaactaacctagggtttgaatttgtatttttttagaaacccttttattttataaaatctgattttatcgtctgaatgtgtttttgtgaaaaatctgttattggtcttacaaaaaatttcttcagactataactttgttcttgtgtaaactgactttaaaattttctaaaatcacaattcaactccctttctgtgatat

SEQ ID NO: 25668 - DNA, 347 bp, Glycine max
agcttagataaatatgtgtgcagagatgagtaacaaagaataatgccaaagaggatgaaataatgactactcatcactgaaaagaaataaaatgcatctttaaaaggtctaggcacttaaagattcaagccagaggagtcataaacaaatacgactatgaaataatctctcttaacatcttctcgttgacataccaagttcttcaaagttcatccactgagtgattcttaaagtgaacaccttttatcttctgtaacccattgtaagcactgtgagtgctagatttgtgtgaaagtcgttagcctaaagaggctttcaaatagcaatcaatactggtgtaataaccc

SEQ ID NO: 25669 - DNA, 372 bp, Glycine max
  unsure (1)..(372): unsure at all n locations
tgttggttataacaaactttaaccaactaactactaactaataaaattaactaccatatgaattaactaatttcaacacttcctcttaattcatattggtacaagacattactcctagcctatctctcatttccttaaatntgatacacttcaaaggctntgtcaacatgtttgctagttgatcttaagatctacaaaactcaagctcaaacttctccttattcacatgatctctcaaaaagtgaaacttggtctcaatatgtttacttctcccatgtgtcactgggtgttgtgccaagtcaatagttaacctattattaattaacaatctcattggcttgaccatctttcaaataagttctttcatcacag

SEQ ID NO: 25670 - DNA, 333 bp, Glycine max
agctttgattttttatttttattttttattagggtaaatctttgagttttttttgggtaatatgcactctccagtatgttatatggaaatctaaagtcggtctaagagtaaaattattgtagttcaaattattcaatttttgttattgttttcaaatatttttttttgatattgctttttgattaaataaaaaattatttttggccattgacacttttttacttttttaatagctatatatcagcaaattttttgttcgctcgatcactgataatcttttccatctattattagttacgttctttgaaaaaaattattgctaaataaaaaaaa

SEQ ID NO: 25671 - DNA, 440 bp, Glycine max
  unsure (1)..(440): unsure at all n locations
ttgaacctgaancctgttgatacgtcaacattcacngacaccattaaactaaaactggtcaaaaagccctattcctacccttttagcaaattcctcaatcaccaacccactccatttatgccccggcttaggcccctgtagcctacccggactatttttaccccgggctctatgcctgaaggatctagggtctttaaatttgaagtctttttcttacctctataacagcagaagcggcggatgatgatttaaagttggaaagtggctctaaggaatagttaacaccaccgctggttaagctaggggacccacgacaaattacgtgagccttataaagacactccttaaatgggggatcgaaatgtggaagaaatcaagaacctgtgaattactaacaaaaattccttaaagcgtgacatatgttatataatgagtataag

SEQ ID NO: 25672 - DNA, 378 bp, Glycine max
agctttaaagaaacatcagaaccatatttaatttatataaaaggacctaaatagtcaaacaccatcacacgttccaaacacactttgcaatagtaatatgtttcaataaggtttaatggctgcaaaatgtgttagggattttttctattataggaataataatccatacaagccttaagccataagctcatactatctctccaaattataatgattcacattattattatttttttgtgaaggtgggatgagggaatgccataaataattttcaaccaccaatcaccattcattatttacaaaatcataaccatctgcagattgaagtgacctgataaaaattcctggaccacccacggacaaacaagtttgaacact

SEQ ID NO: 25673 - DNA, 460 bp, Glycine max
  unsure (1)..(460): unsure at all n locations
cgcacnnccacggagnnnattgataccgtagcatntccgtgacactacagagaactcaagcttgtcaaatctaagtaatacaatggctctgagaggaattaaaatctataacaattaaaacgggggacctggcatacccatatatatatatatatatctatgtatctatatatacatatatctatatatatatatgtatactatatctatatatatctcaaactctgggaagcaaggccaaaaaaaaaggaggggtggggcagattaacatgcgagagcctctctcctttgcgcaccagagaagatggactcttccgctagggaaaaccatcattgtacgtcaacacaacaccgtgtgcggaagggtggtttggccagtcaatcgtgagcctattattaatgcaccctgcatctggcgtgcccctggagaaacacacaggggcgccctccagaaccacag

SEQ ID NO: 25674 - DNA, 344 bp, Glycine max
agctttgtgttatcgattacactaatttggtaatctattactagtgtttgtttctgaataaatcaaaagatgtaactcttcaaaaggtttttgactttttcaaattagtttttctaaaagttataactcttctaaatggtcctcttggccagacatgaagagtctataaaagcaaggctttgattgcttttcaatacacttttacacttattcaatcaatcctttacaagccttgaatctctttgaacttcttcttcttctttgtaccaaaagctttctgaagttttctggttttctaaaccttgaaaacttgtgctattcatcctcttcattctcttctccct

SEQ ID NO: 25675 - DNA, 391 bp, Glycine max
  unsure (1)..(391): unsure at all n locations
tgngattgcatttgggcatctattntgactttcctatgccgcctctacatacataaaacagccccaccatcccaattttgcaaaaatcatattcatatatcattggggcatttcaccaagcacttggtgggcgcacgtttggacacaaattgcaagagaatggggacaatgtggcatgccccattgcttcagaatacaacataggcctaaggccttctcattcaaatccttaactcaagaaatcaagcatggattcagatgcaaattccttcacgaattttgcaaaaaatgagcaactaaagcaccaaaacacatcaatggagagccaaataaccaagggaaattgcacttacttgtggggagtgaattaaaacgtgaaaagggaagcgaa

SEQ ID NO: 25676 - DNA, 358 bp, Glycine max
agcttaatgacttgcttagcaccattttgctacttataatgtcattcatgaacatacaacatgttgctcagacatgcatcatgtcaaaatggtggaaggatagttgaaatttttctatagttctattttaccttccattgatttcagcaaccatgttttctttgaattaatgcttgagattgtatcttagcacaatggaaataatcccctacatactattgaccagaatctccataattactttaaacctgagatattactaatcttgaagggtattttgtgtcttataatatccaaaaactgagtatataagttctattcatcaatcatcaatcttgttttgttgacaagttttttt

SEQ ID NO: 25677 - DNA, 332 bp, Glycine max
tgcttccttcatcgtagttatccacgagaccataataccaactctggtccaatggccaaaagattttaattctccggtttagtacccaatatgcatccacatcacctaaaaggatttcataaaaatggcgcctcttcctggagttactcttgtttttatattgtttcctaggcctcaaaactctgccagcagtatcagctgatgttgattctgaacctaacggagacttcaaactgtggttaacaatactttgactagaagattggaaaaaggacaaaccatttgaacctttcataaaaaatccagtacagcttggatcaaaccttgaagat

SEQ ID NO: 25678 - DNA, 377 bp, Glycine max
agcttgcttgtggggcttctatggaggctggatctttgagcttcaatgaggtcctttaatggtgattttccaccatggagatgcagcggaagacaaaggagaagaggtgagagaaggcgccatccactagggaataagccatggaagaaggagcttcaccaccaagatgagccttggataagaagcttggagaggatgcttcattggaggaaaagaatgagagagagaaagagagaggggggagcacgaaattgaaggaagaaaaagagagagaagttgaactttgagttgtgtctcacaagactctcattcatcaaagttacaacaagtgttacacatgcttctatttatagactaggtagcttccttgagaagct

SEQ ID NO: 25679 - DNA, 410 bp, Glycine max
agcttctggcgggacatcttgacttgctttccaatctgacattcaccacttattctgccttcttctattttcagattgggaatgcctctaacagcacctttgtcaatgatttctttcatgcctcttatgggcagatgtccaaatctttgatgccatattctgacttcatcttctttggaggatagacatgcggaggagtgactgggttcttgaggtgtccataggtaacagttgtcctttgatctgctgcccttcattagaacttcactcttctcatttgtcaccaagcattctgactttgtgaagattacattgaatccttcatcacacaactgactgatgctgatcaagattgcagtcagacccttcaccagcagtactttgtccagactaggaagtccatcatgggc

SEQ ID NO: 25680 - DNA, 366 bp, Glycine max
agcttataatatatttattacacacttagatgaaagcaaagaatatatttaaggtcaattagtcaattgcttaggcatgagcattttattgcccagaaaatttagagaagattaaatagtaacatgtgtaagacacactaagatgaaagcaaagaatatatttcaggtcaagcagtcaggactcgaatataaattaaaatgttacattaattcttcactagcttaatttcaagagcaccagctgggcttcactataatcaaaagaaaaggttaaaactgtgtgaaaggcaatctaatcacaaactaacctgtctgatgacatattaaaaccagggcagagccctccacaagtaacaattgctgtct

SEQ ID NO: 25681 - DNA, 542 bp, Glycine max
  unsure (1)..(542): unsure at all n locations
agacgacatcctcaacccntactcattatcatcacttgaatgaaatacactcaccatacttgtatatattncncaaaggggnnanacgagggtnatgaatacgctgaatccctagacactcagngaacnatagnatgcgctcagcnttgggaaacacgagaacgcctggcgtctatcaaacattcagcccgatcctatgcccaggctccccgtttagatgaagacaatccccgaaaaccagacaagccatttcaacacgatggcacggtcaaacacccctactccctcaaacatctgggacagatgcccaactacaaagaatgaatattcaagatagaacgctaagcgatattaattgaatcctaacccaaggactaaaatctctccccctaagggaacataaaacagaactaatgccaacaatcagtaactaaacagagcccaacattaaaacaaaaacaagtccataccttggtcacaacccagcccaagcagagtgcggaaattataccggaagtagcgagactacgaacaccacaacg

SEQ ID NO: 25682 - DNA, 363 bp, Glycine max
agcttcgccctgaaacgaagtaattattggctttgtacccagaaatgcaatgcaaaaatgttttgagttatgaaaatgagatatctcgagtttcaacactctggggcgagatgagccttaaactgcacaatgctcacaatgttctttctctcttgttatgcttcgttggtcttctttttctttttctctccctttttttttgaaagacctagattgactgtttctttctaaaagatgtgatgattcatgcaacctcatcctatcttttgtagatctcttcagagacttcctcagagtgtatgttttggttgatttaattgcttggcaattttgggagatagaagtggaggcatttgacattta

SEQ ID NO: 25683 - DNA, 388 bp, Glycine max
tagcacttggaatactgacgctccattgaccagcctgttgatgctatgtaaatggtatgcatctttggggcatgtcctgttcagatcagtgtaatcggtgcacattctccatttgtcattggccttttttaccataacgacgttggcgagccaggtggaaagccgaacctctttgatgaagtttgcatggaggagctggtcgacttcttctttgacagctttaagctgctcttctcccatcttccttttcatttgttatataggtttggcctggggacagatagccaatttgtggcagattatgccaggatagatccctgacatgtcagatgattgcaaggcaaataaatccacatttctgcattgcaacgtggcaatgcaccggtgc

SEQ ID NO: 25684 - DNA, 365 bp, Glycine max
agcttgcctcaaagaggttcaggaatgtacaaggcagcagaaggaactagttccgctccggagtatgatagtcaccgctttaggagcgcggtacaccagcagcgcttcgaagccgtcaaggggtggtcgtttctccgggagcgacgcgtccagctcagggacgacgagtatactgatttccaggaggaaatagggcgccggcggtgggcaccactggttactcccatggccaagtttgatccaaaaatagtccttgagttttatgccaatgcttggccacagaggagggcgtgcgtgacatgaaatccatggtaggggtcagtggatcccgttcgatgccgacgctatcgggcagcttctgggat

SEQ ID NO: 25685 - DNA, 378 bp, Glycine max
  unsure (1)..(378): unsure at all n locations
ttagctntgtccccaagagcttcatgtatactggtctaaaatcgcgaagtgaacctcggatccctgtcagatacaatactagaaggaattccatgcaaccttattacttccttgatgtacaactccactagcttatccattctatacttcatattcactgggataaaatgagcagatttggtgagtcgatctactataacccacacagcatcatgtccacgactagtcttgggtaaactagatacaaaatccatagatatgctctgccatttccattctggaatttccaatggcttcaattctcttgatggtcgctggtgctcaaccttatccttttgacatgtcacacaatangctacatattcagctacatctttc

SEQ ID NO: 25686 - DNA, 362 bp, Glycine max
agcttttagtgaaaggatgtgactcttcacatttgaatttgaatttcaatgttcaaaggcactggtaatcgattaccaaaacattgtaatcgattacaacttttatgaaatcaattggaacgttgtaaattcatttgaaaactttttcaaatccattttgctattggtaatcgattacaaaaatctggtaatcgattaccagagtaaaaactctttggtaaacatgttttgagaaaaatccatgtgctactcagtttttgaaaaacccttttcatacttatcttgattaagtcttctcttgattcttgaatcttgagtcttgaatcttgttcttgaatattcttgattcttgattcttgaaa

SEQ ID NO: 25687 - DNA, 363 bp, Glycine max
tatcgtctatgttagccattaggcagatgttggcttgctcattgtctaaactgttactattctcactttcttagtcgtcttaggtgaccattagactatttattttatcaccagagtatcttcttttcttcagctgggaacactcaaccttcatgtgtccaggattttttcattcttagaaaattatctctttgctttcctccttgtacttcttcttgaatcttgtgtcctttcttctataaaagtgttgaaactgtcctttctttcctagcatcagtttaaattttttggacataagcaccacttcatcgtcagtgaactcttcaaaattgttgtctcacttatcacacttaaccagatgca

SEQ ID NO: 25688 - DNA, 371 bp, Glycine max
agcttggccatcaagcattaaactgatttttggctcatcaaccttttagcttgacccttttcacaaaccttgataatgattaaccttttggttgccacttttcttccaacctcctcccgtctctcgctccctgtcttgcttctactgttccaacctatttgaatgtgacctatatatgtatgcattggaggtttcctactttttaagatagaaatgtatctgaaatctctaaatacatgagctgcagaagaggaagaatctgctgaaaattcttgtaattttgaaaacctgactgagaaaatagcttggcataatctgagtccatgatttatcatcctgtattgatggtcttctagtttgaggcagtggaa

SEQ ID NO: 25689 - DNA, 340 bp, Glycine max
cctcagaacctgcaagcttgatattatgatgacgagcagaagatatcttcttatgcaatgttgacgtgcgcagatgaacaatgcctagaaactgctcatcaatcagattttgcacaggctgagagactcataagtcaacactggaggttcattgtcaaaattgatagtgaaaaatgtgtgacatttctatgtaacatacattgtcgagagttcacaaaagtgaatatggaccactgcactacacatatattaggcctcacatgttatggataatcttttaagccattaatatttacttcgcatgtagccaacaagattatggcgcatacacacctttgtc

SEQ ID NO: 25690 - DNA, 355 bp, Glycine max
agctttgtgtaatcgattacactgatttggtaatcgattaccagtgattgtttctgaataaatcaaaagatgtaactcttgaaatggtttttgactttttcaaattggttttaagtttttctaaaagtcataactcttttaaatgattctcttgaccagacatgaagagtctataaaagcaagactttgttttgcatttcaattatcttaaacaacctttacaatacaatcctttacaacttttgcatctctttgaacttcttcttcttccttttgccaaaagctttccaaagttttctggttttccaaaccttgaaaacttgtgctattcatacttttcatttccttctccctt

SEQ ID NO: 25691 - DNA, 340 bp, Glycine max
tgtctaactcacttccccactcttccttatttcttgcacgaagaagataagccaactcattaagaactaatggaatgtccttggcataattgaccaccctttttgataagttgtcatactccctttgatcatcacattggttaaagaaattcaaattgaaaagttcaagtgcttgatttaaactgaattctctaagcgggtatacctcatcagctttgttagctttaagaacttgcatatctctagttgttacaatgattctactacctgatccaaaattaccaagaggtccaagtaattttttctagtgatttgaatcattcacatcatcaagaacaat

SEQ ID NO: 25692 - DNA, 282 bp, Glycine max
agctttgatgtaacatttgtagaggttatatgaaacaacgagatgatgcgctccatgagaggttggatcaaatggagaatagagaccatatgaattgctcaagagcttccattgttcaatttcgagcgtctagatatataatgcgcctcaatcggacctccgagttaaaagttttgaccattggaaatgctcaagagcttccattgttcaatttcaagcgccacgatatattatgcacctgaatctgacctgctagtgacaacttatgaccatttgaattgc

SEQ ID NO: 25693 - DNA, 342 bp, Glycine max
ttcactcggaggcccgattcaggcgcataatatatctagacgctcgatattgaacaacggaggctatcgagaaattcaaatggacaatactttgaactccgacgtcctattcaggtgcataatatatctatacgctcaaaattttacaatggaagctctttggctattcaaatggtcataactcttcactcgaacgtccgattaacgcgcataatatatcgacacgctccaaattgaacaatggaggctcttgagcaatccaaatggtcataacttgtgactcggagggccgattcaggcgcataatatatcgtgacgcatcgaattgaacaacggaagctc

SEQ ID NO: 25694 - DNA, 354 bp, Glycine max
agcttgtatatttcaattgaataaataacaaacttaccatgcacttgatggatgtgaaagttaacatgaaatgcgaacaaaaaaaaaggtgacaaatataaggaataatgaatgaaagtagagatatggtgataattaagttaataacttatatataacatgagatttcattgaaaattcaaaagtatttttagatatcaaaatgaaaataagtgattaagttaaaggataaaaagctggttaaattcataaactaaaataaaagtaagtaattcagtttagagatcaaacatggaagttgtttgttgcttcattatcatccaaatgtgcataaaacgtgttacaaataaaaat

SEQ ID NO: 25695 - DNA, 396 bp, Glycine max
tgttacagatggtaaacccacctccacaaaagactacgtacataaagaaatgggggtgaacttaaggattaattgagacaaattgaaattgggatgcctatgtacacacacaaaaaaaaaaagatttagtttaagaaattattagaacgaaattaaagttatagatatttatttgtaaaagaataaagtttgagcatcttttttaacaagtacacttccgtatactgctccttagacaaatcaatacataaggataataattatgagtcatttccgaaaactgtgagtattttcgtttatttatattggattaaggggattcacatggtacaaatcagatacgtagtctcttgtaaaaacccaacaagttttcctgtcatctaatatgcatacact

SEQ ID NO: 25696 - DNA, 356 bp, Glycine max
agcttatgcgcatatttccttacaaacgttctcttgttcaagacattctattaaccgaaaaaatgcacccatatacaatcaaggcagcttcgttacctagattatttacacgtacttccaaggtgtatttgttacttacatcacacacatctccttggctaaattcacatacatgcatactcaaagcattttggggtaccaaaaattgcacatgtgcacatcttggtatttctaatacctatacatacacaaacttcatgatgaatcttgactatctacacaataaggggctacatttcatgctcttttcaagttttgctacctaaagccgcatgccaaattcagtatatttttct

SEQ ID NO: 25697 - DNA, 398 bp, Glycine max
tcaatgtcactttcgaccacagtcgaggtgtgccttttcctgtatatatctttaggaagctatatgtaggtctataggctttgtaaaattcattctaatggcttttgagagctaaagagcatggacaacactgctaggaaaaattgtgatcattgttcttgccaataggtatgtctatgtttactttttataggattgctagttttgctctcatcatgagtggatagtccccctagtccgggggttatgatgtatctgtccaagtgcactcctctctttgttcttaatggaagtcctcattgttttatgttaattatttatcttccttattttaatgcttatttggaaccggccattctaatactcaatcgaatgcatagaagtgatcatctacatgt

SEQ ID NO: 25698 - DNA, 366 bp, Glycine max
agctttatatagacttcagagcttctatcgttgagagatctcagctagccgttgtctaatagctttggtgcttgacacgaggtcattactatgcaaagagagagtagggaccacaaacactttctgcaacatatcttcagagaagtacaatctatcagtgtcacccaatgctcagagctgacttttattgtatggaccgaaagaaatgttaacaatataagataaaaggaattaagaatttcaagacaagacaatttaaatattttcttttgtgcgctatggcacgagtttcttactaagcatatggatgttactttctgatgattggttttagtacttaagaatcaagtaatggtttcattgttt

SEQ ID NO: 25699 - DNA, 362 bp, Glycine max
ttaggtgtgtattagagtgttctgagactcggtgtgtcttttctgcctggcttaatcatctttttatagttgttggagtggacttggtcctgcgtactcacacaaagcctgcactgctcgcttagcgcaggtgcctgtattcgtgctaagcctgcacttctcgctcagcatgggtgcttgtatttgcgcttagcgtacctcttctcgcttagcgccagtgcatgttttcgcgttgcgcgttgagcgcgtcttgggttaggtctaatgccaaaatcttcatttttcatatttttgttattttttgcatctttctggcttttaatccctcattttatatatgcaatccacaaaaggaaaaaaca

SEQ ID NO: 25700 - DNA, 374 bp, Glycine max
agcttacttaaaatgcattcaattgactcatctttacaagagagatagtgataggaagtatccaattttaccacacaaatcgaagaagaataacatatatcgaatgtttacccataagggatcaaaacgatttcataccataaaggcacaagatttttttttaaattttttttttataaaattcaagtattaaattgtacaatatgaaagtttgtgaattttaaaagaaaatttaacaaaagtatagagaatgaaaatatattttaccctataaaaaatgttgttgtaacttttaagaaaacaaaatatctgcaatctcaaaaaaattcaaaattatcagtgcattttttttttgtttttcaaaattcctctta

SEQ ID NO: 25701 - DNA, 378 bp, Glycine max
tggcaacatagcaattgatttggttgtacccatatgtttaatgtatcaatttcttgattcttccagcttatgtgttacatatactaataatactataggacattccaattccaatggctatccctttttctctcttggatgttatgtcaaggtttacgagtttggtttcgtatatgacgaaggccctctatcattctatcatgtccttgtctatttcctttcatgaaatcagaatatttttggactatttccatgtttttttctgtacattaatgtactgagattgagtatattaatgctgaagttttagctaaaagagcatcttaattgtttgtcttcgagtttgattatttcaccctcatggagattgaatgctta

SEQ ID NO: 25702 - DNA, 376 bp, Glycine max
agctttgtactttgtgcttgaaggccttccactgctctatggaatgccccagagcaccaccgtgataggcgcaggttgcattaggattgtaccatcagggaaaaggagactgatagactttcctagggctcaccatagccatttggttgctgagcaaagatggtagtaggccggcataaggcatcggcatcagggtgaactctgagggctttcttttcgggaaattcctcctcgggtttgtgtttgtgttgggattggtgtttccaattggtcgaggttgtacgagaaatgggttttgtgggggaagtctttgtggtagagtgggaaatatttttttgatgggcgccgatttgggaggagttctgattttggctaa

SEQ ID NO: 25703 - DNA, 411 bp, Glycine max
tgagccaaaatcccaactcaccataaaccttgacctatggtgagaatgttcattcttgcactcgaaagaaaacaaaaaaaagaaaaagaaagttcccgatcaaagatcggaagaaaaaaaaagaagaaaattcccaatcaaagattgggagaaagcaaaaaagaaagaaaaattcccgatcaaagatcggaagaaaacaaaagaaatatacaaaaaggtctttggaccagacaatatctgaacaatacaaaattgtcacaagtaaacaagaaaaggaaggaaaccacgacttggagtggtcctctccctttgatcgccaaccaaaatcctgtgcgctagcgactttctcgccctgcactaaacaaaaacagaaaaggaaaagacccaaacactcagagctaaattcctcac

SEQ ID NO: 25704 - DNA, 324 bp, Glycine max
  unsure (1)..(324): unsure at all n locations
agctntgagccaaaatcctgactcactataaaccttgacccagggggagaatgtcaatccttaccctcggaagcgaaaagaatagagggaaatttccaatcaaagaaaagaaaagaaggaaaattccccaatcaaagagtgggagaaagcaaaaagaaaagaaagaaaattcccaatcaaagaatgggagaaagtaaaaaggaagaagaagaaggaaagaaagctcctgatcagggatcgaaggaaaacagaataaatgtgcagaaaggtctttggaccggacaatatctgaacaatacagaattgtctcccaatgaacaaaaa

SEQ ID NO: 25705 - DNA, 375 bp, Glycine max
  unsure (1)..(375): unsure at all n locations
tctccctgtggttctcgttcttcttcttccactcctcaactcatggatccttcaacttcttcttcttattatgactcacattggcccatttccattacgaaaggtattcgctctactcgtaatcctcatcctatttataatttcttaagttatcaccgtttgtctcctttgtatagatcctttgttttctcattggcctcccttactattccttccattgtccgtgaggcacttgatcatcctggctggagacaggctatggttgatgagatgcaggctcttgacgataatggtacttgagagctggtacctctatctcctcggaagaccactgtgggttgtagatgggtctacactngtaaagttgggcccaat

SEQ ID NO: 25706 - DNA, 310 bp, Glycine max
agcttgagatgaggaagtgttgaatgtttaaacttcctgcttttattggtgaccacagagtggtacctggagatatgtcgcaggggtcaggagaccttggggacgtcaggtggggtgctattgcccaaaaccaagcttgaccaatcccgacccaacccgggcatagtcggtcagtgagaacctgggatgtacctaagcaggcgagctcctggcagtcaacagataaaaggaaaacaagaccacaaatcacggaggcttgtggtggctggccagctgtgaattttgtgtaatatgtggattgtgggctctg

SEQ ID NO: 25707 - DNA, 381 bp, Glycine max
tcccaagtttttaagttattcctcattactgtcctattcaaagttcccaaagtcctattaacaacttccgtttgcccatcggtttgtgggtgacaagtggttgaaaataacaatttagtgcccaacttgctccacaaagtcctccaaaaatgcaaatcatcaagcctaggtataggatgcctatatttaatggtgatgttattaagggctctacaatcagaacacatgcgccatgtcccatcctttttagggaccaaaatcactgggacagcacaaggactcgtactatctcttacccaacctttgctaatgagttcatccacttgtctttgaatctctatgcgttcttgtgaattacttctataagctggcctattgggc

SEQ ID NO: 25708 - DNA, 363 bp, Glycine max
agcttaaacattcaattttgagcgtttctatatattacgggactcaatcagacatccgagtaaaaagttattgtcgtttgaatttgctcagagcttcaacatttaatttcgagcgtctcgatatattacgagactatatcagacatctgagtaaaaagttattgtcgtttgaattcgctcagaggttcaacattcaatttcgagcgtctcgatatattacgggcctcaatcatacatccgagtaaaaagttattgtcgtttgaattggctcagagcttcaacattcaatttcgagcgtgtcgatatattacgggcgtcaatcatacattccgagtaaaaagttattgtcgtttgaattggctc

SEQ ID NO: 25709 - DNA, 352 bp, Glycine max
ttgagccaattcaaacgacaataactttttacattgttgtctgattgagtcctgtcatatatcgagacgctcgaaattgaatgttgaatctatgagccaattcaaacgacaataactttttactcggatgtctgattgagtcccgtaatataacgagactctcaaaattgaatgttgaagctctgagctaattcaaacgacgataactttctactcggatgtctgattgagtcctgtcatacatcgagacgctcgaaattgaatggtgaagctctgagccaattcatacgacaataactttttactcggatgtctgattgactctcgtcacatatcgagacgctcgaaaatg

SEQ ID NO: 25710 - DNA, 358 bp, Glycine max
agctttgatttcaaattttgaattgtttatatatatatatatatatatatatatatatatacacgcgttaattcctttttatatacgatcccctaacgtgaatggccaaacctcaaatggatttttttttgtatgaatgattcttatggcctggactttctgagtttggcattaagcagcatcacacccctatgtcctttggttataataattaactgtgtgtgaagatggactcctcaaagtctaggccttaggggtaaatatatccagtttgaatgctcttttaaacctgtgctgatccccatatggttggagcggtcttgcaaaacagaaagaccctgactggtctccctatgat

SEQ ID NO: 25711 - DNA, 388 bp, Glycine max
tcctcaagtccctccaccagtaggaaaatcccctttactctcgtccaaactggaactatgtccaacctccatatttggagttaatgattctagcccataaatgctgctgaccagaagctaaggcccatatccatttgccaagcaaagctacattgaatttagatatttctttaatccccagacccccttcattagttattacagttgcagctaagagcatcctcagttgtcaaattacaaagcatgatactccttggagctggccacttgcagcaccagtgaaacatattcatccataacaagtgggtgggtataaagaaaactatgagggaatgtatgagattaaaggctgttttgggcagtgtgcaaggaagtgtcatcagtacat

SEQ ID NO: 25712 - DNA, 352 bp, Glycine max
  unsure (1)..(352): unsure at all n locations
agctaaattctgttntttttttcctttacttttattttttctttcttaaatatcccatagttacaaggagtgcaataattgaattgaggattatatgcttgagtttaaaggtttaaatttttttcactccctttatttatcataaattcataatcatatcaattttcctaaatttgctaaaattcatgtattgtggtaacaaataaactaaggaccagccatttggatatatcctctccctctccggtctccttccatcctctctatctctccatcattttctctcaccatcattttcttatcatatattcttttttattacaatacttttgtttgttgtaccacaacaatg

SEQ ID NO: 25713 - DNA, 392 bp, Glycine max
  unsure (1)..(392): unsure at all n locations
ttatatattctagttgtttactagtaccttnntattatcatnttgagtatctactacatatcttttgaaaattactcttatttattactatatgttattaaaaaaatttaaaatcacactgtttgtcttttaattttgctttacataaaaaatagaataaataatacttatatataatgtgaagtagtaaataaataactgagttaatatgtttattttgccgtgaaatacaatgcatatttgtagggatatttatgggttgttttttgtcaaattcaggtaccaatataattaaatttgatttttgatttggtttaatttttatattttttttcagaaattcaacacaacctaatttattcatgaatattntgaattggttcaatacaact

SEQ ID NO: 25714 - DNA, 310 bp, Glycine max
agcttagtcagggaattcattgtcattattccctctgacataacaaacagaaagagtgatgagtaccataaagtgtttgtcagaggaaaatgtgttagattctcccctgctgtaatcaacaaatacctgggcagaccaactgaaggagtggtggatattgatgtttctgagcatcagattgccaaggaaatcactgccaaacgagtccagcattggccaaagaaagggaagctttctgcacggaagctaagtgtgaagtatgcaatcctgcacaagattgttgctgcaaactgggtacccaccaatcaca

SEQ ID NO: 25715 - DNA, 338 bp, Glycine max
tggttcgaggtacttatctgttgatgatcgaatatttatgaagaacgaatgaagaacgtcgaagaacggtcgaaaaccttcgagaaattcctcacggaaaacgttacggaaacgtttcggaagcgcctcggcttagattttcttcacggaaacaatttttccaagcaaattcgaaagagagagaagtgcctaaggggctgaacccttttcttcttcacttcctcccctatttatagcaaaataggggaggtggttgccgcccagctcgcccaggcgagctcatgttgcttcctccagaagcaacagccttctggaggaatcttctggagggcccaagt

SEQ ID NO: 25716 - DNA, 360 bp, Glycine max
agcttcatttatagacctctatcggtcatgtttcctggccgatgttgactgtcatttttttctatcaatatcggtgaataatatgtttttgccgagatgggctaatattttcctggccgaataaatcggaacatgtttgtttcggtcgaaacaaaacgtctgttgagctctcacaaaaaaaccaaaccgacctacattgtaaattttatatgcgacaccagaacaagaaaacttcttctacggttaaaaaaaccattatctgcctgcggtgcgttttaaataaaattgtgcaatgtccgctgaaaaatatacatctaggctatttcacgaacgctgtccgctattgagttatttattcaa

SEQ ID NO: 25717 - DNA, 384 bp, Glycine max
  unsure (1)..(384): unsure at all n locations
ctgtgttagacctcgatcggacatctttccaggccgatgtcgaccgtcattctctttgatccaattccgtgaagaatattatttcgccgaaaagggctcatgccttactggctcgcgtaacaggaacatgcgcaatttccgccaagactatagatcggtcgtgctcacacataaaaacctcttcgacctacatagtaagattttcatgcagccccaaaacaagaaaacttcctgtgccgtatgtacccaaggagacactccttgacgccgatggattttagaactcaaatgcgcgactttggatagacaatattaacgtgggcttcttacgaccgatgccggctctggcgtgtctattcaatacgtgactaactcgcatgtgtn

SEQ ID NO: 25718 - DNA, 283 bp, Glycine max
agcttcaaagtgactttaaataaataatctttctccgatagtttagtactaaagtgaaattattttaaaatataaatatagatgcttttttcaaacaattatataactcacccttaaattaaatatgttcacaacaaaatttattttttatcttccacaaaattaattttgataatccaaaactctaaccaatcgtaatttggtatatgctatttacttattttgtccaaagtgaatctagctctatatgaaaacaaagaagggtatgaaccccataacctaa

SEQ ID NO: 25719 - DNA, 404 bp, Glycine max
taagttttttgttttacataatatgtattttggaattattataatatttcttataaatatattataaaaaatatccccaccaagaaaaaatcttaaatccgtcactggctgaaattaactaacaaaaactagttgataaagaatcaagaatataatttaccaatttatttttatcttcatcaaactggttgatgatgtgctaagttatgtgattctcaatgacaacggtaggaactagaatgaaaaaaaatatataattactacaaatggtaatagttttgctcaaaaaaataatgaaaacataattaacccgcatgaaaaacaatccttatttggactcgctaactatctgtgctttcacatgaatttgaattttcaacatttcataaacctctcaactattt

SEQ ID NO: 25720 - DNA, 376 bp, Glycine max
  unsure (1)..(376): unsure at all n locations
agcttcagacaaaagcaaatcaaaatataggtatccaaaacccaccaatttagtgaattctcaaggtttgaaaagtgaaaatgagaattgggtaattttggggtaaactctcatctcaatcaagtctataacattgatttaaacttgctcgaactggttttaaggcaaaaactccacctattcaaaatttggcctctcaacacccaatttaccttagaaatgactcttttctttcacagntgtcactcatttttctcatttgctcttcccaagcttttctacaagtcctaatgacattctaagcaagaattcactcactttatactccaatttccactaaccccaaatttggcttttctaaccctcaaaatctcac

SEQ ID NO: 25721 - DNA, 370 bp, Glycine max
tggttacctccttcttcactacatcaagaattaccgtggttgagtcttctctgtggctgtcttactggtttagccccatcctctaaatttatccaatgcatgcatgtggatgggctaataccaggaatgtctgccagggtccagcctatagccttcttatgcttcttgagaactgataacaacttctcctcttgctcatcagtaaagaaggcagatataattactggaaaacttttgctctcatctaagtaaacatattttaaatttgatggcaaaggcttcaattgtggtgtggatggttggatagtggtagaaagagatggtttctcagcctgtacctcataaagaaagtcagaggtatgtgtacttt

SEQ ID NO: 25722 - DNA, 374 bp, Glycine max
agcttcctcaccgtggacggcgtcgttaccgatttccagctgctcgtccggcatcctcaagggtatgaacaattttatgacaaggagaataatggtggtggacaccaagttccatccaataacaaacatggccgccaccaattgcttgaagaactgcacaccaccacctccaccatataatgcaccccttgaatttgttactggcaatagaagtctacaaagggctggttctgctaatagacctgtgaggagaccacccaaaaggccagccacagcatgtgtgtgaaacacaccaagggtgtcatctacctgaacataatatttttcacaaaattatggtaagtacaaattatactaagtaaaaaatcaagagt

SEQ ID NO: 25723 - DNA, 389 bp, Glycine max
  unsure (1)..(389): unsure at all n locations
tctcccctattttgcgataaatagggggagaagtgattaagaaaagggttcagcaccataggcacttctctctctctctcgaaatagctgaggaaaattagttccgtgaagaaaatccaagccgaggcgcttccgtaacatttccgtgagtaattacgcgaagattctcgaccgttcttcaagattcatcgttcgttcttcgttttctttagtcttcaacgggtaagtacctcaaaccaagcttttcaattcattctatgtacccgtggtggtccacattttgtttcatgtatttttgttctcgttttcatttactttttatacccccttttaacgtgcttaagccatntatttaagtcatttctcgcctaatctaanaataaaataaa

SEQ ID NO: 25724 - DNA, 332 bp, Glycine max
agctttgtaattatgtaaccgagggtgcgcatgaagcagagttcggtgtcgacgcccacggtgatgaaaaaggttcggaggacggaggaggcgagtttggacgacgccgtttggaggctgggggcgaggaggtagtggaagtagagggagccggcttcggggggcgcgtggcaggcgcatagccagaagaggcgcatggtgaagacgaggttgaagaaggtggagagggattcgggtgtgtgcgagtccatgatccatgcgatgggctcgggattcagtttctggagctgggaacgggggcaggtgctatcgtgcgccgtgggggagtggga

SEQ ID NO: 25725 - DNA, 391 bp, Glycine max
  unsure (1)..(391): unsure at all n locations
taacctaacaaagtttgtttctgactaaccaatctctgtcttcacgaaacttctagccgagaagttggagcgatgaagtcgaagaggtgaaggagcttcaatggaagaaggggtagggcttcaatgtaaaatcgctgaggtcaatgtcaaagaaagcgagggttcaaacgaaggagcaagcacaaaggtctagggttcaaagcaatctcgaaagctagcagaaaggtacatagccgtgagaacgaaggagcaaacagttttcccttttttatttttagaattacgacggtttttttctaaaaaccagcataaattttataaaacataacattctaaggcggttttcaataaccgccttatgaagtgcgtcatanaatgcaatttgttacac

SEQ ID NO: 25726 - DNA, 344 bp, Glycine max
cgcttaacaaaaggcatgttaagtggttggaattcctagagcaattcccttatgttatcaaacataaaaagggaaaaggtaatattgtagccgatgctctttctcggcgtcatgcattactttctatgcttgaaacaaaattgattgggcttgaatgtttgaaaagcatgtatgaaaatgatgaaacttttggagaaatttttaaaaattgtgaaaaattttcaaaaaatggtttctttaaacatgaaggctttgttttttaaaaaaacaaaatgagtgggcctatatgttttattaaaaaaatgtttgtttttaaaccatcaaggacgtttaaggggcatttt

SEQ ID NO: 25727 - DNA, 394 bp, Glycine max
ctacagcagattctagtaatgaccctctatcctataattaaaataacttaatgccattaacctagggaattaaaaaaaacttaatggctgagtgtaactgaaattgtggcaaccaaaagtcacccccaacagccaacaagtcagccaccatttggtcttccaaaaggctgatgcctatgttgccaattgggcccttattacaacttgaactaaacctaactaaagcccttttagttgattaacccaaaacatatttttggtcagccaactttacaaggattgggccattatttagacaaactaaacactctaaaattgagacaaagtggtgtcatttagtcctcctccatttgggccatgatacaactcacaaccttggacttttctccttgaa

SEQ ID NO: 25728 - DNA, 352 bp, Glycine max
agcttggacaattgtaagaaaaattgtactttagtcacttcaggcgttgtgctggtgaaaagtggtggttctcgtgaataacaattccagcaaagaatttaaatcacaatacgcgtttttctttgtcctgttgccatgaagccatattaggtcccgtaagaacaatgacgtacgatcaaaattaaaaaataaatgcattattagtatgttttgatagggggtgagaaatccaaaatcatggcggcaggaaaaattaatagcaaacttagtgttatatatagaaaatctgaattgattaacacaactgaaaccaaacaaaacaagctatcatagcagtgtgataaaaaaaaac

SEQ ID NO: 25729 - DNA, 385 bp, Glycine max
tccttttctcttctttgaaatccaattggggccaactatttgacattgcccttgggattgccagaggtcttgtttacttgcatgaggaatgttgcacccaaatcatccattgcgacataaagccacaaaatatacttttggatgatcaatataatgctagaatttcagattttgggttagcaaagctgttattgatcaatcaaagccgcactgaaactggaattagaggaacaaaagggtatgttgcaccagattggtttagaagtgcaccaatcactgctaaggttgacacttatagttttggtgtgttgttactagagatcatttgttgtagaaagaatgtagaaaaggagcttgttaatgaagaaaagggatattgactgat

SEQ ID NO: 25730 - DNA, 365 bp, Glycine max
  unsure (1)..(365): unsure at all n locations
ttgagccaatacaaacgacaatatcttttttctcggtatgtctgantgattcccgtaacatatcgagacgcttgaaattgaaagctgaagctctgagccaatacaaacgaccataactttttactccgatgtctgattgagtcccgtaacatatcgagacgctcgaaatcgaatgtagaaactgtgagccaattcaaacgataataacttttttcacggatgtctgattgagtcccgtaacatatcgagactctccaaattgaatgtcgaacctctgagcaaattcaaacgacaataactttttactcggatgtctgattgagtccccgaacatatcgagacgcttgaaattgaatgttgaatct

SEQ ID NO: 25731 - DNA, 269 bp, Glycine max
agcttgcagccattagattataatgagcatgtgattggaagtatgactaaaaatgttagtcagtttgtcagattgattgtgaaggaatacattgaccgtatcccggtgaaagtgtgatccttaaattttgagagaaacgtctatcatttagtactgatttttgcatgaatctctgaagtatggactgaatgcatgaaattgaggatgatgaaagccatgtttgattgtgatagccacttacccataaagctgaccacgtgcatgaatga

SEQ ID NO: 25732 - DNA, 396 bp, Glycine max
tcagctttcaattttaagcgtgtcgatatattactgttactcaatcagacattggaataaaaatcaattgtcgtttgaatttgctcagagcttctattttcaatttcgagcgtctcgatatattacgggacataatcggacatcggaataaaaagttattgtaatttgaatttgctcagagcttctgttttcaatttcgagcgtctcgatatattatgggactcaaccagacatccaagggaaaagttattatcatttgaattggcttagggcttgcgttttcaatttcgagcgtgtcgatatattatgggacttaaccggacatccaagtaaaaatttattatcgtttgaatttgctctgagcttcttttttcaatttcgagcgtctcgaaatat

SEQ ID NO: 25733 - DNA, 365 bp, Glycine max
agcttgttaattaggactgcactgctaaacatcttgagaataggtgttgaaaatgaagagtttgcttcctgtttactctatactcactaaaacaaaacctttaaaattatttgaaaggagttcttgcagtataaaaattgaatatagaaaaggaaaagactggttgatagcgatacaagagatgatcgagaatgtaatgaattaagcaaattaagaaacactactaactgtaacatgtccttaatctctttaacactttaaagtctcaatcttcgaactataaaatgggaaaaataaactatgaaggaatggcacgctacatgcatgatcacaaaactgaatgcaattatgcttcagaaatgcaa

SEQ ID NO: 25734 - DNA, 382 bp, Glycine max
tctattgctcttattcatctttacttgggctatcttataccttttatttttgttgtctaagattttgcatacacttccttcaaagtgaagtgtgtagcctttctccatcatttggccaatgcttagaagattttcttttaggttggaaactagtaagacaacatggatgagtcgcttacctttatctgtctccaccgttacagtgcctttgccttttgattcaaccacacttccatttcccagtcgaactttgactttgacaaacttgtcaatgcttttgaaaatagtctcatccttggccatgtgattgctacatccactatccaagtaccagcattgttcttcattatgctcctctgcgatattggcttgatgcctattt

SEQ ID NO: 25735 - DNA, 331 bp, Glycine max
agcttctacttatgtggcatggcgggcttccttcactttcttgtctcaaccgcgagctttgactaccgctcttccttcccgcgatgcttctctttatatctgcctgagtgggcttataacctaaaccatacttcccacgatttcctttggaattaatcaggctagttatgccgccgttgtctttgcctaaacccattccgggttcgtaaccattccccaacataactcgggccatcattactgctgcatcggataagcaaggctgcccatagaaggagaccacacaggagaagcttaccacctcacaagactgggaagcggtttttaatga

SEQ ID NO: 25736 - DNA, 321 bp, Glycine max
tggactacaaaaggatgccaacgcctatcatgcaattcttgcacctaggatctgaaacactagcaatggtcatcaacaaatgacattgtccacaatattcgtcgaataataggtccattggggctgctctctctcatgaaaaatattcatcatgcattcgcaattacttgctcgaccctccaaacttttgcaagatacaaatctgcagttggatactcactgccagatattatatgtgtagctaagtggaatatttctaaaagtttacaaactttcagcactatttcccaatctagatttgaaggtgcataaaattaaata

SEQ ID NO: 25737 - DNA, 300 bp, Glycine max
agcttgagattatgaagtgttgaacgttgaaacttcctgcttttattgttgaccacagagtggtacctgtagatatgtcgcgggggtcaggagaccttgtggacgtcaggtggggtgctattgcccaaaaccaatcttgaccaatcccgacccaacccgggcatagtcggtcagtgagaacatgtgacgtacctaagcaggcgagcttctggcagtcaacagataaaaggaaaacaagaccacatagcaaggaggcttgtggtggctggccacctgtgaattttgtgaatatgtggattg

SEQ ID NO: 25738 - DNA, 391 bp, Glycine max
agcttgccacccagctcgcccaggcgagcttggttgttttctccagaaggcaccgccttctggagaacttcctggaaggcccaagtgggcctggttgctatttgcacccccctttttactaaatacacctgttgccttttttgctgattctttttccctaacgttacgaaactttatgaatttcgtaacgatacttgttttctttctgtaatgttacgaaaccttacggatcacgtaatcatccctttttttggctttcgggatgttatggaactttacagattgggcactaacacttccttttgacttctggcatgtcacggaacttcacgggttgtgaacaatgctctttttgactccggcatgtcacggaacttatgaattgctacga

SEQ ID NO: 25739 - DNA, 359 bp, Glycine max
agctcttaactgagattgcaacgttccaattgtttttttaatggtgtaatcgattacaatatattggtaatcaattaccagcgtatcattgaaatgcaaattaaattgtgaagagtcacatcttttcataaaatgctttgtgtaatcgattacatggctatggtaatcgattatcactgacaagttctgaataaaaagtcaagagatgtaactcttcaaatggttttctcaaagattttctcacggatataactcttccaatggttttcttgaccagatatgaaaagtctataaaagcaagaccttgacttgcatttcaataactctgttagaacaacttttagaatatcttgaacaac

SEQ ID NO: 25740 - DNA, 480 bp, Glycine max
  unsure (1)..(480): unsure at all n locations
cggcctgatgatcatgacggacgcgaaaaacaaagctacacagcagactttcatcgcattggcagacaacacaccagttctatatatatatatatatatatatatatatatatatatatatatatatatatatataggcatagtaactcaggacacatgattcacataatggaaagtagatttgttcatacatatacctaaacctgtgagggacatgctcaattaaaaaaaaagaattatgtgacccctatggaggagttgattaagagaacacaactctctcccaaaataatcccaacgtcatcaggttggctcggcggctccacaaaagaatctcacttctcgtactctattggcatcattatgctcccacgaacaaagattcgcgatcatcacatgtaccaaccacatggtacagaaattgcgaggtgtgagtctatataaaagaagttaatacaaagatcagataatcataattan

SEQ ID NO: 25741 - DNA, 357 bp, Glycine max
agcttcttagtttcagatgatgcagatgggtttgtttctacctcatgcactcctctaatgactatggcatcatttctggcgctaaactgctgggagttggaggccatcttctcaattaaatttctggcttcagcaggagtcatgtctgcaagggctccaccactggcagcatctatcatacttctctccatattactgagtccttcataaaaatgttggagaagaagctgttctgaaatctgatggtgagggcaactggcacatagtttcttaaatcgctcccagtactcatacaggctctctccactgagttgtctaatacctgagatatctttcctgatggctgtggtcctggaa

SEQ ID NO: 25742 - DNA, 383 bp, Glycine max
tccaaaagtgtagattccttctaaaaacaaaaaacaattcggtttcctttatatatatagattccttttcagctcgcatggaactttgaataactttatttcatcaaacataatcaccaaagagacattcctaaaacgcagacagaaggtacatatggcataaaacctcagaatctgagctaaatgaatggcaattatattatagatgaatcctctgcaattgacactgattcactgaacaggaaacttaccttcatccctcttcacactttccaatgtccacaagccccatggttggcccaatccctcccatagccacagtttcagtgaagtggtgattgcgatggccatcccctcccatagcgaaacaggtacgcatcttc

SEQ ID NO: 25743 - DNA, 445 bp, Glycine max
  unsure (1)..(445): unsure at all n locations
agcttgttgagacacactatnttctaacatgttattattaagtgaaatttattgagacccacgaattatgagtaggagcaagattcacatttcatgagtctcaataaattccagccataagaagagtatgttaacatttttcaagattgacatataaaatggtggatgaatggtttattaattaacttgaattgcacgtgactttaattttacaggaagcagatgtactgtggcttagaagtccacttataaagttaaatccaagtaatgaactcacaatttcatgtaatgtcttaagtgatggacaaagtggaagttacctacacggtgggggaatattcttcttgaaagcaaatgccatttcccttgagttcttcaagtattggaaattgactaagtttatgtttccaaacgatcccgcagaagagtccttgtgtaacacaat

SEQ ID NO: 25744 - DNA, 399 bp, Glycine max
tagcagcccactcttgaggatcaggcctcagaagtgtttacttggaattagcacacaaatgttccacctcttccagaactacaggggtctttaggaatgtgttcagagtatcctcatcaaatttcactagatgacctctcaccctcacctgcttaggtgatttatcctcggggtcatagaggttagcataaaattccttcagaatggcaatgtctatgctactgtcattaaaattagtcaactcctcatcccagtgtcttctctcgagttcctccttgaaatcgtcaaactcggtgtaataaactaccacattcctctccggtagtagtttcctgagcaccacaatatctgtatacctctcccaagcctcttgagatgtgaacccggatctatcgtatc

SEQ ID NO: 25745 - DNA, 420 bp, Glycine max
  unsure (1)..(420): unsure at all n locations
catgcaagcttgtgtattcctgcattctactttgatattgaattgcccattgctctgcctgagaataacaattggttgaccacaacagcgctgggggcggaaacggacgatggtctttccaataaacctgttgtacatgaacgaacattatatcatgcgctgagcgagccaaactaacaaacgaagtcatagcataattgctacactaactatattcaatgtacctgaacaaaatgaatttcaaacacttgaccgacacatatgatgcggtggccacaatagtcaggtggtggttgacttctactagggataaatgtcatgcttttgtgttgggacaacgatacaaagattacgttataccgtgaagcaatcacatatcccatggctgatatattccatcactngtccacactaacctga

SEQ ID NO: 25746 - DNA, 438 bp, Glycine max
  unsure (1)..(438): unsure at all n locations
ntaagattttcaaggctatggttgacaaatagtctggtttgtatgttagagctttgagaatagatagaggtggtgaattcttatcaaatgaattcattactttttgtgaggagcaagggataagaagagaattgattgctccatatactccaaagaaaaatggagtggccgagaggaaaaacagaattgtggttgagatggcaaggagtatgatcaaagctagaggtgtgccaaacagattctggtatgaagctgtagcaactgcagtgtacattttcaatgtttctcataccaaagctgtcatgaacatgacaccacttgaagcttggagaagaaagaaattgtctgtaagtcatttgagaatttttggttgtacaacatatgcattagttgatttatggactaagttggatgataaatctatcanatgtgtattta

SEQ ID NO: 25747 - DNA, 344 bp, Glycine max
  unsure (1)..(344): unsure at all n locations
agctngagatgaggaagtgttgaagggtgatacttcctgctnttatgggggaccacagagtggtacctggagatatgtcgcggtggtcaggagaccttgtggacgtcaggtggggtgctattgcccaaaaccaagcttgaccaatcccgacccaacccgggcatagtcggtcagtgagaacatgtgacgtacctaagcaggcgagctcctggcagtcaacagataaaaggaaaactagaccacatagcaaggaggcttgtggtggctggccagctgtgaattttgtgtaatatgtggattgtggcctctggtaatcgattaccaagggtgggtaatcgattaca

SEQ ID NO: 25748 - DNA, 438 bp, Glycine max
tcctcggagccatttcctgcgaaggcaaacatttgatagttatttttaccagtgggacactactcttaaaacaaaaatgacatacaacctcctcccataaatacaaacatcaatgtaaatttagagcaagcttatgcgcatatttccctacgaacgttcacttgcacaagacatcctattaactaagaaaaatgcacccatatacaatcaaggtagcttcattacctagattatttacatgtacttccaaggtgtatttgttatttacatcacacacgcctccttggctaaatttacatacatgcatactcaaagcatttcggggtaccaaaaattgcacatgcgctcatcttggtatttctaatacctatacatatacaaacttcatgatgaatcttgactacctacgcaataaggtgctacatttcatgctctttt

SEQ ID NO: 25749 - DNA, 417 bp, Glycine max
agcttggttcccaacgcactattctttcttttctaaaatctacaggtaaacctaggatctctatcagatactatgctacatggcacaccatgtaatatgacaatctcacttatatacagggaggtcaactcaacttctccaaggaaaatatgatattaatgggaatgaagtgagcagacttagtcattctatcaacaataacccagatagaatctaaacctctacggtgtctatgtagtcctaccacacaatccatggaaatactatcccacttccactgcgtatctctagggttataacatcctgaaggtcttgatgttgatctatacttctgacagactacgcatgatagacaaaacactaacctctttctatgttggccaccaatcatcattttaaatctgatcctcttgaaca

SEQ ID NO: 25750 - DNA, 433 bp, Glycine max
  unsure (1)..(433): unsure at all n locations
tcagcgggatctacagaccctggcatactctcgatcntatttaggaaagnntcacttgggcacataccaaagtgtgacaatccattgccatccttcaatagggcgcacgatcgatcccaaagccttatatcttcttgttgtgtagaataatcgaaaaaaaaaaagaaaggggaaaaccctaggatcaatattttgattgattgattaaatgtcaaatggctccattgccgtcactccaaaattgtcaagtgactaaatcaaacaaaacatacactctgagggaatccttgaagagatttgtaagaagataggatgaggtctcatgagttatcatgtcttttagaaaaagacagtcaatctgtgtttccacaaaaaaanatgaacaaaagcataacaagaaggagataaatcataatcaaaatcaaatcacaaa

SEQ ID NO: 25751 - DNA, 351 bp, Glycine max
  unsure (1)..(351): unsure at all n locations
agctttagccttgatttagggaattngtgntttctttgtagtagggactttaattnttgtattttcatgtattttggcatggggtgagcttagctattgaagaggtgtgagtagcccccctctagcttctcaaggaaggtttcttccttacttcccaaggaagcaacctttctcgcttctcaaggaagcttcccatgtgctangctataaatagaaacatgtgtaacacttgtcataactttgatgattgagaaacttgtgagacacacctaaaagttcaacttctctccctaatctccttcaactcccatgcccccctccacccaccctctatgatgcaatcctaccccc

SEQ ID NO: 25752 - DNA, 405 bp, Glycine max
ggacactatgaaactcagcttctatggaggtgggtcttgagcttaatattgtttttcaatgttgattatcggccatggagttgcagcgaaagataaaggataagaggtgagcggacgcgccatctactagaggataagccatggaaggagaagcttcaccaccaaaagagtgccttggataaaaagcttacagaggaagcttcaatgaaggaagagaatgagagagatagagtgatgcaatcctaccccctaagggctttggatcttatattccagataaataggggaagacatgcttctaaaagtagtgcaaacttcattgaatatattgtaaagtctacgctaggcctatgggtgtcttttgaccttgcatattaatgtatgtctggatcctgtaagatcatt

SEQ ID NO: 25753 - DNA, 346 bp, Glycine max
  unsure (1)..(346): unsure at all n locations
agcttaagtctgacttatttaaataatgnatatttttctaaaatttaaatttagtctttttattacacagaccatcttagatttcactctatatagatcaggtcatgactttttatttaaggttcaatctattcatgactatattactaatgacttgtgtcatttaattgtctaaactttgaatgtttgaacattaatcattgtttcctatgtgatctaaataaaacaaccaatccaatggctttaaacaataacctgccaagacccttcatgatccaatcataatctaactaacaaccaaattccacatattccctccatgaacattagagtgcttgatacctga

SEQ ID NO: 25754 - DNA, 441 bp, Glycine max
  unsure (1)..(441): unsure at all n locations
taaaataatattaaaaacacttttaaatgattttgtttattctattagacatgtgtttatatatgtaaaaaataattaacatgatttattttagcaagattaaaattgattttaaataaaatttatatttttagtaaaatgtattttaagattaaaaataactctaatatgaaataggaagatcctaattataaaagagaattgattgtaaaaaattcctttctagaaaataaagcaatataaagagtgagttgcacatatagcagtggtcctattctgggaatctgattgtcgttatcgtaaaggagacgttaaataaagtccctccttaaatcgtcttgtaactgctgtcgtgtttttgtccgcccaaaagtttgcaattgtttgtataatatccctctattgccaattaanaatgaatcacgtcgtttttctttgaga

SEQ ID NO: 25755 - DNA, 406 bp, Glycine max
agcttaggctcttaaaattcaagtgatctattctcaagtgccatagccatgaatcactaaccacttctatatacaaacacttattttcaacaacattaatttgaatctaaaagatcttattggtgccaagggaatccttaagattttcctttgattggagtcaagaacctccaagtaatcattttgcgtgtgcatagtaaagcatttttctagcaaatgtctcatgttaagcagattactcttcatatttaccatctttccttttaatcatcacatttcccactccttcagcacacaatgttttggtgtctgtgaatatgaccttgcacttcttattatcatcgaagatagtcaaccattctttatgaccggtcatatggatagatcaacttgagtcaagatacat

SEQ ID NO: 25756 - DNA, 319 bp, Glycine max
  unsure (1)..(319): unsure at all n locations
ccaacccccactgttcttttaacccgtttttgaaaccaccccaacccattctcaaaaatctcacaaacactcatgagatcacaccaccattgggaacccctcttatcacaacaaccccctacaagactatccaagtgtgtgattccatattttcccatcaaaacctctcaccgcaagccattttattcactcaacaacctccaaagtcacttccccaacaaggcccttttaaaaacttctaaattntttattcccaatccccccccccccctttttcggttgacacaccacatcccacttgacccaagccactttcttt

SEQ ID NO: 25757 - DNA, 378 bp, Glycine max
agcttgagataattctgctttgtgttatgttcctacaaatgatatagatgccatggttggtgttaacttaaagtccccaaaggcgaagcatatgagtgattggttgtagtattgagtgagagatgcaatggcttcaacagacacttttatcatcaccagatcccaaatcttcccatataccttgctgaaagcctgatgttgaacttgatccattcgctgccccagtattcgcaagctggccagctctagatattttactctgacataatagaacctcttttcaaaagatggcgcttggtccgaccccatgttcgcaatcatgggaatcttgatgatcaactacttcaacatcctatcttagatgagatatgatgaatg

SEQ ID NO: 25758 - DNA, 377 bp, Glycine max
  unsure (1)..(377): unsure at all n locations
tgtgcctcttcacgtctagaatatgtttgattcatattgatccaaagaccctcaggtgctttgctgatggcttcttctcgttgcaagcttcaattggagtcttgtcttttacagacttagttggacatctgttgagtatgtaaacaactgtgtagactgcttcagctaagaatgtgttagatagtctcttctctttgagcatcgatctagccattttcgtaactgtgcgattctttctctcggacactccattttgttgaggagaatatgcaactgtaagttgccgctcaatgccttcatccttacaaaatctttcanactcgcgagaggtgtactctttgccgcgattacttgttagtacttttattccgtttcca

SEQ ID NO: 25759 - DNA, 330 bp, Glycine max
  unsure (1)..(330): unsure at all n locations
agcttgaagttgagcacgtggtacctnggttgacttttgatttttctggcgcattgaagcccaaatatcacgagcagtttctttgttcaacgatagtctccaagattgtgcgatcaatggcttggaaaagatagttcttggctttaacatctttgagtttgctatcatcagctgctttactttgctcggcagtggaattggccggagctaccacgattccatcttcaataatgctccaatactccttagaacgaaggagattctccatcaacatggaccaatgatcataccgaccattcaaattgggaatagagggttgcagacaggatg

SEQ ID NO: 25760 - DNA, 451 bp, Glycine max
  unsure (1)..(451): unsure at all n locations
acttcaaactcagctagatgatgcctttgatttntttnnnnnggggttttntttgattctgaaacgacnacttacatttttgcccccatttaggacatatagtttagaaaatagatgtttttagggttgttctacgatcaaagtaggagcctaaccttatgaaatgcataacatgattcttaattaagacatcaatatttgcattttaactatttttctccaacttaattatgttggcatccgtaactcggtgcaggcaaataaagaaagaccaaacacagtaactttcatattggaaataccatgtcaaacatgcattattttatagtaataaagtacatgtattatatattcattgatactcgtactgtacagtatatatataaaatgtgcattgatgttcctactggattcgctaacaggtggtacatgtgcaacaattgcaagattt

SEQ ID NO: 25761 - DNA, 294 bp, Glycine max
  unsure (1)..(294): unsure at all n locations
agctngcaattgacatatagggacggccaatanttttggaaccacatgggaccactccagagccatgaccacaatatcagctggaaagaccatacctgttatcagaacatcctcgatcacccgcccaggtcttgtgatggatcatgcaacaccatgccaagccattctcgtgggcatgatcctcaactctcactaccttctacacatggagagcggcattaggttgctactggtccccaacatcaatgagagactctctgatgtgccatcactctcttatatttcgtaaaccct

SEQ ID NO: 25762 - DNA, 224 bp, Glycine max
catcacaatattggctacgtttcattattgggggaaccacctgcgtctacagatccctccaccttttgagcgtgttctttgaaagatccgtcctccttgttgcacatgttcgtgtactgcactctattcagaaccatatcacaaattgtactgatactgcctaacacagcgcaaccattatgtcctttctagaatggactcacgaaggtgaccacatagtgtac

SEQ ID NO: 25763 - DNA, 349 bp, Glycine max
  unsure (1)..(349): unsure at all n locations
agctctccagcttttcattgggggactngtgttctccttttggtgctctaaaatgtgggaatatgctcaaatatgtggggcaattctggtttgttttcttgcgtgattgggttgaattgcgggtttgtatgggatggccctacgcctataatgcattttgaagcaatgggacatgccacattgtccccgttctcttgctattgatgcctaaacgcgcgcccaccaagtgttcggtgaaatgcctcaatggcattagcgcgtgatctttgtaatgaaacaacccatggggcagtttggatcgcccatatattccattcnttttgggacatgcattcattttcgaaagggc

SEQ ID NO: 25764 - DNA, 334 bp, Glycine max
taataagaggcatgctaagcgggtagagtttttagattctttttcatatgtcatcaaacataaaaaggggaaagggaatgtagtggctgatgcactgtctaggagacatgctttacttgctatgcttgaaactaaactgtttggtctcgagtctttgaaagacatgtatgtgcatgatgtggactttgctgaaatttttgctgcatgtgaaaagttttctgaaaatggttactataggcataatggattcttgtttagagcaaataaattgtgtgtgcctaagtgttccattagagagttgcttgtgagtgaatcacatgaggggggggggggg

SEQ ID NO: 25765 - DNA, 388 bp, Glycine max
agcttcttagtctcagatgatgcagctgagtttgtttctacctcatgcactcctctaatgactatggcatcatttctggcgctaaactgctgggagttggaagccatcttctcaattaaattcctggcttcagcaggagtcatgtctccaacggctccaccactggcagcatctatcatacttctctccatattactgagtccttcataaaaatattggagaagaagctgctccgaaacctgatggtgagggcaactggcacatagtttcttaaatcgctcacagtactcatacaagctctctccattgagttgtctaatacctgagatatctttcctgatggctgtggtcctggaagcatggaaaattttttctaagaatattctct

SEQ ID NO: 25766 - DNA, 434 bp, Glycine max
  unsure (1)..(434): unsure at all n locations
tggtgtttcacctatggatgatttgaattaagggggtttgtttgttataattcagaatattagttgtaaagtttggtagtttgtttagttagttgagtgtgataagacagtgattgaggctgaacttgagttgtataaatagcctctgtgtaatttagttcataatgcaattcatctcattttagtatatgctttttcctggctttctctctttctccccaacatagattaggtacttattacaatcattagatcttaaaaaaatatatgataaaaatgatgagtaactttaaaatcctccatctattactctgtgttggctagaaggaagagagaatgaagttagaagttacaaaaaattgaacaaggtgggatccaagaacaagattttttatggtcatgtaactctntaaccaaataaaccccgccttcat

SEQ ID NO: 25767 - DNA, 474 bp, Glycine max
  unsure (1)..(474): unsure at all n locations
agctnttagctcgtccttcaagatcatgcctttgacccgtgatgattcctttcacctcttcagagtttgagctcactattgctaccctataaagcccctcaaaacttgttttggtcgtgttcttcctttcgggccttcttggtttctcattccaaggcttcatcggtggccatattgacgtcccttagttcatcatactctcttcagactttgatggttatggacttgaacttctctttgactacccaggctctttcaagctttgcctttagggcttgtacctcatcactttcttccgaagctntaacctcattgtctctcacagtctttagatttgggagccaatccaatccttgtgtgcgaactctcagccacttatgatagccgccgatgatcccattactgcttcccctaagctctctgtcctttcttcacgccgcatnccatgcctngcaaactcagtggagtaccctc

SEQ ID NO: 25768 - DNA, 406 bp, Glycine max
tactcaagctgaggcaaactggatgcgttggtcaacttggtaacttatctggccttgaatcagaaatctgtacctgtcgcaagggtttgtggtttgtgctcctctgctgaccaccatacagacctttgcccttccatgtagcaacctggagcaattgagcagcctgaagcttatgctgcaaatatttacaatagacctcctcaacctcagcagcaaaatcaaccacagcagaacaattatgacctttccagcaacagatacaaccctggatggaggaatcaccctaacctcagatggtccagccctcagcaacaacagcagcctgctccttccttccaaaatgctgctggcccaagcagaccatacattcctccaccaatccaacaacagcaacaaccccagaaac

SEQ ID NO: 25769 - DNA, 427 bp, Glycine max
  unsure (1)..(427): unsure at all n locations
angatatgtgttcttatggccaccacgccacagccatgtaccaatatgtcatgcgggagccaccatacacgtggagacataacagtactcaagctcccgcgcaagactaagctatggacctgtccaacatgacgtcaagcatatactcgcggcgtgaatctcatctggacctaactttgacagatccagagcggcattaggttgctactggccccaactcactgaaagcaagtgagatgagccatcattccgcccatttcgtaaaccacctctgaactctgctaagtaccggttaccaaaggtggacaatcaactagctgcttattattcggcacagtgcctaattgtcctggtaatcataactctgagtcgaggaacatcgggctaaaacgatgtggaggcgctgagcaggagaaatgactccctt

SEQ ID NO: 25770 - DNA, 423 bp, Glycine max
tctatttgaactcatggtatgttatacacttgtcaaataggttatgctaacaactaaacttttggcatattgtttcaacacactattattaagaaaaatttatgtgagctccactaaataatttgagtgtgtgcttagattctttgttaggattcacatgaagtatgttaataacatttctcgagtattatatataagctacccatttctccttgactttttaaaatgcaattgctagttaaaaaatccttgaaaagggaatctattcagtaaatgatatatttttaaaaaagggaagtttgtagcaagcctcactttttcctctggttttgcatgaggaagcaataaggtatatgcatcatccgtggcgtcttttgtaggattaagtggttctgaaaaaatgtctgtgcgtgactctgatgc

SEQ ID NO: 25771 - DNA, 352 bp, Glycine max
agctgatttaaaagagcatcctgttctcttaatgaaagtaagaaattcattttcccaatatattgcacttcagcagactttagttttagatatattagggaattgcagaatattccaaaacaagacacatttatttactatcgactatgaattgaagtctaataaatatacatccctagtttcaattttcaaacaattaataataagcatgcagcaaggcgcaacatcagggtatcagcttgctttcgaaagagaaactcaggccaaacaagagaatctaaattcttcaaggcaacactaagagttctaaacttaaatgtaattaaaaaatataatcactctatgccatcac

SEQ ID NO: 25772 - DNA, 434 bp, Glycine max
  unsure (1)..(434): unsure at all n locations
ntgagagaaggagtctcaagacccctactatggaacttgtaatatgatgaaaatggtggtctcttcctccttgaaggtcttgagaaagaagaagaaaatgaaggttcaagttttggtttttgaagaggaaatggtgataatagatatttctgtttatcttttttttttacttggtcaataaagtcataaggctttagtagttagttttatggttcatcaaaataaggctatgttgcctaaactttaggataaagttatcacattcaaatctcaaattcttatgtaactgatagagggatatttttaatgtttctattgtggaaaagtctatttaaagggctgcaacagttaatacaaaaacacacttcacccatatcttttcttcattctctcttcatatttacctctatttttattctcaaactattaataat

SEQ ID NO: 25773 - DNA, 353 bp, Glycine max
  unsure (1)..(353): unsure at all n locations
agctnttttggagtagaaacatgggttcaatttattntatttcaaaaaggaagtcgtatctagtcaaggtcttagagaccatacaagtttcctaacgatttctaattatgtgggccattaagtctatcatatgctgacaatagccgagaagcccatgaatctcttcgggggcggagtaggtgtctgccatcgccttggccttggctaacaatcggggaagatcttgactcccgttcaaggtaagagcaaaccgatccatccacatggttgcctcttggtgtgaagagtcgatcacccttcctctagcctcttttttcgcgtatacgtgggcatattcgtccgcgatcctatgc

SEQ ID NO: 25774 - DNA, 412 bp, Glycine max
tgagatgaggaagtgttgaagggtgaaacttcttgcttttattgttgaccacagagtggtacctggagatatgtcgcgggggtcaggagaccttggggacgtcaggtggggtgctattgcccaaaaccaagcttgaccaatcccgacccaacccgggcatagtcggtcagtgagaacatgtgacgtacctaagcaggcgagctcctggcagtcaacagataaaaggaaaacaagaccacagagcaaggaggcttgtggtggctggccagctgtgaattttgtgtaatatgtggattgtggcctctggtaatcgattaccaagggtgggtaatcgattacaaggcttaaaattgaagacagggggctaagatggtctctggtaatcgattaccaaggggtgtaatcgattacc

SEQ ID NO: 25775 - DNA, 365 bp, Glycine max
agcttctgggataaatcctcgagttttcagtttcaaaactcccagtgtttcattggaattaggtgtaacctacagcattgacaaattatctcataaatatatcacttcaaggttcgttgtttgtttctcacgaaacttattcaccattggaaacaaagaggatttacctttctccaactatgaccaagaaattcattcacagctatagcattctgtccatacatcagtggtgaggaccagtaaccccacagaaaccatttgtgcacattctctggcacatagaacaaaactatcataataaaggttcattacagtaaccaactttgaagttacatgtaccatttcttacctcgggaaatcacaaa

SEQ ID NO: 25776 - DNA, 437 bp, Glycine max
tcattcataaattatgattcaatctccaacttcttctttttatctctccaaggctttagaggatgaaaggcattggtccatttcttttgaatacattgatgatgctctcttcatggcaaagtatgcattatttaaagcattcattgcataatggccgagtgagattgtgcattgttcctcaacagctgcatgatgaaaatgacctaatcttttttgccaaacttcttttgtattgtttacagtaactggataagttgtttgctcctccttcaatggatcaaatgagaaacttttgcctctcattttgatattgaaagtttccttgtcattgacatctttaatcagacagtgcttattttcaaagatgactttaaaccccttatcaatcagttgtcccacacttagcaaagtttgatgaatctcaggtacatacaaaa

SEQ ID NO: 25777 - DNA, 339 bp, Glycine max
tttttcactgcgttattatcaatttatttaaaggaaactttcacagtaaaatgtctgattgattcttttgattattttattattatttttttcagagatattttgatcattttactattattttcttcaaagatatttttttttaacaataattaaacgaaattaccacacaaatgatcggttgaaattcattttatcaaatattaaacgagataaccgcataaataaacagttgaaagctcgttaaagcagaataatataataccacaagtaaatgagatgaagaatgaaagccaacaaaacaagaatgaattgaaagcttcggattcagaaacttac

SEQ ID NO: 25778 - DNA, 408 bp, Glycine max
  unsure (1)..(408): unsure at all n locations
tcaatggagcttacattagtaaccaacaagaattttttattttgaagatatatatggaaagcatcttcaatttgcttgtatatttggtggttttttactgagaaaaataatgaatttgcctactctaaatgtggaaaacatcttcaattttttatttcatgtagaaattgcgataatatgttttttcctcttttgttgcatttatacgtaaccaattaattaaatctgaatatacaatatgaaacttgaagctatatatttagtttagcaaatactgtgagaatctataattattatactcaattgattagtgaaagaatgagttgagaatnttttggtgcccaacataagtaatctctatatgaatagtcggcaatttaggttttttttggtttattagtagtcaac

SEQ ID NO: 25779 - DNA, 162 bp, Glycine max
  unsure (1)..(162): unsure at all n locations
agcttatgtaacatggtgtttaatttatttcataggttcttttgatagactgatagcctntatgggtggattgattagcccttggcaaagtaatcttatcccggggaggagtgttggatcaagtggcctctaaataattaagatagggggggggggttgaat

SEQ ID NO: 25780 - DNA, 377 bp, Glycine max
  unsure (1)..(377): unsure at all n locations
tgtcagcaatttccttgctacctatacgtcttttgttcagngngctcggggcaggccatcttccacttcacgtgtcgtctgatgggaaatggaggatcaaccacgatgtcagtgcttccggattgagcagcttcctccacttttttctttttcttctcctccatcaactagttttctagatattcataaccccaacgagacaacacgtgaggggaagtgttttgtttctggatgacctatgccttttttcgcacatcctataaaaattaaatgttattgaaagtgatcattacaatgtataatagtaagtgaatgtaaagtttaaaacaatgaanatcagaaacttaactcccacgaatggtctctacgagtctgac

SEQ ID NO: 25781 - DNA, 331 bp, Glycine max
  unsure (1)..(331): unsure at all n locations
agcttattttcctttacttgttgcttgntgagactgcngcacaatntggtgtagtgtttcttctctttgctttggggctggagttttccctgtcaaaggtctgttattcatgtcttgtaaaaatttctctttttcacctattttcatgctacaagctcgattctagctaaatcgcaaaccatattttatgattgtaaggaaatatatattatcctcgtctaaggcttttgatctgggtttgtagattgctaaaactcttccttctgtttccatattctaattttaaattctcttgcatgaagttaaaagctcggggacctgttgctgttct

SEQ ID NO: 25782 - DNA, 431 bp, Glycine max
taaaggagcactcaaactgggtgactttctttgcctactctccgaagagtctgtcagggcctctccctcctgatttaggtctaaccccaaaaaaattttagcaaacagactctatccatgaactatacaaaacacacgactcatcaattgttctcaaatatttttaactcgttgtcctttaagggtcttagcattaacccgtcacccttaaagggtcttagcattaactcgtcgcccttaaagggacttagcattaactcgtcgcccttaaagggtcttatagtcgtgtgatggtacaatccacagtttacaactcaatgcacacaacatctcaatcacatgcatactcaatttatcacatacactcgatttcaatcacaatgttataatctcaaaataacatgttatcacaccttatgaatcatacacac

SEQ ID NO: 25783 - DNA, 407 bp, Glycine max
  unsure (1)..(407): unsure at all n locations
agcttataagaacaaaatngccttaatcattgccaattatgcatgtgaattaggacgcatcaacaagaatcaagccaaggctattgtgcaagcaatcaatggggcaaaacacaccaaatgattataatgatggatggctcaaattctcacaaaggtaaaatcatcactttcaaattgagctttcaaaactatcatgacatgtagagaagaatcaaggatttcaagtcacaaaatgtcaagaacttttattttcaaaacaattacccatttcttgaacatatcctataattcaaagaaaaacatgcaaagtcgtacgtgcacacaaaattgacccataatattaaactgaaaatccgacgaaactaacaacattaaccaaataacacaactaacanaataacaaaacc

SEQ ID NO: 25784 - DNA, 425 bp, Glycine max
tactcagctgaaccaaaccggaagagtgtgacctaactattaggtacgactagttgcgagtaataatctttgcatgaatctctgaattttagaatgaaatgtataaatgaggacatgatgaaggccatggttgtacatacacaagttctctgaccaaatagcttaccttgaatgatacttgtatcttttgctcctgtgtataaagcttattgatttgtcattaactgaacgctgaactttaaatgattatctcctaataccttgtttagattctaggagagcatatgcttcaaggaaaatttactctaaatttgggggagaaaagttgaaaagaatgaaaagaaaaaggttaagcatcagcacacacaacaaataagttgtatgttaaaaaaaaaagagaaaaaaataagttgtgctgttacaat

SEQ ID NO: 25785 - DNA, 269 bp, Glycine max
agctcctcaaggaagctacctagtctataaatagatttatgtgtaacactcgctgcaactcggatgaacgagagtcttgttagacatacttcaaagttccactgctctccctctattattccttcaatagtgagctcccccctctctctttccctccctctttcttgttctacattgaagcatcctctacacgcttcttatccaaggatcatcttggcggcgaagctccatcttccatggcgtattccctaacggatggcgcctactct

SEQ ID NO: 25786 - DNA, 443 bp, Glycine max
  unsure (1)..(443): unsure at all n locations
actaagctagaatgcagaagaagcacaataggttcccagctcttgtgtttgattaaagataacaattggtacctcaaagccttacactggggcaatgaggggcatcgtgcatgagccttaagtgaacataggggcagatcaaaagttcacacccatcgatgtttttaaacaagaaaaaaaagggggagacatgccctggaatttcaatagattgattaaacatcaaacggctccattcccgtcactcaaaaacggtcaagtgactaaatcaaacagaacatacactctgagggagttcccggagagattttcaaaaagataggatgaggttgcatgaattatcacctctntcaaaaggatagtcaatctgtgttttccnaataattaaatcaaaatcaaaatcaccaaatagggaaagaatgtcatgaacgttgtacaacttt

SEQ ID NO: 25787 - DNA, 381 bp, Glycine max
  unsure (1)..(381): unsure at all n locations
agcttctggtgggacatcttgacttgctttttcttcttacattcaccacagattctgccttcttctattctcagattgnggatgcctctaacagctcctttgtcaatgattttcttcatgcctcttaagtgcagatgtccaaatctttgatgccatattctgacttcatcttctttggaggatagacatgtggaggagtagctggtttcttgaggtgtccataggtaacagctgtcctttgatctgctgcccttcattagaacttcacttttctcatttgtcactaagcattctgactttgtgaagtttacattgaatccttcatcacacagctgactgatgctgatcaagttagcagtcagtcccttcaccaacagtact

SEQ ID NO: 25788 - DNA, 436 bp, Glycine max
  unsure (1)..(436): unsure at all n locations
tccatcaataggattgcatcatccctcttcccccttttaatgatttgacctcaaatccagaggttcaagaaactttgggcttcttccctccacttgtaaaaagaataaaaacatatatattagtgttgttgggtatgttagagtagggtaaggtctgaaaatccctttcctgagcatcttcacatgagggaacatggttcctcaccaactcaatcagtggtgctgcaagtatagaaaaatatgggacaaaccttttgtaaaagtttgttaagtcatggaagcccctaatttcccttatacttggtggagtgggccactcaaaaatgatttttattctcttaggatccgtggaaaccccttgatcactatttaaaaaattaaggaaagtaatgcaataaaacatacattnttctgtattttcatgtntattactcct

SEQ ID NO: 25789 - DNA, 468 bp, Glycine max
agcttgcagggctaagactagtagtttctgtctctgtgtcaattatgtctctacatttctctgatgcaagcatactgttttcgagatcacgaagtgtgccactttcagatatgttcagcagggcttggtttacaccaggaagcaatggagatccccttggaaatacctgcaaagacattagttgaagggctagaaattaatagtaattcttacatgatacattgcctttagctacaaccaattaaaaacttaagcgacatgaaaataatagacaacatagatgcaaattcataagtgattttagtgttctccaatcagaactggagtttcaccttctaacctatgctgatctttagtgtaagcctctatcatgcatattacccggatgaaactccaattattattggagaaaaacacaacaaacacctaagaagttgcatgtgagtcttatcctagaataatagtcct

SEQ ID NO: 25790 - DNA, 436 bp, Glycine max
gaccttaaatctcagctttgcagctggaatattatcctatctccgatgttatgggtgggtcccgtccaggtagtcccgaagaagactggcctcacagtgatcagaaatgagaaggaggagttgattcctactcgagtgcagaacagttggagagtctgcattgactataggaggctgaaccaggttaccaaaaaggaccattttcccctgccattcattgaccagatgcttgaacgcctggcaggtaaatcccactactgtttccttgatggtttttctggttatatgcaaattactattgctcctgaggatcaggaaaagaccacattcacctgccccttcggcacttttgcttataggaggatgcctttcggcctgtgcaatgcccctggtatcttccagcagtgcatgattagtattttcagtggatttttag

SEQ ID NO: 25791 - DNA, 366 bp, Glycine max
  unsure (1)..(366): unsure at all n locations
agcttgtcggccgcgattgacgaagtgcacttatgacgacgttagtctctgcgtgctatcaggcttttcgtcttacagatagcaaaaaagaatgtttatacggataaccacttgggtatttccgcccgtcaacgtgactcaaatgtcagtatgacaaatcttgtgagcgtggaagatgacgtaaatcttcgcgtgtcaacggtcttgtcggccgcgattgacgaagggcgcagaagacgacgtcagtctctgcgtgctatcaagcttttcgtcttacagacaacaaaaaagaatgtntattcggatatccactctgggaattccgcccgtcagcgtgagcgtggaagatgacgtaaatctccgcgt

SEQ ID NO: 25792 - DNA, 375 bp, Glycine max
ttcaatacccactcatcacgtttggttcattagggaacaacaccatatctaaacgcgccgcatgggatccctatcgcaccagatccaaatctagaacgatgggtgaacactacgagacgcaagaacagacgaaagccgacatgtcggctctgaaagaacaaatggcctccatgatggaggccatgttaagtatgaagcagctcatggagaagaacgcggacactgccgccgctgtcatttccgctgacgaagcatacccgactctattggcaactacgcaccattctcccttaaacatagtaggacagtgaagggacacactgtggcacgatggcagacctcacctgtgatacaaccgagcggctaacccttatg

SEQ ID NO: 25793 - DNA, 380 bp, Glycine max
agcttaatctgttcaatttatgctatatatttatggttttaatttctaacatgtctcatcatgtgaaatattattgggcttgaaacacggacaacaaacgtgccccctaccttgtgctaaaatcacaattcaatcagaagaatgggggcaatgaggatcatactctagatcatgtggccatagaggcaccaatataatgttatggaccatttctcctaagagcttataatgttaagtgatggcacatgaatgatcatatatatatatatatatatatatataactccactttgtgagagaagcacgaataatatataaacatgttgctataaatgaaacctgaatttctaattcttcatgcagataagataacccttgag

SEQ ID NO: 25794 - DNA, 419 bp, Glycine max
tcaagaattatggcctcatcaaactacttgtttccctgggaaattctataaatagacctcccgtctttaatggagtgggttaccactactggaaaacccgcatgcaaatctttatagaggcaatagatttaaatatttgggaagccatagaacaaggaccttatgttccctctataatagccggaagtgcaacaatagaaaaacctagagcagattggactgaggaagaaagaagattagcacaatataatttaaaggccaaaaatattattacatctgccttaggaatagatgaatactttagggtttcaaattgtaaaagtgctaaggatatgtgggatacactacaagtaacacatgaaggcacaaaagatgttaatagatctaggataaacactttaactcgtgaatatgaactt

SEQ ID NO: 25795 - DNA, 376 bp, Glycine max
agctttctcataagtcctaaatgacttttcattgctatgattaactcactttaacctccatttaccacagaatctagatttaaccttccaactctcaaggcctcactctttttccactcataacaccacattctcactttctaaccctaggttaactctacccttcatctctaacagttttccataagcaatttcagcacataaacatcacaagcatcatcataagaaccctaaaactgaatgggtaagcttaactcatccaaacatggcaagttcaacatgctttcaacaaatttcttcacaaataactatcatgaagcagaaaactagcaaaactacccatcatatctcccacaaccccatacccacgaaaatc

SEQ ID NO: 25796 - DNA, 407 bp, Glycine max
tggactgagctagagagaacaacaaatgaccaatgtttaccaagagccatttctagggcaaaattgtgtgtggaggagtcaaattttgattcggtggaattttaggtgtaaatccagtttgagtaagtttagattgatgttatagacttgtgtgaggtgagagtttgcttcaaatttacctcattctcaatttcacttctcaaacctagaaaatctattaaattgaggggtatgggacacctagattttgtgttgctgtgttttgaagcttgactttggtttagacatgattgatacatgatttgggacttgtatgatttgatttgagcaagattggatgaggggaagtgtggttttcgaaatctgcactttatgcagaattttgctgtgaaattgtgcagcagaat

SEQ ID NO: 25797 - DNA, 323 bp, Glycine max
agcttatcgtaatcgattacacaattgttattttgagactatgattgaatcattcacgagtctctgctttaattaattaccatgtgatataatcaattacttctctttctataagtgtttcataagtgaccaagaacactttaatcgattactttgaggatctaatcgattacattattcttgagaggtttccagttcttgggaagaagactttaatcgatcgaaatgataatataattgattacactgtagatttaaatgattacaagctggtataacctttttctctctatatacccatcttgggatctcacttctatgca

SEQ ID NO: 25798 - DNA, 433 bp, Glycine max
  unsure (1)..(433): unsure at all n locations
ttaaaatntgaattaaaacgtgcaataatggcttgnattcgattaccatatatgnggaatcgattacacggtgcaaattttgaattcaaattttaatagctgttgtaaatcgtttttggccactggtaatcgattacatcatctggtaatcgattaccagagagtaaatctcttgaaaaatactttttaatttaaatttcttggccaaaccttttgctacttcaattggaattcccttcctatttaatatacccttcctaagactctagagactgtcttgatcatccatcttgaatatctataatttctttgtcttgaataaatctttgagaagcatgtgatccatgtgatcctttggcatcatcaaaaacattcagcttgatcctatgtctacagttntgatgataacaaaagtgatgacataaagctcaaa

SEQ ID NO: 25799 - DNA, 343 bp, Glycine max
  unsure (1)..(343): unsure at all n locations
agcttgcctcanagaggtccaggattgtcatgtagccgaaggaactagttccgctccggagtatgacagtcaccgctttatgagcgctgtacaccagcagcgcttcgaggccatcaagggatggtcgtttctccgggagcgacgcgtccagctcagggacgacgagtatactgatttccaggaggaaatagggcgccggcggtgggcatcactggttactcccatggccaggtttgatccagaaatagtccttgagttttatgccaatgcttggccaacagaggagggcgtgcgtgacatgagatcctgngtaaagggtcagtggatcccgtttgatgccgac

SEQ ID NO: 25800 - DNA, 353 bp, Glycine max
  unsure (1)..(353): unsure at all n locations
tctnccgctatttgctataaataggggatgatttgttataaaaagggttcagccccttaggcacttctctctctctcgaaatagctgaggaaaattagttccgtgaagaaaattcaagccgaggcgcttccgtaacgtttccgtaacgtttccgtgagtaattacgcgaagattctcgaccgttcttcaagattcctctttcgttcttcgttgtctgcagtcttcaacgagtaagtaccttaaaccaagcttttcaattcattctatgtacccgatgtggtccacattttgagtcatgtatttttattctcgttttcatttgcttttgataccccctcttgacgtgcttaagc

SEQ ID NO: 25801 - DNA, 395 bp, Glycine max
agcttgtctcagcgtttatgcgatatggtgaccaacaagctagctatcatcgccaagtaccaagaagagttaggtctagccacggcccacgagcataggatcgcggacgagtatgctcaagtatacgcagaaaaagaggctagaggaagggtgatcgactctttacaccaagaggcaaccatgtggatggatcggtttgctcttaccttgaacgggagtcaagaacttccccgcttgttagccaaggccaaggcgatggcggacacctactccgcccccgaagagattcatgggcttctcggctatggtcagcatatgatagacttaatggcccacataattagaaatcgttaggaaacttgtatggtctctcagaccttgactagatacgactt

SEQ ID NO: 25802 - DNA, 385 bp, Glycine max
  unsure (1)..(385): unsure at all n locations
tcttagttntagatgatgcagatgatttttgtttctacctcatgcactcctctaatgactatggcatcatttctggcgctaaactgctgggagttggaagccatcttctcaatcaagtttctggcttcagcaggagtcatgtctccaagggctccaccactggcagcatctatcatacttctctccatattattgagtccttcattaaaatattggagaagaagctgctccgaaatctgatggtgagggcaactggcacatagttttttaaatctctcccagtattcatataggctctctccactgagttgtctaatacctgagatatccttcctgatggccgtggtcctggaagcanggaaaatgttttctaagaatactctct

SEQ ID NO: 25803 - DNA, 384 bp, Glycine max
agcttccttaagaagatcctaaagtagcttgagcttagctacacatacctctctaatagctaagctcacctccttgagatgagaagctagagcttagctacacacccctataatagctaagctcacccccatgacaaaaaacatgaaaatacaaaaaaatgtccttactacaaagactactcaaaatgccccaaaatacaaggctaaaaccctatactactagaatggccaaaatacaaggcccagacgaaggaaatacctattctaatatttacaaagataagcgggctcatacttagcccatgggctcgaaatctaccctaaggctcatgagaaccctagggccttcccttggatctctagccaatctacttggagtcttct

SEQ ID NO: 25804 - DNA, 428 bp, Glycine max
tgccgcagcaaggttgcttcctccatttcaacagccttatggaggaagggtctggaaggcccaagtgggccagattgctatttgcacccccccctttttactaaatgcacctccctatatttttttggtaattctttttccgtaacgttacgaaactttacgaatttcgtaacgatacttatttcccttccgcaaggttacgaatccttacggattatgtatttacccttttttagctttcgaagaagttacggaaactcacggattgcgcaaaaacatctctttttgacttccaccacattacgaaatttcacggatcgcgcaagcctgcttccttttgatttccgagacgtctcgggacttcatttactgtgcaacaaaggacaccaagtacctcaaagcggctaaccaaagggtgcatgtcatca

SEQ ID NO: 25805 - DNA, 443 bp, Glycine max
  unsure (1)..(443): unsure at all n locations
nttgtttcctgctaatggctaatactatatctaaacttatctgttgcttatactataattaataactgatgtaatttcaacatcatcacaaaccaaaacaatcaatcctgttttggagaagtatttttcactttagggttttcctttgaaaatattgccctttccccaatactatcaacttagagcatctctaaggctaaaactaggtctcttttaattgaaagtttccttacattaataagaaaatttgcacccctaagttgattacaaacagttctatattgaacatgtacaagtattgttttacctatatcaccaatggcccaaatccataaatatgtatgtgacaccctctacccctcacatatatactaacaaaggaataaaatttcaaatattaaataaaagtatttttaaaacatttttaaatacaagcctttcaa

SEQ ID NO: 25806 - DNA, 387 bp, Glycine max
tctgagtcacctgcggcatgcagctatccttatagctgcctccagactttttctccgtgccctccggaagatttaagccaagcccttacttttgaggggcaactcccgccttatgacgattatcccgggcaagacgatgaggaaggagatacccatctcggccccctgctccacctcaaattcccacatgaactaccccaactgaacatagttcgccatatcccggcctcacccacacccgtaaaagaatctgttcccttcgcagaagataagggaaagattgaggcgctcgaagagaggttaagagcagacgatggccttggcaattacccattctcggatttagcggatttatgtctcatgcccaacatcgtcattccttccaag

SEQ ID NO: 25807 - DNA, 438 bp, Glycine max
cgagaatggagaattgcactaagcaatcactacgcattgcttctaactcgaaggtggaggacacatgaacgaaaacacaattcatggggctccgaaaaaggggttgagaatggagaattacactaagcaatcactacgcatagctccaaactcgaaggtggaggacacatgaaagataacgcaattcatggggctccgaaaagattgagaatggagaattgcactacgcaatcactacgcatagctccaaacgcgaaggtggaggacacatgaatgaaaacgcaattcatggggctccgaaaagattgagaatggagaattgcactaagcaatcactacgcatagctccaaactcaaaggtggaggacacatgaacataacgcaattcatggggctcccgaaagattgagaatggagagtggcactaagcaatcacta

SEQ ID NO: 25808 - DNA, 346 bp, Glycine max
agcttccagtacttaaagcagacatacttttatgttgttcctaacaatatctttaaatttgaagtcgaaatattgatattagaaaaagaatctagatcattattgtctcttagccttgactacgtggcttgttcccgtagtcataaaatcccaaatcactttggaattgaggccaatgataatgtatataaggcatagattctctatgacacagcaatcatgtatagtccctacaacaacatattagcctttcataattaacatacaaatatatttttatactcttattgttaataaccattagaattaaattcaatgatcaaaatcactgtcgcaggagcaacat

SEQ ID NO: 25809 - DNA, 439 bp, Glycine max
  unsure (1)..(439): unsure at all n locations
tccncataacccttatagaaagtctcttcaatgaaattaactgtatagtacatgatcgntcactcattaagcgagaagtacaaaataaatcacattgattttttgttcaaaagtaccaagtaaaattttcggcctttccttgttctctgtccttatctcgggtataaggttttattcaatagagaaccctttcttctgtgcctatacgaattgatattattccattccaatttctattggtaactcacaagaaaaaactcaaattgacaaattagagcgagctcatccatgcagtcatgcaaatcaagcatcttcggctataatggaaaactatctgccagaagagcccattacaaccaattgagttaacaaccaaaaaaataaaacttgagctaaaaaccaaataaacaatacactgcaagcagttaccgaaatcacc

SEQ ID NO: 25810 - DNA, 284 bp, Glycine max
  unsure (1)..(284): unsure at all n locations
agcttccagattagtgtaccaaacaaccgctgntcttctctgctatcttggaaaaagagtataaacaacttttcatctgtagagagcgcgcgcatcttgcgacaatacatcttgaggtggttcttatgacaagttgtgcctttatacttgacgaaatcacgcactttgaattatggggggatgactacatacggaaccaatcaaacatccgtcatgtctgcgaacggataatcaccaaagccttcaacagctctcaatatcttctcgaggagatcgagtttcct

SEQ ID NO: 25811 - DNA, 418 bp, Glycine max
aaactcagctatgaggtgcttgactcctagcctcgttggaagttttatattcccgagctttcacttgggtgtcgttcttggtgacaattgcatcagggaggccataccttcatatgaggtgttacgaggtaaacttcgccacctcgttggctatgatttctcatagtggtcttacctcaatctacttggtgaagtagttgatagcgactagtaaatatttgattgctcctagggcttttggctatagtcccattatgtccattccacacatggcaaagagccaaggggagcttaagctgtggagattgtcaggaagggtgcgtggaatgcttgtaaactcttagcatcgtctacatttctttgtgaaatcaagggtgtccatcctgagtgtcggccaatagtagctggcacacaccac

SEQ ID NO: 25812 - DNA, 347 bp, Glycine max
  unsure (1)..(347): unsure at all n locations
ctctnttctctctgtcacactcagctctttcttcatttttattcctcttaccactatcgtgctcgacttgntcttgcacaaatcctgcggctcggccactatagaacatcatatgaacgttgacaactcgatcagaacatggatagactccaatgcatgatgaatatcgagctatggtctaatatttcaattgtgtgaatgctcatctttttctttaaccctattttcaatgatcatgattataaataagttgacgattgaaaaagaattaagctatgaatttatttcctaattttgaaattgaatcacaggctattcggatgatattctaacctaagtcgcgatct

SEQ ID NO: 25813 - DNA, 429 bp, Glycine max
agcttggccttagttgggttcatttatgattggtgttatgatttccacaatagactttgctctacataatttggaccatgtatcattcataatggataacttttgacatgtgtatacacttatttttctttgtatacgtgtagtaaattatgaactatatgaactatgtgtcagttgtcagaacattaaacaaatacgttctcttaaaattttaatttgttgtaggaggaaccaattcgttgtaggtggaaccaattcgtaacctatttgcagctctctttctctcaagtattggaatgatcatacatgtttacttccttgtatattggttgtacctctcctattaaatgtgtggccatacaagaaaacatacgatacaaaatgattgagtagacaagatattagtccaatattatctattagtctata

SEQ ID NO: 25814 - DNA, 427 bp, Glycine max
tcatggtgaatcaaaggtgattcaaaggtgttttgattattacaatgatgataacaaaagatgatgacaaaggtgatgacaaaaagctcaaagatcaatcaaagaacaactcaagtgaatcaaagatcaatcaaagaacaactcaagtgaatcaaagatcaattaaagaacaactcaagtgaatcaagaacaattcaagagtttaagataagagtcaagaagaaagtttagagtcaagaatcaagattcaagactcaagattcatgaatcaagagaaggcttaatcaagataagtatgaaaagtttttctcaaaaattgagtagcacatgatttttcttaaaacatgtttaccaaagagattttactctctggtaatcgattaccagattgttataatcgattacctgtagcaaaattgttttgaaa

SEQ ID NO: 25815 - DNA, 394 bp, Glycine max
agctttatctagtgatgacccactttattcttttgttttataggccagctttcgtcacgatatttttaagaagtactattatttattgatagtgttaactaccaactaactaaactacttaatagtgtgtttggacaagagaatttaaaattctgaggaattttaaatgttaagaattctaatgacttctattgaaattcttttatttttaaaattttatgtttggataaaaaaaattaacattgtgtgggtgaaagaaaatgagtcgcgagttcaagaacgaaattccgaaaacttttaggtaggtgtaagagaggatgaaagttataaaggagataagatcacgttttggagagttctctcaagagaatttcaatgttctaccttttaaaag

SEQ ID NO: 25816 - DNA, 421 bp, Glycine max
  unsure (1)..(421): unsure at all n locations
tctaatgtctctccaccaatgagaataggcccttctttctctattatattgaaattctgaccagccaccatatttagaggttaaaactctaacctatagctgatgctgatcagatgcaaaagcccataaccatctacccaacaaagctaagttgaatttggagatatcctttatccccagtcccccatcagacttaggcaaacaaatatcatcccatttcacccaagggatttttttatgatcaatgtctccaccccacagaaaattcctttgaagggatatcagcttattgacaaccttttgaggtattttaaagaaagaaaggagataaattgggagggcattgaggacagaatntatcagagtaatcttccccgccatggatatatttttctgagcccatntggctaatcttgatttg

SEQ ID NO: 25817 - DNA, 384 bp, Glycine max
ggatcttaagcaccgcggctgcagctgaagcaactagatgcattgtttatttggtaacccagttggccttgaatcagaaatctatacctgtcgcaagagtctgtggtttatgctcctctgctgaccaccatacagacctttgcccttccatgcagcaacctggagcaattaagcagcctaaagcttatgctgcaaacatttacaatagacctcctcaacctcagcaacaaaatcaaccacagcaaaacaattatgacctctccagcaacagatacaatcctggatggaggaatcaccctaatctcagatggtctagccctcaacaacaacaacagcagcctgctcctttcttttccaaatgtgttggcccaagcagaccataca

SEQ ID NO: 25818 - DNA, 440 bp, Glycine max
cttgaaaagtgttgtttttcaccttttcgctaatccattctgctggcttagcgagcatccgctaagcgcaacactcatgggctaagcgtgaggaagactctggaagaaaatgagttgtacaagttcactaagcgcaccacttcatctcactaagcgcattgcttcagtccatccgctaagcgagaaaggcacgcacttagccaaaattcactaatgtgcgctaagcggtccataagtgcgctaagcgcacgagcatgaaaaggccacctatttaagcctgaaatcagattttagaggtggagtttggactgggattcagagctttgcatgtctagagattctagagagagaaaggtctaagttctagacagttttgagagattttgatgtgtgaagatctgcagagactaagcttgaagcaggacccggtttgagagctt

SEQ ID NO: 25819 - DNA, 349 bp, Glycine max
  unsure (1)..(349): unsure at all n locations
tcacccgttgtagtttgaatatcgatgaagaacgaatgaagaacgncgaagaacggtagaaacctctgcgagattcctcacggaaaacgttacggaaacgtttcggaagcgcctcggcttagattctcttcacggaaacagtacttccaagcaaattcgaaagagagagaagtgcctaaggggctgaaccccatccttctgcacttcctcccctatcgatagcaaaataggggaggaggctgccgcccagctcgcccaggcgagcagggttgcttcctccagaagcaaccgccttctggaggaatattccagacggcccacgtgggactgggtgctaattgcaccccca

SEQ ID NO: 25820 - DNA, 378 bp, Glycine max
tgcatgatttacattctccccctttctaagcttatttttcttttatcatcaaaatctgcatgatttacatgcttgttgttttggctcaaaatttgttctataattggtgcctagtttataccaatcttagttttgaaatttcaattgaaaattagtgtgaaaacaagtgccaaaactagatgtttcttgagtcttttttttttgttttttttttttactttaatctagagccattctaagtttctctttgagtcctagcttgcttttatgttcttttcattgctttaattgttgaatcatccttgaaaatttgtcttgttaaaactatattggtttagctttcatctcatttttttggtcttcggttatttcttgtct

SEQ ID NO: 25821 - DNA, 370 bp, Glycine max
  unsure (1)..(370): unsure at all n locations
agcncgaaaactgnnncanaaagttaattttctttcataccggaaaactgaggggatacatctaaaaaaaatattcatttcttattcatttgattcgtcaatgtgtatcaaagcacctaaaaagtgaaatattctctttttatacatttaatacttataaaaaaaattgacacttttttttatcattggaaaaaaaatattaattaactgtctttcttttagaaaacatagaggagtgaaaatgaagactttaaatttcgatggactaataccaaaagattgattaacatgattgaaaaatatattacgtatccctattttatttatactacaatactgcaatattcatgaaacttattatgtgaatagt

SEQ ID NO: 25822 - DNA, 371 bp, Glycine max
  unsure (1)..(371): unsure at all n locations
tgcaggaatgggctgagcaggaccaccaancataanttttgcttctaaccaccacccgaagcaccttctggaagaattctgtctaaacttcgggaagcatccaaacctcctggacgaaaaggacgattattgatgcttcctctaacaaagtcctttccataactgcacggtaatggcccagattctacagctcctgatgtcacatctgctacatccacctaatacaacattataggcactaccgatataggagacataatcaattaatagacgactctaagctaaatttgttctgactgttaaccaaactctccgacacagatgtcgaatttgcaatgtcatttaacctccccccacctcctcaaattttg

SEQ ID NO: 25823 - DNA, 344 bp, Glycine max
  unsure (1)..(344): unsure at all n locations
agctngcttgtggagcttttatgtatgctgtatctttcagctttaatgaggtccttcaatggtgattttccaccatggagatgtagtggaaggcaaatgagaagaggagaggggaggcaccatccactacggaataagccattgaagaaggagcttcaccaccaagaatgtgccttggataagaagcttgaagaggatgctttaatggaggaaaagaaaaagagaaggtgggagcacgaaattgaaggaatataatatggagagaagtggaactttgaagtgtgtctcataagactttcattcatcaaagctacaacaagtgttacacatgcttctatgtgtag

SEQ ID NO: 25824 - DNA, 399 bp, Glycine max
  unsure (1)..(399): unsure at all n locations
tctcccgcaattttctataaatagggtggattgtgatttagaagagagttcagacccttaggcacttctctctctctcgaaatcgctgaggaaaattagttccgtgaagaaaattcaagccgaggcgcttccgtaacattgctgtcagaaattacgcgaagattctcgaccgttcttcaacgttcatcattcgttcttcggtttcttcagtcttcaacgggtaagtacctcaaaccgagcttttcaattcatcctatgtacccgtggtggtccacattttgtttcatgtatttttattctcgttgtcatttactgtntatacccccttttgacgtgcttaagccatttatttaagtcatttctcgcttaatctaaaaataaaataaatttgcaccgatc

SEQ ID NO: 25825 - DNA, 442 bp, Glycine max
  unsure (1)..(442): unsure at all n locations
agcttctccgagtaaacacttctctttgcatgcatgactgttaggatgataggaaccattgcagcagacaaatgcttaagtgtgtgaccactgacaatgtgaaacgtcagtaaataaatcactctatcggcggcctcttgcagcatagctagaacataaaatcctgccaagatttgaaatttgaaattgaaggtaattgaaaagagtatctgcattacatcgaaacagctattatacaataccaaaagtgcaaacctgaagcccagagccaatatgctgaatgcgtgtacattggaggcaataaagtagccatgagaggtatggcaatgcatgatgcaccttgngccagaacatataaacggatgtcaccaaagaaccttcattataaaagaataagtgagaaaagtatcaactattctcaagagctaaagttcagtaaact

SEQ ID NO: 25826 - DNA, 429 bp, Glycine max
  unsure (1)..(429): unsure at all n locations
tattgctatcagtcatttctggatggtattgagcattttgcgatggttaaagtaagcagctcaccaatgtttgcatgcttaacacttatcagcatcttcaactgcaactgtcaaattacaattttctttaaataaatgtgcacatgtcataatttgatttcttggctcgtagttggcgtgacatataatccttggttagtaatttttttgttgaattaaagatacaacgaaatcaggttctaagtacttggattgatcttcaatcatgtttctagagaaaataatgtttacatctttattgcccgaggctgtgctctgcctcacgaggaggattcggacctttttttaatccaattaaggaatcctgatacaaatgcactacaagctntgatgactaanataaaaaaatagtcagatttcttgagagat

SEQ ID NO: 25827 - DNA, 458 bp, Glycine max
  unsure (1)..(458): unsure at all n locations
ccggatccttaagcacctgcggctgcagcttgatgcaacattgnagaggttattatcatcgagatgatgcgctccatgagaggttggatcaaatggagaatagagatcataatgaagaagaaaggaggagaagagggaatgatggtgttcctagacaaaaccgaattgatggtattaaactcaacattcctccatttaaaggaaagaatgatccggaggcctacttggagtgggagatgaaaatagagcatgttttctcatgcaacaactatgaggaggaccaaaaggtgaagcttgccgccacggagttttccgactatgctcttgtgtggtggaacaagctacaaaaggagagagcaagaaatgaagagccaatggttgatacatggacggagatgaaaaagatcatgaagaagcggtatgtgccggctaagtactcaagggacttgaaattcaag

SEQ ID NO: 25828 - DNA, 424 bp, Glycine max
tcaccggatgacgccgatcgaacatttcctaaccgattgcattgctatttcgttcagggattgaatggaaaactcgttaggcgacatctgtcgtgaagtagcgaccgatatttttcagccgacatcgcacaattctttttagaaaagctcgctggtcgataatggtctttttacggcagagtaagttttcttgctttggtgttgcataaaaaagttacaatgtacttcggctaggtttttcgtgcgagttcaaccgacattttgtttcggccaggaaaacattagcccacctctgcaaaaaaaatatttgctaaccgtcttcatgcatatttcattcaacgattgaatagaaaactcaatagccgacaacggtcgtgaaatagtcccgactgatatttgtcagccggcattgcgcatttttttt

SEQ ID NO: 25829 - DNA, 381 bp, Glycine max
  unsure (1)..(381): unsure at all n locations
agcttctaaggttgatagggcaattgtgcttggnttcttggatgtccaagataccagtgattntccaaggaattgacaagcaccactggtgccttttctttctacttaaccaccagcaaaatcaatatcacaatatcctacaaaattaaactcagacccttttcttataggccatgattactagttccaatatgatatcttaaaattcttttaatttcagtaacatgacaaatttttggacaagattgaaatttttcacaaagacaaacaacaaacacaatatctggtctactggcaattaaatataataaggaaccaatcatacctctatacttatnttttgaagtatcattacctttctcatcctcatcaatgaccatg

SEQ ID NO: 25830 - DNA, 422 bp, Glycine max
tccctcatcatgaaattttctttcttgaaacatatttgttgtatcaccattccacaactttttcagatcatcaatcaaaggttgtaaataaacatcaataccaattgttggattaaatgggttaggtacgacacaactcacaaacatataagttttagtcatacatatttctagaggaagattgtatggggtaacaatgattggccaataagaataaggtgaagacgatgcttaaatatatgggttaaatccatttgtgcataaaccaagtcgcacattttgcgtatcaatagaaaaatctggatgtacccgttcaaagtgcttccagacttcatagttagagggatgacttaacatgcctgaagatcttctattctcatagtgctatgtcatttcgcttacagtttgcatgggtgcaaata

SEQ ID NO: 25831 - DNA, 440 bp, Glycine max
  unsure (1)..(440): unsure at all n locations
gcattatttttttcctccatggcccttttcccacgtaaggttcntttgatncctaaggagcanctttgaatgttatggttttataatataagacctttttggtttttctctccattggtgttgtcccttctgtcaatgggggcagtcacggataaaggtaagaggaacagcaataaaggataataacaaaataaatgaataaatatggtaatcatttaagagtaatgaatcgcaattgataaagattgatttgtgactcaaattttgtgacttttttactcaacaaaaaagtactgaattttttactattaattttcttgcttgctaaataaaagacattcaatgtcttttatgtgaatttgctgctttcaaggatgttgagggaatattctcagcacagttatccaattggaaacagtttaacttctggagctgatgac

SEQ ID NO: 25832 - DNA, 330 bp, Glycine max
agcttgaggttaagattatgcccaagaggtttatcgtgatggatgaatttattcacagattccttagtttgatattgatgtgtgcaaccaagtaatatataaatggtatatatgttttaagtctttcagttttttttttttgaaactgatcttttagtctttatactcttaaaaatatgatgttaatcttcatgttctagtattctaattacatttccataaagatattagaaattgaccaattacagaaaatacgatgactgatatgttcgtgtttaaaatataaactgagaccaatgttatctgaaaatatagagacctaacacacat

SEQ ID NO: 25833 - DNA, 433 bp, Glycine max
tggcaaccgcattgctgccattgagagactcagatttttttacagacatggctgctgtgtgatcagcagccagaatagtttgtgaaagaaaatgtggtacagtaagtaccaaacgaattatgaaactgtgtattgtatctaactcttttataaggctaatgaattacaccaagacaagtaacatggtactccaatgcgtgtaataatatgctttcattgactttagactttgtcaacactttttaggaaggattccttaacaagtttaattaatgccttgtactattcaaattgtaatttttctaatttggttcttccttttttaattttccttttgtctgagagaagagaagtaattatttcattattaaacaaatacaatatgtttattttgtgtataggatgaacatagtggtattgaatataataaatg

SEQ ID NO: 25834 - DNA, 467 bp, Glycine max
  unsure (1)..(467): unsure at all n locations
agctntggctgcgcacgagctccgattttgtattatttatagaagatgacgcattgtaatcgattacaggtattggtaatcgattacaggcccaataagccttctggtaatcgattacaggatgttgtaatcgattacaggctgcctgttcaagtgtaatcgattacattgagtggtaatcgattaccagagcctatcctaggctagtttctaagagaatatctatatttatgctcaaatacatcttatatgactaattttcactactaatacactaaattcaatcattcaattactatatatacaagagatcataaattctatcataaaaaacaagaattcaaacaagatcaaacaaaataatctacaatcaagaggtaaaaagtaaatcaaccaatcaatcaaccaatcaatcaactaatcaattgctatttttctaaatctcttacatctaagagacctaattc

SEQ ID NO: 25835 - DNA, 428 bp, Glycine max
  unsure (1)..(428): unsure at all n locations
taagctccttcaactgcacaaggctcttaatatttgtgagtatccttatggaaccttcacccgatgaagacactaacaaaaacttatcttctcctttttggacaaagtatgacaagttgggggcaagtaaattttcttcccatcagaccttggatgcaactgtgatcgtatccccatctcagctagatcttgacgagtattcaagccgtccttcatcttgtcttgaatgttaaggagcgtcccaatcacactgtcacatacatttttctccacatgcatagcatcaatacaatgtctaacgtctaaatcagaccaatagggaagatcaaagaaaatggacatcttcttccatatgcaagtcatacttttatccttcttttgggtctttccaaatacagtattaanggtgtgaacccactggtatacct

SEQ ID NO: 25836 - DNA, 571 bp, Glycine max
  unsure (1)..(571): unsure at all n locations
nagcggacagcaactaacganaaggcgcgaccgaaacaaaagcaacacaccccccncncagccgcgctattgatgcatgcaggacggcgcaccaacagcaaccgacgcgagcacgcagcncgaagacagggagacccattaatgcgggacgcgcggcggacgggcagagggcgcacaacaagacangcacacccacaaagcgcgcgaaaacccaccaacaccggangaccaccnccancggaacacacgaacagccacgaagcccaaagacacgacgcgcgcaacaccgagaccccaacaggacgcccaagcggacacagcaaccaagcaaaacaacaggcacacaggacaacaccgacacagacgacaaacacagcaaacgcacaaaacacggccaaaacaccaaccagaaacacagcgggaaccacgcacagaccgcaagaacaagaccggagaaccacaacgaagaccgacggaccgacaacaaaagaaaacaggaaagacacancgcaaaggcagcacacgaccgggggaacaacagccaacaaccgaacccaggcgccnaggagcn

SEQ ID NO: 25837 - DNA, 436 bp, Glycine max
tgtcgggttcagttataattaagcgctcgcgttatcttatggactgagcgaaaaggctcacgtcatcaaatactacgcatcttttaaagcacacagcgaggatcggaacctcaaccctacgttcttttaaaagactgtgaggagaaaatcacagaggacaggaatccctgggggaaaccaagaggaacacacaaaaataagaacatgccgcaacttccttaattgccctagatcttaagcgtaatatcgcttgacaacgtcggagttcacgggtgaaggtagctcctcatcatccatgttggcgagcactacggcccctccggagaaagctctttttacgacgaaaggcccttcatagttcagggtccactttcccctattgtctttgagggcttgggagactatcttcggcaccaagtcaccttcgctgaacctg

SEQ ID NO: 25838 - DNA, 376 bp, Glycine max
  unsure (1)..(376): unsure at all n locations
agctgtcacatggatgnccganctttttcttattatatcgagacgctcgaaatcgaacaacggaagctctcgataaattcgaatggtcataacatttcactcggatgtccgattcggggacataatatatcgagacactcgaaattgaacaacggaagctctcatgatattcgaatgctcataacatttcacacggatgtccgattcggggacataactcatctagactctcgaaattgaacaacggatgctctcgagaaattcgaatggtcataagatttcacacgaatgttcgattcggggacataatatatcgatacgctcgacattgaacaaccgaagctctctagaaattcgaatggtcataacatttcac

SEQ ID NO: 25839 - DNA, 380 bp, Glycine max
  unsure (1)..(380): unsure at all n locations
ntgtgtggagcttcaatggtgaatgagggaggtagattttcatcgtgagggagagggagagagagcttctgaaaatgtggggctgagtgaggagagagagggttgctttttggtttaaataaaagggttttctctttttctattattttatttaagcaatgccacatgtctccatttgagtggagcaagaagggcccactttctctttttgactgtgacccatattcagtcacaaaagtgagaaaaatctgacctttgaaacgctaaaatcctgcctcggtttgcgtgccgtttctttgattccagtttctcgcgtttctctgcgtccgccggggccagttttcgaaagcaagcaatatatatatcanaacgctcagaat

SEQ ID NO: 25840 - DNA, 374 bp, Glycine max
  unsure (1)..(374): unsure at all n locations
agcttaccttgaattataattctattattgtacttctttgtgagctgaatgattntgtcaataattgaaccctgaacctgaatgattatctctagataccttgtttagattctaggagagaatatggttaaaggcaaaatataccccaaatttgggggagtaaagtcagttagaatgcaaagaataaggtaaagcatcagcacacacaacaaataagttgtatgttaaaaaaaagagaaaagaaaaaaaaattgtgctgttacaataaggtcaaaagcaaattaagagaaaaagatagtgagaaagctacttgtatgacacaagatcatttggataagtctaggatttgtgctctcttacaatctaagcctttg

SEQ ID NO: 25841 - DNA, 418 bp, Glycine max
tcttcttcaccacctacgagcaccagtagccattacttaccgccgtaggtctccattgaaaccccacaccgagaggaacccttcaattggagcggaatcttctaaacttatctcgcagtttcgttagagaacgaagcccaacctgaccttcgtggttttcttctaggtaactatgactctatgcttgttccttgttagattcagcttgtatttgcatcttttcttactttggaaccaccattgtatgtttttacgcttcctttgaaaaaccctagagaaaaagactttgtaaaagttatctttttatgaaatgggtgttattttcgtgactggaatttcaaaatgatgctccttttgtagaatccgaaatgcccttagccttttcatgtagtgacatgagtatttgactcagaatatt

SEQ ID NO: 25842 - DNA, 411 bp, Glycine max
  unsure (1)..(411): unsure at all n locations
actcaagcttatgtttttgtctagggagaaaagagcctgntttgcatttctgcncnaaaagaagattggatcattgaagttgccactattgggctgatgtgcttgctagtgtttgggtttatggttttgatcatggttattgttattgcaacatcccaattctctcacgttgggaagtctgaactacaaattgtttgtgcttgttgataagcagtgtaaaaatattattcttagtgtaatcatagatataatacataaaaccatcattagataggaaggtgacctagatttaagtcttgagtctaagcaacagtggtttcgatacagataatccttagacaacttattaatctacaaaagtcaactatagtttacaaagacaaagtaaggatatgcttcattaatgatagt

SEQ ID NO: 25843 - DNA, 339 bp, Glycine max
agcttatcgtgacatctgaactcgatgtatgtcatgtctccatgtggggttagctgaaacatggatgctagggtggcaagcacattacccatctgattttcctctctaggaatgtggtggaaagagacctcatcaagaactcaatcagtttcttgatgtaggcctgatagggtatcaacttgtgatccctatgttcccattctcccctcagctggcgaattaccaaggctgagtctctgtacactttaagcaatttgacattaaagtcaattgccacttggattccgagggcacatgcctcatactcagccatattattcgtgcaatcgaagcccaatc

SEQ ID NO: 25844 - DNA, 417 bp, Glycine max
  unsure (1)..(417): unsure at all n locations
tgaagaagttttgtctnttacatgcccaactcatgtatttggcattcgtatcgataggcgtattgtgtgttgcatcttattctctatcgcttcatatgtgcatcatacatcatcatgtaggagtaagaagaaaggttctaaagttataaaatctcttcagtgtttgaaactctatcttttaatcgattataagctaatcataatagattacacaagtgtgtgtagcttccaaagaagtttcttgtatcaatttaatccgtaatcgattatacagctcatatgagacaatgattggtttttctggagcctttgctttaatcgattaccaagtgatataatcgattacttctctcttacaagtgtttcagaagtgatcgagaacactttagttgattacatcaagaatgcaatcgatta

SEQ ID NO: 25845 - DNA, 382 bp, Glycine max
  unsure (1)..(382): unsure at all n locations
agcttcatgatggtacatctttatcttaatttcttttgcacaatttagatcaagacactctcaaaatactcatcatctcagaggaatgggagaagttttgaaaaacctggtctaagactctatttgagtccaagttntccgtcctaattctatatataataacttatgttcatggagatcaactcattgtaatacctattttgatctggtattgcccctctgaaagttttgatcttctcttggcggttgcttttggatacattaccaactaaattggcattatatatgattatgctttgcgtaacttgacttgtgaagacattgatcactttttttttgtaagttctgtcataaaaatgtggtctttcttatatgcatggac

SEQ ID NO: 25846 - DNA, 433 bp, Glycine max
cttggaagattacagatggcaggagctatagttccagtctgattgagttggtaaagtttcacagaagttaccactgaacctgtgcaatacacaccagtccaattgcaaggagtcaaatcagaagaatcccagttatagagattgttgtttgggtcaagaagggaagctttgaacctcaaaagactcaaaccctcttcattaaccgaatttacaaggacaatgccaaggcaaaaaaacagcaccatgtaaaccccatttaggaagtggaaactactacactccaatgccatcatttctctctcagacaaaccaaaacagcacaaggggttggctctatttggccaagaagaacacaatagttgaaatgattaagctaacaaaaagagacaataagggaaaggtttcacagaagtagcaagtgttaacacgggac

SEQ ID NO: 25847 - DNA, 319 bp, Glycine max
  unsure (1)..(319): unsure at all n locations
agcttcacatggagctactttatttcgtcctatcattgcaaacaatacaagtgcatgctcttaaatacacttaggcatcatgccctcatacaccaattcaagtattaatttcttcacccactcaaacataacttggcatatgctctaggcaagcattggaatttactttagaagaagatctaggttatnctttgaaggagtatgaatataaagttacaaatatatggtctgtaataacattgtttcaactcatttgacataaaatcacaactattattagtatagtgaataactaggactttggttacagtttttggaa

SEQ ID NO: 25848 - DNA, 429 bp, Glycine max
tggtgtacaccttgtgttgtagagttttatgtgacattgattagcacttataactgggtgaagttagtggaattttgtggtttgtcaagaactagacgtagtctcaatggtagaaatgaaccaatataaatctttatgtcttatatgttttcattattattctgcttaaactgacctaggatttgaattttattttgttttggaaaactctttttttttttgcaaaatctatttccatcgtctgaaagtgtttcggtgaaaattttttatttgtcttataaagtttttcttcagacaataactttgttttcttagaaaaaggcttaaaaatttctaaagtcacaattcaaccttccttcttgtgatattttcctttagagttaggtaccaaagcttagcctttaatggttgagtacctaacaatgtcta

SEQ ID NO: 25849 - DNA, 374 bp, Glycine max
  unsure (1)..(374): unsure at all n locations
agctngntgagtttgccaagattcttcncttganatttactgctgcagcagctgcagctgcaaagtaaatggaatcaaattaattgcgagagtattttcaaaattgttgtccaagttgtttatatctcacgctatgttgttgcaactttatttatttaaaagttattttaaatttaaaatgtgaaatattaagaaagtttaagtaagttagttgaaaaattctgagttattataaatcttttgacttgatatgatcttcgattattcctatgaataaaaaaaataaaaatacaaaataaatgttactatgataataaagtaagagtcatgcatcttgagctgttatgtctgaaattaagcaaattctacatatt

SEQ ID NO: 25850 - DNA, 440 bp, Glycine max
  unsure (1)..(440): unsure at all n locations
tatgttatggtgcacctttataaaagttngcactcgttttntantgtgtcagacacaccccaagagttggttaatgagaatagttaaagaagaagacattgatgattcttcaaattcattttgtcttgcctttccttaaggtggagcgtggtggtgctcctctcactaatacacctgagggtataagatattttggttaaattggtcccaaaccttcggcatcatcagtcttaatctttcaataattaatctaaacaaaagtagttatggccatgggtttttctctttgttattgatacaaataattattggtccaaacaataacaattgtataacctcaaaaaataatcgcttatattctatgcaaaactacaatctgttaaatattattcattattcgtaacattcattttgtattcgtttgcgattattgacagata

SEQ ID NO: 25851 - DNA, 408 bp, Glycine max
  unsure (1)..(408): unsure at all n locations
agcttgcacctcctcactctcctcaggggtttcagtctcttcctcactcgaggtttttagcttcgggagacaatctagctcttgcatccgagcctttagccacttgtgatatctactgatgatcccattgctgcttcccttaagttctttatcctttcttagtgaccctntgaaatatccttgcattggggtcactgaaaccccgtgcgatgaagggtgtggtactttcttccgatggtgctcctctcatggggtagccaagttgtcttatggcaaggacgtgattataattgatataaccccttattcccatcaaggggacatttgagaatccctcgcatgaggacaaaactctggtcctttcttcctttcatcggnggaaccaactgacggatgcacctaccatac

SEQ ID NO: 25852 - DNA, 441 bp, Glycine max
  unsure (1)..(441): unsure at all n locations
tctagaagttggaatcttcattttgatgaaattatattatattttggattcataaagaacgaagatgaaccttgtgtctacaagaaggttagggggagtaggggtgttcatggtgtggtttggttcggtttttaggcaaaaagtcatccaaacccaacataaaataaagatgtgttttggtttggctcagtttaaatataacatcaaatctaaacaaaaccaaaccaatcatatttcagttttgcggtttttttatttttgtaatctattatcctaatttaaatctgtcaactaaacttacataattattatatatgctatataattttaaaaatgaaatttatttttattaaattttgtttaaaatgttttaactaaaaattatcttcacttctatttagcattgatantaaaataatttaccaactctttntgtaacat

SEQ ID NO: 25853 - DNA, 396 bp, Glycine max
  unsure (1)..(396): unsure at all n locations
agctnntaatattgataatntaccaataattttgattacggttctacatacaaaatgcctactttcacgaaattttacttgctgacaaaaaaagacacagacaaaaagaataacaggtaggcagtagttagtcaatgaatttcacaaaatcaagtaattgtagacttgtagttcattgcggatcaggatcaaaatgttttttttatttatttatatttaactccatccagagtctggactcaccaaagatcatgtacagatttaatacaatgcttaccaaagcttcaataatntcctccacagtttcgtgactgaaacatctatcaatagtatcaatcctgcatcagganaaanaaactcaagcagcaaattagggcaatcagactgactaacatg

SEQ ID NO: 25854 - DNA, 437 bp, Glycine max
tatcccaagcatatacaagattaccattttggtaatttcattttttctctcacactcacattattgataatattttaaaagattttatattgtaattcagttataaattataaatagataattttttacaataattattttaaaaaatatattaataataaattttaattaattaaaagtgtaaaaacctttacactaacaattatattcattgcggcataaaaaacaattatatttattaaactcaaataaattttatgagataaaacatagataactattattcatttaagttttacaaaagttaataaaataataataaaaatactattttcttattaaggtttattaattaattttttttaatttcagtttttcttgtgacttataagaatagtttgaagagatgaccgaaattaaaagttaaaactcataga

SEQ ID NO: 25855 - DNA, 438 bp, Glycine max
  unsure (1)..(438): unsure at all n locations
agcttctntntccattcaatactgcccaatatctattttaaaggataagaatgcattattatgaggttgttctttactttaaatttatttgtacattaggatgggaaccaataaactaatcaaacatctaatttcttacatcccatgggcggttttaaaaagattagtgcaagttggcttaaaaattcattaaccttatgagttctgtcttttaaaatctatttgttcactcaaattagtccattaaacttaattttaatctccctatgctaatttgcataaaaggtgaggcccctaaacccagttaattcatctcactgtcaatttatctcataatgagtaaaaatgtcaaagagaaataatattctaatcattntatgtaaataaaatcaaggatcttgcnagcagatctaacttattgacttattctatgcctac

SEQ ID NO: 25856 - DNA, 422 bp, Glycine max
tgatgccaaatggcccatgctttacagcatcaacattgctttattgtgagcagaactcttcctcagcttctgaagcctttgtagtcttatttatttctgagtttgaacaccactctccttggaccaacccattagatgatcggttaagaatcaaatcatcaattttctccagaaccacatcaccttcgccaaatgggcgcgcaaatgcggctccagtttccagcattgtatcatagtgtgacatatcaagcaattgggattcagatggatcagtgtcccagaggataagccacattgctgaagaacattagtagttttcttggtaaattgtcccatcctctaacacattactccataaaggatcttgtaagaatcatccagggtgaacctaataaatgaaagacaagagaaactaataacta

SEQ ID NO: 25857 - DNA, 471 bp, Glycine max
  unsure (1)..(471): unsure at all n locations
agcaaatgagcanaagaagataaaaatatagtctcttctngaattgaactaaaatatataagattgaaacaatataacaattnttaaaaatacaaagaatatgacatgaatttaacgttgttggcttgagtatacatggtagggataatttttctttgaatgactcgagatgcgacacatggaacatcgcttcgattgatctggttcttggatanttgttttggtgtggatatgagaggagacnaaaatacctttagaatttattttcttgtctatgttggggcagatcattggcttgtgacatgatggtcaatatgcttcgttgcgcaattctccaaanaatcttctatatacgtnggagacactntccaacgtatacacangaacgtatttgtagtcatgtattcatggtaaacatagctcacgtcattccaccactttgtcgtgtaacatcacatcacaacacaacat

SEQ ID NO: 25858 - DNA, 410 bp, Glycine max
  unsure (1)..(410): unsure at all n locations
nttgatctcgtttcgcttttgattttgccccctaaaattggtcacataaaccagataatgacgccggagaagcagatattgctggggcttttgcttgcgaagcatgtttcattagaatcagatgcaaacacgagcacaaacacaacaacctctctcacggtggaggatcggaccttgttggtaaaagaggcggtggcacaaggattgaagggggagaggaggtgctagggataaggatattttttaccatttgagactttttgaacaagaaacaaatgccctgatatggttgtacatagaatacagttgttattgtaagcccatatacaagtattttgggccattaaaaataggcaatgacccaagaatgtagaanagtaaaggtgcgacagtagaatagaagctgacac

SEQ ID NO: 25859 - DNA, 425 bp, Glycine max
  unsure (1)..(425): unsure at all n locations
agctntatcttttaagatctttatgtgcgattntcatgaaaatgatagatctcatccagcgcaagttgctgcagcccagatacgcacactgctatataaacatgaaggctgcacgagttctgtaccaagtccgggattgaagagttattttgtgagttttgggacttgagtgttttgtgagccaccttgatgtcaccctaacatcaagtgttggacctgagtgtgtagagttgatctctattgttcagagagcaatctctggtgtgtatttgatttaactgtaaacacgggagagtgattgatagggagtgagaggggttctcatatctaagagtggctcttaggtagaggttgcacgggtagtggttaggtgagaaggttgtaaacagtggcttgtagatcttctaactaacactattttagtg

SEQ ID NO: 25860 - DNA, 435 bp, Glycine max
ttttattgtaatcttgaaattcaggacaacactctgatttttgaaattttcgggataaaaatggtcattgaccagtcccttttccatgacttaaccaaattacctagtgacggtgtaccatttgaaggtacactgaatgacgactggaaatttgatttctctgcccatgatgcccgccagttggtttgcaccaacaatgcggatatgaccggacgtcttcttgccgggtcattggcttttgaaagccgcatccttcactatttaattgtgcgtattttgcttccacggtcttccaaccttgcccaggtttctgaggaagatctaattatcatgtgggcctttcatacagggcgtcaacttgactgggcacacttagtcagatatcgcatgcataaggcattgtgattacatgctccactaccatatccacagctt

SEQ ID NO: 25861 - DNA, 400 bp, Glycine max
  unsure (1)..(400): unsure at all n locations
agcttctatagaaggttcgttcctatttnctctacaattgcatcacctctcaatgagttggtgaagaagaatgtggcatttacctgnggtgaaaaacaagagcaagcccctgctttgcttaaagaaaagcttactaaggcacctattctagctcttcctgacttttctaaaacttttgagctagaatgtgatgcctctagagtgggagttggagctatattgttacaaggtgggcaccctattgcttattttagtgaaaaacttcatagtgccactctcaactaccccacttatgataaagagctntatgccttaataagagccctccaaacttgggaacattaccttgtttccattggaattgtcattcatagtgatcatcaatcacttaagtacatta

SEQ ID NO: 25862 - DNA, 434 bp, Glycine max
  unsure (1)..(434): unsure at all n locations
tgtgctatttgcaatcaaaattatgctttatttcntatcttcttatcgtaaagagtaaattcattcagttcaaattctaagagtacttcctagtcaaaattaaaatccaatttcatgaaactagtgatcaaatagaatcaaacattatgaatagaatgaaatcaccataaatgagtagaaaagattcatatatatatatatatatatatatatatatatatatatatatatcaaaagagatacataaggatacaaaaattacatccaatcctttgaataaactagctggtcattgcgtagagcacaacgtcaacaaaagaaatcatgaaggaagagattcacgaccacttcctttcctctttctctcccctagttgtgtgcttcttcctctggtttcttccactccttcctttcctctggtttatagaaaatga

SEQ ID NO: 25863 - DNA, 344 bp, Glycine max
  unsure (1)..(344): unsure at all n locations
agcttcagattcggatccataggactatctttatgtctacaatnctgcatgcctgtctcctccaaaatgtcgagggcgtacttcctttgagagatcacaataccatctcctgactgagccacctcaataccaaggaagtacttcaaatatcctaagtctttggtctggaaatgactaaataagtgctcctttagctgaataatcttagaagcatcattccctgtaatcactatatcatcaacatatactatcaagtaaacacattttccaggggatgaatgacaataaataacagaatgatcagcctcactacgtttcaacccaaaaagttgaacaatatgact

SEQ ID NO: 25864 - DNA, 324 bp, Glycine max
tttacactggagcatataaatgaggcatgctaattcttcttgaatgctaacaaagatgtcttttagaatttgaggaaaaacccaaaagtcaactatgatgggcaacaattatcttacaaggttacttttattcatatgcatatatctgaacattttactcagatgttcctttacaaaataacttattcttattcattttttgtttgcttttggtctatagtcaaagtatggtattgaagacaaaacaaagcttcttcaactggtatgaaagtatcccgaaggccttgttgttattgacctcaaagatgcttaccccactgtgat

SEQ ID NO: 25865 - DNA, 383 bp, Glycine max
  unsure (1)..(383): unsure at all n locations
agcttttgtaatttaatggagctaattntagtccctctgttcaaacattcttctttgcctttnttttttaaggaaaaacattctttgcctaaacacagtgaaaattaatattttaagagaaaaacacacttgatgtggtatgatatttgaaaataaaagtgaattatcatgtaaatgatttgtaatttattagttatgaaagtaaaatctctaatgaaaattgaacataagaactaaaataagtttttttttcaaattaaatatgggagactaaaaataaacatattntaaatttttgacttaatataaaagaagaataaaaaccaacaattgacacaagtaaaacgatgattgatctttgatatagaataaattatgttggg

SEQ ID NO: 25866 - DNA, 440 bp, Glycine max
taaagtacgcccgagtcattcatccctatgagtagttgttgaagtattggcgatcagaactgccattcgttggattatagggttgaaccaagctcatgcttttataaaaaggttcatcaagtcaagttgaaatatggaagtaaccgtcttgcaaaattggggcaaaagatgaatcgagtcacatcactgcttcgtctactgccaaacatatttaggattgttgatgtccttgttacttccagtttcaccttgacaaagatgtcatggaccatgttgaaaatctaaattgattcaaccccatatcctgtgtaaaaattcgcaatacttcaactgtacatcatttgcatacatccatgcttttcattggttgcattgctcattgcattctttccttgaaaaataaaataaaataaaataaaatgaacttaatcattggtatc

SEQ ID NO: 25867 - DNA, 433 bp, Glycine max
  unsure (1)..(433): unsure at all n locations
agcttcaagaaaaatggctctagtttactctttatttccagaaggaaattctatcaatagacctccaatctttaatggagagggttaccactactggaaaacccgaatgcaaatttttattgaggcaatagacttaagtatttgggaagccatagaaatagggccatatatacccaccacagtagaaagaattacaatagatggtagcacatcaagtgaaagcataacaatagaaaaacctagagatagatggtctgaagaggatagaagacgagtacaatacaatctataagccaaaaacataataacatctgccctgngaatggatgaatatttcanggtttcaaattgtaagagtgctaatgaaatgtgggacactctancantaacacatgaaggaactacacatgttaaaagatctangataaacaca

SEQ ID NO: 25868 - DNA, 429 bp, Glycine max
  unsure (1)..(429): unsure at all n locations
tgtgtgaatgattncaagctattttttgnttctgctttacgcactgacccttatcgcatctcgaggccatgtgctacatagactcaaatgccatttaccagtgcatgtgactgcacaatgaacatatgcacgcaactgaaaaattctataaataccactaccagctaaagacatttgtataactttcaaatattcatctaaacacctaccactatgtgtcacccaaatgcatatgtttgtgtttactacaacagccaaatttccaacactaatgagggcaccaccttcattagtaacaatacaaaaactttcatggccaacaaggccataacccttacacaaattggttggatttgttcaacaaaaaataaacattgaaccgcaccatcatatccaacatctccactttcaatgtcccatatttgagtc

SEQ ID NO: 25869 - DNA, 292 bp, Glycine max
agcttcattaagaggcttttccagaagctttctcgtggcttctttgagaagctttctcaagaggcttctttgagaagttagatccttatctatccaaacccctctattaactaaattaacttccttaaaaataattacggatgaaaataacgcaacaaataatcaaacatcaaacataattactaataatatatagatatatatatcagggtgttacatatattcacatatatacacatcattgaaaggtattttccatgctacctatattcacacacatatatacatacca

SEQ ID NO: 25870 - DNA, 401 bp, Glycine max
agctcgcaatcatttggtataaaaatcaccttgtcttgtggctctacacaagggtgactgcaaccttctaaaatagtatctccttcatcctattaaaatcaaaatgacaatgttaaatgctattcgtaaaaagatccctccaaccaaaacaagggataaacagagaaggaaggtaaatgctagaagaaaagaatgtagtaattgtgaaaacaacaaattaagtaccaatgaagtgatgtcatgccttgtgtagggagtaggacaactagaagccaaatcaacaaatctcaactatagattcctatccatgtacattctctataaaacattcatggttagtgtggttctactaaattgtgcatgacaagagtatattcattagacatctaaatggaagttat

SEQ ID NO: 25871 - DNA, 439 bp, Glycine max
  unsure (1)..(439): unsure at all n locations
tgtatggttaagttgggttgattggctgatagcaaattgcttatattgtaaatagtttagcttgggtttagatttagattattagctttaacatctcttcaactcagaaagttccttttaacttgaaatggaaaatattatttgagttttgcgtagttactttggaagaatagcaatggggcttttgttcaaaaagaatgttagtaatatactatttctaacacactctttattattgattggaatttattaaaaaaacaattttttattcgtctcacttctatgattttattttgaaaggatagttactttggaaggatagcaatggggcttttgttcaacaagaatgttaacattgaatacaatctttattattgaatgaaatttattaaaaaaacaaccttttgttcatctcatttctatgattntataattttca

SEQ ID NO: 25872 - DNA, 375 bp, Glycine max
agcttaaggtaacctcagttttaacatctattcttttataagcaggcaatagttaagtttctaagagagtacaaattattttattcaagagttgaaaataactttcttgtgttgccaagagcttttccaggcacctcaaatatttatatcgaaatgtaaagtcactttgactctatttttaatgaattttctggaaatgtgcatcgtgaagagagattcaaggataggaattgggaaatgaaggaagaaaattaacggagtgtttcaatttcaaccgtgtcctttgacttttcaattcgtatttaatcttgaaaatctcgtgccatttaagtcacttgtacaatgaaacgatttgattacgaatgtgcattgata

SEQ ID NO: 25873 - DNA, 436 bp, Glycine max
  unsure (1)..(436): unsure at all n locations
tccccttgttacttgaaaaaagaagaaatattactattaggatggattgctactcagcaaagaaccacagaaacttattggcaataaagaaacgaaaccacagcagcaattacatgaaacacaagaaaatatttgataaaatagtgtccatcaactaattcaagtatcacattaattagcatagactcaaattgttagacaaaaacttaagaacactggattcgaggccagcacctctagaaagcaagaagaaaaggaaaggaagtttttgaattttcatatatcttcaatgatttatatttgctttatttatactagttccctaatatcagaatttgtctttntgtgcttagggaatatttagaaatcattggctaatccatttacgggtatgttgtcccctcttataccaacaagccaacaactagcaatttgt

SEQ ID NO: 25874 - DNA, 398 bp, Glycine max
  unsure (1)..(398): unsure at all n locations
agcttagatcaggcatccgagtcaaacgtnatgngctgttcttatatgcatgggcattccatatacaacttttaatcggcgtgatatattacgggcctcaatcggacatgcgagtcaaaactttagcccgtcagaattcacccgagtcttccatgtgaaattttgagcgtcgcgataggtcacttgacttattcgaagatccggaggaaaagttatggccgtgtgtattcgcgatgggcttcaactttattctaagagcatgtctatatattatgagcttcatttgggaatccgaggcacaccttatggctgtccaaatttgcgtggcctgaccttatctactttcgagggcgaagatatattatgggcctccatctgacatccgagccaaacttctg

SEQ ID NO: 25875 - DNA, 414 bp, Glycine max
taacaaacttacaaatcaagtgatcatgtattccgaatatttttgggatattaccgatgcacattttatctatatacagttgattgttgtttgcttgaatcttgatttcacgtattgtattgtcatcatcaaacaaggggagattgtagatgcaattggctttgatgttttgatgatgatcatgatgatgtgctgcaattgatgcaaatgggcttttcaagattaaaattcaagacaatacttcaagattacaagtcacaacatcgagatgatcactagaatattatgaagggaattcctaattgaattagcaaatgtttggccaagtgatctaaaataaaaagcgcttttcaaaggttatactctctggtaatcgattaccacaggatgtaatcgattaccagcggccaaata

SEQ ID NO: 25876 - DNA, 434 bp, Glycine max
  unsure (1)..(434): unsure at all n locations
agctnggaaggatgcttcaatggaggaaaattatatggagagaaagagagaggggggagcacgaaattgaaggaagaaaaaaagggagagaagttgaactttgagttgtgtctcacaagactctcattcatcaaagttacaacaagtgttacacatgcttctatttatagactaggtagcttccttgagaagctttcttgagaaaacttccttgagaagcttctttgagaaaacttccttgagaagctagagcttagctacacacacccttctcataactaagctcacctccttgagaagattccttaagaagattcctaaagatgcttgagcttagctacacatacctctctaatagctaagctcacctccttgagatgagaagctagagcttagctacacacccnctataatagctaagctcacccctatga

SEQ ID NO: 25877 - DNA, 428 bp, Glycine max
  unsure (1)..(428): unsure at all n locations
gctgaagtgtgtacccaccaccatctcatagtagaatttctgtacgtatcttctatcattgttatcacctccctcttcgtcattgagggtgctacttgagctgccagatccctccacctttgggcgtattctttgaacgactcatgctccttcttgcacaagttttgtagctgcattctatctggagccatatcagaattgtactgatactgcctaatgaaggaaaccattaggtctttccaagaatagacttgggaaggttccggattagtataccaggtgatggctgccctagtaatactttcttggaagaaatacatcaacaatttttcatttttcgagtatgtccccattttcttggagtacattttcaggtgattcttgnggcaagtagtccccttgtacttatcgaaattagacaccttgaa

SEQ ID NO: 25878 - DNA, 333 bp, Glycine max
  unsure (1)..(333): unsure at all n locations
attgtctatggattattcactactgtaaatatctgtcacgaatgttggacccccttgcacattgccattctaagcacaaatagagatataccctaaatattgttagacaatggtgctgataagactatgataattgaggtgattntgttgacacctcacacttggcangtatatatgatggaaatgcatcaggcgaacaggagtcattatcattccttttattcttaacattggctgatgacctatacgttcttcngtatatcattaaaccctgtgtgctatacaactagagtccattgaaactactgctgtgaagtgactacttctttggat

SEQ ID NO: 25879 - DNA, 429 bp, Glycine max
  unsure (1)..(429): unsure at all n locations
ntctccctttcttttagaaatccaggcttcgtactgtttcttatcactcataacaaatggcaattttattcccttttccgttttggtgtaacatagctttttagtataatgttgtggcaccaagtcttttttgtatcattttgttaatttgctgaattcatttttaaaattttatggaaagacagatatttgtttgataacattttttaccctgagtgcttgactgatagcttatgcatatagctgaatatatattattacatctgaactccagatgccatacacaacaatttagagtaagcaaccatcatttaacaacaatttagagtaaggaaccatcatttagtttttaatatcaacaacgtaatttattcctagtgtcttccatgtgatattttcttgcatcagctttgtttctagcctcacact

SEQ ID NO: 25880 - DNA, 328 bp, Glycine max
  unsure (1)..(328): unsure at all n locations
agcttgtaattgagcaacggaagctttcgagtantatttaaattgtcatcacttttcactcggaagtccgattcatgcgcatcacatatagagacgctcgaaattgaacaacggaagctctcgagaaattcaaatggtcataacttgtcactcggaggtccgattcaagcgcataatatatcgagacgcttgtaattgagcaacagacgctttctagaaattcacagggacatcgcttttcactcggatgtccgattcaggcgcatcacatatagagacactcgaaattgaacagcggaagctctcgagatattcaaatggtcataac

SEQ ID NO: 25881 - DNA, 338 bp, Glycine max
  unsure (1)..(338): unsure at all n locations
tccgttgctcaattacaagcgtctcganatattttgttcttgaataggacctccgagggacaaggtatgaccatgngaatttctcgagagcttccgatgttcaattgcgagcgtctccatatattatgcgctagtatcggacctccgagtgaaaagttaggaccatttgaattgctgaagaacttccattgtacagttcgagcgacacgatattttacgcgatcgaaacggacctctgtgtgacaagatatgaccatttgaatatctcgagagcttccgtggttcaatttcgagcggctcgatactttatgcggctgaatctgaccttcgagttaaaa

SEQ ID NO: 25882 - DNA, 398 bp, Glycine max
agcttctccctcttttccctataaatatggttatgagggaagaacaaaaatgttcaaccctcctggtatttgagaatcacttaaaattagtgagaaaaattgtttccgtgaagaaaatccaagttgaggcgcttccgtaacgcttccaagacattttcggggaggatttcgcgaagattttccgccgttcttcgtcgttcttcggtcttcaaccggtaagttcccgaaatcgaacttttcaattcattctatgtacccttagtggtcctcatttgtttcatgtgcttttatttttatttcatttacttttcgtaccctattttgatgtgctttagtcatttatttaagtcattttctagcctaatcaaaaataaaaataaattccatcgatcattcgt

SEQ ID NO: 25883 - DNA, 410 bp, Glycine max
tcggaagaaagtgatgaggtacaagccctaaatgcatagcttgaaagagcccgagtagtcgaagagaagttcaagtccatagccatcaaagtctgaaaagagtatgatgaactaagggacgtcaatatggccaccgctgatgccttggaacgagaaaccaagaaggcccaaaaggaagaacacgtgccagcaaagttttgaggggctttatatggcagcaatagtaagctcaagctccgaagaggtgaaaggaatcatcacgggtcaaaggcatgatcttgaaggacgagctaaaggcttaccttatgtcgaaaagaaatttgtcccaacagttaagcgagactgaagggaatatgtgggtcgtcatcgatgagtgcaaagagaagctaaatctagcggcgactcacgag

SEQ ID NO: 25884 - DNA, 579 bp, Glycine max
  unsure (1)..(579): unsure at all n locations
cgcgaccagaccacancgaagcgcatagagccaataaaccncccccccnccaaacgagcnatgatgcatgcatgcgcaccngcganacannannaccgangcgcaggcaagcaagcagangccaacccacancgagagtatcatagccgtcagnacacagaggaggagccccaccagacacgacaagagaggcggccacagccgccacggaggaaaccggagcaaatgatgcagatacaaaggggctccactagccgagaaccgcctacaaaacatgaagtcaagaacaaagatatgagcgaaggaaccccaagacagccagcaaccagtaccatcaaaaaaaaaaaacacaagagagacgatgccagaaacccagcacccgcataaacagaggaagggggacgacatcagcaccttgcggtgacagcactcgcagcaggaccggcacgaccagcacccgccaactaagaagaccaacacgcgaagggcacaaagaaagcgcgcacccacaggccacagagcgacagcgcaagagaaggcacgacggaccacaggaaaggcgcacccaaggggccaagg

SEQ ID NO: 25885 - DNA, 415 bp, Glycine max
  unsure (1)..(415): unsure at all n locations
gcttagaccccctccggcattcctaagaaaatgaatanatgtatctatangagccggaatatcgttaattaatgaattgataaaccaattaggtcatccggccaagaattgtctttctttgtgtacccttcatcaatgtccattggggaatggggaattaaaagttaaaaaggaaaaagagaaaaacaaatgttaaacttgttccaaaaggaacattaaatactgcatctgcatgttaacaagctgcaattgatgagaatgataaagagtgaagacaaattatcatagccaattcattctctggagtgaatacaagatgcacatcgaatgacagagtggccctttggttttagacgtacgtcaagtttctattatcttaatcgagaagaagttttcaacccataaagcatttatc

SEQ ID NO: 25886 - DNA, 438 bp, Glycine max
  unsure (1)..(438): unsure at all n locations
attatatatgtatgnncagggagaaagataccttggatatgcatgtatgtaacaaaaaatatactccacaaaatatatatatgtatgtttaggtaggaagataccttagatatgcatgcatgtgaacaaaatatatacttcacaaaatatatatttgtatgtgtagggaagaagataccttagatatgcatgtatgtaaacaaaaacatacttcacaaaatatatatatgtatgtttaggtaggaagataccttacatatgcatgtatgtaaacaaaaaatatacttcacaaaagatatatatatatatatatatatatatatatatatatataaatctatagatataaatatatataggtgtgtgggtaagaagatatcttatatatgcgtgtttgtaaacaaaaaacattttcaataatatttatatgttgtgttt

SEQ ID NO: 25887 - DNA, 427 bp, Glycine max
  unsure (1)..(427): unsure at all n locations
tcttgcttcttgtctaacagctttgcactcttcttgtgattttttttggtattngctccaaagttgttggatgacttctcagctaactacttggccacttgacccacctggatttcaaggtttttcaaggctgattcagtactcttatggttggacatggccacttgcataaactgggctattgtctcctccagtttggtggtcctctgaaaaatatttggcccttgttgaggtggcctgttggaaggtccaccctggtccttattgagttgattgccaaggtgtgatcttcattgcccttgctgattatagggaccttgatggaaccccgaaaatcctccttggtgtatccttgtctctgttgatttcccatgtaatgaactatctgagtgtgctcttcaatgggaatgcaatgacatgattcatg

SEQ ID NO: 25888 - DNA, 398 bp, Glycine max
ggatcttaatcacctgcagcatgcagctgtatcggagatatatattctagtattttaataaatgtgggtaagaaaaattcaccaaattgatagagaaaaatctaaaatcatacatcttatgcaaataaggcatgctagcccccaacattattgcattttgattccatctttagacattcaaattggtgtttatttttcctgttatcttttcctttgccttagtctaaatttcaaacttacaattcggtatctctttcttcttttgtttctcctcatttcttaataagtggatttgcatcacttaagtacaaccaaagtccctctggatttaattgttgaacttcaatttcaatctttactactcgtgataaaaatacgacacttgtcaatctattaac

SEQ ID NO: 25889 - DNA, 372 bp, Glycine max
  unsure (1)..(372): unsure at all n locations
ctcagctatctacctatctatctcccagattctntgcaatgtttcaatagataaaaaacatgaagttctaattcaagatgttttctttgttgcatgggcataatgcaatcactctatgtctagcaatgattttattaagatgtccctacctttgagttctactaaaaattatcctctctcaagcgactaatccctaaaactgatgcatataaaaccttcaatgtatttctaccaaggattaccctctttcaagcgccaaacccctaaagatgatgcaaggatgaagcatataatacatttgttggcattttaggcctgccaagccctaactaaaggggtttaacctttcattgtcatgagagaactttacac

SEQ ID NO: 25890 - DNA, 359 bp, Glycine max
agcttctatataagctgattcattttatcttttaacacaagttgagttttattcagaaaattagagtttatctcttttatcttagtgagagtgattctcctaaattcttgagtgattcaagaacaccttggttgtatcaaaggactctcacaacctttgtgtgttgccctcgctggaaagagtgattctttccttcctttcatcatcacccttgttctttcaaaccacaattccagaagatccacctctgcccagaattatctcgtggccataactcccattttacgcactcaaattaagtgattcttgagcctaaattgaatctcaaaacgagacctttcacctcgttttggaatcac

SEQ ID NO: 25891 - DNA, 273 bp, Glycine max
tctcccctattgtgctataaatagggggagtagtgattaggaaaagggttcagccctttaggcacttctctctctctcgaatttgctgaggaaaattatttccgtgaagaaaatccaagctgaggcgcttccgtaacgtttccgtaacgtttccgtgagtaattacgcgaagattctcgaccgttcttcaagattcatcgttcgttcttcgttttcttcagtcttcaacgggtaagtacctcaaaccaagcttttcaattcattctatgtacc

SEQ ID NO: 25892 - DNA, 350 bp, Glycine max
agcttggctcaaagaggtctattattgataatgcggccgaagggactagttccgctcctgagtatgacagtcaccgctttaggagcgctgtacaccaacagcgcttcgaggccatcaagggatggtcgtttctccgggagcgacgcgttcagctcagggacaacgagtatactgatttccaggaggagatatggcgccggcggtggacatcactggttacccccatggccaagttcgatccaaaaatagtccttgagttttatgccaatgcttggccaacagaggatggcgtgcgtgacatgatgtcctgtgtaaggagtcagtggatcccgtttgatgttgacgctatc

SEQ ID NO: 25893 - DNA, 422 bp, Glycine max
  unsure (1)..(422): unsure at all n locations
tgttagtgtgtgtttaaatgtctaatataaaaganattttatgtaataatgtttctttgaagaaaattttatcagtgaaaataaaatattttgaatatgaattttgtagtatttttttaattagattaggttggtgttaatgatttattagtgtgttaataattcatgaacgtttcaactttcatttaaaaaaattagtagatcatatttatttgaagaaagtattttgagtatgaaatttattttaatatgaagttgtagtatttttttaattagattaggttcatttttttgtgttaaaaattgataagcgttcaagttgaaagtgttatttgatgatgttttgttgtttcttgtatcatatttaatttaatatatttgtagtaattttgtaattacctatntttcatttgaagttatta

SEQ ID NO: 25894 - DNA, 442 bp, Glycine max
  unsure (1)..(442): unsure at all n locations
agctttcanatggataaaaggctcacattcttctttcttctatatcatattcaaatntgtccaaataaataataaagtcatatcgactcaaagaaaatcatataagtctcatacaattaatatagaacctatatcctaatgtcacatcctatcagagcgtggtgttcccgtgtcctctagcatgaggttcttcatagtcatccacctattcatctgctcccccgaacacaagttcaagatcatcacaggatccaaacacaacaacacacaaggagtgagttatcacattcctagctaatagagaaacaagacaattaaatatacatattatataaatgagataccacttgcttaaacataactcacgtaacttcaccacttcatcattcaaaaatcacttttcaattatcaatcacattacacaagaaatccacacttcgat

SEQ ID NO: 25895 - DNA, 439 bp, Glycine max
tgttattaagatattaagtggaagtattggtcaaaacacacattgattgggatataggattcgttattcgtgagaaaagttgacgcccttataaccacatcaaaaaattggctttgcaattattacaattcaatagaaattgaacaattggagaaagtttgaaaattaatttgggaaaaaatttagcaatttgatttaggagataaagaatagattaaagataaagatagagcaatatttcaattggataaaattcagaattataaaacttccaggattggggttttcagtccaagacttcctatttgaccctaaggtaatttcactccaagacttccttcctttatttcaaccttccttcttctcttcaagagcgaattaacctaaggtaatttctactctatttaaagacatagtatctaattggatttactcctac

SEQ ID NO: 25896 - DNA, 456 bp, Glycine max
  unsure (1)..(456): unsure at all n locations
agcttcaagaaaaagatggcctcagcaaatttcttatttccagaagggaattctatcaatagacctccaatctttaatggagagggttaccactactggaaaacccgaatgcaaatttttatcgaggcaatagatctaaatatctgggaagccatagaaatagggccttatatacccaccacagtagaaagaatttcaatagatggtagttcatcaagtaaaagcataaccatagaaaaacctagagatagatggtctgaagaggatagaaaacgagtacaatacaacctanaagccaaaaacataataacatctgccctaggaatggatgaatattttagagtttcaaattgtaagagtgctaaggaaatgtgggacactcttcgattaacacatgaaggaactacagatgttaaaagatctaggataaatgcactaactcatgagtattgaata

SEQ ID NO: 25897 - DNA, 442 bp, Glycine max
  unsure (1)..(442): unsure at all n locations
tgcttganaaacttctatggaggctagatatttgagcttactaaggtcctttaatggtgattttcaaccatggagttgcagtggaagataaaggagaaaaggggagaggagacgtcatccactagggaataagcataggaagaagaagtttcaccaccaagagagtgtcttggataaaaagcttagagatgaagcttcaatggaggaagagaatgagagagagagagaaagagagagagagaaagtggcatggaaaattgaaggaagaaagggagagaagttgaactttgaagtatgtctcctaagactctcattcatcaaagttatgacaagtgttacacatgcttctatntatagcctaggtagcttccttaagaagcttccttgagaagctagagcttaactacacacacccctctaatatctaagctcacctcatgct

SEQ ID NO: 25898 - DNA, 397 bp, Glycine max
agtcacctgcggctgcaacgtgaacgcagccgggttagcaatgaattcattgttattcgtggatgcaaagcttatattttatgagagcattcacatattcccggttatcttactatcatgattatcttgctacatccctcttttctttgaataccctactaacatcacacaataatctattagacacaattgcttcatgtatctatttctcatacaatgttcttttacaatggcataacaatgacattgtgccactatttacagcttacattgactgtgtgatgctattacaatgcctggacatagatagctccaagcactcccccagatttgaaccaaatatcttttctaggacaatgttattctacaacctaccacaaggtgtgcacgcaatcat

SEQ ID NO: 25899 - DNA, 457 bp, Glycine max
  unsure (1)..(457): unsure at all n locations
caatactcacgcttcaagttgacaaagactntagaagtttgtataanctttttttatttgttagtnnncattgataatttttacatctgttcaagcttacttatttgagaatgtctttgaaattgctggttttttttaccatatacccgatctgaaatttttggttaaatgtatgtctttatgaaaatttgttaaggtgataattagaaggattaagccatatatagtttaagtgcaaggttctaaggccaaagtattatttggaaacaataattgtcttcatatgaatttgttacccttcttcgggtcttcctctccttagttgccattttcatgtccaccttacactttggctgacttatatatatcatcaaaccacttaaagcacaagcacatgttctatctgacagcaactactatccacctcacataagggatgtcatgctgttaggattgt

SEQ ID NO: 25900 - DNA, 424 bp, Glycine max
  unsure (1)..(424): unsure at all n locations
agcnttgagccanaatcctgactcaccatattcctttacccanggtgagaatgccaatccttaccctcggaagcaaaaaagaatagaggggaaatttccaatcaaagaaaaagagaaggaaaatttccaatcaaagagaaagcaaaaagaaaagaaaggaaattcccaatcaaagagtgggagaaagcaaaaagaaaagaaagaaaattcccaaccaaagaatgggagaaagtaaaaaaaaggaaggaaagaaagttcttgatcaaagaaactagaagaaatgtgcagaaaggtcttttgaccagacaatatctgaacaatacagaattgtcaccaaatgaacaaaagaaagaanaggaaaccatgacctaaagtggtcttcttcctttgattaccaaccaaaatcttgtgcgtcggtgacttg

SEQ ID NO: 25901 - DNA, 431 bp, Glycine max
  unsure (1)..(431): unsure at all n locations
ctgtgtaatcaattacactgatttggaatcgattaccgngtttgtttctgaataaatcaaaagatgtaactcttcaaaagggttttgactttttcaaattggttttaagtttttctaaaagttataactcttctaaatggtcctcttggctagacatgaagagtctataaaagcaaggctttgttttgcatttcaaatgatcttgaatacttttccaatcaatctcttacaatcctttacaagccttgaatctctttgaacttcttcttcttctttgtaccaaaagctttctaaagttttctggttttctaaaccttgaaaacttgtgctattcatctttccattctcttctccctccgccaaaaagaattcgccaagggactaaccgcctgaattcttttgtgtctctcttctcccttttccaaaagaac

SEQ ID NO: 25902 - DNA, 400 bp, Glycine max
  unsure (1)..(400): unsure at all n locations
agcttattngattgcaaatactgtttgtaaatgctatngntctntgcatataaggttattggaatgacatcaattccatgtaccttggtacctggctcataatctttagaagcctctccgacttgagacattcttgttccaacattcttaaattttgtactaaccatagactgaaaatttgatctgaaccctgcattttttagcactaaatattcattcttgttgcacttgagaagtttctgatctggctgctgaagatgatgtagaagcaagcttcattgcttcatgatgatgaatcaagattgattcaaggtgttctgatgataacaaagatgatgacaaaaagcccatgagaatganttcaagattgagtcaagaacaattcaagaatctagagaag

SEQ ID NO: 25903 - DNA, 288 bp, Glycine max
  unsure (1)..(288): unsure at all n locations
tctntaatctcactcaacaattgcaattgcttgtggttaattattcctactatcatcttgttcgatggtagtcaacaaagtaccacgatattcgctagttaaaaacgtctcatctacttgcacaagtggcttgcaatatttgaagccttcaatgcatgaattaaacgtccaaaatacatgattaagaatcatcctacgagggtcaacgtcaccttcctccattgaagttgaagttatgtattttactacggtacctggtacaaagatgtgagcaattgtcaaccatac

SEQ ID NO: 25904 - DNA, 346 bp, Glycine max
  unsure (1)..(346): unsure at all n locations
ctgcagctgatgatgtggcaagngactttatttattaactgcgagaaattacctaccctgatcttaattctgtgtgcttctttcgacaaggtcaaaacaaaaggttctcaaaagaatcagatgaccaaacatcaaagaccagcgaagcgtgattcgtcttaccgggagaatgtggatgcattacattctatgcaaaatagcaattatttagtgaaacattgtgcatcatcatataaactaccaaaacctagcagaaagatgccaatgctggatcaatntcatccatgcattcatgatttcattgaaaatattgtcgatgtataaagtagatggtaatagtggatat

SEQ ID NO: 25905 - DNA, 372 bp, Glycine max
  unsure (1)..(372): unsure at all n locations
ctatgctactaaggaataggatatataactacggaaataaacgtgcaacaggaatgaagaattacctttgtttggggcctcttctcttatccatggaggccctggtcctcgaaactattttctaagggggtgactcgtatcactctatcatgcattaatcatgaacttctcgattgatgcaacaattatctaagctactgaaccaacatcaccgcgccaaccaagatcacatgcgcgcaatcaccatgccgtgcataacccgcatgctcccattgctctatacatgcaacacaagctgatcttgactctcaacaacccgacttganacttctgttgctgaatcatataactcactcatctctaatttataat

SEQ ID NO: 25906 - DNA, 425 bp, Glycine max
  unsure (1)..(425): unsure at all n locations
agcttgttcttttgtttttgataactatgattatgttctttntttttccaggaaagaatgcaacgagcaatgcaaccaatgaaaagcacggatgtatgcgaatgatgcacaatattgcgaatttttatgtaggacctgnggttgaatcaatttagattttcaacatggtccatgacatctttgtcaaggtgaaactggaagtaacaaggacatcaacaatcctaaatgtgtttggcagtagacgaagcagtgatgtaactcgatccatcttttgccccaattttttcaagatggttacttccatatttcaacttgacttgatgaaccttttcgtanaagcatgagcttggttcaaccctataatcaaaggaatggcaattctgatcgccaatacttcaacaacatttcatanggatgaatgactc

SEQ ID NO: 25907 - DNA, 435 bp, Glycine max
  unsure (1)..(435): unsure at all n locations
tgataggtaaggactctatttgtgactcaaaattatttctagttcaaactagcttttgtatcttatacagcattttgtcatccaactgaatgcttattattaagcagggatttgatgaatccaatattggagaaagggcataacagagttcctgtctattatgagcagcctacaaatattattggacttgttctggtatgtaattatgcatacaatcacttatttttctttattccttcagtattgaacaatcattatctgctatgtgaaaacttataaaaaccacaaacagtatgagactattttctttaagcttcaacctgttaacttgctttccatcaagatgattngcacaagttaattatttttgtctgttcgaccaaaactatgttgctaggttctgataaaccctaagttaatattaattaataattt

SEQ ID NO: 25908 - DNA, 592 bp, Glycine max
  unsure (1)..(592): unsure at all n locations
cctagtcttcggcactntctcgtctaatctgcttatatcatntaccntcccttctnacacacacacnccaagacgggggatgattgcctccaatctcgcagcccgggatactctaaagtcgacccgcaggcatgccagctcgcattggcagtgttatatatttcgtttgggtgcgtgcgagttccattccgtggatcctgtatctccaatgatcatctgaaaattaaatccttttcattttccagtttgttgaatttaatttgagaatctatgcacggcaaagcttcttctacaagaggtcttgaaaagttacagcacaaaataaagaaatgcttcccgcatgccgggtgatcacataactcttgcttgggtagagaagacaaacctcatcttgatgccagcaggattggccaagcacttgctttctctgaagaaattgggggcacctcagaaatgttcctaccttgctctctgacaattggactcaactgaaggtgcgggctatccatggattgcactggatgctaaggatagngacactaatacacaagtataactgacgaaccctgctcggagcttcaatgcacaaacg

SEQ ID NO: 25909 - DNA, 442 bp, Glycine max
  unsure (1)..(442): unsure at all n locations
tcgaaagtggagattggtggtgatagcactgcnggatcatgattacatctgagaacactcggaagtatagggaggtatctagcaaaccatgtgctcagcaaagttcatcagttgggagggttagtcttgggaaaagttgtgttacaagaaaagtctcaagcattcagccacagaagaagtgtttagaggtgtctagtcaaccatgtgatcagaaaagtagaagttcatcagttattagtgttagaagaagttatgttttgggggaagcttcaaaagtggagagtggtggtgatagcatgcgatcaaggggtcgtaaatcatcttctgggaagtctagtattggttcatgttcaaaccctggttatgaagttaagtttgtgtcaaggcagcagagagagaacatcaccattgataatgtgaggtcactatgaatcttgcagtt

SEQ ID NO: 25910 - DNA, 430 bp, Glycine max
  unsure (1)..(430): unsure at all n locations
agcttgcttcccctgagtctaccgacatgttgctccaaactctagatcaaaagactgcttatgaacctcttatgtcacagactgtggttcctccttcttgacttttcctctaatatgttntttagcatattcggggaagttatcagttattcccagtctgaaaaaggtcaatcctttaagttgagtggctcctacaaatggttacataacaaagacatctaccccacaattcctcatgatctaagtgaacaacattccataaggaatagggttcttcttgtccttggcatgaacattatccttgaaagctcgaagtcagtagaagaagatgacttcacgcagaattaccttttcaattaccatcactgtatacatgcagaatctactcttatcacttacatagtttatcgatcccagtatggcatgccta

SEQ ID NO: 25911 - DNA, 399 bp, Glycine max
  unsure (1)..(399): unsure at all n locations
tgttgcatttcactatcactacctcttattgtagatcggtatgcactncttgcattgtatatttgtttgattgttgtacagctattggcattgtgctccttcaacgttagtagaatgtttcttgatttcaccattgaatttttcatatcagcaataattgtcttctcatcattagtcaatcaaccagcgtatgaatgtataactaatgacttgaccaattcatgattgtgactcccacacattaatttcaccatccaaccttgccctccaaccagtggtttcccacgaagcttaaagggacacccacatttcctactgtcagtatctcttctgacaaaatctttcttcctagacctatactgaccattcctttcacaaccaattaatacaaatgaagta

SEQ ID NO: 25912 - DNA, 412 bp, Glycine max
  unsure (1)..(412): unsure at all n locations
agcttgagtccttatacccttacgtattaaatattgngtgaaaaatgagtctcttaaaaaactagaaaagaatttaatattagatttttcaatgtttttggttgctcattgggtccacttttcacgcaattttccctatgtttatcaaccttttttattcaaactgtttttgtgagcaacacttacattttacacaaaaaaacaaagcttttcaagaccctaaacacattcaatttttagttttttctttacataatgttataaacttggtagcatccattagtaatcatttatacactatttaaacacttaaaaccatcaatttatacttttaaaactgttgaggaacagccaccacgtttttctgcgtaagtcaagcttccatgcactaaaacaagtcattttaagtcat

SEQ ID NO: 25913 - DNA, 437 bp, Glycine max
  unsure (1)..(437): unsure at all n locations
cgcttgaactactaaagaacctcnntccctatattgctngcattnncattatgagctcaaaacaattcttcatgctcaacttatattagacatctctttgttttcaaataagtaataaaagttttcaaaaaccccaatccaacctccattcttatagtatttttgtcacttcagttatgtgataaaatataaaatgaagcctaatttaaatggtaaagtaatgtgtatattgaattttatgtatatcgattaaatattatgagtttttatcattgtcaagttgtttttttttatttaaatggtagtactccataatatatattaaattaaatatatttcatttgtaagtggactcatttgtacaagttgttaaataattttaattaataaaagggtaaatgtcagattaagaataatatttgggattttatctttta

SEQ ID NO: 25914 - DNA, 393 bp, Glycine max
agcttgtgatggtaaaacttagagtatcactcacagtcatccaataagcaacacgtatttgaaatagaactgtatgtataacataaaagtgtgcgtgctgctatttaagaaaaagataagctaagtgccgaaaggcagtaatagagatggaataaaaagaagaaggttgatctatggatgaatgctctcttagaacctaagctgttgcattctataaaaaccatgaattgattgcagcccagccttgttacaagcctagtaaagtccttcagattcaatttgtgtgttcttgactgtatgatatgagatgaagtgcagagattgagacttatgttgggtgctgtgtgatggataagcctaaacactagtgctagagtgaaacactgaccgtga

SEQ ID NO: 25915 - DNA, 410 bp, Glycine max
  unsure (1)..(410): unsure at all n locations
tgtgactcttggcaatttttttaaatttagtcacttataaagttgtgacttttgaaaaaatctttagaaataagtcacttgaagaattgtgacttttggaaatgtattttttgaaatcagtcactggtaatcgattacacatcaacaaatatgactcttcattttgaattttgaaaattaaaacgtttagaagctctggtaatcgattacaaatgttgtgtaatcgattacactagtttaaaatgatttaaaattgttaaacacaagttgtaactcttgaaatttgaaatcttaacgttttaaaacactggtaatcgattactatcttctgataatcgattaccagagagtaaaactctttggtaatgaatttgtganaacttcttgtgctactcaatgttttggaaaac

SEQ ID NO: 25916 - DNA, 397 bp, Glycine max
agcttgaagaaacatcctttgatgtttctattcttctctcagccacttgacctcattgatgaggttgaccatcgctattctttcaaaactctaacatcgtgttgcaattctaccaccactcttccggtattaaatgtaacctttagttaatactagagatcatacttaaaacatgcttgtaaatgaaaaactacaactaatactttttttaaaaaaagaattaaaacacttttttaaccttgaaaaagaggggtattagcctagatccttgctatccaatgtgtggtctggaggtggaaacactctcacatgcattgctgacgtgtgaggaaatcaagagatggtggttagcatgtccccttacaacaagggtggatgagaatgacgaaattgacat

SEQ ID NO: 25917 - DNA, 413 bp, Glycine max
caccttcacttcgcacgctgggttttactctttcatatccgctttctaatagacccttaaacccatccaatggcttccaaattgccctaatcctctaattacatcaatcttcaccatgaattaaccagaaaaaaaaatcttgaatgcggtggcacgacaatcttccccaaattaaattttctcaaattccaagtgcagaagcagaaaactcaccggaaatgggatccaagtgtggtggcagccagcaagtcactgacttggcgcgatggtgcaacgagcttgcagtgggtgatgtgaggacgagcgtgaagatgaagagaaaggaagagcgcgaccatgaagatgaagagaagggtagtgaagataagccatgagcgtgaagaagagaattgactgagatttaatttctttta

SEQ ID NO: 25918 - DNA, 345 bp, Glycine max
tgttaattctaacaataaaaacataaaatcaatataattcctctgactttgaattccacaaccatttaaggttggtttactaaaattattaagtaggacgaggtttttttttccaagaatcgtcaaataactctatgtgaaactaatctatgataaaaaaaaaaattagattttttcattatagtacctggtcaggaatccagaatccaggaatgccaaaagaatgaaggagatcagaaccacagagaagcatgaccttaaaggattctacactaatcaatacaaagcaaattattgtattgttacaacattgtaaaaaacatgtatagaaagaaatgaaaatct

SEQ ID NO: 25919 - DNA, 428 bp, Glycine max
gcaagcttaaagataaaagggctaaaagagatttttattaaaatattaaaagatatttgttttctaaggcggttattacattagaaccgtcttagaaagtctgtcatttctaagacggatctgatataataaccgtcttagaagaatagacattctaagtcggtcatttaagaaccgtcttagaaattagtgtttgacagactttttaaaacggttctgaagtaataatcgtcttagaatgactactttctaagacggttgttacatcagaaccgtcttagaaaattcattctttcaacaacgatgtttttaaaaaccgtcgttaattgagatttacttttaataacgttggctataacgatggttaaaaactatcataaaaaactcaatttaaccgtcgttaaaaagctttattgtagtagtgttag

SEQ ID NO: 25920 - DNA, 477 bp, Glycine max
tgattgagcagtgcatttttattatccagtggttgatgcttgattttggaattcagtgtttgtgattggtttgaattgatcaattctatgatgtgagtgaattgaaatgtgtggatcatatgccttgaatgagcatgcagtcattagaagagaaagaacatggaattaggatcatgattgaaaatgttagttggtttgtcaagttgattgtgaaggaacgcattagccgcaacccggggagagtgtgatctttaattatgagagaacgactaatgttaagtaatggtttttgcatgaatctctgaatatggaatgaatgcgtgaaattgaagatgatgaaggccatgttttgattaaagatagccacttagctaaaaagcttaccttgtgcatgattgatttatcccttgcacccattttgagttaaaagatgattgtttgattgaaccttgagcctgtacagtttatcttcttcta

SEQ ID NO: 25921 - DNA, 456 bp, Glycine max
  unsure (1)..(456): unsure at all n locations
gcttgtgactcttggcaatttctttaaaactaatcacttaaaaagttgtgacttttgaaagaatcttcagaaacaagtcacttgaagaattatgacttttggaaatgtattttttgaaatcagtcactggtaatcgattaccattaaggtgtaatcgattacacatcaacatatgtgactcttcattttgaattttgaaaatttaaaacgtttagaaacactggtaatcgattacaaggattgtgtaatcgattacataaattgaaaatgtttaaacacaagttgtaactcatgaaatttgaaatcttaacattntaaaacactggtaatcgattaccagagagtaaaactctttggtaatgattttttgaaaacttcttgtgctactcaatgttttggaaaactttttaatacttatcttgatcgagtcttctcttgattcttgaatcttgagtc

SEQ ID NO: 25922 - DNA, 334 bp, Glycine max
aactcgaagaaaaccatgaaggtcagattgggctttgttctcaaccaaaaccacgaggcaagcttggaagattccactccaattgaaagtttcctctcggtgtggggtttcaacggagaactacggcggttcatggtggctactggtggctgttggttatggagaagaagctcgggacgttggaaatgatttacgaagaacgaaggagaaagaaaatggcgtttttccaaactcgaaaaaaaccatgaaggtcatattgggcttcgttctcaaccgaaaccgcgaggcaagcttggaagattccactccgattgaagggttcctctctgtgtgg

SEQ ID NO: 25923 - DNA, 337 bp, Glycine max
ttttttgaattacaacctggcaatgtgaaagtttttattcaatggcaaaacctccctccaagtgaaaatagttgggaatctgtggctaaattacaagaggtttttccgacttatcaccttgaggacaaggtgagtcttttaggaaggggtattgatatgcataagcataagccacacatcaccaaggtgtacactcgcaaacaacgagcaaaagaagcaataaccatggaccaccagcagcaaggcgcacaacacccaaggggtgcaaaccacccaatagttacaacccatccaaagggtgtaaaccacctaatagttacgaatcacccaaagaatg

SEQ ID NO: 25924 - DNA, 473 bp, Glycine max
tgacgtaagctccattggagcttgtaggcctaggatcttcttcatttatggattcctttgcttcttggaagatgaatggcagcggaatggagaaggaagagagagaggagacgccacttcaaggagaagatgagtctagaagaagctcacccccataggaggccatggataagagcttggaggaagaaggagatgaatgaagggagagggagagaaaagcatgaaattttgtgctctaagagagctctgaaatctgaagtttaattttcaaatgatcaaagttcaaaaaatgcacacatatggcctctatttatagcctaagtgtcacacaaaattggagggagatttgaatttctattcaaatttcacttaaatttgaaattgaatttgtggagccaaattttggagccaaaattcactaatataattaaggaattttaactatgggtcagcccactaattcaagatcaagt

SEQ ID NO: 25925 - DNA, 142 bp, Glycine max
  unsure (1)..(142): unsure at all n locations
agctttaagatcaaactctnttctctatttttctctcaactattcttcattcttcttcctcttttcacttttggtcttcctttctcttgcacaaaatttgtggcttttccattgggaatgatcaatggaagctaaaaactta

SEQ ID NO: 25926 - DNA, 333 bp, Glycine max
tcactactcctatatattcttcccaaactctcatcattctcttttctcattctctccatcctttcttcattgtcataactcattcttctcatttgatcaccaagtttaatcatctccgcctctagccttgcgatttttggagatgatagagtagcatctccacttgtagaagccatacctataagaaaagttagtgtacaagtaaaaaatagaataggatctcaccactcaacttagtgttccactcaagttcacttatgtatcactctttcaagactttttttttataatatgcactcttgccttttaccactcttgcttcttttcagttct

SEQ ID NO: 25927 - DNA, 322 bp, Glycine max
tttacatgctaccaaagcaatctaagactgtgcggttgttaccttagaaccgtcttacaaagtctgtcatttctaagacggatctgatataataaccgtcttagaagaatagacattctaagtcggtcatttaagaaccgtcttagagattagtgtttgacagactttttaaaacggctctgaagtaataatcgtcttagaatgactactttctaagacggttgtcacatcagaaccgtgctacacaatctaagatatatatacacgcgaccaattcttgtgatgactggaagaatagttacgttttatgagttgcattggg

SEQ ID NO: 25928 - DNA, 517 bp, Glycine max
  unsure (1)..(517): unsure at all n locations
tgacaattgagtggtattttgtttcacataacagggagaatgagcagctatccaagtatggtgacaccaaaactgctcgaagcattatgttgatagaactgaaaaaactcatagaggcaaatcctcttttccgtgataagcttatcttccctacccttaagtcatcaagactgcgaactttgatcaatcaaaggtatgtgtgattaatttctaccaactttatctatctattttgccatgctctttcattcacatagttgggctctgctttttgacccatatgtcgttatgggaaaaatgaaaagtaaatcatgttgatttctggacatgtagtatatntcatattttgtcagtggtaaatgataagaatttggaaggttttctggtccttttttaattcattcttgtaaatttgaatttttagcgtgctgtgccttgcctattttttaatcagtgaatttatctatgccccttaatcatgcagtctaaactggcagcatcagctctgcaaaaaccc

SEQ ID NO: 25929 - DNA, 418 bp, Glycine max
agcttaatcaaccccttatgccaatgctttcatactgataattgtttcatacaaccacaaacaagcaaactctaactagatgcaatgaaaacgaaattaaaaaggactgggttgcctcccaacaagcgctaatttaacgtcattagcttgacgcatagttcttcatgggtcagggtcaaacttggttctcacctttagaacctcttcaccaaactccttcacctgcaaacaaacattctggtctagcacttgtttttcttcatcaaatagatcaaaactgatcttttgatcttcaatgcccatttctaactttcgctttcccatgtccaccacacagcttgcggttaacatgaaaggacatcccaaaatcaaggggatctcagcatcttcttcaatgtccatgacaatgaaatcagtc

SEQ ID NO: 25930 - DNA, 451 bp, Glycine max
ttacatgtagctacatcaaggtctctaattctaatggagatggcaacgtacatctccataaaagaccacaatgactcgtcattaccctcgtaaaggttgaccaaagtgatggatgtggtatggtaagggaggctagttgcatattacgctttgaagcattaattgggataatgtgaagaaagagtcaatggatcatgggggaaggcgtttgtaccacgtcagtgccaaccctttgagggaggtgggaaagaccttgcacatcaccgtgtcatcattagagtactaattgacttgcatggtgaatatgtctaagtgctcatccagatctaaggcatcatcatatcatttgatgtttataggtttacaagcggtgggtaatgtatccatgatgccatccatgaaaaggtgctagtgatgacattgtcgtctaagttgagtgaattgatcatga

SEQ ID NO: 25931 - DNA, 343 bp, Glycine max
agctttggataatgatttgtatacaatttttagtcgtataaagtgactaacaaactcccccaaatttacagttttgcttgtcctcaagcaaagaaagaatagttcacttgtcctcaagtgacaaagacagtggccaatcaaaagaaaatggtgtttgattcatcaaggacatcaaccatatgaactgaatatcatggaatgcttaaatcaattacttttcacaagcatacagtttttcagagataagagcacaagcattagagtcatagctgaaataagctagtaagcatgacagaaatcaaggaaggatcatcaaccaaaacctcacagtcattgtttcact

SEQ ID NO: 25932 - DNA, 450 bp, Glycine max
taacccatggaagctcctaatatctcccactctttttgtggtgggccattcttggatggccttgattttctcaaggtccacttggaccccatttctaccaactacaaaacctaagaaaactatattatctacacaaaaggtacacttctctatatttgcatagaaggtgtttttcctaaggactgaaagaacttgtctgagatgtcctaagtgatcatctagcctcctactatacactaaaatatcatcaaaataaacaactacaaatctacctatgaaatcccttaagacatgatgcataagcctcattaaggtgcttggtgcattagtgagcccaaaaggcatcactagccattcatacaaaccaaacttggtcttgaaagcaattatccactcatcaccctttttcatcctgatttggggataccacttttaaaaacaaattttgaa

SEQ ID NO: 25933 - DNA, 337 bp, Glycine max
  unsure (1)..(337): unsure at all n locations
agcttctatataagctgaaccattttatttataaacacaagttgagttttattcagaaaattagagtttatctcttttatcttagtgagagtgattctcctaaattcttgattgattcaagaacaccctggctgtatcaaaggactttcacaacatttgtgtgttgccctcgctggaaagagtgattctttccttcctttcatcttcacccttgttctttcaaaccacaattccagaaaatccacctctgcccagaattatctcgtggccataactcccgttttacgcactcaaattaagtgattcttgagccaaaattgaatttcanaacgagaac

SEQ ID NO: 25934 - DNA, 382 bp, Glycine max
tctatataagctgaaccattttatcaataaacacaagttgttttttattcagaaaattagagtttatctcttttatcttagtgagagtgattctcctaaattcttgagtgattcaagaacaccttggctgtatcaaaggactttcacaacctttgtgtgttgccctcgctggaaagagtgattctttccttcctttcatcatcacccttgttctttcaaaccacaattccagaaaatccacctctgcccagaattatctcgtggccataactcccattttaggcactcaaattaagtgattcttgagcctaaattgaatttcaaaacgagacctttcacctcgtttggaatcacctcatttggagccctgtagcttcagtta

SEQ ID NO: 25935 - DNA, 219 bp, Glycine max
agcttcatcctcagatccctcttgttggacaaggcttaatttagacagccctcctaggtttagattaacttaaactaagcttcatcctcagatccctcttgttggatgttagtcgctttatacgactaacttttgtatagaaatcattttccaaatcttgtatagttccccaatttgtggttattttggagtaaattttgtaaataaatctttttttat

SEQ ID NO: 25936 - DNA, 340 bp, Glycine max
agcttagctaacacacccctctaatagctaagctcattctatttctaaatacatgaaaatacaaaaaaaaaatctctacttcaaagactactcaaaatgccctgaaatacaaggctaaaaccctatactactataatgggcaaaatataaggcccaaaagaaagaaaacctatacttatttttacaaagacaagttgacccaaccttggcccatgggctcagaaatgtaccttgaagttcaagaaaaccgcagggctttttaatagctctgggccaatcttcttggaatcttttattcaatgccctttagggggaagaatgcatcatatatgcttttttt

SEQ ID NO: 25937 - DNA, 530 bp, Glycine max
agcttggaggatcaatatacaggatcatcttccttgtatttaagcaaataattttttaattaaagatctttgaatgttgttagaaattatcactatgagtgtaagtttttggtacctatcaattcattagtcttcaagttagaaatttattgatttccaccccttgcaaactcaacatttgttataaaaagtttaaaatttagagagaaagcgtttgtttttatttattattaaatttgcttcacaaccctttgcaaactcagtaggttgcaaaccaaaatgcagtgatatagtgccatccaacaacaacaacattccgtaaagttcaaaaagctaggcacaaccgttcaactttcaaactcaaaaccacaacatgaacagaaaaacgtgaaacataacaaaatgggttgcactaatagtaggaagcaactaagaaaatagtaaactaaaaagtgttttattaagccaacttgaagttgagcacactaagatgagaaagaaacttgagccagcaccccactcaaccccca

SEQ ID NO: 25938 - DNA, 482 bp, Glycine max
tatagaatatataataaaagaactatgactattgaagaatctattcatgtttcctttgatgagtctaatgctatttctccaagaaaggatattttagatgatgttacagaatctttagaacaaatgcacattcatggacaagattctaaaggaagaagtcaaatcaaatgatgaacttccaaaagaatggaaagcttcaaaagatcatccccttgacaacattattggtgatatctcaaaaggggtaacaactagacattctcttaaatatttatgcaataatatggcttttgtgtctatgattgaacctaaaaatataaatgaagccataatagatgatcattggatagtagctatgcaagaagaactaaatcagtttgaaagaaacaatgtgtgggaattagtaaagaaacctgaaaactaccctatcataggaacaaaataggtatttaggaataagttagatgaacatggcataatca

SEQ ID NO: 25939 - DNA, 358 bp, Glycine max
agcttggccaagaatcttaaagaagttctccaaatgttacagcaagaagaagaaggctcttcctcaaagaaggaagaaacaagttcgtcagaggaagaagaagaccatttctaccagaacgaagatgattgttttggtatttccttgaatgatgattaaaatgttaattgttttaccggtcatataaccaattgaatgttttattgttgtaatagttccggtcaagtaaccggtactgaagcaaatagtgaaattttcggttataaaaggagtcatcgaccatgatgtgagctcttttagatagtcaattttttcaagttttagagagagagagacgctctgcatagaaaaaaatctt

SEQ ID NO: 25940 - DNA, 651 bp, Glycine max
atggatgatggggtacttaattaaactagaatttataatgagagctaaaccaacaagaaaacctcatgggttggatatgatccactgcatatataattgaggaggatgagaagaaaacaaaaaaaaaataaaaaatattaagaatggtgggggtgctatggaagaagatcaaggcaaaggtgaagaacgaatacttatatatggcatgtgtgaaacaaaggttaagtgtgagaatgaacggtacaagtgagagaagtcaccaactatacaggttttttaatttcactccaaagaactatgcatgcttcatgacacaacctctttttaactattagtacggttaaaatgaccccaaaattaagccttgtcttaaaaatgtattgtttggttaaagggaaaccagcctgatgataaatctaaaactcctaaaataaaaagatttcataatcacgtaatttggtcaaaaaaccattaaaccaacgcaaaactattcaaaactggtggtaaaaccagatgaaaggggatttttcattttttaaaacctttttaaattcaattcaaatgaaaattttaaagataataaaaattccaattcattaattttttaatagcataagtttaaccaaatttttgcaagaaaagccccaaaaa

SEQ ID NO: 25941 - DNA, 487 bp, Glycine max
agcttctggcggtttgaattgtgagtccttataatcttctggtttagccttggaaaaactggaatcagcaataggctttgcattgttaggctgagttaatccagccactgccttcattcatgtgattatcaatgtttactcctgctgcactcacttcctgaccttctggtttgtgattcttgacatcaagaaaaattaaatgcttgattacaatcagcatccctataatttaaatgtgaaataactacaatcttccattcatttccataaattatcatgaaattcatctctctctattccttttaatacatgttaaaatcaaaagataaagactaaaccagcctataagatttaaaagctaaattcactagaaattacccttacctttcggtaagttatcatgtattagtcatgagagtgaacactaaataaaaacgattgcaatataaatatatacatgaagagctgggttattaaaaaaaaaagt

SEQ ID NO: 25942 - DNA, 498 bp, Glycine max
ctaagctttcacaaatgtcttcacaaataatcatcacacagcagtatacctattcttgactacccatcatatctccccaaaccccatacccacgaaaattaaaggagaaagaagtccacccaaacctgaaatttcgaagtcccactcgtagccacgcacttcacgactccggaaatgctctcctttcacgatttggggcagaaatgatggccaaaggttgaagctttgtgtggagcttcaatggtggagaaagaagagagaaagctacgtgagagagggagagaaaaggcttctgaatttctttcttttggctgagtgaggagagagaacagctttttggttttaaaataaagggttttctctttttctattattttatttaagctctgccacatgtccccatttgagtggagcaaaaagggcccactttccctttttactgtgacccacactcagccaaaaagtgagaaaaatctgacctttgaaacactaaaaatc

SEQ ID NO: 25943 - DNA, 436 bp, Glycine max
gcaagctggagccaattccaagtcactaggttgtcttgagccatccccgacaacagttcctgagccataaggggacccacctttgaccttctccatctcatacatgccatctccaaatgtgtacccaaccggaacaaaaatcattccatggtgaacaagctgagtgacagaggtcaacggggtctcttcttgtccacctccttgagaactagtgctagagaagaaccctgcaggttttcctgctagtgcctgtgtatgccacagccctatagtgccttctaaaaatgctttgaattgagaagccatggttccaaatgttgttggaaaaccgaacagaaagccatcggcatcggcaagctcacggggtttaataatatgaacatcatcactctttggaggtgctcccttcttcacaaggacttcttcagacagtgtt

SEQ ID NO: 25944 - DNA, 580 bp, Glycine max
ttgatgtaaaactcttcactatctatttaaagttgtttttacgtgttcattgcttttatctgtatttaattcttgcgtgtttgtggcttgatcacccatttgtgtataaagttaggatttttagcattggaaagtgctttaaatccttagaactggataaaacagactagagaactgtatgtctggacacgaagtgtaggggtttagtttatattatgctgtaatcctaatgcaattcatttaggctaagttcgacaaggaatctagaataaagtttaaatagaattagactcattcactagaggaatcctagtttgggtagtcgttttcggcataaaacacataaacaaccataaatagagaaaaacacttaattacatcattttgttcagtagaaagacccaacgttttaatcatttgtttatctctcacatttagatagttaattttgtagttaaatcaaaactatagacacaacttctctctatatttattgggcttatacaaatatttacttactgaatgaatgctctctgattgaaacaagtccatgtcgacactcgttcttatcgtctatata

SEQ ID NO: 25945 - DNA, 366 bp, Glycine max
agcttatgcactgaagatgtaattatgttatttttatgcccgaacacacaccatttactagtttaccatgcagttaagtaaccattgtttcaatttatctttgtttttaagtgaaactgtgttatgatcccaacatggttggctcctaacacatgaaactaataatgtagtgtgaagttacacacttcccccttctttgtttttgttttgtagaggaaaacgcaacgatgagcaaacatgaaaacaaatggtatgcaatgttgcagatcaaaaagtttgttgaacgcatatgcatgatgatgccatgactcatgcaaaatgtgaggctggaatatgaatacgcgacaatgcaggatatgttcatta

SEQ ID NO: 25946 - DNA, 278 bp, Glycine max
tgcgaccatttgaataactcaagagcttccattgttcaattttgatcttctcgatatattatgcgccctaatcggacctccgagtgaaaagctatgaccatttgaataactcaagagcttccattgttcaatttctagcgtctcgatatcttatgcgcctgaatctgacctccgtgtgaaaagttatgaccacttgaatatctcgagagcttcccttggtgaattctagcgtctcgatatcttatgcgcctgaatccgaccttcggaggaaatgtttg

SEQ ID NO: 25947 - DNA, 404 bp, Glycine max
agcttcaagaaaaggcccaaactccattcttttatctaatttcaagcttaaataggtggcttttttcgtgcttgcgcgcttagcgcaactctgaaccgcttagcgctaattagtgaatttgggcttagcgcatgcttttctcactcaatggatgtactgaagcggtgcgcttagcaagatgacccttcactcagtgaacatgcacagctcatccttcttccagattcttcctcacgctcagccgaggagtgttgcgctcagcggatggcttgctaagccagcagattggcttagtgagagggtgaaaatcaccacctcacaaacttgcctaatttacctgaaattgagagaaaatgattattaaacacacgaaatgggaagtcctagtatttattacctatctt

SEQ ID NO: 25948 - DNA, 93 bp, Glycine max
tgatgtgagaaagcgtggaagagtcagtcttcctactttttttttgtttgaccccaaatggtaccttgaaatattgtcccgggggtcagaaaa

SEQ ID NO: 25949 - DNA, 479 bp, Glycine max
agctttgatgcaacatttggagaggtttatgatacaacgagatgatgcgctccatgagaggttggatcaaatggagaatagagatcataatgaagaagaaaggaggagaagagggaatgatggtgttcctagacaaaaccgaattgatggtattaaactcaacattcctccatttaaaggaaagaatgatccggaggcctacttggagtgggagatgaaaatagagcatttttctcatgcaacaactatgaggaggaccaaaaggtgaagcgtgccgccatggagttttccgactatgctcttgtgtggtggaacaagctacaaaaggagagagcaagaaatgaagagctggttgatacatggacggagatgaaaaagatcatgaggaagcgatatgtgccggctagttactcaagggacttgaaattccagctccaaaaacttaccccaagcaacaagggggttgaagagtatttcaa

SEQ ID NO: 25950 - DNA, 57 bp, Glycine max
tcaacattcaatttcaagcgttccgatatattacagggttttttttttttttcccac

SEQ ID NO: 25951 - DNA, 469 bp, Glycine max
agcttctttgagaaaacttccttgagattctagatcttagctacacacacccctctaataactaagctcaccttcttgagaagcttccttgaaaagattcctaaagaagctagagcttagctacacacacctctctaatagctaagctcacctccttgagatgagaagctagaacttagctacacaccccctataatagctaagctcacccccatgacaaaatacatgaaaatacaaaaaaagtccatactacaaagactactcaaaatgcctcgaaatacaaggctaaaaccctatactactagaatggccaaaatacaagacctaaacgaaggaaaaaacctattctaatatttacaaagataagtgggctgatacttagcccatgggctcaaaatctaccctaaggctcataagaaccctagggccttcccttggatctctggcccaatctacttggagtcttcta

SEQ ID NO: 25952 - DNA, 530 bp, Glycine max
  unsure (1)..(530): unsure at all n locations
tttctacagcatagaaaacaaacaggtaaaaattacatctatctgagcataatacaattttacagtatttgtggttgctttgctaaataacaaaatataaaatagcaaagcaagttttcatcacttatccgagggtaacgaacttctgagttacatgagatggacaaaagctccagaacaaactacaaacattgttgttgcacaatttaataccaagttccatgggatggaccaaagagcctagacaaatataaatattattggacaatttaattaacaggtctcaggttatgatttatttacagttttgaaatctgcaatgtcataatttgtgaatcattgataaagttaaatggaaaaccttcctcaaatgtatacaagatatgtgaattttcaaattatagcaaattgtgtgacctaagcgaagaatcaattccttttatcanaaggaagaaagaaaaaacccaaattcctcanaacacaantttatatgcccgagtcaaaagaacaaattacaacctacctgctga

SEQ ID NO: 25953 - DNA, 434 bp, Glycine max
agctttaaaatttgaattaaaacgttcataaagtgctggtaatcgattaccatatatgtgtaattgattacacagtgcaaattttgaattcaaattttaatagctgttgtaaatcatctttggccactggtaatcgattacatcctctggtaatcgattaccagaaagtaaatctcttgaataaagctttttaacttaaatttcttggccaaaccttttgctacttcaaataggaattcccttcctatttaatatacccttcctaagactctagaaactgtcttgatcatccatcttgaatatctttaatttctttgtcttgaataaatctttgagaaacaagtgatcatccattggcataatcaaaacattcagcttgatcctttgtctacacaaaccacaagacaatggaggatatacatggagaataagat

SEQ ID NO: 25954 - DNA, 544 bp, Glycine max
  unsure (1)..(544): unsure at all n locations
tcaggctgctcaattgctccaggttgctgcatggaagggcaaaggtttgtatggtggtcagcagaggagcacaaaccacaaacccttgcgacaggtacaaatttctgattcaaggccagctgggttaccaagttaaccaatgcatccagttttccttcaagcttcttagtttcagatgatgcagatgggtttgtagctacctcatgcactcctctaatgactatggcatcatttctggcgctaaactgctgggagttggaggccatcttctcaattaaatttctggcttcagcaggagtcatgtctccaagggctccaccactggcagcatctatcatacttctctccatattactgagtccttcataaaaatattggagaagaagctgttctgaaatctgatggtgggggcaactggcacatagtttcttaaatctctcccagtactcatacaggctctctccactgagttgtctaatacctaagatacccttnctgatggttgtggtcctagaagcatggaaaaaattctctaagaatactc

SEQ ID NO: 25955 - DNA, 411 bp, Glycine max
agcttgtgtagcggtaattctaactgttaaaagattttcgcacctgttacctagatgtcggtgcagcttgataatagtttcctcctcttccttggtgtaatttcctcttttgaggtttggccttaggtaattcagccaccttaatctgcaactctttccacatctcgcaagacctgacaaattaataacaacaacaacaacaaagtaaaaccaattacaatggattcatatatgatttaggtataatctgtgcatgtgtataattaaacattgaatatatggttcctacatattgatgtagaagttaaaccaaaccttgaaaacagagaagaagaaaaattgaaagccacattggcgactatattgatggtacatgctctcacatactttattttgtttctgaccaaacta

SEQ ID NO: 25956 - DNA, 372 bp, Glycine max
ttggggctgagaacctatataacagtactggggtttttgttttttggggagaagaaaataattctaggattttagaattccaatttttactgttcatgcgcactgttcacctagaataaaatttgttttttgcaatttcgtttctgcttcaatctacaatttcgttttctactgattaatggaaggctaagtctccagcgttgttttctcttgaggatcaagcacaactctttttgaggttttgttattactattgaattctgatcagtttttcctcttcaccaaatgctctgtatttgttgctattaatccatgcatgcctagtgcttgatgaaatggctctgcccttaatttaccgtcatgcttaatgat

SEQ ID NO: 25957 - DNA, 363 bp, Glycine max
agcttctttgagaaaacttccttgagattctagagcttagctacacacacccctctcataactaagctcacctccttgagaagcttcctaaagaagattcctaaagaagctagagcttagctacacacacctctctaatagctaagctcacctccttgagatgaaaagctagagcttagctacacaccccctataatagctaagctcacccccatgacaaagtacatgaaaatacaaacaaaagttcctactacaaagactactcaaaatgccctaaaatacaaggctaaaaccctatactactagaatggccaaaatacaaggcccaaaagaaggaaaaaacctattctaatatttacaaag

SEQ ID NO: 25958 - DNA, 462 bp, Glycine max
cgttctatagaaggttcgttcctaatttctctacaattgcattacctctcaatgagctggtgaagaagaatgtggcatttacctggggtgaaaaacaagagcaagcctttgctttgctcaaagaaaagcttactaaggcacctattctagctcttcctgacttttctaaaacttttgagctagaatgtgatgcctctagagtgggagttggagttgtattgttacaaggtgggcaccctattgcttattctagtgaaaaacttcatagtgccacccttaacaggggggttcatagaactaccaagaagtccccttttgaggttgtctatgggttcaatccctaacaccgttagacctcattccccttcccctagacacttcttttatacattaagaagggggattctatggtcaaagtttgtaaagaaagttggcatgagaggggttaataacccaatttga

SEQ ID NO: 25959 - DNA, 365 bp, Glycine max
agcttatccttatggcctgcctcttttcttcaccccccgtaccaccccggaagatttaagccaagcccctactttcgaggggcaactcccaccttatgaagactatcccgggcaagacgatggggaaggaaatacccatcttggccccttgctccacctcaaagatccatccccgcatgaactaccccaaccgaacatagtccgccatatcccggcctcacccacacccgtaaaagaatctgttcccttcgcggaatataagggaaagattgaggcgcttgaagagaggttaaaagcaatcgaaggcctcggcaattacccattctcggatttagcggatttatgtcttgtgcccaacatcgtca

SEQ ID NO: 25960 - DNA, 564 bp, Glycine max
tattgttatatttatattggttaataaactagtttttctttgtaccacacattaagatcatcttctccaacgactcctttgatagtaacaaactaattgacgaggcatcctttctattgtggacatggctatcgaatttggagaaggattttttaataccttttaatcagtggtctagtaatattagagaaaggttttggtattatggaagtcaattcatataaactagtaatagcttaatggtagtatggcagggtagcctgttttggttccactctagactctatttagtctgattaggaaccatgtgttaggctatccaattacatatgtatttcaaaacctctggaattgtgtttcattaatataaatacttatctttgctggacaaaaaaaaaaagaaaaaaattacaaccttctggttcaaggtttcaaacttttgacctattaaaactcgacctttttgttttctccaactcgatgatttaatctatagcctgggataagtccttggttttaatttttccaaaaccttaaaattttggatatgtctaaaaaaaacca

SEQ ID NO: 25961 - DNA, 374 bp, Glycine max
agcttcaacatcagaccacttcctttgttctggaactacttcacatggacttgatggggcctatgcaagttgaaagccttggaggaaagaggtatgcctatgttgttgtggatgatttctccagatttacctgggtcaactttatcagagagaaatcagacacctttgaagtattcaaggagttgagtctaagacttcaaagagaaaaggactgtgtcatcaatagaatcaggagtgaccatggcagagagtttgaaaacagcaggttcactgaattctgcacatctgaaggcatcactcatgagttctctgcagccattacaccacaacagaatggcatagttgaaaggaaaaataggactttgcaagacgct

SEQ ID NO: 25962 - DNA, 518 bp, Glycine max
tccttatagtgcgtcacgtttaaaaccgagctttatgtggtgcaagcctttgatggtactcggcgggaagtgatgggggaaatcgacattcccattcagataggcccccacacttgcaacctggtgttttaagtaatggatataaatcgcgcctatagctgcctcttggaaagaccttggattcatgccctgggagtggtcccttcaacgcttcaccataaattgaaattcgcagcgggtggacttttagtgatagtgtccggtgaagaggatatgttagtgagatgcccctcctccggaccgtacgtagaaacggcagaagaatcattggaaacggctttccaatcctttgagggggtgagctgcgcctctgtggaaacaagtccgtcgctaccttctctctccagaacggccataatggtggcgctgtgttatgctcacgaatggatttgagccccgaatggtcttagcaaagaccgcttaggaatgccaacatggtctattccagggaaatccct

SEQ ID NO: 25963 - DNA, 503 bp, Glycine max
agcttggtttgaggtacttacccgttgtagactgaagaaaatgaagaacgaacgatgaatcttgaaaaatggtctagaatcttcgcgtaattactcacggaaacgttacggaagcgcctcgacttggattttcttcacgaaactaattttcctcagctatttcgagagagagagaagtgcctaaggggttgaacccttttctacttcacttctccccctatttatagaaaattgggggagaagcttgccacccagctagcccaggcgagcaaggttgcttcctccagaagcaaccgccttctggaggaatcttctggagggcccaagtgggcctggttgctatttgcacccccatttttactaaatacacccctgccttgcttttggtgattcttttttcgtaaaggtaccgaaaactacgaatttccgtaacgatacttgttttcttttcgaaatgttaccgaacccttgcggattacataatcatccccttttttgactta

SEQ ID NO: 25964 - DNA, 373 bp, Glycine max
tctagcacactccagacatcttatcaaagatcccaactgtcagatcatggaaaagtttcttgtgaagttgcagaccaaatttcgagaagatccaacggctaacgaaagctggaaagcgtttttaccgacgcagcttcatgtagctttctctagaagcttcattaagaggcttcctccagaagcttcctcgtggcttctttgagaagctttctcaaaaggcttctttgagaagctagatccttatctatccacacccctctttcaactaaattaacctcgtgtaaaataattactgatgaaaataacgcgacaaataatcaaacatcaaacataattactggatatatatagatagatatatcacggggttcca

SEQ ID NO: 25965 - DNA, 404 bp, Glycine max
agcttgctctaaatttacattgatgtttgtatttattggaggaggttgtatgccatttttgttttaagagtaacattccttggtaaaactaattttccaaatgtttgccttcgcaggaaatggccccgaggaagcttgcctcaaagaggtccaggaaggacaaggcggccgaaggaactagttccgctcctgagtatgacagtcaccactttaggagcgctgtacaccaggagcgcttcgaggccatcaagggatggtcgtttctccgggagcgacgcgtccagctcagggacgacgagtatactgatttccaggaggaaatatggcgccggcggtggacatcactggttactcccatggccaagttcgatccagaaatagtccttgagttttatgccaatgct

SEQ ID NO: 25966 - DNA, 461 bp, Glycine max
tgagatgaggaagtgttgaagggtgaaacttcctgcttttattgttgaccacagagtggtacctggagatatgtcgtgggggtcaggagaccttggggacgtcaggtggggtgctattgcccaaaaccaagcttgaccaatcccgacccaacccgggcatagtcggtcagtgagaacctgtgatgtacctaaacaggcgagctcctggcagtcaacagataaaaggaacaaagaccacaaagcaaggaggcttgtggtggctggccagctgtgaattttgtgtaatatgtggattatggcctctggtaatcgattaccaagggtgggtaatcgattacaaggcttaaaattgaagacaggaggctaagatggtctctggtaatcgattaccaaggggtgtaatcgattaccaggcttaaaaacgaaatcaggaaacttaaggagcctctggtaatcgatta

SEQ ID NO: 25967 - DNA, 337 bp, Glycine max
accttcaacctagaggagacggaccatttttgtgttggagaagatcaacgacaatgcctacaagattgacttgcctagtgagtataatgtaagtgccactttcaatgtgtctgatctatctctttttgatgcagatggaggagccttggatttgaggacaaatccttttcaagaaggagggagtgatgaggacataaccaagggcaaggaccatgaagcacttgaaggtcccatgaccagaggcagacttaaacaagcccaacacgtcatagagacaaggctggtcatttgtatagctgccattgatgatgattgaaggcccaagtggagaaagatg

SEQ ID NO: 25968 - DNA, 529 bp, Glycine max
gaatcggacatccgtgtgaaaagttatgagcatttgaattattttttagcttccattgttcaatttcgagcatctcgatatattataagcctgaatcggacattcgtgtgaaaagttatgaccatttgaatttctcaagagcttccgttgttcaatttcgagcctctcgacatattatgcgcttgaatcggatatccgtgtgaaaagttatgaccatttgaatatctcgacagcttctgatgtttaattcgagcggatcaatatattataagcctgaatcgaaccttagtgtgaaaaggtatgaccattttaatttcccgagaactttcggttttcattttcgagcgtctctatatgtgatgctccttaatataacatccgtgtgaaaagatatgaccatttgaatttctcaagagcctccggtgttcaatttgagcctctcgatatgtgattggccgaatcggacatccccgtgaaaaggtaataccttttaatttttaataaatttccttgttaaatttttagcttc

SEQ ID NO: 25969 - DNA, 506 bp, Glycine max
agcttcaaaccacagcaacacaaaatctatgtgtccaaaacccctcaattcaatgggttttctaggtttgaaaagtgaaatttagaatgaggtaaatttgaagcaaactctcacctcacacaagtccataacatcaatctaaacttgcccaaactggatttacacctaaagttccaccaaatcaaaatttgactcctcaacacccaattttgccctagaaatggctcttggttcactttggtcatttgtttttctctctagctcagcctaacctttctcacatgtcctaaatgacatttcaagctattattaactcactttaacctccatttaccacagaattcagacttagccttccaactctcaaagtctcactctttttccactcataacatcacattctcactttctaacctttggttagttctacccttttgtctctaacagatttccatcagcaatttcagcatataaacatcacaaacttattccccaaaaaccctaaa

SEQ ID NO: 25970 - DNA, 471 bp, Glycine max
  unsure (1)..(471): unsure at all n locations
ttgcagtctatataaagcttcaagatgtgatgtagctccttgtttatcttgtaggcctcggatcttcttcatcaatggagtcctttgcttcttgaagattaatggcagtggaatggagatggaagaatgatgattggagatgccacttcaaggagaagattagtcaagaagaagctcaccaccataggaagccattgataagagcttgaaagtaagagaaaaggagtggagggaaagggagagaaggagcacgaaattttatgcgtcaaaagtagtctgaactttgaagtttaattctcaaatgatcaaagttganaaaatgcacacacatgaccactatttatagcctaagtgtcacacanaattcgagggaaatttgaatttctattcaaattttacttgagtttgaaattgaatttgtgcaccaaattttggaaccaaatttcactattatgattagtaaattttagc

SEQ ID NO: 25971 - DNA, 467 bp, Glycine max
agctttggaactttacactatatatgtttttattccgtgatgggagggagagaaattgtgtgattttcacccattttttggctagaaaataaatggaatggatatgttgtcaaattttgtgggggtaccatttaagaattcctttctcttttgccaagaaaagagaggtgatttccggtgactctttttttttagttttttaaaaataaaataaatttgattataatataaaataataaataattttttgttatgaaaatggtggagtaaaaaaattattttttagttagtataaatatttttatataatttatctatttctttcctctcttttttacttatccaagatttttttttaacttttttgcctactatttttatccccctaaacaacaaaatttttttaaacccgaattttttttttttttatttaaaaaaaacaattttttttaaaaaaacttgaataa

SEQ ID NO: 25972 - DNA, 356 bp, Glycine max
taagcttgcccaggtgtttttctttcctaccccctaatggatccttatgttagtttcttattctgctcagtatcctagaagttaattaacctgttgcaatatgtcaagagccatttcagctgtttttggatatacccttcaaattcttatctgtattcaaggctataaatctggaaaattctgctgcatgggactcttttggagctttttaataacttatgtatacactgctggaaggtgatgtaattgcttatcgattgattgagttaacagcatcttggactccggaactttcctcctttagggtacatatcaagtctgctcttggattacataaatgaaaaaaaaattgcctc

SEQ ID NO: 25973 - DNA, 353 bp, Glycine max
cctttagtcacctcccgcatgcaagcttcttagtctcggctgatgaagattattttttggctacttcatgcactcctctaatgacaatagcatcacttctggcactaaattgctgggagtttgaagccatcttctcaattaaatttctggcttcagcaagggtcatgtctgcaagggctccaccactagcagcatctatcatacttctctccatgttactgagtccttcatagaaatattggacgagaagctgctcacaaaactggtggtgaggacaactggcacataaggtcttgaatccttcccagtactcatacaagctttctccaccaagttgcctgatgcctgaaatg

SEQ ID NO: 25974 - DNA, 555 bp, Glycine max
tttatccatggcttcctatggtggtgagctttttcttgactcaacttcttcttgaagtggcgtctccaatcatctttcttccttctccattccgctttcattcatcttgaaaaagcaaaggactccattgatgaagaagatcctagttctacaagctccacatggagctacatcacttagtaacgtaacataaagcgtaaaatcattcagttcatattctaagattactttccaatctcactgaaaatccaatttcatgacactagtgataaaatagaatcaagcattatgagtataatgaaattaccaaaaatgagtaaaacagattcatacatatataatacccaaagggatccatatgggtacaaagattacattcaatcctttagaaaaactaaccgatcattgcgtagagcacaagactaacaagagaaatggcgaataaagtgatccataatcacaactctgcagtgcctcggctgcactattacttttctccttctttgcatttttctctggaatttcttcaactcgattctcttttccttaacaatg

SEQ ID NO: 25975 - DNA, 451 bp, Glycine max
agcttgccgcccagctcgcccaggcgttttctgttgcttcctccagaagcaacagccttctggaggaatcttctggagggcccaagtgggcctggttgctatttgcaccccctgtttactaaatgcacccccttttctattttttgtaattctttttccgtaacgttacgaaactttacgaatttcgtaacgatacttattttccttccgcaaggttacgaatccttacggattatgtatttactcttttttggctttcaaagaagttacggaaactcacggattgcgcaaaaacacctcttttcgatttccgccatattacggaatttcacggattacgcaagcctgcttccttttggatttctgagacgtctcgggacttcatttattgtatgtcatcaagtaataatccccggacgaaattagggtatgacagcataatatatcgaca

SEQ ID NO: 25976 - DNA, 502 bp, Glycine max
  unsure (1)..(502): unsure at all n locations
tgtgactagtgaaggaaataatcatattgaatattgtacttcaggtatgggcagaacaattaggaataggaactcatccactaacaatgttagtgttattcgtaatactcaacaaccatttccattttatgtggggaacatgagaaggaatgataaagcaaatgaatatagaggtttctttgctcccttaaatcattgtcacaattgcatctagtaacattgaaccaatagctttctggccattgctttggtggaccaccttaataggtggtttatggataataattatcaaccgttagatacatgctgttaaaatatgatatgatacatgtcatatcctaatttcgtctaaggacgattgtttgtcaacatttggatcttcgtcagccgatttgagctgcttaacaccaattgttacgcaatctgtanggttttgtgactgttcggaaagaaatgagcaatatactcaaaatgggggcaaaatggtcaatttgggggcatt

SEQ ID NO: 25977 - DNA, 349 bp, Glycine max
agcttcctcctcagctgctcaaatgcctctctacaaagttggtcaagcaaaaaattttcgtccttctgaagaagcttggacaatgctaggagaatctggctaaaatcctagatgaatctcttgtaaaaacatgcatgtccaagaaaagaacatacttcttgcacaaacatggggtaaggaaaagaaataataacatcgatcttcgccttatcgacctcaatacctatactagagacgaaatgccctaagactataccttcatggaccataaaatgacatttttctaagttaagaacaaggttagtctcaatgcatcgatcaaaaactctagagaggctacccaaacatg

SEQ ID NO: 25978 - DNA, 426 bp, Glycine max
ctcataaaaaagtgaaacatagcctcctcaagagtttccttttctataggatccacttctttaggaacaatgacaacttccatctcttatggtctttgggcaatatctagagataagatctcagttgcatgttctgtagaagattgaggtagaggttgggggtgtttgattttgatgcttggtcttttggttgctgattgtgatttaggttcagacttagattctagagcctttcttttttaggttgttctagggtcacaaggtttagggtttgaaagtggttgtttcttaagatttttgtctttaggtttagatcaaggtggggtggattttctattcatgggtagtttgcgtctatgttgaatggggtttaagttggggtcatccccccctctctattcttgagctctcatatattctaccctt

SEQ ID NO: 25979 - DNA, 256 bp, Glycine max
  unsure (1)..(256): unsure at all n locations
agcttagggatggaatacttacttgtttgtgatgaacaaaagcgcaaaacggaatcaaaaaatgcgaaaaaggatgaccctagggctgcaaattcgtcaatcccgtgggtatggcttttgaaaggggggaaaagaagtttttgaatgtaaaaacgccccccctttcgtcatttttataatttggtgcaggggtggctcgcccannctcgcccacctcgcccagncgagctaaccttcactctttttttgttttttt

SEQ ID NO: 25980 - DNA, 421 bp, Glycine max
ccttttcgattcattctatgtacccgtagtggtccacattgtttttcgtgcatttttattctcgttttgtttactttttatacccccttttgacgtgcttaagccattttacttaagtcatttctcgcttaacttaaaaataaaataaatttccaccgaacgtttgaatcgtatgatccgtaaactttggttaagataaattccgaccgttcggtcgtgccgtaaccacgttggaaataaaaaaaaaaaaaaataataatataataacaaaatataccttttagtaaaataaagtggaaaatcaatcggacgttttctctttgggatttctcattcttaatcgaattgattaaataactaaagtgaaactaaggctaaaatcaactcgcctagtcaagctcgttcataaaaaataggcttt

SEQ ID NO: 25981 - DNA, 390 bp, Glycine max
agcttcctctgccgtaaaaaagatattatctgccagtgtttgtaaaaaaattgcgcaatgtcggctgaaaaatatccgtcggggctatttaactaccgatgtcggctattgttttttctattccacccctgaattatatttggatgatgcctattaagaaatgttcggtcggggtcatccggtcatgcttctttttgaggcctcgatctgtcgtctttcctagccggccgacgtcggctagcatttttttcgatcaatatctgtgtgaatcatgtttttttttgccaaggagggctaatgttttcgtggccgacaaaatgagaacatgccaatgtctggcgaaacaccaatccccaccaaaaaacctaacccacctacattgtgattttt

SEQ ID NO: 25982 - DNA, 344 bp, Glycine max
tcatgagagagtcaaagatcaaattgagaggaaaaatattttctatgctaaacaagccaacaaagggagaaagaaggttgtcttcgaacccggagattgggtttgggtgcacatgagaaaagaaaggtttccggaacaaaggaaatcaaagcttcaaccaaggggagatggaccatttcaagtgcttgaaagaatcaatgacaatgcttacaaagttgagctgcccggtgagtataatgttagttccaccttcaatgtctctgatttatctctttttgatgcagatggagaatccgatttgaggacaaatccttctcaagagggagagaatgatgaggacatga

SEQ ID NO: 25983 - DNA, 297 bp, Glycine max
agcttttgatattactcattgagaccctcattgtctttttaaaggttctcaatctcttgggtgttgttttgctttaagaagttcatctctctgtagggtgatgatcaataagtgatcatcaagctcctgattagaggtgctcatggttggttatttaaataaccctaaccataactaataaataactatagccataactagttataataactatagccataactagttatgatttggtataactggttattggttttaaaatatggttatataactatttatgaatataactagtta

SEQ ID NO: 25984 - DNA, 472 bp, Glycine max
ccttatgctgcaaacatctataatagacctcctcaatctcatctgcaaaatcagccacaacaaaacaattatgacctctccagcaacaggtacaagcccaggtggaggaatcatcccaaccttaatggtcgaatccttcacaacagcagcaacaacaacaacaaccttattttcaaaatgctgctggcccaagcagaccttacgttcctccaccaatccagcaacaacaacaacaacaacaacaaccctagaaacaacaaacagttgaggctccttcgcaaccttcccttgaagaacttgtgaggcaaatgactatgcaaaacatacagtttcaacaagagaccagagccttcattcagagcttaactaatcagatgagacaattggctacacaattaaatctacaatagtcccagaattctgacagattaccttctcaatctgtccagaatccaaaaaagtgagggcatta

SEQ ID NO: 25985 - DNA, 291 bp, Glycine max
agcttctatagaaggttcgttcctaatttctctacaattgcatcacctctcaatgagctggtgaagaagaatgtggcatttacctggggtgaaaaacaagagcaagcctttgctttgctcaaagaaaagcttactaaggcacctgttctagctcttcctgacttttctaaaacttttgagctaaaatgtgatgcctctggagtgggagttggagctgtattgttacaaagtgggcaccctattgcttattttagtgaaaaacttcatagtgccaccctcaactaccccacc

SEQ ID NO: 25986 - DNA, 445 bp, Glycine max
tccattgttcaatttcgagtgtctcgatatattatgcgtttgaatcggacctccgaatgaaaagttatgaccatttgaatttctcgagagctacctttgttcaatttcgtgcgtctcgatatattatgcgcctgaatcggacctccgagtgaaaagttatgaccatttgaatttctcgagagcttccgatgttcaatttcgagcgtcttgatatactatgcgactgaatctaacctccgtgtgaaaagttatgaccatttgaatttctcaagagcttccgttgttcaattttgagcgtctctatctgttatgcgcctgaatcagacctccgagttaaaagttatgaccatttgattttcttgagagcttccgttgttcaattttgagcgtctcgatataatatgcgcctgaatctgacctccgagttaaaaggtatgacccattg

SEQ ID NO: 25987 - DNA, 436 bp, Glycine max
agcttcctcggggccattcctgcgaatgcaaacatttggaaagttagttttaccaagaaatgctacccttaaaacaaaaatggcatacaacctcctccaataaatacaaacatcaatgtaaatttagagcaagcttatgcgcatacttctttacgaacgttcacttgcacaagacattcttataactaagaaaaatgcacccatatacaatcaaggcaccttcgttaccaagattatttacatgtacttccaaggtgtatttgttacctacatcacatgcacttccttggctaaatttacatacatgcatactcaaagcatttggggtaccaaatattgcacatgtgcacattccggtatttctaatatttacgcatatacaaacttttgtgatgattctttgctatctacacaataaggtgatacatttcatgct

SEQ ID NO: 25988 - DNA, 386 bp, Glycine max
  unsure (1)..(386): unsure at all n locations
tcttatccaggcaattcttggtggtgaagctccttctttcttggcttattccctagtggatggtgcctcccctctcctcttctccttttccttccgctgcatctccatggtgtaaaatcaccattgaaggacctcattgaagctcaaagatccagcctccatagaagctccacaagcaagcttccatcaagtggcaatcagagcacaagagcttcaagtaggtgctccttaaacctccattaattttttgctttaccttctcttccattgttttttattcattttttctccatgtatatcctcanatgtcttgttctaaatgttggtaacatgattctttagagttttcaccgattaaacttgctatagaaactagactttatttt

SEQ ID NO: 25989 - DNA, 394 bp, Glycine max
gctatcaatctttgagcaggagaacttccaatgcataattggatgcatcacacattagctcaaaaggggatgtccaatcaggtgcctgaataataagggtggtagtcaccgcacgcttgaggcaatcaaaagcctctttgcatcggtcatcaaaataaaactccaagtccttttgcagcagattggatagtggaagggccactttgctaaaatccttgataaagcgcctataaaaccctgcatgaccaagaaaagaacgaacctctcgaacgcaagaggggtaaggcaattgtgaaataacatttatttttgcagggtctacctctatgcccctactggaaatgatatgcccctaaactataccttgttctaccatgaagtgacattttttaaa

SEQ ID NO: 25990 - DNA, 555 bp, Glycine max
ttatagcagatgccactctactccaaattcttgaaggatatgtttttatggaaacataagtacattcaccaggaaaacattatagtggaaagaaattgtagcactgtgattcaaaagatccttccgcctaagcataaagaccctgtgagtgtaactattccttgttcaattagagaagtcactgtgggaaatactcttattgacttaggagccagtataaatttaatgccactctccatgtgtagaaggttgggagagctggagatcatgcccactaaaatgactttacaattggctgatcgctccattaccagaccatatggagtaattgaagatgtgctggtcagagtgaaacattttatcttcctggcagactttgtggtaattgatatctgtgaagatactgacattcttgtaatattgggaaggccattcatgttaactgcaagctgcatagttgacatgggtagaaagagaaatgggttttgaggatcagaaaattgattttgatttgtttgttgaaagcagcccgcttcagaacaaaatgtttgctta

SEQ ID NO: 25991 - DNA, 251 bp, Glycine max
agcttcaacatcagaccacttcccaggtgctgtgactacttcacatggacttgatggggcctatgcaagttgaaagccttggaggaaagaggtatgcctatgttgttgtggatgatttctccagatttacctgggtctactttatcagagaaaaatcagacacctttgaagtattcaaggagttgagtctaagacttcaaagagaaaaagactgtgtcatcaagagaatcatgagtgaccatggcagagag

SEQ ID NO: 25992 - DNA, 502 bp, Glycine max
ttaaattaaagtaaatttgggattttagtgaatgcataagttactcattgcatcttattgggccttgctcaatgcgcacgttgtactaaagtcaaattgggtcttcatcaatgcataaatttcgcttctgtcgtattaaactttaatgaatcattggtgttacacttataccttatattttgaaatacttaattttacaaattttgattatcatatattttcataatataaagggtatttatttattatcatttttaaatatttattttgtacaaaacacaaattaaaagactaatgataagcatgacttatttatcttaatcaaataatgtaaatattattttgttaattttattaaaaattatcatagtattggtttgttaatttaaaaatattactaatatactaatttcagtactttcctttgataaaatatatttaagtatattatataattattatgaattataataaattaaaaatttaggttcttcacttatct

SEQ ID NO: 25993 - DNA, 449 bp, Glycine max
  unsure (1)..(449): unsure at all n locations
agcttaacanacttagaaataagtgattatgtatttccgaaatatagggggagaaaacggatgcacattttatctatatacagttgtttgttgtttgcttgaatcttgatttcaggtattgtattgtcatcatcaaaaagggggagattgtagatgcaattggctttgatgttttgatgatgatcatgatgatgtgttgcaattgatgcaaatgggcttttcaagattaaaattcaagacaatacttcaagattacaagtcacaacatcaagatgatcactaaaatattatgaagggaattcctaattgaattagcaaaggtttggccaaatgatttaaaatataaagtgtttttaaaaggtttactctctggtaatcgattaccagaagatgtaattcattaccagtggcccaatacgttttataacagctataaaaattgaattcaa

SEQ ID NO: 25994 - DNA, 225 bp, Glycine max
tagatcaggcatccgagtcaaacgttatggccgtccgaattgtttgtcattccatttcaacttttaatcgtcatgatatattacgggcctcaatcggacatgcgagtcaaaactttagcccgtcagaattcacccgagtcttccatgttaaattttgagcgtcgcgataggttacttggcttattcgaagatccggaggaaaagttatggccgtctgtatttgcg

SEQ ID NO: 25995 - DNA, 347 bp, Glycine max
  unsure (1)..(347): unsure at all n locations
agctgggccactggagaaaaggtatcanatttatattgattcctttgggaagttccatataaacttcttcaaacaaatctctattcaaaaaagcattattaacatctaattggagaagacactagtttctagcagcaacaacacagagcaaaactctcacagtggtaagcttggccattggagaaaatgtatcagagaaattgattccagcttattgagtataccctttggcaaccaatcgagctttgtatctatccacaaagccatccattttatatttaaccttatacacccatctacaacccatacaatgcttatcaggtggtaagggaacaagtgtctagggg

SEQ ID NO: 25996 - DNA, 187 bp, Glycine max
tctggtgggacatcttgacttgctttccaatctgacattcaccttttattctgccctcttctattttcagattgggaatgcctctaacagcacctttgtcaatgattttcttcatgcctcttaagtgcaaatgtccaaatctttgatgccatattctgacttcatcttctttggaggatagacatgt

SEQ ID NO: 25997 - DNA, 305 bp, Glycine max
gaacgaaaataagaaacatcttctttgaccttggggaatcttgactccatctcattgaagcgcatgtccacttgtaactccaaagtatcaaacctttcaccaacaaaggcttgaagaccatcgaacctatccaaaatcttttgaaaaagaaatgaatcttttccaccatgtcctttttcatcaacatgtcgagtaccccttttcacccaagaaccatcatgctttttttgataacccaagggtgcaatgcctgaagcgcctattaaaaaggatctttttattggaacataagggtcaaaaacaaa

SEQ ID NO: 25998 - DNA, 370 bp, Glycine max
tcctcggggccatttcctgcgaaggcaaacatttggaaagttagttttaccaagaaatgctactcttaaaacaaaaatggcatacaacctcctccaataaacacaaacatcaatgtaaatttagagcaaactcatgcacatacttctttacgaacattcactcgcacaagatattcttctaactaagagaaatgcacaatcaaggcaccttcgttacctagattatttatatgtacttccaaggtgtatttgctatctacatcacatgcccttcctttgctaaatttacatacatgcatactcaaagcattttggctaccaaaaattgcacacgtgcacattctggtatttctaatacctatacatatac

SEQ ID NO: 25999 - DNA, 371 bp, Glycine max
agcttctcctctagaaagttccaaattcttccaccaggtccaccactctccccataatcagcaacctccaccatggcaccatctcaagcgccccctccattgcaccttcagagccctctccgacaagtacgacgacgtcatctccctatggttcggctcccgcctcgtcgtcgtctcctcccaaacactactccaagaatgtttcaccaaaaacgacgtcgtcctcaccaaccacccccactttctctctggaaaacacatatcttctacactatggtgagtactaacgcgttaaggggaggaagattgatggtggcacaagagaacgaggaggaaaaggtggaggcttctaagtatcagcgcgaaaaacc

SEQ ID NO: 26000 - DNA, 567 bp, Glycine max
  unsure (1)..(567): unsure at all n locations
tgctcacatattagtcttgtgaaacattaattggataattatcaatttcattagtcttataaaatattaattcttgttgtaggataatgacaatgttgtattcaaaaataaaagagtagttgtgcatggcaatattgaaattggataatgataacatgaagctatagtcaattgaagcatcttgaattttaatagttatttttatttcttaattaatattcttagaatttttctttcaattttggtatttaaagtaaccagatctaatagtcaaacatttaattgcagaatgagatgcaaaccttcacaactttcataatgcacaagatgagacatgaaaatctttttgcatcacaagggggacccattattcttgctcaggtttcatttcaaaattgtattcccagttttttttttctctaatttttatcattgcattgatggtgttaaatattctaatatctacatactntgattgggtgtactaatatagattgaaaatgaataaggaaacgttatgagtgaatatggagaaaaatggaaacaatatgtgcaatggtgctctca

SEQ ID NO: 26001 - DNA, 187 bp, Glycine max
agcttgcagtagtccataaccacatgtttctgcacttacaacaatgcatttcaaatctttacaaccttggtattgatgtcaacttcacattcataattgattcactagcttcttttcagttgtgtcaaacaacccctggacaaatgtttgcaaataagaaactaaataacatgccttttgcaaacta

SEQ ID NO: 26002 - DNA, 387 bp, Glycine max
  unsure (1)..(387): unsure at all n locations
tgtaagagtataactctattagtttaaagctacctatggttagtctgttatggttaggttaactgtgttagttagttagttagaatctctgtatgcataaatacagttgtaaacagagattcagtaactaattgtaaaatctcttgtcataataatggatctattttctctctcttatatgttcctctcccaaagctttataaactcaaattaagtcatatctctagttcatgttggattaaacctccacacttgaggtgcaattaaggacggccccaaagaagctgcagctaaggcaggctangggtgacagcaattaaagcagattccaacaatttctaaagcattagtcttagaatttggtttggacctaactcgacccaacaa

SEQ ID NO: 26003 - DNA, 390 bp, Glycine max
  unsure (1)..(390): unsure at all n locations
agcttcttctggctctgaattgntttcttctttttcatgctttgtttctcgtataatttgttccctgcttcttcttttcgatcaatcttcataaagattttatcttttatcggttcttgcaattattcattagcttgggattcacgttttgttatggtgcccctcttaagtcttaattcttcaatgtacaatttcggattgtctgaactttgattgctatgagaaacgatggggtgaatttcatgagatatgtgtcaccgtataacattggtatctggcagttcatttgcattttttgagagtttgaattgatctcagaaagttcatgcaagacttattttcaaattgtgatgttgggtctttctccgtgatagaaatttgcatttaact

SEQ ID NO: 26004 - DNA, 243 bp, Glycine max
cttttatttatgctgcttacatgttttctaatccaagatgattcctaacttgacttttaaattacagaactcgttttaactatacagttaatacctaattactcgcttatcgcatgcttaatatctgtaattactcttaccgtgtatgtgacatgtattttatctatgtttcctaggtatcaaccacagctttctgtagtgaccatatttgttttttgagaggtgacttctttgggtctgttt

SEQ ID NO: 26005 - DNA, 318 bp, Glycine max
agcttctgcacttagctcccttaaccttatactgtacctctatctcaaagcattttgactttgtatttggcacctatgattttttattttttatttttactaactgacgacatgtattcaatatgactacaagtaggcctgatccaatttttcaagcattacagcttagaaagttgacccttcaatcaaaagaaacttgctatttacagccccattttcctaagtacaactcatcccttctctttagattttaatcatccactatatcatttttccttaaataggcacaccccttgtaacccctcttcttctctttca

SEQ ID NO: 26006 - DNA, 313 bp, Glycine max
tgtaagttagttgtgtacctattatcactctgcatatgtgttttattattctttgaaattctgaatgtggtttcaaaaaggtttcaaggccttggtgggtatccaaaatgttgtatctctgatcgattaggaatcagaatcaagaagcaccaaactacaaaggaagcatgggaattgcttcaattggagtttcatgatactgatagaactaggctcaaggcttaaattcaaggaactgagttcgaagatgaaagagagataattttcagagttttccgcaaattatgttttgcatgaattgaatcaaataata

SEQ ID NO: 26007 - DNA, 302 bp, Glycine max
agcttcttttggaccttgaacaagctttcaactcctctttcagaaccatgctatgtgctcgcgactggtctctttcttcccttcgcaacttgagttcactattgctaccccatagagctccgcgaaatttgttccggccatactcttccttgcgagccctcttggtctcttgttcgaaggctctttgcagaattgcattcttcttccgtaacccggcgcactcctcccgaacgtgtgtagcagccaacttgaacttctccttggcgaggtttcctttcctaactcgcttttgagagcttgga

SEQ ID NO: 26008 - DNA, 382 bp, Glycine max
tcttagtctcggctaatgaagatgaattcatggctactttatgcactcctctaatgacaatagcatcacttctgacactaaattgttgggagttggaagccatcttctcaattaaatttctggcttcatcaggggtcatgtctccaagggctccaccactggtagcatctatcatacttctttacatgttactgagtacttcataataatattggagaagaagctgctcacaaatctagtggtgaggacaactggcacatagtttcttaaatctctcccagaattcatataagctctctccattgagttgcataattcctgaaatatcttttctgatggttgtgggcttggaagcacggaaatgtttttctacaatactctc

SEQ ID NO: 26009 - DNA, 411 bp, Glycine max
agcttgcacacatcgtattttttcattattagaaaaagttcataacgaattgaattctttttatacttatgtcatcctgtcaattttaattaaacaatatggttgggatatctctctaattcaggatctaattttaacatgatatgatcaaatttaagaactaaaatcactcaattaaaatatgggaattaaaattacacaaaatgtgaaaataaagaaactcaaattgtatttaaacttttttttctactaatattactattaaataatatgttttaactatgcctttaaaaaaagtatgttttaactatatattaccaaaaaaacatagaataaccaaaaaaaatgtgtattcaaacaaacctactatcagttaggatactttatacttttaatctggccgataaaaaa

SEQ ID NO: 26010 - DNA, 250 bp, Glycine max
tgcatattatatttggtttggcttagagacgttctcttttatcttaaaagcatgcttctaaagtcttaaacaaaaccgaaacttgggtggcactttttaaaattgaacctttcttagttctacctcaaatataaaaaactttaaccaaccttgatgatgaagagaagattttaataggaaatatgtagaagtataaatatcatcaatcgaccatgttgcaaaacatagaaccaccacgtttagattttaa

SEQ ID NO: 26011 - DNA, 395 bp, Glycine max
agcttgctaattaactatgtttttattttcaggcagctgtgtctccagcaaaacctccagaaagcccagatgaagaggtcgatgatcccctgtacttgatgacattgaccatcccacaactgtttttgaagccgctccaggttatgtgggatgctaccatattcggggtgtttaatcaaaacttcccattgtatataaagcacgaagatctcactgaaattgcacacggtggtcaatgtctcaacatatctgttatacagttgtggattctgtaagtcattttagattactattaattaccaaagtaattgttgtgaattcatacataattaaactttgacttaacaacacaaccatctgactgatacaagtgtgccaacggagaattctgatgt

SEQ ID NO: 26012 - DNA, 450 bp, Glycine max
ttaaaatttgaattaaaacgttcaataactgctggtaatctattaccatatatgtgtaatcgattacacagtgcaaattttgaattcaaattttaatagctgctgtaaatcatttttggccactggtaatcgattacatcttctggtaatcgattaccagagagtaaatctcttggaaaaaactttttaacttaaatttcttagccaaaccttttgctacttcaattggaattcccttcctatttaatatacccttcctaagactctagagactgtcttgatcatccatcttgaatatctttaatttctttgtcttgaataaaagcttgagaagcatgtgatcctttggcatcatcaaaacattcagcttgatcctttgtctacaatcttcccctttttgatgattacaatccccttaatcaagacaagctatatacaagatgatagcac

SEQ ID NO: 26013 - DNA, 285 bp, Glycine max
ttttactcggatgtctgattgagtcccgtaatatatcgagacgctcgaactggaataccgaagctctgagcaaattcaaacgacaataactttttactctgatgtctgattcagtcccgtaatatatcgaaacgctcgatattgaaagttgaagctgtgagcaacttcaaactacaataactttttactcggatgtctgattgagtcccataatatatcgaaacgctcaatattgaatgttgaagctttgagcaacttcaaacaacaataactttttactcggat

SEQ ID NO: 26014 - DNA, 442 bp, Glycine max
tcgataatccatttcgagcgtctcgatatattacgggactcattctgacaaccgagtgaaaagttattgtcgtttgaatttatcagagcttcagtatgcaatattgagcgtctcgatatattacggcactcaatcgaacattcaattaaaaaggtattgtgcgttggatttgatcagagcttcaacattcaatttcgagggtttcgatatattacggggactctatccaacacttccgtaaaaaagttatggtcgtttgaatttgctccgggcttcaacattcaattttgagcgtttcgatatatgacgggattcaatcggacatctgagtaaaaagttattggcgtttgaatttgctcagagcttcggcattcaagtccgagcctctcgatatattacgggactcaatcagaccaccgagtaaaaagttattgtcgtttga

SEQ ID NO: 26015 - DNA, 397 bp, Glycine max
ggatttgacttttaaagctttcataatgttcaattgccatttttattttattttgtcaaatacaaaaataaagagcaaattttacaaagggtggcttttaaaattgtgacatgatgattaattgtcatcttttaattattttaccaattttaagagtaaagagaaaaatgtttacaaatgggatttactctcgtgcattccgtgctcatgcatattgaattctcttgactcattggtcctattttatgatttaatagaattactctttttttatgaaatattaaatcagtatttagttagcgattccaatatataatagactaaattatactctattagtgtttttttcaaattgcattccatactttttatttttttaacccacaaaaaaccccct

SEQ ID NO: 26016 - DNA, 548 bp, Glycine max
  unsure (1)..(548): unsure at all n locations
tgaaagagctggtggactgagcaactggctgacttcacttggactggggcagtttgtgagaatttttcaggggaatagtctcagtaagtatcagctggtaaacctaaccatgaaaaaactcaaggatatgggcgccagtgcagtgggacctcgcaggaaactgatccatgccatggactgtgtttgtcagccatattgctttgaggcgttgtagaagtttttaggatatgtacaaaaatgttctaagacatggtacaaatgcaaaactcatgtttctgaatgcttttgtgatagttcacagcacttaagtctcaaagttatagagatttctgtatataacttcataagtagacgcaatcattctacaatgtttccttttacattggcgtctccatgcacttcaatttttcatcgcctattgtaagattatttaagtaatttctcaataattcacaggcaaggctgcacaagtcccttgatancctgtatgctccggttataagcggggtagtaaatatttattanatatgaatacccatttaactatc

SEQ ID NO: 26017 - DNA, 346 bp, Glycine max
  unsure (1)..(346): unsure at all n locations
agcttgcctcgaagaggtccaggaaggacattgcagccgaaggaactagttccgctccggagtatgatagtcaccgctttaagagtgctgtacaccagcagcgcttcgaagccatcaagggatggtcgtttctccgggagcgacgcgtccagctcatggacgacgagtatactgatttccaggaggaaatagggcgccggcggtgggcatcactggttactcccatggccaagtttgatccagaaatagtccttgagttttatgccaatgcttggccaacagaggagggcgtgcgtgacatgagatcctgngtaaggggtcagtggatcccgtttgatgccgacgc

SEQ ID NO: 26018 - DNA, 442 bp, Glycine max
  unsure (1)..(442): unsure at all n locations
tgcatttggagaggttccatcaaccgccctaattccttgatgctggtggtatctaggcctttaaccttgacttggtaaaacctcttgccggtttgattagtccccatgcttactaaagtgagacaaaaagctggtgcaaatcaaaactccgatatctcatgggtgggatggatgaatgcatgaaggaatgcatatgacacagctgtattttaagaatgcgggtgcccgggacattgtctcctttttagacacaacgtctaggggtagcaaagtgccccaatgtatgtatttaaaacggtgacccggaccctccattgantttgtctatagaggggatcaagacagaacccctatgcaatgcatatgcaaaaggcgcaatagcatgaaaatattcacttgacataagcaagaggtatatgatattatgcatgcagtgtgaaaa

SEQ ID NO: 26019 - DNA, 485 bp, Glycine max
agcttaaagatccagcctccatagaagtcttacaagcaagcttccatcaaacatttggaaagttaatttacaaggaagcactattttaaagcaaaaacggcatactaatatttttgacttggaacagacttgtgcagacatttccctgaagaaaaacatttatgaaagcgcatactcgcaaaatatcttgctatctacatcaatatacaaggatattcaaaatattctagctacttatatcccacacatattcttttgaaaagaactcatatatgcatgctcaaggtattgtgccaaaattacattgtccgtattcaaagtatttgctaccaaaaattacatatgcacattcacagtattttattaacatacaaaataacataaggtttttgttgtttcattcacatttatttatacatacatgcatatttgagacccatttcatgtcggcccacacttgcatttatttgaaaaggaattttatg

SEQ ID NO: 26020 - DNA, 358 bp, Glycine max
ttgcgaaacaagtggtcctttttgagaagcatgtgatacattggctatcatcaaaacattcagcttaaacctttgtctacaagtttgacactctaaaatattcatctattcctagggcagaagtgatgatgtttttggctttaagattatattggattcttcttctatcctcttcagtccatttatgtctaggtttttgtgttgttgtgctagtgcttgcatctactatggtgggtatgtaaggtcctatttctattgcttctcaaatgtttaaatctatggcttcaataaagatttgcattcgggttttccaatagtggtaaccctcaccattaaagataggtggcctatggatgga

SEQ ID NO: 26021 - DNA, 585 bp, Glycine max
agcttgcatttggaattgcgaaagccccactccatcattaggattagtacctgacatctcaaacaaacaaatcaaacgtaacaagacaattatagttgctgtttgaatacctcacccactcaagtgtattacacaattatggcttttctctaatgaaacactcttgccttttaccactctaattccccttgagttcttaggcaattcaagagattatggccacaacaaagaacaacttaccaatatgtgtaaagtaaggctagagaaacaaggaaaaggttaaccaagaaaaaagtttacaattgtttttaggcacaaatgaaagaaataaaattcagaatttaggaattcaagtaacaatcccttttgccacccaaaatttttcctttaaagagaatttttttaaaagttttttaagcatgaaccattcaacccaaattttttttttttttaatttggagaaaaacaaattccggttcttttttttttttttttttaaaaaaaagaaaaaaagagggttaacttttgcgtgggtccccctaaaaaattttttttataaagagggttcttatatggggaaaaaaa

SEQ ID NO: 26022 - DNA, 459 bp, Glycine max
tgaagaggatgctttaatggaggaaaagaaagagagaaggggggagcacgaaattgaaggaataaaagagggagagaagtggaacttcgaagtgtgtctcataagactttcattcatcaaagttacaacaagtgttacacatgcttctatttatagactaggtagcttccttgagaaactttcttgagaaaacttccttgagaagcttctttgagaagctaaaccttagctacacacacccctctaataactaagctcacctccttgagaagcttccttgagaagattccgaaagaagctagagcttatctacacacacctttctaatagctaagctcacctccttgagatgagaagctagagcttagctagacaccccctataatagctaaactcacccccattccaaaaatacatgaaaataaaaaaaaagtccctactacaaagactactcaaaat

SEQ ID NO: 26023 - DNA, 374 bp, Glycine max
agcttggctggccaatatgaatctctgttcatcaaccaactttctggtcaaggcttccaactgagcaatatagctgatggtgaacataggaattttggcacttccaacctgtatacataactagtctatagacattgatattatctacctcaatcgcgtatttttgcctcttttaaatggctcaaagacttcaatcatcgatgttaagtttaggaaacaatgtctgcagcatttttgttagaattagttgctgcagctgcatttatgtccacatcttcaagtgtggaaattcttgttcattatcttgtaagtacaaaagtgtttgtgtacgtttggagtcccgagagaatataccagtacaaatgaacaaatat

SEQ ID NO: 26024 - DNA, 473 bp, Glycine max
ttacatcccatattgtgataaaatcttttgtattttttgttatgttgaggttatgaaatgatgattcaaactatgagtatgtgataaattgaacatgtgacggatgatgaaatacatgtgtattgagatgagatgtgtgtattgagttgtgaactatgaactgtgcaatcacacaattgtaagaccctttaaggacgacgagtattgtgatgggatccactgtgggaacccgacgagttaaaatgattttgaaagcaattgagtaaatgtgtgtattgcatagttcatagataaagtgtatatgattcatgaggtgtgataacatgttaaattgagattataccattgtgattgggattaagtgtatgtgataaattgagtatgtatatgattgatatatatatatatgtgcattgaaatgttgtgtgcattgaattgtgaacctataatttgttaattacacgatcataagt

SEQ ID NO: 26025 - DNA, 346 bp, Glycine max
agcttgatacatcattacaccatcagccttgttatcaatctgcatcgctttttatctagtctattttcatgctgctcacccctgaattaaagtttgtgcaacattttaacttattttgattcaaaaagtaagcaataatatgatacaacctagagaggaactactgttttttttttttacatccacgtagatattcatcaatttcaatatatatctagaagagagcaaaatatgaaccaagttatccagtagttagaaaggaagatgcaagcatttgagtgcaatcccaaaactctgtagaaaagaaattgcgctttttatgatataaaagcaagtgcacaacatg

SEQ ID NO: 26026 - DNA, 377 bp, Glycine max
tggtccttctttgtataagagtaagaggtagactttttatattatgactttctctttaattggtgctctacccttatacaaaggtgaactagctcatataggtctctatatggaaggagttcaaccatgtctcttacttccatatttaaaccacttaggaacctagcaatgcttggtctttccttccccctatgtctagctctcaaaaagagtaattccatttgttgtctatattcttccacactcatactcctttatctaagcctttggagcttgtccataagctccctttcatagtaagagagaatgtgcctttttctaagggcactcttaagattattccaatactatattggaggatccccatgaatccttct

SEQ ID NO: 26027 - DNA, 408 bp, Glycine max
agcttcctcgtggccatttcctgcgatatcaaacatttagaagttagttttacaagataatgcttgtcttaacgcaaaaaatgtcatgctaatccctccggtttagaatgaactcatgcgcacgtttaaagtaacacatttatgcacatgcgtatgtgtagaatatcctactattcatatcaacatagaggccatccaacacattctaattgtcatacatatatatgcatttgaaaagaacacacattctcacgcttaaggcattgcgtcaaaatttacacttaactatgtcctaaacatttgctatcacaaactacctacacacactcgaaatatatataccttacaaactttcattgttcactcacacttatgcatattggcaagatatttacattatgcacatac

SEQ ID NO: 26028 - DNA, 368 bp, Glycine max
tcaacctttggtgcccatttccgctccaaatcttttaatgatggcatttccggagtcgtgaagtgcgtgtctacaagtgggacttcgaaatttcaggtttgggtggacttctttctctcttaaatttcgtgggtatggggttttgggagatatgatgggtagtcttgctagttttctgcttcatgatagttatttgtgaagaaacttgttgaaagcttgttgaaattgccatgtttggatgagttaaacatacccattctgttttagggtttttatgaggatgcttgtgatgttcatgtactgaaattgcttatggaaaaatgttagagatgaaagggtgagttaacctatggttagaaagtgagaat

SEQ ID NO: 26029 - DNA, 320 bp, Glycine max
agcttcagtaagagatctgaaacattgatagaattctctataatgtcaatgcaggatcctatagattttcccattgataaggcctcagcaaccttccctcgagctgcttcatgcctccacaagaccaagaccgtgtttagcaaaggccatctaacatgagaatctgccttcttctgtgtgaagcctaggcccttgagcaataaatccaactgtctacaattaagaaaatcacaattagtaatggcaatgccatgtgagctttccaaatgttttcactaagtaagtaagtaaaaagttgcataaacctttcttatgtcatc

SEQ ID NO: 26030 - DNA, 466 bp, Glycine max
tgaagaggatgctttaatggaggaaaagaaagagagaatgtggggagcacgaaattgaaggaataaaagaaggaaagaagtggaactttgaagtgtatctcataagactttcattcatcaaagttacaacaagtgttacacatgcttctatttatagactaggtagcttccttgagaagctttcttaagaaaatttccttgagaagctttcttaagaaaacttccttgagaagtttctttgagaaaacttccttgagaagctagagtttagctacacacacccatctaaaaactaagctcacctccttgagaagcttccttgagaagctagagcttagctacacacacccatctaaaaactaaactcacctccttgagaagctttttgagaagctagagcttagctacacacccctataatagctaaactcacccccatgacaaaaaacatgagaatccaaaaaaa

SEQ ID NO: 26031 - DNA, 340 bp, Glycine max
agcttcttaaggaggtgagcttagtttgagaggggtgtgtgtagctaagctctagcttctcaaggaagttttctcaaagaagcttctcaaggaagttttctcaagaaagcatctcaaggaagctacctagtctataaatagaagcatgtgtaacacttgttgtaactttgatgaatgagagtcttgtgagacacaactcaaagttcaacttctctccctttttttcttccttcaatttcgcgctcccccctctctctttctctccctctttcatttcctccattgaagcatcctctccaagcttcttatccaaagctcatcttggtggtgaagctcattc

SEQ ID NO: 26032 - DNA, 346 bp, Glycine max
ccttagccaagtccatagaagaaagactgcatcatccattatcttttacatgttgggatagcttgggctttttctattttggagggcagcaccataggtgccttgtattatctttcaaccagtacccctagtactgtcaactttatttaataatatatattttctgccttccaaaaaaaaatgtgtgtctctcccactctctttgtgtctcttagtcacatgatgggtgtggaagaagacccatcattcttaaacacaaccaaaattacaattcagtaatgggactactaaacattcttaaacatacttaaagagttgatacaagatgaactgagtctttgttaca

SEQ ID NO: 26033 - DNA, 232 bp, Glycine max
agcttcacaagatgatactgatcgattatttcctaaccgacatcatgcaaatatcgttcacggattgaattgaaaactcaatagccgacatcggtcgtgaagtagccccgactgatatttttcagcagacgttaagcaatttttttttaataatgctcgctggccgataaatgtttttttttaccggagaagaaatttttttgttttggtgttgcataaaaaatttacaatg

SEQ ID NO: 26034 - DNA, 431 bp, Glycine max
tcaccggatgacgccgatcgaacatttcctaaccgacgttatgcaaatttcgttcagggattgaattgaaaactcgttaggcgacatctgtcgtgaagtagcgaccgatatttttcagccgacattgcacaattctttttagaaaagctcgctggtcgataatggtctttttacggcagagtaagttttcttgttttggtgttgcataaaaaagttacaatgtacttcggctaggtttttcgtgcgagttcaaccgacattttgtttcggccaggaaaacattagcccacctctgcaaaaaaaatatttgctaaccgtcttcatgcatatttcatttcacgattgaatagaaaactcaatagccgacaacggtcgtgaaatagtcccgactgatatttttcaaccggcattgcgctttttttttagaaaaa

SEQ ID NO: 26035 - DNA, 319 bp, Glycine max
agctttgaatgctctattcaatggagttgacaagaatatcttcagactgatcaacacttgcacagtggccaaagatgcatgggagatcctgaaaatcactcatgaaggaacctccaaagtgaagatgtccagattgcaactgttggccacaaaattcgaaaatctgaagatgaaggaggaagaatgcattcatgacttccacatgaacattcttgaaattgccaatgcttgcactgccttgggagagaagatgacagatgaaaagctggtgagaaagatcctcagatccttgcctaagagatttgacatgaaagtcact

SEQ ID NO: 26036 - DNA, 457 bp, Glycine max
ttcataagtgaaatcaggtgcagccatctccctaagagttctttcacgaggtggaggttgagccatgttctaagtataaaaactagtagtgaaatgctcaaaatcagaatattcataatcaccctcaacagaatcctcaaaatgcacagaatgaccaggatgcacactatgcctaactaatctatgaaaggttctatctatttcaggatcaaagggttgtaaatcacctggattgcccctagtcatgcactatatgcagcaaataatgtgtcttagcaagcacctaacagggggtaaaactacagctatactcaaatgatatcaaaataagctgaaattttgtgaggaaataccctaaatcatgaaaagaagcacaaaattttcaacaaaaattcaagtctactatgaaactaccttagcaagttaaaaaaatagacattatccttaaaataaaaaa

SEQ ID NO: 26037 - DNA, 480 bp, Glycine max
agcttgtgaagaagagataacgtttttttatactcactatccttcatttttggaggttaaatttgttgtttttaacatatgaatggtgggggagctctgggtcctagtggttttggtggttgcttctaccaagctttttgggatattgtaggcatggatgtgtataaatctttcctacaactctttgatcaaggctggctcttgcgtaatcttaattcgaacatggtggtgttaatccccaaagtgcctggggctgatacaattgaaaatttacgccttatatccttggcgaattttcagttcaagataatcacaaaaggtcctagtgataattgctttttacatttcattttttgtaccaattatcttagtatttttaagatttttgtcaattaatctctgttttttgaataaaattgtataaaataaggttaagaaatttaagaaaggttttaatgttttttttgaaatttgatgttt

SEQ ID NO: 26038 - DNA, 522 bp, Glycine max
  unsure (1)..(522): unsure at all n locations
tcaagaaaaagatggccttagcaaattccttattttcagaagggttttctatcaatagacctccaatctttaatggagagggttaccactactggaaaacccgaatgcaaattttcatcgaggcaatagatctaaatatctgggaagccatagaaatagggccttatatacccaccacagtagaaagagtttcaatagatggtagttcatcaagtgaaagcataaccatagaaaaacctagagatagatggtctgaagaggatagaaaacgagtacaatacaacttaaaagccaaaaacataataacatctgccctaggaatggatgagtatttcagggtttcaaattgtaagagtgctaaggaaatgtgggacactcttcgattaacacatgaaggaactacagatgttaaaagatctaggataaatgcactaactcatgagtatgaattatntanaatgaatgcnaatganaatattcagagtatgcaaaagagatttacacatatagtaaatcatctag

SEQ ID NO: 26039 - DNA, 410 bp, Glycine max
gtttttaagttcttcctcattactgtcctaagcaaagttcccaaagtcctattaacaactttcgtttgcccatcggtttgtgggtgacaagtggttgaaaataacaatttagtgcccaacttgctccacaaagtcctccaaaaatgacttatgaacttagagtccctatcactaacaatgctccttggcaaaccatggaatctcacaatctccttgaaaaacaaatcagccaaatgggaagcatcatcaacttttttacatggaataaaatgagccattttagaaaacctatcaacaaccacaaaaatggaatctctaccattgcttgtttttggcagccccaaaacaaaatccatggataaatcaatccaaggatactcccgaattggcaatggagtatacaatccatg

SEQ ID NO: 26040 - DNA, 561 bp, Glycine max
  unsure (1)..(561): unsure at all n locations
tgaaaagattcccaaaattttgttcttaggatttgatgtatcatgtatatgtccatgactcatgcgattcattacttcttcattataactatctcgtttttcttgcagagacctaagcttcaacatgttgactggtccagtcccagatccaatacagggattggataacctagactacttgtaagtgaacattccattttctgaccagaagtttagccaaaaagatctctctctcctcacacacacacacacacacacacatataattggtttcttcttatttattgatttgatgcaggtttctgacaaataattctctgagtggaccaattcaggaatggatactgagcttcaagaagcatatgttagcatattttcttcattgcgttttctctaattgcataattntgaacctttacagaattacaccacatactatattatngatataatgatactagttcttccagttctttctcgtgacaattcttgattagtaatttaatataaaaaattaataaaatttaccatatgttcactttcagagatctattctacaac

SEQ ID NO: 26041 - DNA, 217 bp, Glycine max
agctttcacatggatgtgcgattcgtttcttaatatatcgagacgctcgaaatcgaacaacggaagctctcgataaattccaatggtcataacatttcactcggatgtccgattcggggacataatatatcgagacactcgaaattgacaaccgaagctctcatgatattcaatgctctaacattcacacggatgccgattcgggacataactattt

SEQ ID NO: 26042 - DNA, 327 bp, Glycine max
ttgcgtggagcttcaatggtgaatgagggaggaagaaattctcttgtgggacagggagagagagcttctgaaaatgtggggctgagtgaggagacagagggttgctttttggtttaaataaaagggtttcctctttttctattattttatttaagcaatgccacatgtctccatttgagtggagcaagatgggcccactttctctttttgactgtgacccatattcagtctcaaaagtgagaaaaatctgacctttgaaacgctaaaatcctgcctccgtttgcgtgccgtttctttgattccagattctcgcgtgtctctgcgtcc

SEQ ID NO: 26043 - DNA, 309 bp, Glycine max
  unsure (1)..(309): unsure at all n locations
agcttgctctaaatttacattgatgtttgtatttattggaggaggttgtatgccgtttttgttttaagggtagcatttcttggtaaaactaactttccaaatgtttgccttcgcaggaaatggccccgaggaagcttgcctcanagaggtccaggaaggacaaggcggccgaaggaactagttccgctcctgagtatgacagtcaccactttaggagcgctgtacaccagcagcgcttcgaggccatcaagggatggtcgtttctccgggagcgacgcgtccagctcanggacgacgagtatactgatt

SEQ ID NO: 26044 - DNA, 433 bp, Glycine max
taactaatcaaatgggacaattggctacgcagttaaatttacaacagtcccagaattttgaccgattaccttctcaatctgtccaaaatcccaaaaatgtgagtgtcattgcattgaggtcgggaaagcagtgtcaaggacctcaaccagtagcatcttcctcatccgcaaatgaacctgcccaacttcactctactccagaaaaagatgatgacaaaaatttaacgagtaagttacctaacaatttatatgcaggtgaatctttcactggtaattctgatttacagaagcagcatatccctcttccattccctccaagagcaatttccaacaaaaaaatggaagaggcagagaaagagatcttggaaacatttagaaaagtagaggtaaacatacctctgctggatgcaataaagcaaattccaagatatgc

SEQ ID NO: 26045 - DNA, 376 bp, Glycine max
agcttctgggaaaaatcctcgagttttctttatcaaaactcccagtgtttcattggaattaggtgtaacctacagcattgacaaattatctcataaatatatcacttcaaggttcgttgtttgtttctcacgaaacttattcaccattggaaacaaagaggatttacctttctccaactatgaccaagaaattcattcacagctatagcattctgtccatacatcagtggtgaggaccagtaaccccacagaaaccatttgtgcacattctctggcacatagaacaaaactatcataataaaggttcattacagtaaccaactttgaagttacattaccattttcttacctcgggaaatcacaaatccctccaaaa

SEQ ID NO: 26046 - DNA, 505 bp, Glycine max
tcattcataaattatgattcaatctccaactccatcttttttatcttcaaggctttagaggatgaaaggcattggtccatttcttttgaatacattgatgatgctctcttcatggcaaagtatgcattatttaaagcattcattgcataatggccgagtgagattgtgcattgttcctcaacagctgcatgatgaaaatgacctaatcttttttgccaaacttcttttgtattgtttacagtaactggataagttgtttgctcctccttcaatggatcaaatgagaaacttttgcctctcattttgatattgaaagtttccttgtcattgacatctttaatcagacagcgcttattttcaaagatgactttaaaccccttatcaatcagttgtcccacacttagcaagttttgatgaatctcacgtgcatacaaaatatcataaattaattttgtgtctgcacaacttttaattgcttacagttccctttccttcatagtgataa

SEQ ID NO: 26047 - DNA, 685 bp, Glycine max
tcttggtatgctccattggatgtatctctcaaacgccaaacttaccaaacatagattgttgctataagtgtaattatttgtttgtcacatttactttttttattttgttcgtgtaaatatgatgccaattgtaattctagccaactctatttatattaaaaaaaaacaaataattacacgcataacatatccctgtctgttcattttgtgaatgattttaatgatgagattcctgaagtggtgaatgttgacttcttggcaaacatattaatttgttgtagtaaataaaatggtaagatcgagggtcgagactacatatactctacttgtactcagagagagaaatatatatatatatatatatatatatatatatatatatatatatatatatatatatatatatatatatatatatataaaaacgcccttttgaatcaaaatctatcttttttctttgtttcccctctaatttaattggcgaaaatttaataccacgtggtgaagttttaccccaaaaaaaaggggggtcccccttggaaattaaatttttttcctatggtttggggcttaaaggcaagtataaaattccttttctttattaaaccctttttgaaggggggttttaagatttttttttttatcccttccaaaaacctttttttataattgggggacgcttccg

SEQ ID NO: 26048 - DNA, 437 bp, Glycine max
ttgatgatatggtcttcaccgacgaaaggatcaaagttgttctaaaaagaggcaaatctgatcatcttgctttgataaatgcaaaaaaataaaagctggagcaaataaagagggtgaggatgaaggagaagcccgtgctgtgactgtcattcctatacagccaagtttcccaccaacccaacaatgtcattactcagctaataaacaaccttctccttacccaccgcccagttatccacaaaggccatccctaaaacaaccacaaagtctgtcttccgcacttccaatgacgaacatcacctttagcacaaaccaagagcaccaaccaagaaatgaattttgcagtgagaaagcctgtagaattcaccccaattccagtgtcctatgctgacttgctcccatatctacttgataattcaatggtagccataacccca

SEQ ID NO: 26049 - DNA, 528 bp, Glycine max
  unsure (1)..(528): unsure at all n locations
agcttatttgttgctttgtgcttaatggaatgcccttgagcttttctttctttctctgctctcttttcttttaggtttccactctcacacactctccctcttctctttctctgcaataatctctcttctcttcttcactctctcaactcctgccaaacccccatttccgcaggtgcgtgcgttactgattcattctttttattttatcgatgtttttaccattttggtctctctttttgcttttctttttgctggattccgagtgtgtttgtttctttttcggatagaatgtgcgccttttgtgttctttctttggattttttatttatttattttccagttctcaaatatttatttacctttcttggctggctctggtttttattttattattgcttggttttatttttgcaaaaaaggaaattattttggaaagaattgtgtgtgtgtgtgtggaattggtttaacacaaccccccccttttcctttggggntaaatatatatctcttacaatatatatacatata

SEQ ID NO: 26050 - DNA, 430 bp, Glycine max
ttttctttcacactcaatctgtctactgactaacaatttttattccaagttcacattcttgttctttctttgtctaacatacatacttgctcaaactcatgaaaggaaacacaaactccatcaaaatcatgtattcaattcaaaatgaaagcatacaaccattgttcacagaaacatatagagtgtttcactgtcatgtcaacaaaagttaagttaaactgttccagatgcttcaggataagcatactaactattcatatataaaactaacaagaagtaaataatgtactaaaaccataattatactaatagatcaaaaagcgcaaaaaaaaatcaacaggaatttaaagatcctgtgattggttctgggtgtcctgtgtctaaccctcctcctcttccgacaaatgaagtacatgagtagctacaggag

SEQ ID NO: 26051 - DNA, 295 bp, Glycine max
agcttctatagaaggttcgttcctattttctctacaattgcatcacctctcaatgagctggtgaagaagaatgtggaatttacctggggtgaaaaacaagagcaagcctttgctttgctcaaagaaaagcttactaaggcacctgttctagctcttcctgacttttctaaaacttttgagctagaatgtgatgcctctggagtgggagttggagctgtattgttacaaggtgggcaccctattgcttattttagtgaaaaacttcatagtgccaccctcaactaccccacctatg

SEQ ID NO: 26052 - DNA, 390 bp, Glycine max
tcgtcctcagatccctcttgttggactagggttttttttatccgcccttgtaggtttagactaatttaaattaagcttcatcctcagatccctcttgttggactaggctcagcttaaacagcttacataagtttagactaatttaacctaagcttcgtcctcaaatacctcttgttggacaaggcttaaattaaacagcattatcgtcacaacatattaagaaaactaaaacttaatcctcagatccctcttgttggactaagtttcaatccggcttctatcaagttctaaagcaacaatacattttccaatgctaaagtcacctaactagacatacaaatgggtgatcagaccaagaagcatgcaaaaattaaacattgaaagaagcat

SEQ ID NO: 26053 - DNA, 258 bp, Glycine max
agcttcaagagatcatcccctcgatttctttattggtgatatctcaaaaggggtaacaactatacattctcttaaagatttatgcaataatatggcctttgtatctatgattgaacctaaaaatataaaagaagccatagtagatgataactggatcattgccatgcaagaagaactaaaccaatttgaaaaaaacaatgtgtggaaattaatagaaaaacctggaaattatcctggcatagggacaaaaagggtttt

SEQ ID NO: 26054 - DNA, 375 bp, Glycine max
cctcgaaggtaaactagatgccttggttaacctggtttcctttttggtcatgaatcaaaaatctgcacctgttgccagactctatggtttatgctcctctgccgaccaccacacagacctttgcccttctgtgcaacaatctgaagcaattgaacagcctgaagcttatgctgcaaacatctacaatagacctcctcaacttcagcagcaaaatcagccacaacagaacaattatgacctctccaacaacaggtacaacccctggtggaggaatcatcccaaccttagatggttgagtcctttacaacagcatcaacaacaacagccttatttccagaatgttgctggcccaagaagaccatacgttccttcacc

SEQ ID NO: 26055 - DNA, 275 bp, Glycine max
agcttattagccaagggagtgatccattatctcataagcctcttaacccagcatccattaatgttccttcttcttccactacttcttctaaacctctttcaatgatcattaccaacaaccatattaaccctgttcatcacgatctcaccaacatgtttaatcaaagagttcatcaagttcatcattctgggcaacatcaccaccaaccttcaacttttaatccttatgatacccataacccattcctgttgttgccaccggagatgtttttgcaa

SEQ ID NO: 26056 - DNA, 338 bp, Glycine max
atatatgctaaatagtcttctctagctctttgtttataaatcccaaattgacttctttttttcttttttgtcaatagggatatggttcaatctgctatcatttgcagtatgtaaggattttataaccttaattttttgttttatctcaaatcaaaatatattgaaaattttgtgataattatttcaaaaggcatattaagaatattttttattggctgattgtataaaaatgctttaggttttgttaataattaagtattttaagaaattaaaaaaacatttattgtgcgaattatatataaatgttaaaaaaaaagtcataaattatattattttat

SEQ ID NO: 26057 - DNA, 557 bp, Glycine max
agcttgaagtggagtttttaaagaaatttttgcttttacatgcccgactcctttgagtggcatttgtattggttgttatcttgattgacggatcttagtacatttgatatatgttttgcatcatacatcatcattgtttaggtgaaggaaattttctaagttagaaaaatttcttcaaaggcaaaaactctctattttaatcaattacaaccaactgtttgaagcttgtagagttgagtctcgtatcggtttaatcaattacatatatctcacaatccattagaatgttatttgagaaaatgactaatttattcaggagtctttgctttaatcgattaccaagtggattaatcgattattatttctctctcattcagttgttcagatgttaacaagaatacactactacaaaagtcatttactacgacgtaccaacaatgacggtccacagaaaaacaatgtagaatctttaaaatgtaagtaaaagatggttattttaaaacccgcctttaaatgtaattttttctctctcttaactaatctcccgggatactact

SEQ ID NO: 26058 - DNA, 427 bp, Glycine max
  unsure (1)..(427): unsure at all n locations
gccgctggagctgacccattaactgccctaactcttttttactggtggnccctangctcttgaccttaacttgatagaacctctttttaagcgaaggcatttgacttgatcccatggtttactaaagtgaacaaaaatcgggacgaatcaaaactccaacatctatcatgggtggaatggatgaatgcatgaggaaatatgacacaaatgccatttatgaacacgggagcccgggaaattgtctccttcttagatacaacatcttggggtagcaaagtgcctgacgtatgtattaaaaaaggtgactccgaccgtccgttgttttccaatgggcgggatgcatatgccaaaggtgcaacactggaatgtacatagtatgacaatactcactgaatataagcaaaaggggtcatgacacttatgcatg

SEQ ID NO: 26059 - DNA, 189 bp, Glycine max
agcttctaaactttgtacaagaatgattctctgataccacttgttagacaagtggcctcagatatcttaagaaggggggggttgaattaagatattcgaaactttttcccctaattaaaaatctatcttactttttacttaagttatgaattcccttaatgacaatcttcttaaatattaattcaaatg

SEQ ID NO: 26060 - DNA, 351 bp, Glycine max
ccttgatgagaatcatgaaactggccaaatacaggctaaatttccaagtggagaaggacaaagcccccgagtggagaaggatgaaggcccaagtggagaaggatgaaggcccaaaggcagagacactatcaagactatcaattgttgctaaaggcccaaactaatttgaaggcccaagttaaataagtttttagttataatttatttttattgtaattttgacccaaactgtttagaaggcccatgtctatttttatctttttgttcagctacactataagtattggtttttgttttgaataagaaaaactttggcaattgataaaagttggtgagagtttctctctgggt

SEQ ID NO: 26061 - DNA, 357 bp, Glycine max
gcatgccagcttcaagttgctcatagacctccaattgcttttaataaagacaaacacctgtatggtgaattgcaaaagaacatataccacagactcttggaacaggtgcagaagcaaatttcttattcatggcaagctgaagtactaggttgaccaatgcatcaagttttgcttcaggctttttattttcagcagatgaagatgaatccgtggccacctcatggactccctctaaggacaatagcatcatttctcgcactgaattgttaagagttggaagccattttctcaatcaaattcctagccttaatagaagtcataataccaagagccccaccactggcagcataaacaata

SEQ ID NO: 26062 - DNA, 343 bp, Glycine max
  unsure (1)..(343): unsure at all n locations
ctctttgctttctagaactaactntcagctatatagcctgatcgactttgggaatttgttagtttaacaattttgttgtatcaaacattgtgccttttgggcttttgtctattgaaaaggccatagactatacaatctttaaagtgattcaataatcagataactaaaaacaagttaattttaagataatataatcttcaatttccttagtattaaaagtgtttggtaggatgaaaataggccaaacagttcggaggggggtaatgcttaccttaaatttggcatttttgatagggctattattaaacaaacctcattgttggctaatttaaccccctttttt

SEQ ID NO: 26063 - DNA, 306 bp, Glycine max
tttgctttgaaccaaaatttcctattatgaatgatgctctcctacaacctaagacaaggtagaaggagataaactatacatgctcaagattcaaggttcaatcaaacaatcatactttcagctcaaaataggcgcaagggataaatcaatcatgcacaaggtaagctttttagctaagtggctatcttcaatccaaacatggcattcatcatcttcaatttcacgcattcattacatactcagagattcatgcaaaaatcattactcaatgttagtcggtctctcacaattaaagatgacactttc

SEQ ID NO: 26064 - DNA, 745 bp, Glycine max
  unsure (1)..(745): unsure at all n locations
tccgattatggggtatacatcacatgtggtactaagtggcagttcggcgaaggagcaaaacaatgtgacattccaaatatgaaacccccttcctggtgcccctgaatggggcccaacttcaagggccctttatggaactgtaaaccgggggccttaattcttcaactttacaaaaacaatgtatttaacattcgacattttgagtctcacagccaaaaaaacaggggaaagggggaaaaactttgcccaaacacaaagcaacattatcaacttttgtcacttcaaatatccccccaaagatattcttttgttccaaattttaaaccggggggtgccttaaaaattaatggaagagtttgcgccaaaaattccattttaaccccggggaaatggttaaaaaggtcaaaaaaaaatttttgttattcttttttcgaaagaccgccaaaaacccacaaatttttttgtgcaaaacccaaaaatttgtgttgccaatttttgaagcaaaatttggttaaaggggaattttaaaaataaactttccttttcaaattggccaaatagaatactacacagccccaaataaatattaaatatgtttaaataaagaaaaactttaaacaaaccatttcaaatttaggtttttaaacaccccaatttattggagttttacggtgttgaaaagaaaaaaaacaataggggggaatattggacaaaacctcttcctctccccatctctattttattn

SEQ ID NO: 26065 - DNA, 360 bp, Glycine max
agcttcaggctgttcaattgcttcagattgttttacagaagggcaaaggtctgtgtggtggatggcagaggagcataaaccacagagtctggcgacaggtgcaaatttttgattcatggctagttgggttaccaggttaaccaaggcatctagtttaccttcaagcttcttagtctcacctgatgaagatgaattcgtggctacttcatgcactcctctaatgaaaatagcatcatttctggcactaaattgttgggacttggaagccatcttctcaataaaatttctggcttcagcaggggtcatgtctccaaaggcttcaccacgtggcagcatatatcatacttttcttcatggtac

SEQ ID NO: 26066 - DNA, 322 bp, Glycine max
gaattctcaagcttcaaacctgcaacaaaagagttgagcaggtaaaaaagattcctctttttactcttagaggggactttgagcgtctgtttatggaggagtctgactcaatctctgattatttttctcgagtattggcccgcctcaatcacacttaaaagaaatggtgaacatgttcttgatgtgaaggtcatggaaaaaatacttcgaactttaaatcctagttttgacttcattgttaccaacattgaagaagaccatgatttatagaccatgactattgagcaactcatgggttctttactagcgtactaagaaaaac

SEQ ID NO: 26067 - DNA, 133 bp, Glycine max
  unsure (1)..(133): unsure at all n locations
agcttggtttgngagttgatttagcctttgtttgacttggttatttctcaactcatttaatggaactttccaagaacaaaagttcgatttggaatttattttattatttcattatttgcggtattttattatt

SEQ ID NO: 26068 - DNA, 1059 bp, Glycine max
  unsure (1)..(1059): unsure at all n locations
cctcctctcgcantatctntctccttcgngtgtctcntctcctcgcccacactttactctcnntcttgttanacntcggttcttnaattttnnnnnnnaaggagcatactccttgctgaactctanaatactaagcctggcactggagctgaaccctctactgccccaactcttttatactttgttgattccctaagctcttggaccctgtacctgataagaaacctctttttaagccaaatggcgcttgacatctaaccccatgcttttactataagcgaaaacacaaacccccgtggccgaaacaacaacatcccacactcttatcaatcgggttggaaatgggatggaatagccctgaaaagaaaatgcaccactgtgcgttataaatgccaattttatgaaaaataccgtgagcccccggcgagaaatggtcccactctttttaccataacaacaaatttggggcagaatgtggggccctctactccttaatatattaaaaaaggaggacaccggaacctctctcccgggtttgaacaaaaaaagtgagggtggatgacccccaacattgtgcaattaatgcacttttcccaaaagcgcccccaccccgggagggttcctattttccccccattatttcccaaccaactaattaattaaaaagggccccccatgaatatttatggaaacaaccactcttgggtttggtgtataaaataaggcggcccccccggttggtcgcctatccacctcttcttattnggggcgcccaccagggagggtgaacataaataggggcgttttattgtatatgatacccaacgtggggcggtatttctctctttctatgggtactctcaaggatacactccctcctttgaaaaaaacaaaacttggcgcgggggcgagcacctctaaccccacttcattttttgtgtaaagaagaattataaaaagagagtgtctttgtatctttccatcacttgatacaacacttatacaacaaatacttcgcctctctatttatttctagatacccgcggtaaggacgccccc

SEQ ID NO: 26069 - DNA, 603 bp, Glycine max
cctgcggcatgcaagctttgcaaaagcaaagtatgaatttttttactttagcgtttattatccataaagaccaaagtttttgagacttaaaatataaacttcgctaaacggtattggtctctattttttgttcttctctttatagttggtgaatggtgatgaagacttattcgttcgaaaatattatcttctcattcagttggtgcattaaatgcctgggcacattcttcacggtaatatagatttacttgtattttctaaagaagatattaaaggtgtagcagtctaagattcgatagtttatatcttaaaggtacacattcatgaaacatacacaattggtggatgctttatataaaactttttttttgaaatccattttaaataccaatttggttctttcaaagtgtagtaaaccacctttttatatgaaaatctattttactccacctggaacattttggtgttagtccaaaaattttaatatccacatttgttttctctccacctttaaatgggggattaaagcttttgtggctttggtccccaatatgaaaatttaattaaactttctattttccaattttttttttattaaatttt

SEQ ID NO: 26070 - DNA, 397 bp, Glycine max
  unsure (1)..(397): unsure at all n locations
cttgccccccagctcacccaagcgagctaggcggcttcctttanattcttccggcttctggaggaatattctggaaggcccaagtgggcctggttgctatttgaacccccatttttactaaggacagcccctgcctacctttggtgattgtttttccgcaacactacgaaactttacgaatttcgtaacgatgcttggattgtttctgtaatgttaggaaaccttacggattatgtaatcatcccttttcttgccttcaggaactttactgattgcgcactaacacttccttttaatattcggcatgtcacggaacttcacggattgtgctacaatgccttcttttaacttccgacatgtcacgaaactgcacgaattgcctaacgatgggtgccaa

SEQ ID NO: 26071 - DNA, 388 bp, Glycine max
agcttcctcggggccattcctgcgaatgctaacatttggaaagttagttttaccagtgggacattactcttaaagcaaaaatggcatataacctcctcccataaatacaaacaccaatgtaaatttagagcaagcttatgcgcatatttccttacatacgttctcttgcacaagacatttaaccgaaaaagtgcacccatatacaatcaaggcagcttcattacctagattatttacacgtactgccaaagtgtatttgttacttacatcacacgcatctccttggctgaatttgcatacatgcatactcaaagcattttggggtaccaaaaattgcacatgtgcacatcttggtatttctaatacctatatatacacaaactttatg

SEQ ID NO: 26072 - DNA, 516 bp, Glycine max
  unsure (1)..(516): unsure at all n locations
ttataacaactatcaaaagttgagaactcaaaagatttctttgtagcagtcaaaatgatgaagaatgtttccctctgagtacttgggtcttggcaagatactgaacaacaaggccttatgtataagacttataaaatgctacatgaagagcatccagaatcaaaatgaagatatgacaaagtctacattagaatgataaaaaaacttgactctgattatctatacatcataataatttagaatggcttagatagtattacaaagacaacatcaaatcttccatatgttgccacacaagatttgcacatcagaagacagaagttaaaaacatttcactttccatatgttggcacacatactgaaagcacatatataagtgagagctaattgcataaaaagatgaaaatttgttgaaagctgaaantgtccatgaaaaacactggtgagaagattaaaaaaagaaactgagaatgcccatagttggccctggataaacactaatactttgacaccaaa

SEQ ID NO: 26073 - DNA, 370 bp, Glycine max
agcttattacagataatctggcttcaatatcccactttataggtcaacaattccaaattattatctcatgaaataactgtttcatgattaaagtttgtactttgtcaatgtttgcaatgtttttccgctgaactgaattatttataatcgtataccttgttcagattctgcagttgaatgggcacacaaagatgatgttcttaattggtatcaacaaaatgcttatgataatgaaggttctttggatggcagaagaatgtcatcacaacctcattcttctctttctcagttacatgaaccaaaggccctgtacagaacatcctcttatcctgagcagcaaaggcagcaacaacatcttcagcttcaacct

SEQ ID NO: 26074 - DNA, 469 bp, Glycine max
catcatgtaagtgaattgctcagctagctagctactttttgacattacatatgattaatgataacaaagtaacttctcgtgatgttggacctgactaacaacttttcactgacgaaggacagagggaagcagtcagcagcattgtggccttgacccacatgaacttgaccttgtcctgaggggatcttgagaatgaacaaaactcagcaaaattggacattgaatgattgcaacatcattgccttgtcccatgtgaatttgactttcttcatcttgagggtcttgagaatcaactcaactcacaagaaattaagagtctagcagtggagtggggagaagcaatacctgtactttacatgtgttaacagaattaataatatcagcatgtgacagaaaaatcacccaaccaaagaaaagaatcttatatagaaactccacttccaaccagcaatattgagtatttcatgct

SEQ ID NO: 26075 - DNA, 329 bp, Glycine max
ggatccttaatcacctgcggctgcagctttatggaataatgaatatttttgtgggcagtgttttcattgttgaatctaattccttgttggtgattgataattgtagaaaatacttatggagatatgtaaatttaggtaattatttcattttttttcttttatttaaactctgtttgtacctttttggtgttaaatttatgaatttgtagctttctctttagtttatcattttgataggttgcatatgtttatggatgaattatttgtaagaatgaatattggttggaaaggaaacttacaacagaaatgagaagtttaagtcaaaaaat

SEQ ID NO: 26076 - DNA, 365 bp, Glycine max
ccttaagctctcacaccatttgaaaaagactcttataaccatttcaattacactcttgtggagcatgtgcctccactattccccaccaacagtctaccatgacaccatcaacatgtactaatttcaacaccttcagctgctttagtagatcatccagatcaactagctcacatttaatattgatcacccctaactataaaacaatatacacagaatgttcctatataatggtagattcatatttaaagataatttcctaaagaaaattagagtgtttcctttcttatactaagaatatctctcaaactctaatttcattcgaggactatcattcactgatattgtgattctcattagtcaaatta

SEQ ID NO: 26077 - DNA, 297 bp, Glycine max
agcttgaaattgaacaacggaagctctttagaaactcaaatggtcataaattgtcacacggaagtccgattcaggcgcataatacatcgagacgctcgaaattgaacaacgaatgctctcgagaaattcaaatgatcataacttttcaaacggaagtctgattcaggtgcataatatatcgagacactctaaattaacaacgaaagctatcaagaaactcaaatggtcataaattgtcacacggaagtcctattcatgagcataataaatcgagacgctcgaaattgaacaacgaat

SEQ ID NO: 26078 - DNA, 173 bp, Glycine max
gatgcaacatttggagaggttaaggaaacaccgaatttttgccctccatgaaaggtgggaccaaaggggaatttaaaaccttatggagaagaaagggggggaaaaagggatgattgtggtccttaaccaaacccaattggtggtgtttaaccccacatttctcccttttaaag

SEQ ID NO: 26079 - DNA, 124 bp, Glycine max
  unsure (1)..(124): unsure at all n locations
agcttgtggactataccttcgatcgtatcacggccgngtttctgtctaagcccggattcaaagtgggctgcaacaccggctccgcttccctaactgtactggaggcggttgcggaggctttatc

SEQ ID NO: 26080 - DNA, 412 bp, Glycine max
tttgcatgtgtaggaagttctagagagagaaatgtcctttttccagagagttctgagagattttgctgtgtgaagatctgtagagacaagagctcgaagcggaagactttctgagagcttgagatgagtttgtgagtgattgtgagatcctagaggtgaaggagacatcctcaccacttgtatttttgcaatctttcatcttgttcttctctgtgttgtaaaggaggttttcggactatggaaagctaaatcctctgttggatcttccctgtaggtacttgatgtaaatatatttttatctatttaatgatgttttgtgtgttctctgtgctatctgcttttcactccagtatgcctttaccttgatcacgtaaatgcatgctttggtaggggcaattcataaggaaaactg

SEQ ID NO: 26081 - DNA, 285 bp, Glycine max
tatgcagagaatatccaatgtatataccttcatctgacttaacatcaaatttttctaagttatcttttccattattcaatacaaaacatttacaaccaaagatatgaagatgtgagatgtttggttttctgccattgaacaattcatatggagttttctttaaaatgggtcttattaaagccctatttaaaatgtagcatgcagtgttaacggcttcagcccaaaagtattttggaagaggagtatcatgtttatgttcaatgacacacttttgagaataaatga

SEQ ID NO: 26082 - DNA, 501 bp, Glycine max
tgttaataattaaaaaacaccaaacctacaaatacattttcttttaaaaattaagaaaaataaacaacatggtaatgatagaaatgtgcataaatcaatgtcgattaatgaatatatcaaaaattaaaataaatttaataaagaacatctaatacttttgtttctctataaaattgaaaatataatacaattagaatatattaataaaaattaatgacacgtataataattaattgataatatctccttttaaaaaaaatctgaaagtagaataattcatcaatttctacatcaattatttattatataaacaaatataatgatcttgtatataaatagaacaaaaaaaaaatacaatgaaaaaaaattacttgttacgaataaaaataaaattaaagaaacaagtctcacgaaaaaagtgtatatgaatggaatgtgacaacaaaatatgcaacaaattgtattaaggcccaggtttttggaatgaaacaaaaaatgccc

SEQ ID NO: 26083 - DNA, 165 bp, Glycine max
agcttgagataaggaagtgtagaatggtgaaacttcctacttttattcgttgaccacagagtggtacctggagatatgtcgcgggggtcatgagaccttggggacgtcaggtggggtgctattgcccaaaaccaagcttgaccaatcccgacccaacccgggcat

SEQ ID NO: 26084 - DNA, 334 bp, Glycine max
cggaatccaaacctcggttttacacctatattggtggccacccacttacacttgaaaacacaagccatgaatttgacataattaagctcccaaatttcttcaatgactccaaagtaaagcattgaagctagacggggattgtcatcatttacactaacaaagtgttgagattcaacccttaaactaaccccattattttgcattgtactcttggtgtcttgggatttcgtgtacaacgaatacttgttgatatcgtatccctggcaagttataacaccctgttatgcccttttaaccccttggtcttagacaattttgggatactttcctttac

SEQ ID NO: 26085 - DNA, 368 bp, Glycine max
agctttggcatcatcaaaacattcagcttgatcatttgtctacaatctccccctttttgatgatgacaatccctgaaatcaagacaagctatatacaagatgatagcacgttcacacaacccttactccccctatcttttggcatgtatgcctaacttttcttaatgataaacttctaattgatttctaacccaagttatgttctctcaagttctctccccctttggcaacatcaaaaagaactaagcaacacaaacaaaatctaaacagagccaaacaataaatcaaaataaatccatacattgtcataaccaatccaaaacaaagtcgagaaatataataatacttaataatagtgcaatattacg

SEQ ID NO: 26086 - DNA, 373 bp, Glycine max
agcttacccatctgttgtaaatccgagcccattagtaagatcaaatcatttctagataagatgagataagatctacatgaactaatatgtagatgagatcaaatctaaatagtatctggaggagaaagataagataagatctaattttatagaataagttagtctgcccttttcgagtccaagcccaattctggattcaagcccaaggcttcatggattcctgaaactagattaaaaacatcaaagtagctgaatgggcccaaataataaaactgcctaattaatttgacaattaagactaatcagtacttcaaatggtgcaaaaaggggtaagaactacgataaactattggcgcatcaaaaccccccatac

SEQ ID NO: 26087 - DNA, 887 bp, Glycine max
  unsure (1)..(887): unsure at all n locations
ccacccaaccgagcaacaaaaccacttacgcaacacagaccaaccaccacacatgaaagccgaacaatagaacaaacataagaatgccccacgagaaagaaaatttgaccccgtggagccacccgannctctagaaaagaccccgcgcatgccagcatgnnggaccgcgccaaaccaagcagatatagcccaaggaaaaaaaccggaaatgggccaaaaaagacccaccactaaaagaaccaaatgtggaaaaatggacaaccggcgttaatacctgaaagtacaaataacccatgagccccggaaccgggagatatgaagccacaaaaacctatggagccaacacatcccagtatagacctaaaacgtgtataaaccggaatggaacaaaaaggacaaaagccgctttggaatcattcagataggaaccaaaatgcccaggatggaaaacacctaaaaatccggaatgcagaatgagaatataaaaagaaggtcactgggggctatgaaatgtgaaaaacataccggagttgaaacctaaaaaaaggaacccaaaaaaagggccccggtccaacgctaagcggctcggactgaaacggaacccaagaaggaaaaagccttatcagggggccctcaaagggaggcctggcccaaagagaccggctctaatctgcaaaacaaggaaaaagtggggcccaaaaacaaaaccggtcaaacatataggggttagaccgcccatgcaggaaaaaagcgtacgcccaagaagaataccaaaaaacccatgaaccttgaaataagggaaagggcattccaaacaaactaaaatcgaaaacaaaaaaaaaggggcgaaaacccaggttgtcaaaaaaaataggtgaaggacaatc

SEQ ID NO: 26088 - DNA, 491 bp, Glycine max
tgctcgagaaacttccttgagaaacttctttgagaagcttccttgttaagctagagcttagctacacacccctctaatagctaagctcacctccttgagaagctagagcttagctacacacacccctctaatagctaagctcgcctccttgagatgagaagctagaggttaactatacacatcccctataatagctaagctcaccccatgccaaaatacaagaaaatacaaaaatgtccctactacaaagactgctcaaaatgccctgaaatacaaggctaaaaccatatactaatataatagccaaaatacaaggcccaaaagaaggaaaaacctattgtaatatttacaaagaagagtggacccaaccttggcccatgggctaaaaaatctacccttaggttcatgagaaacctagagccttctttagcagctctagctcaattctcttggagtcttctatccaatacccatgggggtaggactgcatc

SEQ ID NO: 26089 - DNA, 330 bp, Glycine max
  unsure (1)..(330): unsure at all n locations
agcttgtanaactgcagcanatcatctgacagtgcaaaagaataaccaacccatcaaaaaaaaattatagcccaaaaggcctttgtatattcgcattcaaagcagaagtgttttgcagtctccaattcaaatttacagaaaaaaacacgaaatgtgatattagatgatgagaatttagaatgtaatgataaaaaacacaaatggtcaagtatttgcacaaaaaaaaaatatggttactcgtggcaagaatatgtatatttagcaagcatttgccaaatgcatgcatggtcccatgattcaatttattttaaagaaatgattggttggctt

SEQ ID NO: 26090 - DNA, 397 bp, Glycine max
tttcgctagtttctatggaaatcacataatttttttgtcattcatttgactaaggtgaatttttgctttacgttgtagattccctctatgattgcaaaagtgaagttattgggcctggattcttcagatttaaggcagaaataggttcctttctcatctttgttacagaattcagataatgaattatgcatgatggtgttaagctgatcattcttaatgaaacagattttaatggagaaatggtggtgcaaaattatcttaaaaggactggtcgtgaagagtgggcaagacaggtatatacgcattataatgttcatgtaaaacctctgataatatgctgctatgatctgctgctgcaattagtattattcacctactgctggttttgaatacatgc

SEQ ID NO: 26091 - DNA, 238 bp, Glycine max
agcttacagaacctaaaccctaagttaaattgtgaaattcaaagcaaaaccagacaattacaccaacaattactcaacaattcaaccgttcatctgcagcaaacagcaacaaacagaacaaccacaataacaaaaacaccaattaaaaagagaaagcagatatttacacgtgggcgtaccgagcttgagagtcctgaaacagatgtaatagagagcctcattgtccaaaaccatacac

SEQ ID NO: 26092 - DNA, 789 bp, Glycine max
gggctagtctgcatggcgtgacgtatagaattctcaagctttccacagagtcatgacttcattttttttatttgttctaagcaatttatatacttgttggaaaattctgagtctattttcatatgaacaagttaaaagatgaaaactcataggaggataatttaagttatgataaaaagattggctatttttcagagttttaagctacctccttgaatagcttacaaggaacgaggttctatcataccatcattttgctctcaacaattatgcttttgaaagttacattcttccatgtgtctaaccaaaatggtttgatatatatatatatatatatatatatatatatatatatatatatatatatatatatatatatatattttacccacgacaaaacaagtataaaaaatccacctttatttgattagaggcattatctccagcggtgatgctttgctgtctgaagtttgccctgatataaaattgtagaatgcgcaccctcaaatttggctattttcaagtcccgccagcctcaagtctttgtggtgctcttgggggataaatagttttacagtttttgatactttcacttttaggtcactttctgggtgggcgctttttcccattaaatggaaagactttttgcgtaaatggaaaccacaaggatgttttttttttcctcccctgaagaagttttaatacagaaataaaacaaagattttccgctttagaaaagaaaaatgggggcaacttttaggtctggtttattacgaagaaaggggttcc

SEQ ID NO: 26093 - DNA, 683 bp, Glycine max
acttgttattttagagacatgactggaattagattggaggcttcaaatgcctgggaaccttcaaaattctcttttgaaaaaaccccgcttgtataaaatttgggccctccaagggaccaagaggaaaagagttttggtacccgcgaccctcgtccttttgagaaaaaaaggaccccaaggaaacgaaagacgaaatggagctttctgtgacccaaagaggccctgacttcgacctccatttaccatgggccttttatatgggccttccgtttgaaaagcttatgtgggatattaatccggcccaaagaaggagatttaaaaaggaccaaccctgggccttgtggtgacagaatccgataataaccgaattgaaaattggggtggccaaaaaatttggggccacgtgtttccaaaaacacaaaaggttgcaggtttctaaatttaaatttcgaatttttggggacccgggacccccggaaccaacacccaagtattggagaggctgcctccaaacccctttggcacacaaaacgcctgtagatcaatacccctttgatggtgacccaacccccagcgggttttttggccagaaaaccacaaatttacggctttcctagaaaagagacaattttggaaaccaccttttcgaaatcctttgtttggacccaccttattgggctatg

SEQ ID NO: 26094 - DNA, 530 bp, Glycine max
  unsure (1)..(530): unsure at all n locations
ttatagagtgaagatggcttgtgaaaattaaaatgcattttgttacagacaaaattatcggttcatttcaccaatgtgagtcaggaaagaaatgtacacgcatgtttaaaaactatttatcaatatcaatagcagcaatagtgaggagtctactattactacttgaccaaaaatcatgtcgatctcgaatccccctatcttactgctctgccgcatagcccgagaagagattattacatgttaagtgacgaaatgagagaaaaaatgtaccagggataataacaatatactggtttatatattgctatcaataagtaataaaaatatcccttgcatatggatgagccaacctatcacggaaactgttttaatgatctaatgggaacaatgcagctgaacanatttaactgaattcatgttgcaaaggatataaaaactttcaagttagaagcatgtaagtatgattaagatgaacataatttcatttctcaactagaaccacatacgcatagacacattaaagctatctt

SEQ ID NO: 26095 - DNA, 505 bp, Glycine max
agcttatctttcagagtctgaaaagctttctagcattcatcatcaagcttgaagactgcctctttattcagcaagttgctcaatggtttgacgattttagagaagtccttgatgaacctctgatagaagcctgcgtattcgaggaaactcccgatacccttggcatttattggtggaggtaaattctcaatgacatcaattttggctttgtccaccttaatgcctcaggctgaaatcttgtggcccaatattattccttcttggaccatgaaatgacacttctccttattcagcaccagatttgcttcaactcatcttcgcaatacgagctctagattagtcaagaagtagtcaaaggaaagcccaaaaattgagaaattgtccatgaagacctttatgcacttttctaccatgttctgaaaaaatagctagcacgtacctcttaaaaggttgttgtgcattacataaccccgatgacatctttttgtatgcaaagaccccaaag

SEQ ID NO: 26096 - DNA, 430 bp, Glycine max
ttatatgacaaaggttacatgctaaaatggagatgcaatttctagaataaaggttagcatcaatattttcccatggaggacccgccaaagaatgaacgacatggcaggagggatggcgttattccaaatattcttccaccatcgagatggattcaaagtggatggggacaaaaaacaataggcatccttctgggtcagggtgccattggttaataaatctggtttcacctgaatagggataggagtgtgcaaaattgcctgcgcaatatttgggcatagctgacaaaaggttgtaggaatcaaccaagactggtgagatatgaagtgactaaccttagctattagggaataactaatatgtttagggatgccaagcttacccacaatggtttcgctaagccagttatcgggtcaaaagtgagatcataaa

SEQ ID NO: 26097 - DNA, 361 bp, Glycine max
agcttgtgctattccaagttcattaattatacctttaagccagattgcttcgttcactccttcaactaaggccatgtattctgcttcagttgttgaaagggcaacaactgattgttgatttgcttttcaactgattgctgtaccaaacaaagtaaacacatatccagttaaggactttcttgtatctacgtttcctggaaaatctgcatctacatagcctgtgattgctgcttcatgtgttgtcttcttgtaccttaatccagctttcaaagatccatttagataccttagtgttcacttcacaactttccagtgtatgctgccaggatctcccatgaatatgcttataatacttacagca

SEQ ID NO: 26098 - DNA, 351 bp, Glycine max
ctgggttcgatggccccaatgacatctatcccctacattttataaggccaaggggcggacataacattcagaggatgtggcggaacattgacattgtccgcgtatgcttgacatttatgacatttccttacatgggcgcagcaatcgctttccatagtgagccagtaataaccggccctaaggatcttcctggccatagcatgcccattggcatgtgtcccacatgaacccccgtggatttcctcaatcatgcagattgcctctttggcatctacgcatcgtatgagggtcatgttggggtttcgtttatacaggatggtaccacttacaaagaaaccaatatccaatctc

SEQ ID NO: 26099 - DNA, 877 bp, Glycine max
  unsure (1)..(877): unsure at all n locations
gacgagtacgattaatactcatccactaccacgatgagtttgttgtcattctacggacacatggtgaaatcattagcaatcgtgtacaccattcgcgcnnnnaagtatgaaccctgggaagccccgcgagatctagagnagacccgctggcaggcagcgcagcgtnaaagctggagacagaagcaggtgtttattgaaccacaatcccccacccgtgagaaaagaataatggcatgcaacgccaaagcatgatcgaataaaatgtaaagggggttcccaccgaaacagacggggtttaaaggaaaaggcctcgagaagtaatggcatatgagactacaacagaaatgcactggtaaaaatcacaaaccggctaagtgtgtgccttcttattgacaaccgaaacgcggaccatgaagactccacataagcaaggaaaaacccaaacgcatgtgtgggcccatgatagtaaataaaataaaaaaaaaaatgcaagctgggcaaaagcgctaaacgcacttcataaaattaaacttaaaagcccccaaggtaaaagaaaaagtggggccacatctgtgacagcgaaaaagaaaaaggtttaaaaaatgggcgaaaaagtgagaaataaacatacacggggagacttgaagatattgaaaaagaaatcctaaatgaagaatgagggaaacctgaaaaaaggaggcaatatttaagtgaacccttgggcgcaaagcctagggcgaatatgagagagaaaaggagggggcacaaagcgtttaaatttggtttttcgaaaaaatggaaaccggggaaggggggaaaaaaacaaaaagacgaacacgcgctcttaattctccccacgtcaaaggagagagaagcg

SEQ ID NO: 26100 - DNA, 438 bp, Glycine max
tactcaaccttgtaaaattacttcagtttggtcaaaattatttatttttttaaaatttatttttaccaaaatatttaggcttttattgttctttttgttacaaattataggtatgcaatctttgttttgtaaagagtcaattttggaattatgtttttttcaaaattttcataaaaaaaatctacatttttttctatttggttcaattagatttccaaagtagaaatcctattgtttataattttattttctatttggttcaatctgatttccaaagtagaaatcctattgtttataattttatttccagaatcattttctttcttaaagtctgaaaattctattttcaaaatagtttgtacacaagtcttgcaaaaattctatagtataaactacagtgaactctcaatgtttgtggggatatcttttacagaaatg

SEQ ID NO: 26101 - DNA, 157 bp, Glycine max
agcttgttcttggtcaaataagtttttatatgttgatgtcttatctgaattgatgtgcatcttaaagctgatttttagtatgtatatatttaacccttgatatattgcaggaacttgatttgcatgacattcttttcattgatgctgaacttgggaa

SEQ ID NO: 26102 - DNA, 452 bp, Glycine max
ttattattgccatttaagattacagttttgtagatgcttttatacagactagttggatatcagtttaagtgctgtagaatgaactgggtcttgagaatttggtgtctgaaaacattcctatagtggctcagtggttacattggtggtgccttggagccttgtttcttttggaattgggtgattcaaagtatggtgtgttctagaatggataagatgtaggtctgcaatcattgcttcccatgcaatgattgtccttcaccttgtactttccttgtctatactctgctaataatttattttttatgcctgcttttggtctaatctgtttggaactctcttgttaggccatctgcaccactaacaaacactctgacgaaccctggttttttggaaggtgaggtatatagtccgtgaatttggatagcattatgactacatatatcttctgtttt

SEQ ID NO: 26103 - DNA, 89 bp, Glycine max
agctttcttaggaaaaattccttgtctttgctttcttaagaaaacttccttgagaagcttctttgagaaaacttccttgagaagctaga

SEQ ID NO: 26104 - DNA, 393 bp, Glycine max
ggcctaggatcttcttcatcaatgggatttcttttgtctcttggaagatgaatggcagcggaatggagaatgaatagagagaggagacgccacttctaggagaagatgagtttataaaaagctcaccaccataggaggtcatggataagagcctggaggaagaagatgaatgaagggagagggagagaagagcacgaaattttgtgctctaaaagagctctaaaatctgaagtttaatattcaaatgatcaaagttgaaaaaaatgaacacacatgacctttatttatagcctaagtgtcccacaaaattggagggaaatttgaatttcaattcaaatttcactagaatttgaaattgaatgtgtggatccaaaatttcactaagtatgatta

SEQ ID NO: 26105 - DNA, 330 bp, Glycine max
ggatccttaagtcacctgcagctgcagcttggggtgattttgtcaatgttctagcaacctcttgcaatgttgtcaatcaaaattgtattctactttggcttgcacacctctacatataaaatacttgaccaaattattatgcataaacttaaccaaagcagttatgagcatattttgtgtacctttgaaaatcttatttactacctctaacaaattagttgtcatatggtcatatctatgcccaccttgatcatgtgcaaatattcatttttctttggaaattcacttaatccaatgcataatttctgcattaatctcatgaaatcttta

SEQ ID NO: 26106 - DNA, 378 bp, Glycine max
tttaggctgctcaattgctccaggttgctacatggaatgtgtttaggtctgtatggtggtcagcagaggagcacaaaccacaaactcttgcgacaggaacaaatttctgattcaaggccagctgggttaccaagttaaccaatgcatccagtttgccttcaagcttcttagtttcagatgatgcagatgggtttgtagctacctcatgcactcctctaatgactatggcatcatttctggcgctaaattgctgggagttggaagccatcttctcaattaaatttttggcttcagcaggagtcatgtcttcaagggctccaccactggcagcatctatcatacttctctccatattactgagtccttcataaaaatatt

SEQ ID NO: 26107 - DNA, 861 bp, Glycine max
  unsure (1)..(861): unsure at all n locations
ccacaccttcactatcttgtgctcctaccatcttcacttacataacaccacactatactatacaacaaatcatgacgcaacctncccaaacaccaaaggtatgaatccatgcacgcccccggaatctctaaaaccacccggagcctgccagcctggccaagaaccggctctttattctttttttccctatgtggtaaaaacccccgttgatggcccttcttaatcaaccgaaaacctcgtgccttggaagacaaaagggtgttgaaatggggacccaaaaaaatgaaacagtgcattggtgactgggggggaacgtgttgcaaaaaaaaggactcaaatagaatgaaaggggggaccaacgggaacttcctgctcggggccttttgctgaaaagagggctttgctcctgggtttggttaaaaagggttcccaaaacccaaaacttaaatacacccccggggaaagaaaatgggggacaaaaccccgaaaaaccctaaaccgggagagggttttttttttttaacaccccaaggggataaaaaacccccctaaattggtctaattggactccaaataaaaggaaataataatccaaaaaccccccttaaaaaaatttggtttataaaaaataaaagggcactttcggcccccctcaaccaaaaaaggggaaatcccccctctcccccaaaaaaaaaggggcctattccaaaaaaaaaaaaccccaaaattggaacctattaaaattgggacaccaacaggaaaattccttttctttttaaacctgagagaaacctctaccttaaaaccaaacgcagatttcattgttaaacaaaaagtgaaaccgcgccaagaaaaaaaatc

SEQ ID NO: 26108 - DNA, 548 bp, Glycine max
  unsure (1)..(548): unsure at all n locations
tggatctggattgggccctaagcctggtccataanaattttgtttagaatttgaaaactttgttcacctaatggcaatggggacatgtccttttgttgactatttttataacaggcaaatatgaacgaaaaatataaagaacagtatacttatgaagctaaaatgaaattgctttgttcttttaccaaaagcttaggttttcaaagagtattttaagtagaaaaggtaaaggtatatatatatatatatatatatatatatatatatatatatatatatatatatatatatatatatatatatatatataatcactttgacacgtaaatataatttgatatatatattactgtttaaatctgtgaaaatagcattaaatataataaaatctataaatgttgtagtgaaaataaaaaaacttttttaaacatttgggacatgttataaaatattactatcacccaaggcatttattttataaggatttttatacaaaaaaaaaatgttttttttggtgacaatgaattgaataaattttttttggaaaa

SEQ ID NO: 26109 - DNA, 415 bp, Glycine max
agcttcagaagaaagtgatgaggtacatgttctatttgttatagcttgaaagagcccgagtagtcgaagagaagttcaagtccatagccatcaaagtctgaaaagagtatgatgaactaagggacgtcaatatggccaccgctgaagccttggaacgagaaaccaagaaggcccgaaaggaagaacacgtgcaagcaaagttttgaggggctttatagggcagcaatagtaagctcaacctccgaagaggtgaaaggaatcatcaagggtcaaaggcatgatcttgaaggacgagctaaaggcttaccttatgtcgaaaagaaatttgtcccaacagttaagcgagactgaagggaatatgtgggccgtcatcaatgagtgcaaagagaagctaaatctagcggcgactcacgag

SEQ ID NO: 26110 - DNA, 420 bp, Glycine max
agcttgctgttgatgcttaactagggagtgttgtagtttatataccaccagcatctgtttcaaatccaaatccatcgatttgctgttttgtctatataagagaaattgcaatcatgagtgtttccagtagatagaaaaactactaggtcgaagacagctaaatttatggctcattttctatatatggcccagcaatacatgaagaatcagcagaaacatgatgacaagtctaagtcatgacttgtgatgggtgaagcaattaacttaagtgttactatgccctcaattttacctcaacatgcttggactaccattggcataaatatgattgcaaaatataatattgatagacatgtatgcttcacatatttcatgtctaacccaaactgatttggaagatattaataggtataatgactg

SEQ ID NO: 26111 - DNA, 418 bp, Glycine max
agcttgtgattcctcaatacatccttatttattgtttaattcttacttcttaaatgtacgttatatacttgttataggaaccttataattctaagtatatatagttgtagtatggtgttctgccttaattgcataggtagtatggttgtttgtgatttcttgttcttagtgatgctaatactctatagttggatgactcatatcaagttatatttcataaggaatactcttttgatcgtaccttctaattctagtgcaacctatttttttttgtgttgcgtgcttaagtcaaataaattgagttcacttgaaagcctaagtataattaattctatgttatgagactacatcaaacaattggattactgatgtttctatcacaatcaagtgattgttaatgtcttcatatgagtgtaca

SEQ ID NO: 26112 - DNA, 280 bp, Glycine max
gccatggacgcttggttcagattgttccggatgcaaattcaagaaccaccattgttgatcttcctagaactcaagaacagaaaaatagaaaatatggattatatgagaagatgaacggaacgatgccacgatccacggagaattgattagctgaaggagaattcaccacaaaggaatagcttccttgataagaatcaatttgattttcagccaaaaaccaaagaaaaggctaagctctttctaagcacaaacttaatttcaattatatcaaaagtttcta

SEQ ID NO: 26113 - DNA, 424 bp, Glycine max
  unsure (1)..(424): unsure at all n locations
agcttgttctcgttctgaatcactngatgttggggtctatctgaaagctgttgacaccttgattggtacgatgtttgggtttgaagacgtgcagaggttcttgttcaaccctcaaatgaatgtgctgattaacttggttggggtacactactgcctcacaacccttgggattccggtattcccattctttgacaccctattttgatttgttcatgagtcttaataattagtgcccttagaacactgattaaggaatgataaatagaaaatttttatgaaaattacattgcattggaaatcatgggggagtgcatctcaataaaaaaaacttttcacttttgattccttgatcaatacccctttagggaacttaactagttagcattttcgttgttttatttacagtttaactagataaacacct

SEQ ID NO: 26114 - DNA, 632 bp, Glycine max
  unsure (1)..(632): unsure at all n locations
caccagacactgcgacacgaccccacctgttgcngacgttcgntcancgcatanngngcgcgancncntacancnncnncncnnnnnnnnnntgtatgatgcattcgatgacccacaccanagnanacncaagcccgncgccccaccanagaanaagacaaagnagagagacaagnccttatctctcattctgctagccgatcaatgagcaccagagnaatccatatatagtcacatagagcatcggcaaagtaatagatcatatcacacatatcaccatgttaatttgctacgcgcctacacggaaagcttcgagcgagcaaacctcgcttggagagaaatgccaactgtatgtcgaaaacgcccaagtaatacattacatttctacatcactcgacaaggaaggtccgatcaatgtcttttgtnttgcgcgaaagcacggatgcagatcaacttggacactcacttcaaaatcaaaacgtgaatgaaaataaccaaataaataagtggaaaacttcgatatgcacggcgttgcaaaagcatgaacgccagaccgactcgaagatacggtttctcaaccattgaagcagagcaaccccctcactgagtcacagcccctcacaggagaaacc

SEQ ID NO: 26115 - DNA, 457 bp, Glycine max
  unsure (1)..(457): unsure at all n locations
gcgatccttaacgcactgcggctgcagcttntgaaactggaatcatttatcctatctccatcagccaatgggtgagtcccgtccaggtagtcccgaagaagaccgacctcacagtgatcaaaaatgagaaggaggagctaattcctactcgggtgtagaacagttggagagtctgcattgactataggaggctgaaccaggttaccaaaaaggaccattttcccctgacattcattgaccagatgcttgaacgcttggcaggtaaatcccactactgtttccttgatggtttttctggttatatgcaaattactattgctcctgaggatcaggaaaagaccacattcatctgccccttcggcacttttgcttataggaggatgcctttcggcctgtgcaatgcccctggtaccttccagcggtgcatgattagtattttcaatgatattttagaaaa

SEQ ID NO: 26116 - DNA, 453 bp, Glycine max
tggtgcatgtgagttgcattgttgtttagaagatatgatctattatgatgtcatggtgcttcaaagtgaaaacaaaaggttagtatgggttatgatggccatagaagatcttgaggtggagttggagtgcatgttcaactgtttgatccacacaagagttttgcttcttaacattttaaccaaatagaaaaactagttgggaaatgggagccccaacataccaatgacaaacaaattgactagctaactagctcaaaacccctttatctcttaattaaatttacttagattgttaatcattcttttattctttgattgttttcaaataaactacattgtgaatgttgaatataattgaaacattgtctattccaccctgagttacttagaattacagtcaactggaaaataagttggacttaaaataaaagcaattcaatttcttgtatatat

SEQ ID NO: 26117 - DNA, 432 bp, Glycine max
  unsure (1)..(432): unsure at all n locations
cttaagtcacctgcagctgcagctattacgngnngaagtattcacttatacttttatagaangntaaaataaattatgaattaatagttcaaataataaattaaattgaaggaaattaatatattaagattcaacaataaatacttttaatgcatttttagtttaattatttattaactcttttaaattgaaaataatatagtttaatttaatatatacacattttgtgtcatgtaaatattaatattgtgtgatgtgtatatgattcatgaggtgtgataacatgttgcgttaagattataacattgtgattgagattgagtgtatgtgataaattgagtatgtgttgaattgtaagatatatgtgtattgagattttatatgcattgagttgtgagttatgaatcgtacaatcacacgattggaagaccc

SEQ ID NO: 26118 - DNA, 415 bp, Glycine max
  unsure (1)..(415): unsure at all n locations
agcttgccgccacggagnntttttactattctcttgtgnggnggaacaagctacaaaaggagagaacaagaaatgaagagccaatggttggtacatggatggagatgaaaaagatcatgaggaagcggtatgtgccggctagttactcaagggacttgaaattcaagctccaaaaactaacccaaggcaacaagggggttgaggagtatttcaaggaaatggatgtgctcatgattcaagcaaagattgaagaagatgaggtgatcaggatataaccaagggcaaggaccatgaagcacttgaagggcccatgaccagaggcagacttaaacaagcccaacacttcatagagacaaggctggtcatttgtatagctgccattgatgatgattgaaggcctaagtggagaaagatg

SEQ ID NO: 26119 - DNA, 366 bp, Glycine max
  unsure (1)..(366): unsure at all n locations
tcgaagttctcctcattgataactntcaacttggatttctcttctaaccctcgcgtatgaactcttagccattcatgataaccaccgatgatgccattacggatgcccctaagttctttatctttcctcaacggacttctccacgccttgtggactttttgtacaactttgagactttgcgccctgaaatctctcacaaggaaaggcgagaggctctcttccgttggcgctcccctcatggggtaccctagctgtcttatggcaagtacgggattatagttaatacaacccctcgtccccatcaacggaacgttagggtagtccccacatgagaaaagaactccctcctttccttccttccatcga

SEQ ID NO: 26120 - DNA, 438 bp, Glycine max
gatccttaagcaccgcggctgcagcttgagttcttgaaattgtgtttgtatactatggaagacttggtggagttggtgcttccttgcctccattccttattttggagtgataacctgaacaacatcgtgttctccaatctcctctaaaagggaataaagcaactcagacaacttttcacctatcttcacaaatttagagccatcaatggacttcggaaacattttccttgtaggagaattcactataatattaataatgctttggttttttttatcactccatgcatctgacataatagaataaccttgtttgccctactgcgacttatgatccttcaacaaattttcagttagttccatctccctgttgagcagtggaactataatatcatgataactacgagctggtaaatttaggtcgtaggctgcaatggcatt

SEQ ID NO: 26121 - DNA, 399 bp, Glycine max
  unsure (1)..(399): unsure at all n locations
tgtgggaatggggatcttcttgtccaccaccatctattcttttggtccacaaggctaaccaaatctggatgttgaagttttgagagtaaatccaatttagctctaagattttgaattgagcatttctttgacagagccaaagatcgtatcgccgcgtaggatccattctctagtttacctttgaacagctgtaatatgacagaagacttataagagcataaaaaataagtttgacaaacgtttcctatgtctatgtatatacattttaaatcacttgactttctaacaaggagtaaaggccccanaacatactttctgtatgtgcatatgaatagctaaatcttgacaggagttcagatattgcaccttccagaaactcatgtaagtttggtatttcag

SEQ ID NO: 26122 - DNA, 433 bp, Glycine max
  unsure (1)..(433): unsure at all n locations
agcttgtgtaagncatctaaattttacttttgtttcttggacatcttgataacatcatctacatgtgagaaagcatttggattttgaacacaaggagcaatcaatggaggaaataattaaaaaataatttatgtggagtcattgacacagactgtcctgtgtatgcagtaaaaaacacatcatagttaatcagaagcatttctccaaattgtggaaatcagaactaggtcgaaagctacaaaaaaaagcagctcaattgtaaagcttaaaacaacttaaaataccaaaaaaaagtatttaaatcacgttaactaatccaacacaaatttgaaagttgctacacataccaaataaaaggcaaaatatttactttttactagaaacgttaaaagttcacaagtcactgacttctcactgataaaaaattaacagg

SEQ ID NO: 26123 - DNA, 431 bp, Glycine max
  unsure (1)..(431): unsure at all n locations
actcagctttggactgaaagacaggtggctgggtgtgtctagttttgctttataaaaatcgccagacacctctatattctgaatatagacgttccctatgtgcaactgatcataggttaggagtctgtccataatcactctccatgntctgacccctaccttatagggagcatcactctcccacaagtatgggtagtggttcgttttggaatctttccattccaagatttatccgctgagaaacgaataatagttaacaatacatttctgactcaattgatgtgcgaattccatcctacaattgacccaaattaaagcaaggaaagggggattcacatcatgaggccgccgaaaaacctttctccacttacagcttcccaattcagcaatcgtttctgtcatggacatgattgtctcccttgagttgagtc

SEQ ID NO: 26124 - DNA, 417 bp, Glycine max
  unsure (1)..(417): unsure at all n locations
agctagccaaagggtttctatgtttctaatatctntattcaagacaaagatattcaagatggatgatcaagacagtttctagagtcttagaaagagtatattaaaataggaagggaattcctattgaagtagcaaaaggtttggcctagaaatttaagttaaaaagtctttttcaagagatttactctctggtaatcgattaccaaaggatgtaatcgattaccagtggccaaaactgatttacaacagctattaaaatttgaattcaaaatttgcactgtgtaatcgattacacatatatggtaatcgattaccagcagttattgaacgttttaattcaaattttaaagcttgtaatcgattacacacatactgtaatcgattaccagagaagattttcagaanaatattctcaac

SEQ ID NO: 26125 - DNA, 120 bp, Glycine max
  unsure (1)..(120): unsure at all n locations
gaagtattatagcacaagagcttcaagtaagtactccttaaacctccattaattntcagctctaccttctccttcattggtgagtcttcatttttcttcatgcatctcctcacatgtctt

SEQ ID NO: 26126 - DNA, 416 bp, Glycine max
  unsure (1)..(416): unsure at all n locations
agctntgaacaatatacttggccttcatttatctgnctctgggcttggcggccacgctcaacaaagtactttcgacacctactgtacgttgatttgaccaaggctgttatgggaatgttgtgacaatccttcaaaaccttattgatacattctaagaggttggttgtcatgtggccatatcgacgtccttctctatcataagccatcgtccatttttcctttgaaatgcgatcaatccatgttgctatggctagacttagttcacgaaatttttctaaattttgataaaaaaaaatctgcttgcaaggagtgtaggctgcataaaattagttatcaataacaattttaagtatatagggaagttaaataaacgtgaccatcaaatatgaaatcttacccaacttcttcagcatttt

SEQ ID NO: 26127 - DNA, 294 bp, Glycine max
ctcagcttgaaaaacgaaaacttgaagtatggaaaaatttgttttgttctatagaaaagaaaactgggagaaaattgtgggaaatcgtttgagatcaacaggaaggatcgcggaggtgttctttattactctgttgatcttgtcaccaccatcatgagcggctaatttttcctgtatgaagggagggatctctatagtcctatgtatttcttttgatatacatacaaacacatatatgtgagaagtatctattgttgtgggtgagtgcattatgttctttagcccgagtatatc

SEQ ID NO: 26128 - DNA, 428 bp, Glycine max
  unsure (1)..(428): unsure at all n locations
agcttgttnntaaagttttagctagntactctctatgttttactaactntcaattaccaattnttttttaattttcagctcacttttaaattattttttataaatataaccttaataatgtggtgaattaagtcaataatatcaagcatattaattattatgatcactaatatttaaagagttgttaaattattatgatcactaaccttaattatgatcactaattattataacctcctgatagtcttctagtccttctaacatgtttttttggtgaataccagtccttctagctgatgccatgaagattggttttacacggatgtaattttttttttgtttttcccttttgctgtttttgctttctagttagctcttgtaactagaaggactaattagtcaaaatntaaatttattgaaatctcact

SEQ ID NO: 26129 - DNA, 431 bp, Glycine max
  unsure (1)..(431): unsure at all n locations
gcttccaagattattntgatgatgccatttattatttaatatccattcaaacaagattaaagaaatcaagaagattcaagagaagacttaagatatgtaagaacctcaagaaaagcatcaagataagtataaaaagaatttttcaaagaaaagattgaataacacaatttgtccaaaagaatttttcaaagaaaaatcttttaccagagtttttactctcttgtaatcgattaccataaggcagtaatcgattaccagaagcccaaaacagttttataactgttttacaaagtagtaatcgattaccaatgtttttgaacgttgaatttcaaatctcaagagtctcaacttgtgacaaaatattttcaaaacagtgtaatcgattacacaatatttgtaatcgattaccagtggtttttgaatgttggatt

SEQ ID NO: 26130 - DNA, 180 bp, Glycine max
gatgaattgagtcacatcactgcttcgtctactgcccaacatatttaggattattgatgtccttgttacttccagtttcaccttgacaaagatgtcatggaccatgttgaaaatctaaattgattcaaccccatatcttgcgtaaaaattcgcaatacttcaactgtacatcatttgcat

SEQ ID NO: 26131 - DNA, 170 bp, Glycine max
tcgaaaacaatatgcatgtatgacagctcatcattgaataaatgacattcatcggcttattataactgatccacgcgtatcatctcttgcgtctaaagacactaataaatgtctcttaaaaataacgccccgacctgacacatgatacagccctggcgttgatgactaag

SEQ ID NO: 26132 - DNA, 427 bp, Glycine max
  unsure (1)..(427): unsure at all n locations
agcttgaggcacaatggtagccacaaagctgattattctgcatagctgcngcatgggaagaagaggagaagaccaagtgttgtcttaggtaactcaaccttaatagtttcagtgcattgaataactattttcaataacttctgacacattttcaataaccttaattatcaatttgattctcaaatttttaaaaggttcaatttaatgctcaagtttttaaagatgaaatcaatttggtcttcaaattattttaaatattttaatttggtctttaagttcttaaaaatttgaaaatcatattgattcatttttaaaaatttgaaggttcaattgattcatttttaagaatttgaggactaaattaaaccttttaataatttgnggatcaaattaatttatttttaagaacttatgatcaaattgaacc

SEQ ID NO: 26133 - DNA, 302 bp, Glycine max
agtgatatctctaattatgtttagttgataagccttcttcaaagtagcgttatcatcggttgaacagacacaaagagagaaagaacatccgtaacaacataagatcattttacaagttgtttagttaaccaaaatgagtgaaccgaagactatcaattattgttctctcggttagtttactagaaagtgacagatgcatataaaattacatacatattcttaataagaagaaatatgttaaactcagggtactatgatctatgtaaaaccaaaaagtgaaaaaaataatatcaaattgacct

SEQ ID NO: 26134 - DNA, 435 bp, Glycine max
  unsure (1)..(435): unsure at all n locations
agcttatccttgtgaatttgaagacatcctgattttgtatgtatttatncctctttgatgctgcatatatatctgtttttatttgttacatgtatccactcataattgtgccactcatccaaaattgatgttacttgccacactaacagaattgtactgtgtcttcagtttcttttcattttaaatacaacattgcatgatcgtgctctttgaactacacttttagacttcaacttaagtaaatgaaaactacatattatgaaagttcaacaaaatgcgatatttttttatgcagaacaacaaaatgcaatatatccaagaagaagagggaaagaaagaaagcaaaggaaagaaattaacaggttgccctacgataaaaatggtaatcagaattcaagtccccatcatgattgaaagaaattaatgatgtcaaat

SEQ ID NO: 26135 - DNA, 404 bp, Glycine max
cttgttaaaaactctaagttcttgatccctaatcctccactcttctttactgcacaaaccttcttccacaccacccaacaaactctcatttcctcttattttgccccccaaaggaaccttctttggatgttgttgattttatcaatgactcacaaaggatctttagaaacagaaaaaaaaaaaaaaagaggtatagaagacaaaatagattttataaggcatatctgaccaccgaaggaaaggtgtttatatttccaagtggctagtttgcattctactctaccatcggattccatattggcaccttgcgaaggtttacaccaacagacatctccaaatacacaaaaggaatctgcataaccttgtagtttaagatttcctccatctacctaaagcaaagatca

SEQ ID NO: 26136 - DNA, 423 bp, Glycine max
  unsure (1)..(423): unsure at all n locations
agcttgtgcaaatcaaatcactcctacattttatctctagcatgcattgtatgttggtctcgtcctttgtcacgggaagccggaaggtccatatcaccttcttaattgtacacatggggcactacgcccccaaatgcgcaagtaagaagagataattttccgggctctcgtgtccgtaaaatgcattcatatcatgcatcgcataagcatctcttcataacatcataatggacatatcctgcatttgtccgttatcatattccagcctcacattttgcatgagtcatggcatcatcatgcatatgcgttcaacaaactttntgatctgcaaaatcgcataccatttgttttcatgtttgctcatccttgcgttttcctctacaaaacaaaaacaaaaaagggggaagcgtgaaacttcacact

SEQ ID NO: 26137 - DNA, 331 bp, Glycine max
  unsure (1)..(331): unsure at all n locations
tactcagctttcttgagaaacttccttgaganacttctntgagattttctttcttgagaagctagagcttagctacacacacccctctcataactaagctcacctccttgagaagcttccttgagaaaattcctaaagaagctagagcttagctacacacacctctctaatagctaagctcacctccttgagatgagaagctagagcttagctacacaccccctataatagctaagctcacccccatgacaaaatacatgaaaatacaaaagagtccctactacaaagactactcataatgcctcgaatacaaggctaaaccctatctact

SEQ ID NO: 26138 - DNA, 406 bp, Glycine max
  unsure (1)..(406): unsure at all n locations
agcttgcattcgactaacccatattacaattctactagaaaatagtcttttaacatcggttgttttcgattttcaacatcgatgtttaaccgatgttgaaaccaccgacgttaacattatcaatgctaacattggttttcaaaaaaccgatgttaatatacactacacgacatcggtttttaagaaaaaaccgatgtcgtatagtacaaaatgtatgaaaaacaaatactacaataaacaacatcggttttagtcaaaatcgatgttgaattgcgtattctgaaacgcttactacatcggttatgaacaaaccgatgtagagagtacctttacaacatcgattattggaagaattgatgttaaatgtgcttatgatatcagntttagtacaaactgatgtagaaaa

SEQ ID NO: 26139 - DNA, 408 bp, Glycine max
  unsure (1)..(408): unsure at all n locations
tgcctcgccctaatctcttctttgtattgttcgatatatattcgcaactacgagccataattagagaactctcgttctgagaatgctgggctctcctcaagatcttcatgatagatgtcctctacatggaaggattccctaaacttaacacaattgcagggaagaaccacattgaagatgaccatcaaacctataagttgttgaaggtctagaggagtggagaaaggcatttcatcataagcaacctctctacttctccatattgtagctcctggagggtaaaccttcatgtcagatggtgtatgttcaaagattatgttgttgagaattggcggagagggattcctttaaggaaacccccttatatgacttgctcttcaaaantagtgaaaagagcatagacctctt

SEQ ID NO: 26140 - DNA, 423 bp, Glycine max
  unsure (1)..(423): unsure at all n locations
agctntaggcttgcaaatattctcccatgttatctgtatgaacttgtctctgattctcattatctccccaaacgaaagctctacacttttgaccaacttcatgacattgatctaggcaagcatgcaattttcatagcataagatgagagagcttgtaacacaggtttcaccaaagatatatggatctgacatgtctataatttttaaccagcttgagagcttttagttcttgcgtgatgctatataaacatggtgagaacagccaaagcataataagctggcacccaagaatccttctttcattaacacactcttaaattcttcacaacaatattcccattaaacctcgcaaacaccatcaaaagcacgattggaacaaaatacaacactagcccaaaatacatattatatatatatatatat

SEQ ID NO: 26141 - DNA, 255 bp, Glycine max
  unsure (1)..(255): unsure at all n locations
cgttgaaacattataatnttggaaaatattaccaaaaagattaaatcataacccaacatgttttgaatttacaaagaaataacactcattgtcatagtattcttggtaagatatacgttgaaacaaatgcctnctaaagggtgattctggttaactactacacaagtcaataaaaaaattctataaaaattaattaaaaaaatatttctaagaaacctcttttattatgaatggtatttttttaaaatacatatc

SEQ ID NO: 26142 - DNA, 420 bp, Glycine max
  unsure (1)..(420): unsure at all n locations
agcttgactaggcgannngatttttctctattttcactttagntattagtcaattcaattaagaatgagaaatcccaaagagaaaatgtccgattgatttttgtgcttcattttactaaaagatatatttttttattattatattattattttacctctttttttttatttccaacgtggttatggcacgaccaaacggtgggaattcattttaacaaaaattaacgaatactacaattcaaatgatcggtggaaatttatttttttagattaggcgcgaaatgacttaaataaatgactgaagcacgtcaaaaggtggtacgaaaagaaaatgaaacgagaataaaagtacacataaaaaatggggaccaccacgggtacagagaatgaattgaataagcttgattcggaaacttaccc

SEQ ID NO: 26143 - DNA, 146 bp, Glycine max
  unsure (1)..(146): unsure at all n locations
atgtgagtatgacagatcttgtgagcgcgaaagatgacgtaaatctccgcgtgtcaacaggcttgtcggccgcgattgacgaaaggcgcanaatacgacattagtctctgcgtgctattaggcttttcgtcttacagacagcaaaa

SEQ ID NO: 26144 - DNA, 410 bp, Glycine max
  unsure (1)..(410): unsure at all n locations
agcttgcgtccgngtattggatantatgctttaaatgtgtgcattaaatgcacatacttcttaatgttgagaaatcactctttgtcattgacatgttgaacactatagcaggaaaccacttcctttttttgttcgagaaagtctgtacaacatagctcttctttttaggaattttagatcttagcttcatttattcttcattcgattatgtcgatcctagtataatgtctatgaaaaatacatcttaaacacaaagtattaaataaagtcttaaatatcatctttaatgcgatattagatcatgattccatcttgctatcgtctaaaacatcagacgtagacttcgtgaaacatgttctaatagtgtataagacataacttttaactntagtatttgtttacatctaatc

SEQ ID NO: 26145 - DNA, 333 bp, Glycine max
  unsure (1)..(333): unsure at all n locations
agtctcacgatagtcacgtgcttttcttttangttagccgaggctatacgagacatacttgccaacaaagtcaggttaacgataactcacctatgctctttctttcattctatatgtagcaaagtcattgatccagtcatatttgatgagttggaaaatgaggccgcaattatactgtgccagttggagatgtatttcccccttgctttctttgacatcatgattcacttgattgttcatctggtcagagaagcagaagaagccattgaattttgttcagaatacttagagaaggctaaacctgttgggctttctgagtctcggcatgatgac

SEQ ID NO: 26146 - DNA, 411 bp, Glycine max
  unsure (1)..(411): unsure at all n locations
agcttggtggctagttcatggctttaattttccaatacttcaaaaagattgcccttaagctacttgcgcaaccttgttcatcttcttgttgtgaaaggaattggagtacatattcatttatccattctttaaagagaaacaagatggcaccacatagagctgaagatttagtatttgttcatagcaacctacgaattctctcaaggaatactccacaatatcatcaagaggaaactaaaatgtgagatgtaactggagatgattttgggtcacttgatgattgtggtattcttgaaattgctagtttgtctttagatgaaccagagttagagggtgtctttttcattgatgattgctagtttgtgaaattcgtgaagacttgaagttgttaattcatcatcttgctntata

SEQ ID NO: 26147 - DNA, 368 bp, Glycine max
  unsure (1)..(368): unsure at all n locations
ttcccttattttcaggctaaactttcctctgtcctgaggacttatcgagatacactgactgctgatatgaagagtgctattaagactgctgttgctgagttgcttccggttcttgcttctcgaggttcagagtcagaattcttttctggagacagagctgtggatgcagatggtgagaatttcgctagcataaatgattatgtttgtctgtacgagaaaatatacttttaatatctttcttccatcgtggttttatgtgatctgttctactttcaactttctaatgctaaatagtaactcaggtggaggtgcatcacttgctancaagttgcggagcctatcatctgactgttttgcgcatcttctga

SEQ ID NO: 26148 - DNA, 372 bp, Glycine max
  unsure (1)..(372): unsure at all n locations
cagcttgagatgaggaagtgttgaagggtgttatactttctgcttttattgntgaccacagagtggtacctggagatatgtcgcgggggtcaggagaccttggggacgtcaggtggggtgctattgcccaaaaccaagcttgaccaatcccgacccaacccgggcatagtcggtcagtgagaacatgtgacgtacctaagcaggcgagctcctggcagtcaacagataaaaggaaaacaagaccacagagcaaggaggcttgtggtggctggccagctgtgaattttgtgtaatatgtggattgtggcctctggtaatcgattaccaagggtgggtaatcgattacaaggcttaaaattgaagacagggggc

SEQ ID NO: 26149 - DNA, 318 bp, Glycine max
tgtgctcgcgactggtccctttcttcctttcgcaacttgagttcactattgctaccccatagagctccgcgaaatttgttccggccatactcttccttgcgagccctcttggtctcttgttcaagggctcttgcggtaattgcattctcttcccgtaacccggcacactccttccgaacgtgtgtagcggccaacttgaacttctccttggcaagttttgcctttcctaactcgcttttgagagcttggacttcttcgtcctcttccggtgcttcaaaactctctttgctgacgacttttaacttggcgagccaatct

SEQ ID NO: 26150 - DNA, 430 bp, Glycine max
  unsure (1)..(430): unsure at all n locations
cgcnagcttaagtccccattactacacatccatttctagtcttgtgatagatgcgggattgcgcatgggctgggagaatgcactgttaatgatgagatacctacagccatgaatgagattaactttgtttggggaagcaactattcttataatcagtaccccaataatttcaatcaacgatagggcttcaagaagaatcacagaatgtttaggtcttaacctatgcaaaattagaggcctacaaaagaggagacaacccactcttcaagaaatcatgcttcaatatatgacccaaaatgatcaaagaatgaagtaggttgagtcctaattgaccaacatacaatctctcttgtcacaaagacaactaagaaaccttccttataagactgaaccaaatcctaagaggaagaatgccaaagctatgatgact

SEQ ID NO: 26151 - DNA, 377 bp, Glycine max
  unsure (1)..(377): unsure at all n locations
ttctttccacttgtagttcttgctgctaagccaagcctgtctccctccttcctaaggcgattctcctcttatcagcgtaacccaaaccaaaattttcgtgattctccatgaactcccctagacttgctatgcctttcccgttttggcccaaacccattccaggctcatactcgtgccccaacatcacctgggccaccatagtttctatctagtttctatccatctatttgaccgtcctactcagctgttcggtcaaacttctcttcgacctttgacaagccttcaatntatcctctaatatcatactttccacccttgactcatntcctttggcccttcgaagcttaagctcattgttgatgccccatagagccccc

SEQ ID NO: 26152 - DNA, 425 bp, Glycine max
ggctaacagacgccggaggtcttgacttctattcattgtcaatgtgaacctatccatccacatagtcgcttcttgatgcaacgcatcaatcaccctccctcttgcttctttttcggcatacacttgtgcaaaatcctccactagcttttgttcatgggccatggaatggttcaattcttccttgtattgccctatgatagctaacatgctttgctccatggcttccaagtgttgagccaaactccttttggacctcgcgcaagcaactaactcttcttttaagatcatgccatgtacccgtgaccgatctctctcctctcttcggagcttgagctcattgttgctaccccacaatgctcctcggaatttctctcggccatgttcctccttgcgaagccctttggtttcttgttcaagagctcttg

SEQ ID NO: 26153 - DNA, 288 bp, Glycine max
ctaaagatttgttggcttaagtatggttattctctgaaatgttattaataaatttcaatctggagctatacccaaggtgagttagatcataatttagtttaatttgcacttttataggctccgattttggttattttgttattgtatgttacaatgtattatctttcaaggttgtggagagtcctgtttgatttgcattgaaccttgatgggtcatgttagaattcagatgttggaggccaaataagaactcaaaattctagaattttgttgcttacttctcaacctt

SEQ ID NO: 26154 - DNA, 423 bp, Glycine max
  unsure (1)..(423): unsure at all n locations
agcttgactntctgaggatgacatacttatgtaagtttcttgttgtccctctccaccatgatagagtgtccaagcaaaaccatcaatttattattgacaaagttaatcaaaggttgagcaattggaaaacgtccaatttatccatagcatgtagagtaactttaacaaaagttgttattcaagccatgcatatctatgtgatacaaactactttattactgtcttcggtgtgtgaagaaattgaaaaaaatgttgtaattttgtttggggccacacaaatacctctagcaaaattcattggcgaaattgagattctctatgcattccaaaaagaaatggcgaccttggtctgaggaaaactagtgttatcaaccaagtttttttaatggaggtggggtggaaattatgtatgcgacctaatga

SEQ ID NO: 26155 - DNA, 467 bp, Glycine max
  unsure (1)..(467): unsure at all n locations
ctaagcttctctgttatagcattctaacacccagagtataaattattctctcatgatgctctgcaacttcaaatttcaacttcaaatttaaaccctacagtacagaaaacaatcttttattagatcttaagacaataaatttctccttttaaggcacaacatttgcacaaatgcataaacactaggttcccatttggagctatggtctctttntatcatgtcttcataatatctagagctgaacaccctttactcggtatctcacaaaattgtacacatgtatatatgctagtgcaagtgtgttcatactccatacttacattagtctgcagcaggttcctttgttcattgnttgtagataggaatacgatatccgatatcatccattatcattgaacagattttgcgtaagttttaaaattttaaattgaaaagtaaggggactttatcagaggctaaaattttaa

SEQ ID NO: 26156 - DNA, 421 bp, Glycine max
  unsure (1)..(421): unsure at all n locations
agctntntattttctgtagattaagatgattctgtggccacctcatggactcctctaagaacaatagcatcatttcttgcactgaattgttgggagttggaagccatcttctcaatcaaattcctagcctcagcatgagtcatatcaacaagggctccaccattggcagcatcaatcatactcctctccattttgctaagtccctcatagaaatattgaagaaggagttgctcagaaatctagtggtgagggaagcttgcacacaatttcttgaatctttcccaatactcatacaagctctctccactcagttgcctgatgcctaaaatgtcttttctgatggtagtggtcctagatgcagggaaaaatttctccaagaacacccttctaaggtcatcccagctgaaaatggacttgggag

SEQ ID NO: 26157 - DNA, 380 bp, Glycine max
  unsure (1)..(380): unsure at all n locations
tctaaacttacgagggatcgatgtttattactttangctatagcatagaacacaagaacatgattaattagagaaatatccttatatgcatcaacttgtttattagaaagacccaatgccttttacctattgctgtcaacttttacttacttgcatttattgtttttgccatagaaatagtttatttctgtttttaataatcaattaccaatgtttgttccaacaatgccttacttctgaataaatctctatctaataaataagttccctgtgttcgatactcggatcactccgttttaattntaaatacttgacgacccaatgcgctntccggtatctcatttcccttgaatatatttgtaaaaagtggagaaaaagga

SEQ ID NO: 26158 - DNA, 208 bp, Glycine max
atctcacttgagtgtgaaacggctcttttaattaaccccacctcgaactttacttagtgaagtacacacggagattgaccacccagagtttgcgtcccatactactatatatactaccacgtcacaacttgcacttaccacattgcgggtaacggcctgtcacatctaagatccgaaatgctaacactaagcctatggtgatcgacat

SEQ ID NO: 26159 - DNA, 434 bp, Glycine max
  unsure (1)..(434): unsure at all n locations
ttaagcgaccgcggctgcagctaatacgttaactatttttnngtcnttcttanaatcaaaacttacgctatttgaaaaaaaaaaaagatttcaggaaattattttttataaaaaaagtagctttttaataagtggtatattttaatattttttctcattttggactaatgaacataaaataatgaaatagaattttaatttaaaaggagcttttacttaacattttcaattaacttcgacttaaaaaaaacttcttattttaacctttaactttaaaatgaaattcaatccagaaacaattatactaaaatcttaaccttaatatttatctcatttagataaatatcaacgctcatactactactcattcggtaaaaatacaacgaccctattattactatgacaatagatcactaccaattttcattcatatt

SEQ ID NO: 26160 - DNA, 362 bp, Glycine max
  unsure (1)..(362): unsure at all n locations
ngacttcagtcctcttctgcaagcaagaccaccttccttttattctggcgaaagcgtccttagcaatgctctgaatctccccaaccttctgattaaacgcgtgctgcgtccaagtaagattctgatgagtgtaaggaaccaaaacaccctccatcagagggtgtcccgagtttcccaccacccacacgtccttcaaatttcccatagtggctctctgatacaacgcgcttttctccaacacttgatcgtctgagagagacccaggccaacctatacaaacatcgctaaaaatacctttgggatcaaccacgccctggacggttatagagtaacatgtcttctggtttctttctgtgtggcgc

SEQ ID NO: 26161 - DNA, 419 bp, Glycine max
agcttgcaacatcggagaacatgttaaattgtctgtgcagagacagagagggaaagatgtgaaaatacagttacctaggggaattttgcggtcttctccgagtcaactacactagtttggcactaggtttgatgacatgtcaacgagttacttacagaaatgatccaacaattgaatcagctcggctaagggtctggtttccgattcgaccagtcgggccgagccgagtttaataacactgattgggaggggtccttacttagtattgaaaatcttgctttcaatttgatagtatgtagtaaagttcttcttcatggagtatgtctcattaagattctcccgcatttcacaaattgaggtagaaaacatacaattatagcttattttttgaataagagtgccataaccaggtttatgat

SEQ ID NO: 26162 - DNA, 439 bp, Glycine max
  unsure (1)..(439): unsure at all n locations
tataagaaacaaaatgcctcaatcatttccaaatatgcatgttatttangaagcatcaacaagaatcaagccaaggctattgtgcaagcaatcaatgggggcaaaacacaccaaatgattatgatgatggatggctcaaattctcacaaaggtaaactcatcactttcaaattgagctttcaaaactatcatgacatgtagaggagaatcaaagatttcaagtcacaaaatgtcaagaacttttattttcaaaacaattacccatttcttgaacatatcctataattcaaagaanaacatgcaaagtcgtacatgcacacagaattgaccaaccatgaagtccttcttaactatcatgctatcatggatcttcttggtcttttctttgtagaacttggcattctcgtangcttctaggcggatttcatctaactcactc

SEQ ID NO: 26163 - DNA, 412 bp, Glycine max
  unsure (1)..(412): unsure at all n locations
agcttgcatttggaatgggattgtcccttcttatattaggattagtacctgacatctcaaacaaacaaatcaaacgtaacaagacaattatagttgctgtttgaatacctcacccactcaagtgtatcacacaattatggcttttctctaatgaaacactcttgccttttaccactctaattccccttgagttcttaggcaattcaagagattatggccacaacaaagaacaattcaccaatatgtgtaaggtaaggctagacaaggaaaaggttaaccaagaaaaaggctaacaatgttnttaggcacaaatgaaggaaataaaattcagaatttaggaattcaagtaacaatccttcatgcaaccaatatattaccttaaagagttttttttttaagttcttcaagcatg

SEQ ID NO: 26164 - DNA, 313 bp, Glycine max
  unsure (1)..(313): unsure at all n locations
gagtcccgtaatatatcgagacgctcgtaattgataacagaaactctgagcatattcgaacgacaataactcttgactcaaatgtccgcttgtgtcccttagtatatcgagacgctcgtaatagaaaagggaagctctaagaataatcaaacgacaataacttntaactcggatgttggatagagccccgtaaaatatcgagacgctcgaaattgaaaacagaagctctgagcaaattcaaacgacaataacttttgactcggatgtccgattgagtcccataatatatcgagacgctcgaaaatgaaaatag

SEQ ID NO: 26165 - DNA, 407 bp, Glycine max
  unsure (1)..(407): unsure at all n locations
agcttagacagtgttagcttcttatatattntgcatcatttcatttattttatccttttttcttttgtaatacatagaaatagaaatgtgtatgacatttgctcatgaatgtaagatacccaattctctcactctctctttgtgttttccttatttttatcaagtttgtgtttctacaaccgatgttttgtgtccaacattcattttttttctaattcattttttcttatatgtaacatgatgtgggtcagtgggtgtaatgtgacactatttgtttgtgtacttaggagtagcaaataggatattaggaaaactagttttggttttaagttttttttctcttgtattctttttttaatatttgtttcattttgtgttttgatatgttcatgacatgttgcttattc

SEQ ID NO: 26166 - DNA, 250 bp, Glycine max
  unsure (1)..(250): unsure at all n locations
gagtcacaagagacatgttagtgagatctcttgtttctgcaattccagntacttttggtcgtcattccctactttaacatcttagcactttgttaatgagatcctcgttaggaaatatctttcctaatgatgcaagttgattaactatatgtgtaaatcacttttgcatatcttgtatgatctcattttgattcattctaaaaggtcatattcatgtgtgagggtggttattctagatctctttacatca

SEQ ID NO: 26167 - DNA, 413 bp, Glycine max
agcttttcgagaaaatgaaataattatgtatgtgatctagagcaacttacttatttgaagttggtgatcaaagagacattcagggtacacccacctactcctttattgctccctagagaatgctctcaaccaaccatcattgatggctatgaaatacctgccaaaactaaagtcatggtaaatgcatacgcaatttgtaaggattcccaatattggattgatgctgataggtttgtccctgaaaggttcgagggtagttctatcgatttcaaagggaataactttaactatctcccttttgggggaggacgaagaatatgcccaggcatgacattgggtttagctagcattatgcttccactagctctactactgtatcacttcaactgggaactcccaaacaagatgaaacc

SEQ ID NO: 26168 - DNA, 441 bp, Glycine max
  unsure (1)..(441): unsure at all n locations
cttgatgttgttagtcgntcattggatgtcgagagtgtcatcttgttggattctgagaagaagatcaataaaatcttggtcctctaattcagctccatcttcttttgcaattntgttcttttcttgatgctctctgatgatgttttccaggaccttgtcaacctgcttgtgcaacttcttcaatctggtcatctttccagttaggaaatataagaatggaattgaaggaaagacatcagcaaggtcgaatcctcccccggattctacgattnttcggatcaaagacacaacaaactcatcttgctccttgtatatgccaccgaatgctaccctggaaatagaggcacatatcaatgagaaaattctactggtgagattgataggcgaaccagcagattcgcgaatggagttgatanactntgctgcctcgtcttctctaat

SEQ ID NO: 26169 - DNA, 400 bp, Glycine max
ttattgctctgatattctacgctcgcagacgaggagcctacactctacctactgagaccatcaagaacaagaaaggatggacttaggctcacatagaattcgtagacgaagccgacttgatagctataaaggatacatccactcagttatatgatatactgatcctgatggccaacgaaagtggtagatgaagctaaacatgacatgtcaaacgtcaacaatactgacgacgatgatgaaaggctcgacaacgatgagttgagatacaatgctgctgagtgggggaacagactactggtggagagagcggggagagttagctcataggtgatacatagactgatatgaaagagagcatgaagaagcgagatgttccggctaataactccagggacttgag

SEQ ID NO: 26170 - DNA, 423 bp, Glycine max
  unsure (1)..(423): unsure at all n locations
agctntntctttcttcttctctctgggtttctcacttatactctntnctttcccttctttatttttttttcaactttttctttttcttcattttctttttatttttctacctctttttcttttcttggtcgtttatttctttctcctcaaccattattggtttttcactctcatgatttgtcacattagttacctcctctttctttttctcagtgccaccctatcctcatcctcaactaccaaatgcttcttgtttcttgtcatcacaacattacattcctctttgggattcttttatttgtttgccccaaagctattggatgacttttcagctaattctttggctagttggcccacctggatctcaaggttcttcaatgctgactcagtgcttttttgatttgacatggtcacctgcatgaa

SEQ ID NO: 26171 - DNA, 308 bp, Glycine max
  unsure (1)..(308): unsure at all n locations
ttcagttaagaaagagaaatctcaaagagaaacgtccgattgatttttttggtttattttactaaaagatattttttgattattatattattattttacctctttttggtttccaacgtggttacggcatgaccaaacgatcggatttcattttaacagaaattaacggatattagaaatcaaatgatcggtggaaatttattttattttttgattangtgagaaaatgacttaagtaaatgactaaagcacgtcaaaagcgggtatggaaagtaaatgaaacgagaataatagtacgcgaaacaaat

SEQ ID NO: 26172 - DNA, 427 bp, Glycine max
  unsure (1)..(427): unsure at all n locations
agcttattatccaaggcacattctaggtgttgaagcttcttcttccatggctnattccctagtggatggtgcctcccctctcctgttctcctttgccttccgctgcatctccatggtggaaaatcaccattgaaggacctcattgaagctcaaagatccagcctccatagaagctccacaagcaagcttccatcaagtggtaatcagagcacaagagcttcaagtaggtgctccttaaacctccattaattttttactttaccttctcttccattgatgattcttcatttttctccatgtatctcctcacatgtcttgtgctaaatgtttttaacatgattttttagagtttccaccgattaaacttgctatagaagccagatttgattctctatggatcaaagttcttgttcttgttcttgaacca

SEQ ID NO: 26173 - DNA, 303 bp, Glycine max
ctcagctgaacccattacgtaatctctcgggtgttgagggtactttttatggatttttcacgtatttcgtgaaagactactcttgctaacgaaatattatcgtgtagagcaccctgttgttgtaacatctcaatgatgtgccaagcaatagcttcttcctcacgatctggatccgatgcacgaataaggtgttctgctctgtcaaataacataaaatgaattaagcaggatacatgctgtcgaccacctatgatgcacgtatactttcaaaatggcagcatatacatactggacctgtgctac

SEQ ID NO: 26174 - DNA, 424 bp, Glycine max
  unsure (1)..(424): unsure at all n locations
agcttccagattggtataccatgccactgttgctcctgctaagctgnctngaaagaaatgcatcaacaacttttcgtccgtagaatatgcccccatctttcggcaatacatccgaagatgtccttttggacatgtcgtccctttgtatttatcaaaatctggtactttgaacttgggagggatgacgatgtcaggtaccaaacacagatccgccaaatctgagaacgggtagttgccgaggccttctagcgccctcagcctctcttcaagtaaatcaatctttcccttatcttttgcaaagggaacggattctttaacgggtgcgggtggagacgggacatggcggactatgtttggttggggcaattcatgggggggcggatccttgaggggcagtagagggcctagacgggcatcttcttca

SEQ ID NO: 26175 - DNA, 444 bp, Glycine max
  unsure (1)..(444): unsure at all n locations
ctaagctatgaagaatgaatcaactatttctaattaattttatatttaattattatccatactttatttatttatttattttatcaagaaacatttaatgtgaatttaattaattaaaacacatcacttaataaatcattaaaatttatacattaattatatttttgtattaaattaaataatataataatgaaggaaaaatccctcgagaaaaacataatttataaaaatgaaccactcctctcacattatagttctaccaacacatgtatggngcgtgtacaaatattgattttatcaggcgtatgagaatggctctatagtacncctttgagatcctatccattgttatccatattgatgatccatttttgtgctcaagagctactcatattctttatactagtaataaggataattttaatttgaataaaatactcatac

SEQ ID NO: 26176 - DNA, 420 bp, Glycine max
  unsure (1)..(420): unsure at all n locations
agcnnnangnnatcttctggctttaattcttgacaacgacaacaacgtgaattatataatttgagggggaacaacaagaagatccttcagtcaaatatggtctagatccacaagcatgggaggaatttgtggcaacccgcataacgcctaactagcaggttagatgttaatatttnttaatttttatactcttgtaattataaaggcaattaaattttattcatgcgacaagtatatggaactccacagggaatcagaaagaagatgcatgaaatccaaaaatccaatgagtgtccgcatttactttcccgtggcagatatgatttgttagaaacgcactaagccatatgggcagatgacatctcaggcggcacaagacatacctgatacaattgttagttgctagttaaattgtaatta

SEQ ID NO: 26177 - DNA, 402 bp, Glycine max
  unsure (1)..(402): unsure at all n locations
agctcgacacagnncnnaccttataccaattgtaaatngcaagcactacaaaaaaaagcagaatgacttgccatgcaacttgggacattagcacaatgatagtcattaactagataagtgcaaacactagtccagctaatttgtatggtatgtctgtgtctacagtactttgatccgtttatggctataatcatcaacaaaagaatggttgaaatcttattaaagctgataataatcaaaagatagcagtaatctatcaaataaagaaataacagtgaaactgaccctactcgtaatttggcttgaaggtgtggtgtcaaaaaatgaaacatgtgcccttaanacaatccttcctagtatgaagatggtgccaccaaaagatagaagagcaaatgttcccat

SEQ ID NO: 26178 - DNA, 291 bp, Glycine max
  unsure (1)..(291): unsure at all n locations
tactagnggagcattagaactaacgaattccgtaataacttccttagaaaggactttctcccgaacaaaatgacaatcaatctcaatatgtttagttctctcatggaatactagattaaaagctatatgtagggttgcctgattatcacaacatagcttcgcttgttgagtatttccaaacttcaattcttaaagaaagtgtttaatccanatgagctcacaaggggctacaaccatagctctatattcagcctctgcactagacgttgcaacaacattttgcttcttact

SEQ ID NO: 26179 - DNA, 415 bp, Glycine max
  unsure (1)..(415): unsure at all n locations
agctntaataaaatggagnatgtttgnatattaatatttatatnnagaggagaagttttgtcattcgtatcaatttaattaatttgagtagaattgtcttttatggaaaatacaggtgatttggtataaaaaaatataattgactctaaatatattatttttagaaaattaatataattactatatatattttataaatattctttaagactctcattcctaaaaacctaatttagttttcaacaaaaaaaataataatttagtgagaataaaaaaaatcctaatattaagtgtcaccttaaataaaaataccatttaacctttttatttaattttaaatgattttaaaaaatcatgagaagatttaatattattntattggtantaatattttttcctctagaatttttcaaat

SEQ ID NO: 26180 - DNA, 387 bp, Glycine max
  unsure (1)..(387): unsure at all n locations
tgtgggttggaagtccaagtagttatcgcttacattcntattttgattgcaaagnctgntattgaggctttgcctatctactctatggtgacaaataaaattccatggggaattatcaacaatattaagaaggatgagagatcttttatttgggaagatcaagtgggaagaaagaaaatgcatgctataggttggaacttgatggctcggcctaaagcttatggaggggtggctatgtgaaatctcaagcataagaattctgctagtttgatgaagttagggtggtttctcagaaatgatgtgaacaacttatggtgtcaggttcctaaagggaaatatgcgagacaagatttctctgcaacatgtttggtagccaagccacatgat

SEQ ID NO: 26181 - DNA, 190 bp, Glycine max
  unsure (1)..(190): unsure at all n locations
caagaaaaacgggcaacaaaaagaaagaancacgaccgaacagacaccaggcgaggggcnagacgaccaacacaaacaacaaaggcaaggagcnaaagacaccagcgggccaaagcaagagaagaaacangaagacgcaaagaaacaaaccaccaacaaaaacnanaccggcggagcagcncgaaaaaag

SEQ ID NO: 26182 - DNA, 420 bp, Glycine max
  unsure (1)..(420): unsure at all n locations
agcttaataaanaanaaccaatantaaattanctttaaactncnncatttcgtaaaaaaccaacagatcatttcaaggtccaacgccttaacgattctcttcgcttttcaaacttgagaagatcatttcaaggtccaacgccttaatggtcctctccttttttcaaaagtttaaaacatcgtttcaaggtccaacaccttaaacgagtttgttcgtaattaaaataaacctttcaaaaacataaatataatttaacacacaaactttcaaaattaaagaactacataggtctgatttcctcatcgcacttgaggacacgtaggagcgagggcaacacccttgtcgacccaaaaaggggaaaatacataattttgaagtcatgttttgcacactcgattagaggctaccgtcccttgtgac

SEQ ID NO: 26183 - DNA, 512 bp, Glycine max
cgttgttggtcactgtctacggacacttaaaactcagcttgaaggcgtgcccccatttctagaaattttgtttgtgcacataatggatcgttttttggattgaggaggcactttgagctctcaagttcttcaactttgggcgtattctttgaaagatttggccccctctttgcacatggtctgtagttgcattctatccgaagacattatactgacactggcttacgaaagaaaccactaagggctttcaagaatggactcgggaaggttccaagttagtgtaccaggtgacagctaccccagtaagactttcttggaagaaatgtattagcaggtcctcatctctgtgtatgcccttatcttccgatatacatctttggatgggtcttggggcaagtagtccccttgtacttggcacagaccagcacccttgaacttgggatgggtgatgatattgggtctatgaacaactcttctatgttagaaagggatgatctttacctcttcaatgg

SEQ ID NO: 26184 - DNA, 437 bp, Glycine max
  unsure (1)..(437): unsure at all n locations
agcatgtncgctncnnaaggagtttatcaatttatctgtttacgccccgnaggaagtcaatattagattatctccgttcaatttagatcctcgcggatatattgtttaagctaacgttggaacttgaagcattgcgcttaggggttatgggaacctctatgtagcgtgaatgatcactcgtgtgtccacgcttgcaggggcttgcgaaattccagagggcacacagcgtagccagagcatatgagacagtaatgacgtgtttcagataatgctcaagggtatgaaccttggataatgcaggtcacatctgatgacaaactttaaatgatgccaatagatgcttgccgttattcagtttaataaagaatatatatcaacttgatggtctgaaacgtgcaatatctgcttccggtttcaacaaacgcatcatttcataa

SEQ ID NO: 26185 - DNA, 401 bp, Glycine max
  unsure (1)..(401): unsure at all n locations
agctncncncaaattttaaatttttattatataagancncgaggagcttctctaaaaacttattctaacttgtgcacacgttaattttaacttacagacgaaactcaatccattttacctacttattttcttctcttagaagatcttgttgagaagttttcccaaataggacatgattttactatgcctagggtgacgttgataggtagttgttagcaagtccaaaaatgaaggtctagcaaaggaaggttntggtaaggatttgctcattcttctagtttgaatgactaatgttagaaactccacattagaacctgctgccattgctaggagcccagatgctcccgtccaccttgttggcttgctgctgcaccacaactactgactaaatggttacatgt

SEQ ID NO: 26186 - DNA, 197 bp, Glycine max
  unsure (1)..(197): unsure at all n locations
tttaaacctttcttattaattgtgttgttttattgaggaggtagaaccccaacaatgtattttatgatagataaatatttttcctatctaattgacatcatttatcaaaatatccttctttttttattacttatataccttgcnctactactaaattaaaaaaatgagaaaatcatatgtaattttttaaaagaata

SEQ ID NO: 26187 - DNA, 390 bp, Glycine max
  unsure (1)..(390): unsure at all n locations
agctnggcanncatttattatctttttattatgancnngcgctagcatcatctttcacatgaacttaatgatttcgaaacaatctatctcgtaccacggttaaaagtatatttttctaacaattttatctcaacatcttattattatcttttgttgtatactttaatgaaatattactactatgacttttttttttgcacgtttaaatttatataacttctattatttatggcacccgagcattcatgcatagtgttacttactaatttgtgtaaaaaagtcttagagggttccttagactatcaattatagaaaactaacacgatcttgaaacatatgattctcacaatgatcagatagcaatagataatgatgtgctcctttctccat

SEQ ID NO: 26188 - DNA, 361 bp, Glycine max
  unsure (1)..(361): unsure at all n locations
gctattatgaagctgatactctgggctgatatttttcattttttacatnnggacttgataatatagttatcaaatcacctaagataggatcatcttatcactgcttatctatatatgttaaatntcccttgattctaagagttagtttttcacaattggtgtcacttgtttatgcatacatgtaaacattcaagagatatgcacactcagattattcccatcgtcctactagtcctcctccgtctccgaatgtgacaacactccttgcccccacgacagaccctactccgccatcttcaccacgggtaattaattaacatttgactacataatcatctcttatcagaattagagtctcata

SEQ ID NO: 26189 - DNA, 424 bp, Glycine max
  unsure (1)..(424): unsure at all n locations
agctnttgagggtgcgtagcccaccatcttttatattatagtatcgataangngtctaccatcacgattatcgtctccctttttgcacatgttctgtagttgcatcctatccagaaccatatcaaaattgtactgatactgcctaacaaaggctaccattaggtccttccaagaatggactcgggaaggttccaagttagtgtaccaggtgacagctaccccagtaagactttgttggaaggaatgtatcagcaattcctcatcttttgcgtattcccccatcttctgacaatacatctttagatggttcttgggacaagtagtccccttgtacttgtcaaagtccagcactttgaatttgggaggggtgatgatattgggtactaagaacaactcttctatgttagcaaaggaataatcttca

SEQ ID NO: 26190 - DNA, 294 bp, Glycine max
taagctgggatttcagcctgacgagggatcgagggtttagtaatttatgctatctcttataacacaagaacacgagtgattagagaaatatatttctatgcattagcttgtttgttagaaagacccaacatatctacctactgttgtcattttatttaccttgcatttgatagtttttagcatataagtttagtttaaattttgtttgaatgtatcacttatacatgttctctcaacaatgcttcgattatgaacttaattcaggctcacattagctccctgtgtctgatactc

SEQ ID NO: 26191 - DNA, 414 bp, Glycine max
ctgcagctttctttttggcacatctattctttttttgtgtagaatgaagcttgacaggttcaggtgcaggtgatactactggtggaggcacttgaatttggttgtcagacctcaaggtgatggcactcacattttttggattctgcacagtttgtgaaggcaatttgtcagaattttgggactgagcttggttcatctgagtagccactgccctatctgatttgtcatactttgaatggaggctcttgtctcttgctgaaattgcatatcctggatgatcatttgcctcactaactcttctaaggaaggttgaggaggagcctcaactgcttgttgtctttgttgtgactactgctgttgttgctgctgtattggaggaggaacatatggcttgcttggaccaacaacattctg

SEQ ID NO: 26192 - DNA, 404 bp, Glycine max
  unsure (1)..(404): unsure at all n locations
gaagctntagtcaaggaaaggaacccaaaaatgaccaataatagggtgttgaaagagcataacaagactttccttaattgatttaaagacataatttttggtgaccataatgaatttgaaacgttaaggaagttagcagatgggcctaaaagaagtgttataacttggtaaggatacgatatcaacaagtattcgttctacacgaaatcaaaagacaacaagagtataatgcaaaacaatggtgtaagtctaagtgctgaatctcaacactttgctactatacatgatgacaatcctcatgtagcttcaatgccttactttggagtcatttaagaaatctgggagggtaattttatgtaaatcaatgtctgtggtttcaaatgtaagttagtagatagcaatat

SEQ ID NO: 26193 - DNA, 431 bp, Glycine max
agcttatgctgcaaacatttataatagacttctcttattatcataaccaacaacagcaaaataattatgacctttcaagcaatagatacaatccaggtttgaggaatcatccaaatctgagatggacaagtcctctataacaacaacagcatgtccctccttttcaaaatgttgttggtccaaacaagccatatgttcctcctccaatacagcagcagcaacagcaacagtcacaacaaagacaacaagcaactgaggctcctcctcaaccttccttagaagagttagtgaggcaaatgaccatccagaatatgcaatttcagcaagagacaagagcctccattaagagtctgacaaatcagatggggcagatggctactcagatgaaccaagctcagtcccaaaattctgacaaatttccttcacaaact

SEQ ID NO: 26194 - DNA, 331 bp, Glycine max
cgctcgtcacaaccttgcatctcgacgaagtggcacgcatgaggaactgacagaaactgtgcaggttctctaataagacatttcggggaccagaaaagctctacggatcttctattgacaggattcgccccacgattcgtgctcttcacaaagcttttttttaacaaagacgactgttaagagagataagatgatgtcacatgaccgtctatacttcttatttttgatctggagacacaatctatccaatgtctattcaactatactcgccacttatgacacccgcaccatacatgtcgaacatgcaatttctcatcgtgagggcaagtca

SEQ ID NO: 26195 - DNA, 427 bp, Glycine max
agcttttcctttggttgctctgtaggtttctcaagtattatagagaaggagaagacattggattatcaattttactatctttgtgcaaaaatgagtttctaaggtggtgtcaaaacttcaggacgatccaatgggttttattaagacaggtttgagtgcatgcttaaaaaataaagggttttggaagaggaagaagggataacgaatttgggaagaagaaaaagcgtagagatatatcgtaattgtaaaaactgacctattatatctatatttatagttagactactccgagcctattttttattctatttttctttattttatgattttatggaaaaaaactctattttactctttgattaaataaataatgaactaaaacattcatttattttttaaaacatcattttactctatttattttcta

SEQ ID NO: 26196 - DNA, 367 bp, Glycine max
tgtctctcaatcaagttcctgtgaaaagaaagtttcttattggtgtgataaaaatactaagattatgttgaaagtgtgcatagaagaggtgaatgttggaaataaacctcacaaccacttcactaagcttggttgggcaaatattgcagaaaagttcaataagacaacaaatttgagatatgaatataagcaattcagaaataggttggattctttgaaaaaggaatggcaattatgggccaagcttattgggaaggacacaggtcttggctgggatggggagaagaaaaccattgcagctagtgatgaatggtgggaagccaaaattcaggtatgtgttattcaactgaaaccattgcagccttct

SEQ ID NO: 26197 - DNA, 464 bp, Glycine max
  unsure (1)..(464): unsure at all n locations
atccttaagtcacctgcggcatgcaagcttataacgagtactacactaaaatgtttattctatatggatttaggcggcttgaaattcaaacccaagcttaaaaagattttgacccaaaaagagagggttttgcttgctcatcccttttggttgctagactgtgaggtagcctcttggatgtgatcctatgcttcaacagcaagcaagcaacactccaatgaaccaatcatgtcttaaactacagaaagagaaagaggaaacttgcatgcaaatggggtgacgtangagaggcaagtttagcttgctcgaacaattgggaatctagaagggggttgattacatttttttgaaatagttatcaattcattctttaatctgattaaaatgactcctttcaattaatcaaagttttctcaaaagatcatatcanaagatcaacacaattaggaaaaatttcaatgatt

SEQ ID NO: 26198 - DNA, 424 bp, Glycine max
  unsure (1)..(424): unsure at all n locations
tcctcaagtccctccaccagtaggaaaatccctntttgtctcgttcttctggaactctgtccaacctccatatttggagttaatgattctagcccataaatgctgctgaccagaagctaaggcccatatccatttgcccaacaaagctacattgaatttagatatttatttaatccccagacccccttcagccttaggaaggcaaataaccttccattttacccacggaattttcttgtaatccttttctcccccctataaaaaattcctttgcaatgctaccaatctatgagctaccttttgaggaatcttgaagaaagataagaggtaaattggtaaagcattgaggacagaatttatcagagagacctttcctgccatggatatatntttttgtgcccacttggataatttagattcacat

SEQ ID NO: 26199 - DNA, 412 bp, Glycine max
  unsure (1)..(412): unsure at all n locations
agcttcggaagaaagngangtgtttcatgtcttaaaggcagagctngaaagagcccgagtagtctaagagaagttcaagtctatagccatcaaagtctgaaaagagtatgatgaactaagggacgtcaatatggccaccgctgaagccttggaacgagaaaccaagaaggcccgaaaggaagaacacgtgccagcaaagttttgaggggctttatagggcagcaatagtaagctcaagctccgaagaggtgaaaggaatcatcacgggtcaaaggcatgatcttgaaggacgagctaaaggcttaccttaggtcgaaaagaaatttgtcccaacagttaagcgagactgaagggaatatgtgggccatcatcgatgagtgcaaagagaagctaaatctagcggcgactcatg

SEQ ID NO: 26200 - DNA, 340 bp, Glycine max
gatgaatgagagtcttgtgagacacaactcaaagttcaacttctctccctttttttcttccttcaatttcgtgctcccccctctctctttctctgcctctttcttttcctccattgaagcatacttccaagcttcttatccaaggatcatcttggtggtgaagctacttcttccatggcttattccctagtggatggcgcctcctctcccctcttctcctttgtcttccgctgcatctccatggtggaaaaccaccattaaaggacctcattgaagctcaaagatccagcctgcatagaagctccacaagcaagcttccatcaagtggtaatcagagcac

SEQ ID NO: 26201 - DNA, 420 bp, Glycine max
  unsure (1)..(420): unsure at all n locations
agcttggttaaaagnggcttgtgttcagataatagctagtaggatgngtgggctaatgatgtctacttgttagttgttatatttaaacactagttgcaacagtttagaagtttgcaaaatcttagtatgaaaatttgaaatacatcataccgattttactcctctctttatacgtttatacttcgctcgttctatttcacagcattttctgattgagtccaatacctctttttatgttctgttctgtttttccaacaattaagatccaaaattgctttgtctctattgtagagtgttattttcagattgacattcacaaaaacatcgtggatccagtggtagtagaaatgacaaggcttggaactggctgccaaaaacaacttttcatgatgagtatataagagatgatgacttagaatg

SEQ ID NO: 26202 - DNA, 410 bp, Glycine max
  unsure (1)..(410): unsure at all n locations
agctttctctcatcattgctcattctntttgttatttcaacttgcacacgaaccaattgatcacccctcatattgtctttattcaggaagggaacacctttcttagccataacaagtgttgtgttcggttgtgtcccagcaggaattttcaaatcgaccgttccatctacagtaggaaccttaattgtagtccccaggattgcatcaatatacgaaaccttgcaggtgtataaaatgttggtgtcatcacgtttaaggatgggatctgggataacctcaataactacaaagaggtcaccaggggaaccacctttccttccagcattcccctcattccggacccttagacgactaccagagtccacaccagctggaaccttcagacttatccgttttgatttccttacccg

SEQ ID NO: 26203 - DNA, 445 bp, Glycine max
  unsure (1)..(445): unsure at all n locations
tataaaactcaagctgaactgagtcttagttatatatcaacacagagtgtggattcacataatgaaaactagcattgctaagcaatcaaacaagagtataccctgatcattnttttaactaaagaaacttgaggaagcaaagtaattttatgtgttcagtgcacttgagaaagtcaagctacatcaagctagatttttttattgtaaattaatttgacgtcataaactcgtatgtatacaaaatgaagaattaaaaatgttggtgtttctcttagatttattgatagtatcaagtcgttagtttgtcaatgtaaatattacattatcaattaatattattgtttgacaataaaaattaaaattgttaataaaagtaaaaaaatacatatataaactaaattatttagcaactaaaagtgaaattagtccacacacagacccttct

SEQ ID NO: 26204 - DNA, 414 bp, Glycine max
agcttaagataaggaagtgtttttggtgttatcttcctgcttttattcgttgaccacagagtggtacctggagatatgtcgcgggggtcaggagaccttggggacgtcaggtggggtgctattgcccaaaaccaagcttgaccaatcctgacccaacccgggcatagtcggtcagtgagaacctgttatgtacctaagcaggcgagctcctggcagtcaacagataaaatgaacaaagaccacaaagcaaggaggcttgtggtggctgaccagctgtgaattttgtgtgatatatgggttgtggcctctggtaatcgattaccaagggtgggtaatcgattacaaggcttaaaaatgaagacaggaggctaagatggtctctagtaatcgattaccacagggtgtaatcgatta

SEQ ID NO: 26205 - DNA, 274 bp, Glycine max
  unsure (1)..(274): unsure at all n locations
tgtgtctgaagcttataggtgttggagcacttattgtatgtctttcttcactgcccanaaccactctgtttggcttttgtgtataacaatttatcaaaaagccactcccttttaattagagcaagattgtcactaataatgtgtgtcttctgatggtgtttgaaagctcctatatcttacgcgtaatctatccttcatacgagtcgatagatcctaagaaaatacctctgctaaatgatctcacacactgagagatatatgaagtttctcatgc

SEQ ID NO: 26206 - DNA, 401 bp, Glycine max
  unsure (1)..(401): unsure at all n locations
agcttccatcagacatgacccgtgtcattatgtatgactggnggngtgtaattaggtggcaatccataagggtaagccactcgcttaaatcccagatgggggttgctgatgtgccccagtgtgcttctttcttgtcctaccacgtttgggatagggtggtgtgcaatacctgtgagagttgggtctgcttcggcaacagaactaacagcggtagcgatagtcacgtttttctcctttagttgcctcattcctagcatggcatccatcatggtagccatttgctctttcaaagccaacatgtcggctctcatctgttcctgtacctcttcatggtcacccatcgtcctagaatttgatttggtgcgatagagatgccttnngggcgcgttagttatggcgtc

SEQ ID NO: 26207 - DNA, 352 bp, Glycine max
  unsure (1)..(352): unsure at all n locations
aatgaacgaagaacggcgaagaacatccacggaatcgatcacggaaacgtctcggaagcattacgaaagcacctcagcttggatttttctcctttntcttcttctcctcactaatttcaagtgaaaactcagtgtaaaaattgctagcccccttcccctatttataggagaaaaggggaggtgggtgctgcccagttgcttcctgatgaagatttctgagtgcacctccaattgataagtttaccctctccaaggcttcctgatgcagattcatgagcgcacccccctcaggttgcttagtgatgaaatttttttagtgcacccnctaattngatgagtgcaaccccctttt

SEQ ID NO: 26208 - DNA, 397 bp, Glycine max
  unsure (1)..(397): unsure at all n locations
agcttgagccaatttttgacttaccatttacctngacccagggtgagaatgtcaattcttaccctcggaagcaaaaaaaaaggggagagggaaaatttccaatcaaagaggaagcaaaaaaggagagaaggaaaatttccaatcaaaggaaaaaaagagaggaaagggaattcccaatcaaagagtgggagaaagcaaaaagaaaagaaagaaaattcccaatcaaagaatgggagaaagaaaaaagagaagaagaaagggaagaaagttcccgatcaaaaaaaaataatatgcagaaaggtctttggaccggacaatatctgaacaatacagaattgtcaccaaatgaataaaaagaaggaaagggaaccatgacctaaaatggtcttcccccttt

SEQ ID NO: 26209 - DNA, 440 bp, Glycine max
  unsure (1)..(440): unsure at all n locations
tcttggcaatcctcattccagcgatcagtntggtttttgcttaagagcttgaacagcggctcacaaatggcgatgagctgcgagatgaatctggcaatataattcaagcgtcccacgaaacctcggacttgcctctctgtacggagttctggcatctcaaggatagccttcacctttntggggtctacctctatccctttctggcttacaatgaaaccaagtaatttccctgatttgaccccaaaggtacacttagcggngttcaaccttaattgatatttcttaagcctttcgaacaacttccgcaggttgacaaggtgttcttcctcggatttagatntagcaattatgtcgtccacgtagacctcgatctcttgatgcatcatatcatggaaaaaagctaccatggcccgttgataagttgccccgacattcttgag

SEQ ID NO: 26210 - DNA, 318 bp, Glycine max
agcttgcattgtgttggagtatacatccttctttaatgttttgacgaagagaaatattgtcaaatagaaacaaacttatacaaataatcagttcccagatttctaaagattgtagaaaaaagtattaaaaataaaaaaaataaaacaaaaaacattgtttagatttttttaacgtgtacattattttatatatcatttgtgtaaaaaatttatatttgtattatttgggtaattttttttgtattaaataggcactattagaaaatatgcttttcacatcggttatttatgactttctacattcggttttaaaccgat

SEQ ID NO: 26211 - DNA, 459 bp, Glycine max
  unsure (1)..(459): unsure at all n locations
ctaagcttggctggggtggataattctctttagtcctcaggtttttaatgttatcaatgnggctccttaggatttaagaaatgtttggatgaatactttattctattgtggcccaaatggagtttcgtgtctcccatattttccgagatagtaatgtatgcgctaatcattnggctaactatggtgtagaattactctattatgtgggaagaataaacttgaatttggatgaggtgtacaaggggagatacttggtgttgcaagggtagaaaaataaaggtaacctttgctatttggatggacaagccttgaagagaaaccatgattgcaaagtgaagaagaaaatgaagtttctaatatcgtagaagtgttgggagatactttcgttggaggaagagtttgtcactttaagccaaaagatatgtgcattaatcatagtgggaangaattttatcacta

SEQ ID NO: 26212 - DNA, 422 bp, Glycine max
  unsure (1)..(422): unsure at all n locations
agcttccatcaagtggtaatcagagcactttatcttttttatgtgctccttaaacctccattaatttttttgctttaccttctcttccattgttgtttcttcatttttctccatgtatctcctcacatgtcttgtgctaaatgtttttaacatgattctttagagtttccaccgattaaacttgctatagaagctagatttgattttctatggttcaaatttcttgttcttgttcttgaaccatgaattgtgttgagtttaggtttctttcagttttgtcttgttattttttgtggctgaaacctaaaccataaaattcttacaaaaatattaaagtagaagaaaaactcaaaaatctagagtgacttgttcacctattgtagttttgtcatagaagtcatgtctagtcatganacttgtca

SEQ ID NO: 26213 - DNA, 373 bp, Glycine max
  unsure (1)..(373): unsure at all n locations
aaccccgaatggggttatgctaagacaacggcggcataactagcctgataaatgccaaaggaaatcgtgggaagtatggtttatgctataagcccactcaggcagatgtaaagagaagcatcgcgggaaggaagagtgggggtcaaggctcgtggttgagacaagaaagtgaaggaagcccgccctgccacataagtagaagctttataagcgcgggtctgggagacgaaggtcaagtggtcgcgatatacgaggatgatgttccgagtacattggatttggtacgaccatgccctcctgatttccagctgggaaattgngagtggaggaacgctccgacatttacgcagcgagcataatgtaaacctttacg

SEQ ID NO: 26214 - DNA, 431 bp, Glycine max
  unsure (1)..(431): unsure at all n locations
agcttgtaggattatggggtactcatcatttgtggttctatgtggcgatcgggcgatggtgcaagtcgactctccacatccacaaatcacacataaatccaccatccccagttgcccaccttcaactgagctcacgtacttccacgtagcccttatcctcgttcttctcaacaccgggtccccatcaatccctccaagcttccacaacatccaagcaattcaacatccaaacatcatgagctatccaaaccaagaaaatagggcagaggcagaaaactctgcccaaaacacattccaatgccacaactttccttactcaaataccccagtaacattttcttcgttccgattcgttaaccgttggatcgactcanaacttttactggaggtccctagtacataaatctacattntgaccgttgggatatgct

SEQ ID NO: 26215 - DNA, 202 bp, Glycine max
ttaacctcttgtggctgctccaaaggaaaacacctaatagttgctccagtctcctcctttacttttaactcatcttcatcactgttaaattgtgtaaagcttgatattagaagtgtgaataaatcatgttccttgtctaaacatgtgttggaaggtaccatttcaacatcaaaacatattggtgaaaatcgggggggggggg

SEQ ID NO: 26216 - DNA, 421 bp, Glycine max
agcttcttcaggtgttattccttccaatctctttatttggctcctattcaagatgaagacaactgtagacactacctctccccacaagtacttgggcagactcttgcctttcaacatgctccttaccatattcattatggttctattttttctttctgcagctccattatgttgaggtgtgtagggaggagtcacttcatgaattatgccttcttgatcacaaaattcttgaaattctacagaaacatattcaccaccaccatctgttctcaatatcttgatcaatgagccactttgcttttctgccatatttttgaacttctcaaagacttcaaagacatcactcttccttcttattaggtaaactcatactttcctagtcaattcatcaataaaggatatgaagtatctgtttccaccc

SEQ ID NO: 26217 - DNA, 418 bp, Glycine max
  unsure (1)..(418): unsure at all n locations
gtcttcgcttccatttgttttatggagaaacctgatgatggtattaatggacactggtagcnttcacaacatcatgcaaccaagattggccaaacatttgcaacttcccatttcaccgattaaaactttccctgttatgattggtgatggaaatcatttaatttgtaatggtcaatggactaacgtgcctcttttagtccaaaaccatttgtttactttaccattttatttgttacctatccagggagctgatttggtattgggtatggaacggttgagaactttgggccccattatttctgactntgtagtcccttgcacgactcttacttacaatgattgctccattactttaaaaggggaactattaaatcctcaatttaccacttttcagtaactctgccacctcatgcatact

SEQ ID NO: 26218 - DNA, 408 bp, Glycine max
tttaaccattaagtccttcttaattatcatgctatcatggaacttcttggtcttttctttgtagaacttggcattctcgtaggcttctaggcggatctcatctaactcactcagttgcaactttccttcctcaccagcttgatccatagagaagttgcaggtcttcactgcctagtatgctttgtgctcaatctccactggaagatgacatgcctttccaaagacaacccgataaggtgacattcctatgggtgctttgtaggcagtcctatgtgcccaaagagcatcatctagcctagtactccaatctttcctgcttggctacacaatcttctctaaaattctcttgatctccctgttagaaatctctgcatgtccattggtttgaggatggtatggtgtggatat

SEQ ID NO: 26219 - DNA, 403 bp, Glycine max
agcttatcctgaccccgagagttatatgtttcttgtgggaaaactcatttaccttaccattactagacctgatatctcctttgctgtgggagtggttagccaatttatgcagaatcctcatttggaccattggaatgctgttatgcgtattctgaggtatgttaagaaagctcctggacaagggttgttgtatgaagacaagggtagtacgcaactatcaggatattgtgatgctgattgggctggatgtcccatggataggagatctacatcacgttattgtgttttcattggaggaaatctaatctcttggaaaagcaagaaacaaactgttgtcgctcggtctagtgcagaagctgagtatcgatctatggctatggttacatgtgagctcatgtggatc

SEQ ID NO: 26220 - DNA, 322 bp, Glycine max
  unsure (1)..(322): unsure at all n locations
acctcacgatttcttaccaagtaaaatggatcatntttaaggtccaacgccttaaaatgaccaccttgcaagtaaaaagaatcgcttgattcacccttataaaagaactacgtaggtctgatttcctcttcgatggagggtatgtaggagcaagagccccgcttttgtcgacctcaaaataaaaaagaaataaaagtttatgtacacaatttcacacaattctaaaattaaggctgttgntctttgggacaaacgtgagaagtgctaatacctttctcaaatgtaaatacaactcctgaatctggaatattcttcatgaccg

SEQ ID NO: 26221 - DNA, 288 bp, Glycine max
agcttttaactcggagggccgtattaagctcatattatatcgagacgctcgaaattaaccaacggaagctctcgagaaattcaaaggggcataacttttaactcggaggtccgatccaagctcataagatatcgagacgctcgacattgaacaacggaagctctcgagaaatacaaatgctcataactcttcacacggaggtctgaggcacgcgcataatatatctagaccctcaacattaaacagcgggagctctcgagaaattccaatgggcataacttttcactg

SEQ ID NO: 26222 - DNA, 220 bp, Glycine max
  unsure (1)..(220): unsure at all n locations
aatcctgactcaccatataccttgacttcttttgttatttcatccttaccctcggaagcaaaaatagaatagaagggaaatttcctattcnacaaaaagaaaaggaaaatttcctatgaaagccaaaaaaagaaaagaatgaaaattcctcaatcaaagagtgggagaaagcccaaagaaaagaaaggaaattcccactctaataatgggagaaagttaa

SEQ ID NO: 26223 - DNA, 413 bp, Glycine max
  unsure (1)..(413): unsure at all n locations
agcttgttcttcctggaacatttcttnttttgttactaatnnnaaaaaaaattattatttatatataaatatatttttagaaaaatgataaggtttttgcaattaaatgaatagggagaaataactttattaaaataatggtttgagagaaaataaaaaggatattcatttgatagaaaataaaatagagtttctttttacaaaacaataaaaataaataaatagagtaaatgataggttgtgagaaccctaactatacatagcgttaggtcagttttcacactgacgatgctttttctttctctcaatttcgnttttttctcttcttctcccaaaatcctatcttttctcgtataccaccaaacatatcccaaataaatgacaatctcacactcattcgccatttgatcatc

SEQ ID NO: 26224 - DNA, 452 bp, Glycine max
  unsure (1)..(452): unsure at all n locations
tctcattgacatacagtcgatgctttttgctgtcgatctccatgtcctccccatttctggtgcctatgtagtgttaagtgtccaatggcttaaatcattgggtccactactcacagattataacatcttgtgcatgcagttcttctatcagggacgcatggtggaactgaatggtgatcaggatgacactccgaacttcatcacactgtcacaattttggcgaatttcgcagacccaagctttaggactgtactaccacatcacacttctatcgaaggactcgcccaacccacaggaccttcacccagatattcagtccctcctgactaagttcgcacacttngttcaccaacccagcaccttgtcatcgaagtaggacaccgatcatcacattcatctcctccctcagttcactccggtcaacgtgagaccgtatcactacccacacttct

SEQ ID NO: 26225 - DNA, 425 bp, Glycine max
  unsure (1)..(425): unsure at all n locations
agctntctcccaagnccnaaattacattttatgctattattaacncactgtaacctccatttaccacagaattcagacttaaccttccaaccctcaaagcctcactctttttccactcataacatcacattctcactttctaaccctaggttagttctacccttcatctctaacagttttccatgagcaatttcagcatataaacatcacaaacatcatcacaaaaaccctaaaacagaatgggtatgtttaactcatccaaacatggcaatttcaacaagctttcaacaagtttcttcacaaataactatcatgaagcagaaaactagcaagactacccatcatatctcccaaaaccccatacccacgagatgtaagagagaaagaagtccacccaaacctgaagtttcgaagtcccactcgta

SEQ ID NO: 26226 - DNA, 397 bp, Glycine max
cgtccattgcttgcgcattcacagacgtcagcgtctctatattgttatctcagcacaccggacaaacaagctccaccttatcctcttcctctttcttcaatttgatctcattccattgattcaacctttcttcagttcctccaacgtcagcgaggttggatctcaatccggcgaactcgtctcatcaccgcctcgaaatgcataaatgattggtgttagggagttcttggtttggttagttggagggaaagggaaaggttagaggcacatactagagggtgcttgtctgagtctgagaaggaggtttagaaacaaaaatcatatgattttgaagaaaaacgatgttgaagaaagaaagacgtggtttttcttgagtacacagagagagtgagaggga

SEQ ID NO: 26227 - DNA, 405 bp, Glycine max
  unsure (1)..(405): unsure at all n locations
agcnttggccaantcttctatcttgaaggtcatatngatcttggaagtcagaacctctgtacttgaagaatagggttacgagtttgggcttttgttttgtataactagcttagttagttaatcagcttgttagttaggtacgtagttagttagttactagcactctatatattagtgttagatagttagttaagaactaaacttcatgttggagaaagcactacactagaatttcattttgtacaaaacttgttgtgcaagctttgtcttttctctcaattttttttttcattcttctttatctcttcaatcctattttcattttttatgattgtaattatgtttaggattgaaaatggattaggttatggattcatttcctaatttcgaaaattaatcacagat

SEQ ID NO: 26228 - DNA, 411 bp, Glycine max
agcttgtgcaaatcttatcactttcacattttatctctagcatgcattttctttctttacccgctcctcacgtttggttttttagggaaaacaccataactaaacgcgccgcaagggatccctatcgcaccagatccaaatctagaacgatgggtgatcaagaggagacacaggaacagatgaaagccgacatgtcagctctgaaagaacaaatggcctccatgatggaggccatgttaagtatgaagcagctcatagagaagaacgcggccaccgccgccgctgtcagttcggctgccgaagcagacccgactcccttggcaactacgcaccatcctccctcaaacataataggacggggaagggacgcactggggcacgatggcagccctcacctgggatacaaccgag

SEQ ID NO: 26229 - DNA, 381 bp, Glycine max
actatgaaactcagcttggcaataaatactccgcatttatctcttcatgtattctttctttctttacccactcctcacgtttggttttttagggaaaaacaccataactaaacgcgccacaaggcatccctatcgcaccagatccaaatctagaacgatgggtgatcaagaggagacacaggaacggatgaaagctgacatgtcggctctgaaagaacagatggcctccatgatggaggccatgttaggaatgaggcagctcatggagaaaaacgcggccaccgctgccgctgtcagttcggctgccgaagcagacccaactctcttggcaactgcgcaccaacctccctcaaacatagtatgacggggaagggacacact

SEQ ID NO: 26230 - DNA, 424 bp, Glycine max
  unsure (1)..(424): unsure at all n locations
agcttgtgactgttggcaatttctttaattctagtcactaatttagttgngactttngaaaaaatcttcagaaaagaattgtgacttttggaaatgtattttttgaaatcagtcactggtaatcgattaccattaaggtgtaatcgattacacatcaacagatgtgactcttcattttgaattttgaaaattaaaacgtttagaagctctggtaatcaattacaagtattgtgtaatcgattacacaagtttaaaatactttaaacatgagtataactcttgaaatttgaaatcttaacgttttaaaacactggtaatcgattactaccttctggtaatcgattaccagagagtaaaactctttggtaatgaatttgtgaaaacttcttgtgctactncaatatttgacaaaaaaatttagtac

SEQ ID NO: 26231 - DNA, 342 bp, Glycine max
  unsure (1)..(342): unsure at all n locations
cttctggaggaatcttctggagggcccaagtgggcctggttgctttntgcacccccatttttactaagtacaccccctgcctttttttggtgattcttttttcgtaaagntacggaaacttacgaatttcgtaacgatactagttttctttccgtaatgttacggaaccttgcggattacataatcatccccttttttgacttacggaatgttacggaacctcactaattgtgcaaggatgcttccatttgatntccggtgtgtcacggaaccttacggattgtgcatcaatattttcttttgttttccggcatgtcccagaaattcacaaattgcctaatg

SEQ ID NO: 26232 - DNA, 428 bp, Glycine max
agcttctgctgcaaacatttataatagacttcctcatctcaaaaccaacaacaacagaataattatgacctttcaagcaaaagatacaatctaggttggaggaatcatccaaatctgagatggacaagtcctccacaacaacaacagcctgtccctcctttccagaatgttgttggttcaagcaagccatatgttcctcctccaatgcagcaacagcaataacagtcacaacaaagataacaagcaactgaggttcctcctcaaccttccttagaagagttagtgaggcaaatgaccatccagaatatgcaatttcagcagaagacaatagcctccattcagagtttgaaaaatcagatggggcagatggctactcaattgaaccaagctcagtcccaaaattttgacaaattgccttcacaaactgg

SEQ ID NO: 26233 - DNA, 508 bp, Glycine max
  unsure (1)..(508): unsure at all n locations
cgctgtgctcctgtacggccttgnatctaagcttgaattccggagacattgtgcctcacaattaatatataaatccgttaaagcggaacattgcatatgttcagcggagagcactgactcggagatgtgatgtatcaatagagagggtcttctacaacttgccgctattcaggatgcgtgcacatctgatagaattatgagtaagctctaatagcagctttttataatacttgttctaatatcctatcaagaagagataattaaaaatgtatttggtggggtgagcatggaaaagataaacgttctctatgttttacatatattaagattaataaacatgtactcggaaattcagaaataaataaatatctctttcttttagatataaacaaaccacgccgctttcacgcgtgggaggggttatatattgttacactgtgtaataattaccaaagcggggttaggattgtgtccccgccacactctctggtggtgctgtgtttttctg

SEQ ID NO: 26234 - DNA, 446 bp, Glycine max
  unsure (1)..(446): unsure at all n locations
acctgcggcatgcaagcttgatatgttttttaaaaaagnngggttgtctcataagcttttttataatataaatggaaaagaataacaatataacaacatacaataaagtggcaagcgccttatggtaaaagaaatgacagaattcacatacttattctctttctgccaatagtctaactataagcttaataagctttttaaaagagtttggatgtctcataaccaaccttaattatatgtttagaccatatttttggcaaatatacaaaatggctaattcttaacaacttaacaagtaatataaaacaaataactttccagccaaaatttgacgcatgcctttatgcatgcaatattaagtaattcagaaaatggttaattaagtttttagtctttaaaattttttgaaaatntaatttagtcccaaaaattttaattttagtcct

SEQ ID NO: 26235 - DNA, 327 bp, Glycine max
gccctgatgagactaatgaaggaggtatagatgttgaaattaagctaaaggagttagaacaaaagtcagctgaagtcagtaccgagtggagtattgtccctggacgtggagggcattccactctggtatttatttctgtctaattgaatttgtattctctttaacaaccgaggaatttttggcctgcccaattaatttgtttactttctatgttgactttgtgtaagcttcccttcagccaggtggcactggtagttttgaacatcggaatctgcaagggctgaatagatctattaacggttctataacaacaagcaacttcttgaa

SEQ ID NO: 26236 - DNA, 426 bp, Glycine max
  unsure (1)..(426): unsure at all n locations
gcttcccttttctgacatcgggacactcatatattttgcaancncnccnggcggaaatgaccatgtgtctctcaatcccaaaaccaaagttgttctcatttgggaagaatgtcacatctacattacatttcagcatacctttaactagaggggaccattgaacatgcgtttgatattgattttaatccatttggttatgactggtttgtctcaccaaattctattgatggaggtattcctttgcttcaaccaccactccaaacaggaaaaaaattctttccctcccaaatggccaaatttctattcctctagatggtacataaaatcatagcaaaatcaagtagtttagtaccatctagagtttggcaagtatcaaaacctacatctctgaaagatttaactcgcctaataataagaaatagctca

SEQ ID NO: 26237 - DNA, 412 bp, Glycine max
  unsure (1)..(412): unsure at all n locations
ctgcaagcttgagggtgcgtatcccaccatcttttatagttgattatcganaaagngtctaccatcacgattatcgtctccctttccattattgggggtaccacctgngccgccagatccctccaccttttgggcgtgttctttgaatgatccgtccccctttttgcacatgttctgtagttgcatcatatccggaaccatatcaaaattgtactgatactgcctaacaaaggcaaccattaggtccttccaagaatggactcgggaaggttccaagttagtgtaccacgtaacagctaccccactaagactttcttggaaggaatgtatcaacaattcctcatcttttgcgtattctcccatcttctgacaatacatctttagatggctcttgagacaagtagtccccttg

SEQ ID NO: 26238 - DNA, 410 bp, Glycine max
  unsure (1)..(410): unsure at all n locations
gctcacattctctgtttatctcctaaacaatccanaagttttggcttctggttntatgtcaatacatcaaaatcttatgttttacttgtgtcatcatgtaatgcttcctctactactgattcgataaaacagaaaaaaaaacactaaaaaatgaaacctaatatcatcaacaacataaaccaaaatttctagtattagtatcaccaaaatttntggctgctggttttgtgcccattccccacatttgatcttcgatgatccaatctacaaatctcccccccgccccccataaaaatgaataaaagaaagaaaataaaagagaattcataaaccagttcataaagaaataagcgctaaaattaaaattcaatcgaaaaactaaatatgaagaaaatgatcagaactgtgat

SEQ ID NO: 26239 - DNA, 373 bp, Glycine max
  unsure (1)..(373): unsure at all n locations
agcttgcttgagaagctactattttggcttgatctttgancttaataagggcattcaatggtaatttttagctatggagttgtagcggaagataaaggagaagaggtgagaggaggcaccatccactatagaataagccttggaaggagaagcttcaccaccaagagagtgctttggataagaagcttacagaggaagcttcaatggaggaagagaatgagagagagagagagagagagagtctgggggggggggtgcgaattgatggaaattanggagagaagttgaactttgaagtgtgtctcacaagtttctcatccatcacagttatgacaagtgttacacatgtntctatgtatagcctagcacatgg

SEQ ID NO: 26240 - DNA, 417 bp, Glycine max
  unsure (1)..(417): unsure at all n locations
agcttgtagaatggccagacatgatacatttcatggtttggtttggttcaagggtaaaagggatgccccacattatttccatgacacaaatgcaaaaatgatgatttggaaactttatgcaaaactggtcatgcatgcacctatgtggacactcaagtgtcaaatttttatgctcatgtgatgctagggctcangattcattccctctattttagtcaacccaatgtttccaaaatatgttcttttatccatttgtgcattcatccgagtccattttgggcgttcggggaaatttcactgcgttcacccttcgggtgtacacacatttttttcaaaaaccagctatgatcggcgaatttcccaaagaagagttggtagtcatctcttttcaaaagcatgtcggtttttcagctaaac

SEQ ID NO: 26241 - DNA, 416 bp, Glycine max
  unsure (1)..(416): unsure at all n locations
agcttctgcacgtctaaaactattatctttgcctcacttcataagcatgtttctatctaaggactaatggtctgttttatatttacattaatggatttttaaagacggtttaactaccatgctttcaatattttttaaatgttgtagttgttgttgaaagtttaatggttgctggttaggatgtaagcctgttactttctatcctttttgtaatgtagtggttccgtttataataattgtcatttgtgtatttgtgtagcactgtgcagtgctctattttatctggataattctacatgagtctttttgcattttgtttgaatgatattatgtttttttatttgttntggactgatttatgagttgcangttatgtgtttgatctaatgcccaaatgaactttgaaatgttttagc

SEQ ID NO: 26242 - DNA, 482 bp, Glycine max
  unsure (1)..(482): unsure at all n locations
gtgactatttcaatcaatcatggccttcattatttccaaaattcatgcattcattcagtattcagagattcatgcaacagttggtacccaatgctagtcgttctctcacaattaaagttcacacaactcattgggttgtggctaatgattaccttcacaatttacctgtcaaaccaactaacattttcagtcatgttcctaatttatgttctttctcttctaattaccacatacttattcaaagcaagtgatctaagcatcacaattcactaaatccatgcaatcgatcaattcaaatcatacacaaacacaaaattttcaaatcanagcaaaccattgcataatcaatcaaaactataaactattcaacaagctntaaaattntctaactaaataaactgaaatataaaactganattaanagcataaactgaacataannaattatcaagaacagganaaatanataaagatcctgtcat

SEQ ID NO: 26243 - DNA, 423 bp, Glycine max
  unsure (1)..(423): unsure at all n locations
agctntttatatctcccgagtgtgtatttatnnttttacactntactgactttacatcttatgcatgattcttgtagatactaaatggaatatcgatggacgaatggtaggcaggaaaccggtggccgtgacagaaggcaatctaaaagggaacaggtaatagatattttttcacccaattaagtgatgttcttctttctcttctctggaagatggagaattctgactctagcttttttatacttataaattatactgctggtctgtgttcttcaagacattgtgaatgcacaattattactgtgattcccattgtattgagatgaattgtgttttcaggcatatcatgactctcttattgaggatttgtcagaggattttagtttgccaatcaaccacaggccaacagaaaatgttgatctg

SEQ ID NO: 26244 - DNA, 390 bp, Glycine max
  unsure (1)..(390): unsure at all n locations
aactaagctgctaatgaataatgacataccgcataagggttaggatagtctcatagcattgnggagtgaccaagctgaggccctgtggtcgacacacacggcaatgatcacgcattgaaagcttgccatgaaacacattaagccattgctcgtgtaatgagctggaaatgtcttgcttatgtctttctgaaaaacgtaatgatataataattctcttaaagaggaaaattaaactagttaagatagattgatgcttaattacttgaattatgaaccatgctgcccagacaagggtgctaagaattacgaccaaagggcctaggaacatgtttcctttgccagaagagctagttccttccaatttctcagcatatcttcagtgaatacttg

SEQ ID NO: 26245 - DNA, 419 bp, Glycine max
  unsure (1)..(419): unsure at all n locations
ctgcagcttgctgatnttttntcgtctatatttgatcgaagtgagtctgaaaagaggcaaatttaatcatcctacttggatgaatgagaaaactggggtgaatgaagagggtgagaatgaaggagaaacccatgctgcgattgccgttcctacatggaaacttcccaccagcccaacaatgtcattactcagccaataacaatccctctccttacccaccacccagttatccacaaaggccatccctaaatcaaccataaaaacccacctaccacacaaccaatgctaaacaccacctctagcgcaaacccaaaacaccaaccaagaaatgagttttgcagcgaaaaaaacttgtagaattcaccccaattccggtgtcctatgctgacttgctcccatatccactcgataatgcaatg

SEQ ID NO: 26246 - DNA, 407 bp, Glycine max
agcttctagaggctgggcttatttatcctatctctgacagcgcttggataagcccagtacaggtggtaccaaagaaagggggaatgatagtcatctggaacgagaagaacgacttgataccaacattgactgtcactggttggcgaatatacatcgacttcgactaccgcaagctaaatgaagccataaggaatgatcattttcctttacccttcatggatcagatgttggagaggcttgtaggtcaggcatatattgctttttggatggatattcaggttataaccagattgctgtggaccccaaagaccaagagaagacggccttcacatgcccttttggtttgcctatagacagatgtcatttgggttatgtaatgaatcagccacattccaaaggtgcatgct

SEQ ID NO: 26247 - DNA, 407 bp, Glycine max
  unsure (1)..(407): unsure at all n locations
acactataaaactcaagctgggtactgcttgattngtaagagctaaaagtggttgttatcataatacttgtaacttgtgaaaagttagtggaacttggtgttttaccaagaattagatgtaaactcggtggtaaagacaaaccagtataactctctatgtctgataattctttgctttgtctgcatttaactgaccctacgtctgaattggttttttagtcgtttgagaatatcttgtgttttgtaaacttttatctcattgtttgagtgttattgttataaaatttgttatatgtttttacaaagttttcttctcatacgaaaaaatttgttggtttaagaaatggtttaaaaattatgctaaaatcacaattcaacccctccccttcttgtgatatttgccttta

SEQ ID NO: 26248 - DNA, 419 bp, Glycine max
  unsure (1)..(419): unsure at all n locations
agcttgtgcaaatcaagtcactttcgcattttatctctagcatgcattgtatgttggtctcatcctttgtcacgggaagccggaaggtccatatcaccttcttaattgtacacatggggcactgcgcccccaaatgcgcaagtaagaagagataattttccgggctctcgtgtccgtaaaatgcattcatatcatgcatcgcataaacatctcttcataacatcataatggacatatcctgcattcgtccgttatcatattccagcctcacattttgcatgagtcatggcatcatcatgcatatgcgttcaacaaactttntgatctgcaaaattgcatanccattgttttcatgtttgctcatccttgcgttntcctctancaaacaaaaacaaagaagggggaagcgtgaaacttca

SEQ ID NO: 26249 - DNA, 439 bp, Glycine max
  unsure (1)..(439): unsure at all n locations
acgttcaataactgctggtaaatgattaccatatatgngtaatcgattacacaatacaatatttgaattcaaatttaatagctgttgtaaatcgtttttggccactggtaatcgattacatcctctggtaatcgattaccagagagtaaatctgttgaaaaaacctttttaacttagatttcttggccaaaccttttgcgacttcaattggaattcccttcctatttaatatacccttcctaagactctagagactgtcttgattattcatcttgaatatctntgtcttgaataaatctttgagaagcatgtgattcatgtaatcctttggtatcatcagaacattcagcttgatcctttgtctacaatctnccnctttttgatgatgacantaccggagatcaagaacagctatatacaagatgatagcacgttcaca

SEQ ID NO: 26250 - DNA, 361 bp, Glycine max
  unsure (1)..(361): unsure at all n locations
agctntgactcatgagtggtcagnngatgtctaagtgtattggtcctttngntattactaatgtttttccttatggtacagttgagatcaaaagcaactccataaacaagaacttcaaggtcaatggacaccgacttaagccattcctcacaaacccttctttagtggacgtagtggtggaagagacttccttactccaccctactcttcctccaccatgacttagggagtttttctttcctatctccttctttacttttattacatttgtctgattctatttgatggtctaattgcttttaatcttttaattatgtgttgcttaagtatggggggaggcgcctctcccatttggcacggt

SEQ ID NO: 26251 - DNA, 428 bp, Glycine max
  unsure (1)..(428): unsure at all n locations
tatgctgcanacatctacaacagacctcttcaacctcagctgcaatttcatccacaacaganaaattatgacctctccagcaacaggtacaatctcgggtggaggaatcatcccaaccttagatggtcgaatccttcacaacagcaacaacaacaacaatagccttattttcagaatgttgctggcccaagcagaccatacgttcctccactaatccagcagcaacaatagcaacagccccagaaacagcaaacagttgaggctccactgcaaccttcccctgaagaacttgtgaggcaaatgactatacaaaacatgtagtttctacaagagaccagagcctccattcaaagcttaactaatcagatgggacaattggctacacagttaaatcaacaacaatcctagaantttgacagaataccttc

SEQ ID NO: 26252 - DNA, 419 bp, Glycine max
cttgcccagagaaggagtccacggatgatttgctttctacctcaaaagactagaaagcggtttctaatgacgcctctgcggcttccacataaggcatagaggatgggcagctcaccaagatgtcttcctcgcctgatacgatgaccagatgcccttccactacgaattttaacttttggtggagtgtagagggaacaactcccactgagtggatccacgggcgccccaacagacagctgtagggggggttaatatctattatttggaaagtaacttgacaggtgtgagggcctatctgtactgggagatcgatctctcccctaacctctcggcgggtgccgtcgaaggcacgaaccaccattgaactcggctttaagtgggaggcattgaatggtaatttctccaagtgctcttagcat

SEQ ID NO: 26253 - DNA, 444 bp, Glycine max
  unsure (1)..(444): unsure at all n locations
tgtatcaactggtgtgggttctctgatcttagagctatgtgggtaaattgttgagaaaaatgagtagttgataggtaagatcattttcttttaaaagtttaaagacacaggccctagttggggttggctacatgcagctacatggattcacttttaatcatattatcttccatttcatctataaattatcttccatcacatagccaaattaattatgctagaccattttttgatacctctcctcaataggggctactgcatgtttctattgtcgtacaatgtacatttgttactaaactctctaatcatgcagctatactttcattcaagtttgacggccacttcacaattacaagacagaagtatgaatctggaccttcgatcaactacagagatgganggaatagatcattaagagccaaggatgactctacaactaatgaa

SEQ ID NO: 26254 - DNA, 408 bp, Glycine max
agctttctccactaagttgcctgattcctgaaatgttttttcttatggcaatggtcctagatgcagggaagaatttctccaagaacaccctcttaaggtcatcccaattgaaaatagacctgtgagcaaggtagtatagccaatcttttgccactccctctagagaatgaggaaaaacctttagaaaaatatgatcttcttggacatcagggggcttcatggtggaacaaacaatatggaactccttaagatgcttatgaggatcttcacctgcaagaccatgaaacttgggcatcaaatgtattagtccaatgttgagaacatatggaacaccctcatcaggatattgattacacaagctttcataagtgaaatcaggtgcagccatctctctaagagtcctctcac

SEQ ID NO: 26255 - DNA, 371 bp, Glycine max
catatcacacatatgcttcagctgtagggggagtgtgtgattatattcctgatattctatttattattagaatattctatctcctattaatgagtaattgattgatcttgtaatctatactaattccttctgcatattataaatagcgtgaggtgtagtctactttaacacacaacacaacaatgaaacactgttatagacctttcttgatgagggctcatcccatcccaaaccgggatcgcccctactatgaatggtggtgattggagaattccctctttgccggatgccaaattccctgttgctactgtggctatcaataatattattattcctatcgattctcacgaggatagtttagtctggacccc

SEQ ID NO: 26256 - DNA, 326 bp, Glycine max
acagagtggtacctggagatatgtcgcggaggtcaagagaccttggggacgtcacgtggggtgctattgcccaaaaccaagcttgaccaatcccgaaccaacccgggcataatcggtcaacgagaacctgtgatgtacctaaacaggcgagctgctgcggtcaacagataaaaggaacaaagaccaccaagcaaggaggcttgtggtggctggccaactgtgaaacttgattgatatgtgagatatggtctctggtaatcgattaccaagggtgggtaatcgattactaggcttataaatgaagacaggaggcttagatggtctct

SEQ ID NO: 26257 - DNA, 406 bp, Glycine max
  unsure (1)..(406): unsure at all n locations
agctnnangnnatcttctggatatcaatctatgacaatgacaacaacgtgaataataaatattagagtatttaacaaaagtttagcttaacaaaattataagtatattataccactgcatgtcgaggcatgttagcatcaacatgtgttggtgcaggtggatgtggcacagctattgtatcaacaggcaacataggtggatgtggcataactgatgtangattatgcaccgtgggtggatgtctaggaggctccctaagttatggaaaacttatgaatgggtgagatatcatataaaaccactccatatagcctgcaacacatcgaccaggaaaagtaacaaaatctcctatcggtgcaaggtattgtaaaaatngaagtcatatatcatcaatttcctctgcgga

SEQ ID NO: 26258 - DNA, 402 bp, Glycine max
  unsure (1)..(402): unsure at all n locations
tattaaacaatctcatcttgcatgacccaatatattatattcttcctattaaaagntagactcgcttgtttagattttntttatacacggaattttgaattatatattctttccattattttatactcatctaaattttttccacttttcaaatttagagttttttttcagcaattgtttctacaccatatgtatgttgcagtctgatattgagcatgtcgataacnaaaacaattttctcttcttccatacctcattgaatcattaatggagaaataatataattgtatataggtactaccactactacaaaatgtagaattaacatcgctacgttaacatcggttttataaaaaattgacgttaacaaaaacactgtggcataatgataaataacatgac

SEQ ID NO: 26259 - DNA, 420 bp, Glycine max
agcttgtccaacttcaaaagcattaaactttaaggcaaaaggacaatcatgagttttatgccaaagtacatatatcaaaaaagagtttaagtaaaggggtagacatcaaaagttacacacaacttaaggatcactataggatgaattgctaaagacaatagtgatgatgatagatgtgtctacacaatcgagaagcacacaccaaaagttgtaaagacaaatgtcatgcaacaatgcattgtctcgatgaagctctcttgatccaatcggtctatttgaaagagaagagaaagctaagttctactttgcaagacaaccatgaagaagaaaagtagtctttcacaatttgcaacgatcaagaaaatatcaatgccattatgcggaagactcacttttatgaagaagtagcaagcctcatga

SEQ ID NO: 26260 - DNA, 375 bp, Glycine max
  unsure (1)..(375): unsure at all n locations
tgattgatccttgaacctatggattacatctctatctaccttgtcttangttgtaggagagcattatggttcaaagcaaatttttcccaaatttgggggagtttattgggtgatagcttctaatggtaagaaaatatcagcatggacaataagtcaataagcagcaagtaaagagttgttgttcaaaaaaaaactataagtattcaaaataaaagtgtgtgtgtgtgttgntatctaagaagaagtgaagctaagtgctttaaggcaagtaattgaagctggaaataaaaagaanaaaagggttatctaaggatgaatgctttcctagaacttaagcctttgcatcctagaaaaactatgatttatttacagctc

SEQ ID NO: 26261 - DNA, 369 bp, Glycine max
aacatgcatattgagagattagatcgtctttcaaatatctataattgaaagtgttgaatcaaccatattagctgcattttcccttgattgtttattcttcgctaccattcaagtttcttaaagatctggagttttttcaatatatttgcatctgactaactcatcataaggtgcttgtgttatcaaaattaataattgacattttgtatgacttgctaggccttccctagggactctcctttggctggagacatgaaaactgccattctacagctctctgaaactggagatctaaagcatattcatgagccattctgacacaaagctcttgtactttagacaatgctaaaattgatccagatcgacctc

SEQ ID NO: 26262 - DNA, 407 bp, Glycine max
agcttaagaatggctatacccataactattttgtttccccaccaactttcacagaggaatgccttcaatagaatattacaatatgcaaacaaatatagactcccggaaggcttaaaagagcaaatgttagcacacatgcaattgaagtttaatactgcagagttacaacaagtctctacaacgtttatcgcccaactgctaaagctttttctttgattttattttctttttgtcttttagttggcgattgaatagattctaaacatgtcaacatttactaaaaatgacatcatcacactaaatagttacatataattgttttggtcaatacatacttttgttttgtttgttggttgtttttccgagtttggaaaccgtgtgaattttcgtagccaacattgtgaata

SEQ ID NO: 26263 - DNA, 271 bp, Glycine max
taccctgtgaagatgtcctatgtttttatctggactgattcatttgctttcaaagattcatggccttgcaagtgaagacccgcacaaacatttgtaaaatttacaatgtctgctccaccatgaaacccccagatgttcaagaggatcacatattattgaaagcttttcctcattcattatatggagtggcataagactggcttgattaccttgctccaaagtccatcaccagctgggatgaccctaagagagtaatcttagaaaaaatttt

SEQ ID NO: 26264 - DNA, 419 bp, Glycine max
  unsure (1)..(419): unsure at all n locations
agctnttctatgagtagctcattnttgtgttgttttaattatgttaacatgcatattaggtgattagattgtctttcaaatatctttaattgaaaatgttgaatcaaccatattagctgcattttcccttgatttttttttcttcgttaccattcaagtttcttaaagatctggagttttttcaatatatttgcatctgactaactcatcataaggtgcttgtgttatcaaaattaataattgtcattttgtttgccttgctaggccttccctagggactctcctttggctgtagacatgtcaactgccattctacagctctctgaaactggagatctaaagcagattcatgagccattttgacacaaagctcttgtactttagacaatgctaaaattgatccagatcgtcttcagctt

SEQ ID NO: 26265 - DNA, 392 bp, Glycine max
gggcgtgtcatatgttgatcatgagtgggtcatggaaggtcatctacccgcaacaacaaacgttgatttgatggaagaagaatctgaagaagaaactcggcgagagcctgatcttcaatggaacccttttgagtcccttatgattcaaaagatgaatgctatcattcatctccatcaaaagcatcaagccgaagttcacaactccttagagaacattacaactaagcttgagaacatagaaactaggctatccctttgtaacttcttgaacccgaatgaggataaggcttaaatatgcttatgtgattgttcgcgttggtttatgggctttctatcatgtcatgttctattaggcttagttggataatgatggttacattagttagtctttg

SEQ ID NO: 26266 - DNA, 324 bp, Glycine max
  unsure (1)..(324): unsure at all n locations
agcttgaaaagaggttgtgtagtatggtttaactncctgcttttattcgttgaccacagagtggtacctggagatatgtcgtggggatcacgagaccttggggacgtcaggtggggtgctattgcccaaaaccaagcttgaccaatcccgacccaacccgagcatagtcagtcagtgagaacctgtgatgtacctaaacaggcgagctcttggcagtcaacagataaaaggaacaaagaccacaaagcaaggaggcttgtgtggtggctggccaactgtgaatcttgtgtgatatatgggctatggcctctggtaatcgattac

SEQ ID NO: 26267 - DNA, 70 bp, Glycine max
aaaaacaagaaatgaattgtaagtctcagatttggaaaattacccgttgaagaatgaagaacggatgaag

SEQ ID NO: 26268 - DNA, 413 bp, Glycine max
  unsure (1)..(413): unsure at all n locations
agcttgtcaagcggtctctcttctatnattatatatatatgnnattcgaatgaaataaaactaagcaagtgagtgaaaagtttctctcctcacatattcaaagcttcaagttggtactagagcgggtcgtatccgccgccattcgcgctgtcgttcgccaccgtccgccggccgtttcaaccgacgactacagggttctgtgcgcctcgaggagcgcaacccagcacaactaaccactgggcctggagcttccccacacgccgtcacacgccgtctccgtgcgtgccaaacgccggcgcgtgaccaccacgcgccgcccttcccttgccgaaaatgcgcgcatttgcttccgaccgtctcgtcgggctctcctgagtccatatcagcccattagttttggtttcggcacttcg

SEQ ID NO: 26269 - DNA, 348 bp, Glycine max
agcttgcctcaaatatgttcagtatggatgttgcgggcgaaggaactagttacgctcctgagtatgacagtcaccgctctaggagcgcattacaccagcagcgcttcgatgccatcaagggatggtcgtttctccgggagcgacgcgtccagctcacagaccacgagtatactgattgtcaggaggagatatggcgcctgcggtggacatcactggttactcccatggccaagttcgatccagacatagttcgcggatcttatgccaatgcttatccaacagaggagggcgaacgtgacatgagatcctgagtcaagtgtcagtggataccagttgatgccgacgcta

SEQ ID NO: 26270 - DNA, 315 bp, Glycine max
catctaagaaggagcagcaacttctgaaagagctaaacaatctagaagctggcatcagtggcagacaactgaccccccatgagctgacatctcataaaaagatacatgaggacttgtggactgctgctcaagcacatgaatacttgctaacaaaaatggctacaacaaaatggattaaggagggggactgcaatccaagatactatcacaagatcatgaactataaccacacacataaagcacttaaacgtgtgtggattgaaaggttataggttgaagaacccatcatcgtgagagaggaagttcgcaactttt

SEQ ID NO: 26271 - DNA, 541 bp, Glycine max
ctatgaacttggaaaggaacttgaactatactatattcttctcgtgctggtgtatcttgatattaggcagaggcaattctcagggaacatcaagctcactttcggataaggttcatcaagttgaatggaaatcttttagcaccctcatcttgttcttggacttaaacctcatgcagagggataagggtataccattataatgattgcatagttggtcatatagggttaattgaaagtatataatttctctatttttttcaggacagatttgtttaataattataaatggattcatagttccttcttgactttcagcttctacagtgcattcatatcaagtgataacattctcttttatgattaataacatgactcctacttggtaatatttgtagaatctgttttgagtgaagctttagcagtacttgcaggtaaaattatctccacttgtttgcctgatgctggtttgctattgttgataatcagtaatcaccaagtaattttatgatgcatcaaatgccttattggctttgcactcctg

SEQ ID NO: 26272 - DNA, 443 bp, Glycine max
accagcgctaactacccgctcgataataaacttgaacgatctaaaatggctcggagcaatgcaggttaagtaactccatgcatatcagacaacttgggctgggttagtggatcatcgcacacatttcccatgggaggattgaacttgtatttcactttatatgaagactcaaagtttaacctcaggcgacagagctatgactactgataccctttaattactgatgggtactgtcatttattgacccacgtactaactaattattagagcccctcccgtaattataccacttaccacaagtgtttacatatacactcggacatactaactcataaggactgagaaactaattcacacttacataagctagcgctagtgtagtactatctaataccactagagtttgaatatctgtacatgaattaatgcacacctagtttata

SEQ ID NO: 26273 - DNA, 432 bp, Glycine max
  unsure (1)..(432): unsure at all n locations
agcttgcctcgaaaagatccaggaaggataatgcggncgaaggaactagttccgctcctgagtatgacagtcaccgctttatgagcgctgtactccaccatcgcttcgaagccatcaatggatggtcatttttccgagagcgacacgtccagctcaaggacgacgattatgttgatttccatgaagaaataagtcgccggcggtggacatcactagttacccccatggccaagttcgatccataaatagtcctcgaattttatgccaatgcttgggcaacagaagatggcgtgcgtgacatgaggccctgggtaaggggtcagtggatcccgtttgatgcggattctttcagccacgtcctgggataccctttagcgctgaaaaagtggtcggagtgctagtttcgccataagaggaaccgctctgagggtc

SEQ ID NO: 26274 - DNA, 561 bp, Glycine max
ccgcttcttagtttcagatgatgcagatgggtttgtagctattttatgcactcctctaatgactatggcatcatttctggcgctaaactgctgggagttggaggccatcttctcaattaaatttctggcttcagcaggagtcatgtctccaagggctccaccactggcagcatctatcatacttctctccatattactgagtccttcataaaaatattggagaagaagctgttctgaaatctgatggtgggggcaactggcacatagtttcttaaatctctcccagtactcatacaggctctctccactgagttgtctaatacctgagatatccttcctgatggctgtggtcctggaagcagggaaaaatttttctaagaatactctcttaaggtcatcccagctcgtgatggaccttggagcaaggtaatacagccagtcctttgccactccctctaatgaatgaggaaaagccttcagaaatatgtgatcctcttggacatctgggggtttcatggtggaacagaccatgtgaaattctttccaatgtttgtgcgggtc

SEQ ID NO: 26275 - DNA, 618 bp, Glycine max
agctttggtaatcgattacatgttttgtgtattcgattacacatgcttaaaatactttaaaactgtttaaacataagttataactcttgaaatttaaaatcttaacgttttaaaatactggtaatcgattactaccttctggtaatcgattacaagagagtaaaactctttggtaatgattttgtgaaaacttcttgtgctactcaatattttgaaaaacttttttagtacttatcttgattgagtcttctcttgattcttgaatcttgatcttgattattcttgaatcttgattcttgaaacttgattcttgaatcttgaatcttgattcttgaaacttgattcttgaatctttggattttgcttgactcttgattctttggcatcatcaaaataaccttggaagacattgcttccacacgcatgtgcgtcgagaaagggaaagctaattaggagcagctcttggctggtatggtaggggcatccgttaataggttcccccgatggaaggaagaaagggccgaagttgtgttctcatgtgaagggttctcacacgtccccttgatgggaatgaggggttgtttcaattacaatcccgtacttgccataagacaacta

SEQ ID NO: 26276 - DNA, 512 bp, Glycine max
ttctgagcagttgtttcctttattcgatgttaaggtttctgagctatttagttgctgttagttaggagataagtgtgggggtgtgaaggtgtgttggactgtttcatctttttaaatttatatagatacatagtacatacaccaatgatcattcgttaaatagcatccattgcatagggaattaactttgttatactgtatctttgagcctttcctttgaattgtgtttcagtcagttttgatttggattttaaaatacactgtttgtgtattatggtacctttattgagtcagtttagttgagttggacattatgacttatatgaacataaccccaaggtgcgacctgaggaaacaaaaggaagaagcatgttaagaatcggatttgattagtgaggtttcgtttgatgaaaattatgtcctacatttatgtgttttaatgaaattgtttattgacttttaattcttctaactgcaatgataaatgttatggatatttatcccttccaagg

SEQ ID NO: 26277 - DNA, 657 bp, Glycine max
agctttgatgatatggtcttcaccgacgaatgtgatctaagtaggtctaaaaagaggcaaatctgatcatcatgctttgatacatgccaagaaaaaactagggcaaatgaagagggtgagaatgagggagaagcccatgctgtgactgccattcctatacagccaagtttcccactaacccaacaatatcattactcagccaataacaaaccttctccttacccatcacccagttatccacaaaggcaatccctaaatcaaccacaaagtctgtctaccgcatttccaatgacgaacaccacctttagcacaaaccaaaaacaccaaccaagaaatgaattttgcagcgagaaagcctatagaattcaccccaattccagtgtcctatgctgacttgctcccatatctacttgataattcaatggtagccataaccctagtcaaagttcatcaacctctatttctccgagaatacgactcaaacgcaacgtgtgcttgtcaaggagaaggcccggagcgttccattgagcattatagggctctgaagcataaggtgcaaggtctaattgatgcgggctggctgaaatttgaagagaatcgcgtgtaaattctgacattgacaagagaagccacacatggggcaattttgaaagctgt

SEQ ID NO: 26278 - DNA, 452 bp, Glycine max
  unsure (1)..(452): unsure at all n locations
tgtcaaaagggacaacaagtaaaaaaattcttttctttcttaaacattgtttccacctcaagacctttagaactactacttcttgatctatttggcccaactagaatagccttcgtaagtggaaaaaagtatggactagacataatctatcgagcataagtcaattatgtaaccgcgaatatgatgtttcctttaacaaggatgagtttattgtccaaaacaatgacaagtccttactttttttctaccaagaggaaaggtaatattttctatcaaagaagatcattgggtgtggcataaaaaacttggtcatgctagcttgaggttaatctcacaactacaaaagcataaccttgtatgaggtataccaaatatgttatacaaagatgatttgctttgtgaagattgtcanagggaaaacaagtataaaatttcttttctagcaaaaacat

SEQ ID NO: 26279 - DNA, 569 bp, Glycine max
tgtccgagcagttgagcaagaccgaagaaaatatgttggccatcaccgactagtacaaggaaaagttaagcctagcagcgactcatgagcaaaggctagaggatgagtacaacaaggtatcaatcctgcaagcgaaaaggaaagcaagggaaagggtgatcgattcattgcacagagaagcaatgatgtggatggaccagttcgtctgggagtcaagaacttccctaactgctagccaaggccaaaggaatggcggatgtgtacttagttctcgaggaggttcacgggctcctcaattattaccaacacatgattgatctgctggcccacataattaggatccactaaggcaattgtattgtcgctttgatttttattagataaaccttttttgttccctaataaaatgaggttgatttaatcctgtgtgtttaaaactctgtgggaatccaatactttgacaacttgtctttagcatgcattcatgtttagtttttgtcacattactcattgcattttgttcctctaggaagtaacaccctaactaaatgtgctctaagtcaccccta

SEQ ID NO: 26280 - DNA, 554 bp, Glycine max
ttagtggtacaccacatggagatgtcatcggttattgaatgagattagaccacatgacaactgaataggtaataaataaactatgtgttacataaaaataatgttgagttttgtgtttttaataattaattaattattcattttatattatttcagttcttgtgtgtcataccctaatttcgtccggggacctttgcttgatgacatgtgacctttgtttggtccttgtaaggtgcttgacacccatcattaggcaatttgtgaaattccgggacatgccgaaaaacaaaagaaaatattgatgcacaatccgtaaaggttccgtgacacaccggaaatcaaatggaagcatcgttgcataattagtgaggttccgtaacattccgtaagtcaaaaaggggatgattatgtaatccgcaaggttccgtaaacattacggaaagaaaagaagtatcgttacgaaattcgtaagtttccgtaactttacgaaaaaagaatcacataaaaaaaaagcagaggggggtgcacttagtaaaaatgggggtgcaaatagc

SEQ ID NO: 26281 - DNA, 478 bp, Glycine max
agcttgcaagaagccctaggtaaaaagttttttcttagttcagcttatcaccctcaaacagatggtcaaactgagagaaccattcagtctttataagaccttatgagagcttgtgtaataggacaaaagggtatttgggatgagtatttacctctagtggagtttacccacaacaatacttttcatgctagtatacatatggctccatttgaagccttatatgggaggaagtgtacaacaccattatgttggtatgagactggtgagtctcttttgatagtgttgagtttggttgcatccaagtcacattggactgtaccaaacaagttaaattcctgaggttttgatgttaacaaagtataaattgtaagtactaacctttcatgcttaagttacaagctattttatctctgaaatacaagcagataagcatgaccataaaggttctggacaatacgcaaagtatcagtcattggat

SEQ ID NO: 26282 - DNA, 585 bp, Glycine max
ccgcttgtaggccttggatcttcttcatcaatggagtctttctcttcttaaagtttgatagcagcgtaatggagaaggagaagggtgattggagatgccacttcaaggagaagatgagtctagaagaagctcaccaccataggaagccatggataagagcttgaaggtaagagaagatgaatggagggagagggagaaagggagcatgaaatttagtgcctctaaagaagtttgaactttgaagtttaattctcaaatgatcaaagttgaaaaaatgcacacacatagcctctatttatagcctaagtgtcacacaaaattggagggaaatttgaatttctattcaaattttactagaatttgaaattgaaattgtggagccaaaatttcactaattatgattagtgaattttaactatggttcagcccactaatccaagatcaagttaaagattctccactaaatgtgcttaggtggcatgaggcatgtaaagcatgaaggacatgcacaaagtgtgactatatgatgtgacaatagggtgtagccagcaaatgctcacctcccctctaaaatttaattggatt

SEQ ID NO: 26283 - DNA, 331 bp, Glycine max
ttctatataagcggaaccattttatttataaacacaagtggagttttattcagaaaattaaaggttatctcttttatcttagtgagagtgattctcctaaattcttgaaagattcaagaacaccctggctgtattaaaggtcattcacaacctttgtgggttgccctcgctggaaagagtgattctttccttcctttcatcttcacccttgttctttcaaaccacaatttcagaaaattcacctctgcccagaattatctcgaggccataactcccattttacgcactcaaatttaatgatccttgagcctaaaatggctttcaaaacaaa

SEQ ID NO: 26284 - DNA, 520 bp, Glycine max
ccgcttcttcattagacctcagggatcggtcatctttccttatcgacgtcgactgtcatttttttcgatcaatatcggtgaatagtatttttctgccgatgtgggctaatgttttcctggcagaataaatgggaacttgccagtttcggccgaaacaaaacgccggctgagctcgcacgaaaaaacctagccggcctacattgtaaattttttatgcaacaccaaaacaagaaaacttcctctgtcgtaaaaaaaaaaccatcatcggccagcgagcgttttcaaaaaaaaatctgtcggggctatttcatgaccgatgtcggttattgagttttctattcaatccctgaatgagatttgcatgatgtcgattacgaaatgttcgatcgacgtcatccggcgaagcttcttcattagacctcagggatcagtcctctttcctggccgacgtcgactgtcatttttttcaatcaatattggtgtataatattttcctgccgaagtgggctaattgtttcct

SEQ ID NO: 26285 - DNA, 566 bp, Glycine max
agcttgagcattctgattcactagaaattcttcattccccatccaacctgaatacaaatgattcttcatttgattcagattcaccccccttctgcatcttgcatcaacataagcttttcttctgacttttgttttcttccaacatgaagatcgcacaaatagtgttgtggttttgacctattgatgtttgttgatcatcctcgttactgaggttctcacaagtattcttgctttgtctagcatcgagaaaaacatggtcctttcatcaaccataactatagagccaacatatgctatgagtttgcaaaaacatccctgattccaaaacttaaatggaacgtcgtaacagttcacccaaaccactcaactttctgctcccacaaaatctgaccatgagtacatgtgtccaaatatctttttccaccattcagcattgttcttcaaagccatctctatttttatatctccctttatagacaacaatgcccaattgtctcccaagcttttcactttgattgcctccatgtcttccaaaagaaaaactcttttagccttggtgtgttgat

SEQ ID NO: 26286 - DNA, 521 bp, Glycine max
tcaaatggacatcacttcgtcttagtcgccatttgtttttcttcatcaaatgggtcaaagtagcttcatacgccaatgtgactaggagtgtggtgattagattcataaaaaaggagataatttgctgatatgggttgcccaggaaaattatcaccgattatgccaccaatttgaacaacaagatgatgaaggaaatgtgtgaggatttcaaaatccaacaccataattccacaccttacaggcctaagatgtatcgtgcagttgaggttgctaataaaaatatcaagaagatagtccagaagatgattgtgtcatactaggattggcatgagatgttcccctttgcgttgaatggttatcgaacttcgatgcgcacatctactgggcaacccctttttctttggtgtacgggatggaggctatgctcccgtttgaggtggaggttccttctttgagaatcctatccgagtcggggttggaaagattcgaatgggcccaagctcgctttttgatcagttgaa

SEQ ID NO: 26287 - DNA, 572 bp, Glycine max
tccacataaaacaatttgatgtaggggattattctttttatagtcaaggtcaattaactctgattgcattcctatgtttagaagatttgctgcacaatcaggaaacacctgtgtcgatcaaatgagtttgtgagaatcaaaatcagataaaacaattgaactaaaagaaaaataataatttcatacctcttcatcaaatagataatcaatactaaacatatctaggttgcaatatgtattatttgtcaaaaactgagcatatttgaacccaaaatatgcattatttgttaaactaagtatatgttcaacctggatactgaacatacacgagcttgtctagctccattttggtcttcatcaattcagaaatcacttcatctgcctttggtagctccaagagatcatccaacttcttcatctgtttcattcacttagataaatcactaaaaatctctttgacctgagattccattcttccttctattagaccatatatatatatcctacaatctcttcacaaggagaataaaatcctattgagattaaaatgcagtacgattgaagagagaaat

SEQ ID NO: 26288 - DNA, 933 bp, Glycine max
  unsure (1)..(933): unsure at all n locations
cggggccaacatgagcngattccgtatnganaccccngnctannnnnanaanaacanccgcccgccttggtgtngagccaacatggatacgaggcagagcttcaccttgacngtttgagccgggcaagccacaagctattcctaagcccatagtcttatacaatagctgatgatatggtgggcaaccgaccaagcgcgtttgaaatagacatccactctgaggtgagagataatatcatgtcactctttttcctgtctcggaagcattagactatcttgtgctatcctgcggcacacagccaaaaacataagcgagagccatacgactggcaatagctctagttatctcctacacaccattacccacacacaccccactacatgataatctataacgcctcagaagacgacaatagtgatagaccatcgcacagcattctctacaaaccaacattcacctgttttgttgtttattttcttgcgttcttaaacaacgcgtcatatagtatattgccaattgacgttgacttctcactggaaaatgggcagacacacaaccaccttggagtcagaatccctgtgtactcaaatcccaagcagaagaagtttgtaactactcgcactgtacccgaaatcgcccgatagatagacgaacacacacgagaaaccgtgcaatctaaaattgaaccacaacccaacccaaccatatatgaaagtattaataaacacattgatacgccacggaaggtgctcatcggtgggctctccacctcnctcatcctctcccttcttcttccccctctatcctaactaccaccatctctactcctcttcaccccaatatgtcctcttcttgagctatccatttgttctcctcttttccttctctctctacccactgactctaacatccgccctccccgccgactaaag

SEQ ID NO: 26289 - DNA, 536 bp, Glycine max
cctcgaccaagttaggttggctatacaccttgcattttgtttttttataccaacgtcacattgaagttattgttatctacttgcccttcttatccacttgcttgactactaaagctctggtggctgtttcatccccagagaagattttaattcaaactttgtatattgtttcgtacttttactctttacttggtatgaacttcctgctaaattgttcatattcttatttttcatatttatgagccaagctgatcatatttactctgatttcagttgttgtcatttgactcttgtggatgcttttttagtgtagacccttattgacatggacaaaattaactaaatgtttgatcattaattgaacatattgagtggcagaatcagttattgagttgtagaatgtaaattcattttgttattttcataggagttattcttatgtttattgttcagcaatggtttgtcatcagtgattaacatttcagtttagtatgaaattgaatttgagaatagtagaaccttaacacacttaacaa

SEQ ID NO: 26290 - DNA, 643 bp, Glycine max
  unsure (1)..(643): unsure at all n locations
caactcatccaaacatggcaagttcaacatgctttcattttatttcttcacaaataactatcatgaagcagaaaactagcaaaactacccatcatatctcccaaaaccccatacccacgaaaatcaagagagaaagaagtccacccaaacctgaaatttcgaagtcccacacgtagagacgcgcttcacgactccgaaaatgccctcctttcgcgatttggagcagaaatgggcaccaaaggttgaagctttgttgggcaacaatggtggatgaagaagaaggagaaaagcaacgtgagggagagggagaaagagttgtctgaaatttctgggctgagtgaggagagagaatacagctttttggttttaaataaagggttttctctttttctattattttatttaagctatgccacatgtccccatttgagtggagcaaaaagggcccactttctcttttgattgtgacccatactcagccacaaaaagtgagaaaaacctgacctttgaaacgctaaaatcctgcctcggtttgcatgccatntctctggttccagatcctcgcgcttctctgcgttcgtcgggggccggttttcgaaagcaagcaatatatatattaaaacgctcagaataaaaccccgag

SEQ ID NO: 26291 - DNA, 592 bp, Glycine max
agcttatcacccttaccggtgattgaaaaatgcttttaatggaagtcaagaacatgatagtgcgccgataccattaactggtcaacaggttcttgagcgagttgagggcatcaatattgtatttgaaaagacccaaaataagggaaaaagtaaaacttccatatggaagaagaggttgatattgcttgatcttccatactggtctgatctagatgtcagacattgtattgatgttatgcatgtcgagaaaaatgtgtgtgatattgtcattggaacacttcttaacattcaaggcaagataaaggatggtttgaatactcatgaagatgtagttgagatgggtatacaagaccacttacattcaagatctgatggtaagaaaatatacttgccttaatttgtcatactttatcctgaaaggaaaatataagttttttttcagtgtctgcaatgtgtcaaagtgccacaggaatactcttcaaatattaagagtcttgtgtagttgaaagatctaaagttagttggcttaaagtcttatgattgccacgtcttgatgccacaactgtttgttgtgagcaatacgagacatttt

SEQ ID NO: 26292 - DNA, 538 bp, Glycine max
tgtaggattatggggtacccatcacatgtggtactattggcggtcgggcgatggtgcacaacaagttttccacatccacaaatcgcgcataaacccaccatcccctgttgcccacctccaactgagctcacgtactcccacgtagcccatatcctcgtttctctcaacaccgggtccccatcaatcctcccaagcttccccaacatccaggtaattcaacatccaaatcatcacaaactaacaaaccaagcaaaacagggcaaaggcagaaaactctgcccaaaactcaaaccaaaaatcacagctttttctcacttaaagaccccagtaacatttccttcgttccaattcgttaaccgttggatcgactcaaaaagtttactggaagtctctagtacataagcatacattttgaccgttgggatctagtagcaaacatccagaactcattctgcactactctttccacaaccaacaaaacatagcatttttctgcacttatgcaaaattctgctgcacaatttcacagcaaaattct

SEQ ID NO: 26293 - DNA, 703 bp, Glycine max
agcttgaaattgatcaacagaagctctcgtttttattaaatggtcataacttgttacacggaagtccgattcacgcgcataatatatcgagacgctcgaaattgaaccatggaagctctcgagaaattcaaatggtcataacttatcacacgaaagtccgattctggcggatagtataccgagacgctcgaaattgaacaacgaaagctctcgagaaatttaaatggtcataacttttcacacggaagtctgattcaggtggataatgtatcgagaagcttgaaattgaaccaaggaagctctcgagaaattcaaatggtcatatctttttaaacggaagtccgattcaggcgcataatatatcgagaagcttgaaattgaacaacagaagctctcgagaaattcaaatggtcataacttatcacaccgaagtccgattcaggcgcataatataccgagacgctcgaaattgaacaacggaagctctcgagaaattcaaatgggcataactgatcacacgaaagtccgattcggcagatagtataccgagactctggaattgaacaacggaagctctggaagattctaatggtcataactttttacatgggagctccattcacgcgcataatatatcgagactttggaaatatacacggaagctcttgagaattcaaagggcttaaaatttcaaccaaaagcc

SEQ ID NO: 26294 - DNA, 506 bp, Glycine max
accttctggtcctcctcatagttgttgcatgagattttatgctctattttcgtctcccactccaagtaggcctccggatcattctttcctttaaatggaggaatgttgagtttaataccatcaattcggttttgtctaggaacaccatcattccctcttctcctcctttcttcttcattatgatctctattctccatttgatccaacctctcatggagtgcatcatctcgttgtttcattaacctctccaaatgttgcatcaaagcttgcatttggaattgcgaaagccccactccatcattaggattagtacctgacatctcaaacaaacaaatcaaacgtaataagacaattatagttgttgtttgaatacctcacccactcaagtgtatcacacaattatggcttttctctaatgaaacactcttgccttttaccactctaattccccttgagttcttaggcaattcaagagattatggccccaaccaagaacaattcaccaa

SEQ ID NO: 26295 - DNA, 606 bp, Glycine max
agctttctcccaagtcctaaatgacatttcttgcttgtattaactcactttaacctccatttaccacagaattcagacttagccttccaactctcaaagcctcactctttttccactcataacatcacattctcactttctaaccctaggttagttctacccttcatctctaacagttttccatcagcaatttcagcatataaacatcacaaacatcatcacaaaaaccctaaaacagaatgggtatgtttaactcatccaaacatggcaatttcaacaagctttcaacaagagtcttcacaaataaccatcatgaagtagaaaactaacaaaactacccatcatatctcccaaaaccccatacccacgaaatttaagagagaaagaagtccacccaaacctgaattttcgaagtcccactcgtagccacgcacttcacgaccccgaaaatgctctcctttcacgatttggggcagaaacgagcaccaaaggttgaagctttgtgtggagcttcaatggtgaatgaaggggggaagataagcaccgcgagggagagggagggctggctgaaaattctggtttgctgagagaggagagaggaaagct

SEQ ID NO: 26296 - DNA, 459 bp, Glycine max
ccttcaccttctggtcctcctcatagttgttgcatgagatttcatgctctattttcatctcccactccaagtaggcctctggatcattctttcctttaaatggaggaatgttgagtttaataccatcaattcggttttgtctaggaacaccatcattccctcttctcctcctttcttcttcattatgatctctattctccatttgatccaacctctcatggagcgcatcatctcgttgtttcattaacctctccaaatgttgcatcaaagcttgcatttggaattgcgaaagccccactccatcattaggattagtacctgacatctcaaacaaacaaatcaaacgtaacaagacaattatagttgctgtttgaatacctcacccactcaagtgtatcacacaattatggcttttctctaatgaaacactcttgccctttaccactctaattccccttg

SEQ ID NO: 26297 - DNA, 552 bp, Glycine max
  unsure (1)..(552): unsure at all n locations
tttcgattcattctatgtacccgtagtggtccacattgtgtttcgtgcatttttattctcgttttgtttactttttataccccctcttgacgtgcttaagccgttttacttaagtcatttctcgcttaacttaaaaataaaataaatttccaccgaacgtttgaattatattatccattaacttcggttaaaataaattccgaccgttcggtcgtgccgtaaccacgttggaaatcaaaaaaaaggtaaaaaaataatataataatcaaaaagacatcttttagtaaaataaagcggaaaatcaatcggacgttttctctttgggatttctcattcttaaccgaattgattaataactaaagtgaaactaaggctaaaatcaactcgcctagtcaagctcgtccacaaaaataggctnttgaagttcgtcatttcaattcctcactaagtaaaatggatcatttttaaagtcccaacgccttaaaatgatcaccacttaagtaaaaaagaatcacttgataagaaagaactacgtaggtctgagttcctcat

SEQ ID NO: 26298 - DNA, 427 bp, Glycine max
cccttcggcagatcaaggagagtggacttcattcattgatgttttagcactgttggtgtttgggatcatcctctttccaaatgtagatgggctagtggatctaacagagatcgatgcttttcttgattatcaccatagcaaggaaagcccggtcgttgttgttttggtcgatgcctatgacacatttgatcagagatgcaagaagagcatcgcgagaattgtctgttgcacacccgctctttatgtatggctggtctcccacattttttgtcatgaaagtacactcgtctgtgccctacaaggtcatcgcatgtgtaccgagaaagggaaagcctattatgaagaactcttggcacgtacggtaggggcctccgttaattggttcctctgatggaaggaaggaggggccggagttttgcgctcctgt

SEQ ID NO: 26299 - DNA, 631 bp, Glycine max
tgctttgcggatttgggctttgccagttgtttgatcgatgtgggtccgaaaagaggcaaattcagtcatcctgcttcgacgaatgagaaaactggggcaaatgaacagggtgaggatgaaagagaaatccatgctgtaattaccattcctacatggaaacttcccaccaacccaacaatgtcattactcagccaataacaacccatctccttacccaccacccagttatccacataggccatccctaaatcaaaccacaaaacccacctaccacacaaccaatgctaaacaccacttttggcatgaaccgaagcaccaaccaaaagggaattttgcagcaaaaagcctgtaggatccaccccaaattccggtgtcatatgctgaacttgctctcatatctactcgattattcaacggtagccataacccctgctaggtttccccgatctccatttttccgaagatacgacctgaacgcaacatgtgcatattatggaggagccctggggcattccatgagcactgtatgaccctgaagctaaggcggcaaatctaattgagggggctggctgacattgagagaatcacttgtgaatcctacacttgcgagcgatccccacatggggcaatt

SEQ ID NO: 26300 - DNA, 647 bp, Glycine max
ttggaaaaggctgttttcaccttctcgctaagccttatgttggcttagcgagcatccgctaagcctaacactcctgggctaagcacgaggaagaatccagaagaagatgagttgtacaggttcactaagcgcaccgcttcagttcatctgctaagtgagaaaggcgcgctaagccaaaaatcactaacgtgcgctaagcgcccaagcacgaacaaggccacctatttaagcctgaaatcagattttgtgaagagagtttggactgggatttagagctttgtatgtctagggtttctagatgtagaagcaaagactttgagattgtagaagcaaatactttgcctttgatgttttgatgatgccatatgatcgtgatgatttgatgtcttatggaaatgcgcttcacaagttgaattcaagacaacaatccgagaatacaagatacaacatcaagaagatgtctagtattttaggaagggaattcccaattgaaatagcaaaaggtttgaccaagatatttaagttaaaaagtctctttcagagatttactctctggtaatcgattaccagaggatgtaatcgattaccagtggccaaaaatgatttacaccagccattaccaattggaattaaactttacactgtgt

SEQ ID NO: 26301 - DNA, 427 bp, Glycine max
ttgataagtgttgttcggactacttctttcaagttgtttttggtggacatgcttttggttttgcaggtgaggtttggaaagtctatatttgacaactttgcccttttctgattgttagataatgcattgaagacaaatgttacattttgtcttttgttgtatgcgtgtgcgacacacgtgcagtactcttgcattcgtgtcacttgtggagtgggcacgtactaaagatgtggtgcgtgggtgagtggggttgcattgtgtgaaaaattagggcatgatttcagctcttgccaattactgaagagtatgcctccactttaaatggagtggacgtttaatttgtgatcactatcacttttgaatttgtggcttatttctcttggaatcgttttggttaccatgctcgggtttttgtaatgaaagaatt

SEQ ID NO: 26302 - DNA, 458 bp, Glycine max
agcttgagatgaggaagtgttgaagggtgatttttcctgcttttattgttgaccacagagtggtacctggagatatgtcgcgggggtcatgagaccttggggacgtcaggtggggtgctattgcccaaaaccaagcttgaccaatcccgacccaacccgggcatagtctgtcagtgagaacctgtgatgtacctaagcaggcgagctcctggcagtcaacagataaaaggaaaacaagaccacaaagcaaggaggcttgtggtggctggccagctgtgaattttgtgtaatatgtggattgtggcctctggtaatcgattaccaagggtgggtaatcgattacaaggcttaaaaatgaagacaggaggctcagatgggctctggtaatcgattaccacggggtgtaatcgattaccacgcttgaaaacgaggtcacgaagctaaagaaacctctggtc

SEQ ID NO: 26303 - DNA, 541 bp, Glycine max
cccttcaagatcgcacaagaaaaagtaaagcttcgatttttttaataaagtggcatccctttagagggaccaaattaaatgggcaaacaggaaagaagaatgctatattcggacatcaaatcatgtacttatagaaatgtggcattgctggatttgattgggtgtaggtagaatagataaagtcacaaaataaaggaaggggggaatattaccattggtccaccgcacagttccaatttatatcgctaccaacacattatattactttgacttcaaataatataatgattaatcacagctatggtaataatatataggctctagaaggtaagttaaagacccctaattaactacaaaaacttgcccaataccacacattaattcacattataaaaaatggcccactttttaaactacacttaaactttcataaattattaattacccctcaatctatatttttggccttaacttcggaaaccttccaaattaaatatttccataaataagaacataacattttttttgcccttaatttttt

SEQ ID NO: 26304 - DNA, 434 bp, Glycine max
ggcttctatagatgcaggctctgcagcatagattttgaatgcccgaagctctgagcaagaaaacctgtaagaactggagatgctggtgctggacggagatgagagatagaaagagctaatgtagatggggcctcagatcttctagccttggatttctgggttcccaaaaagtgaccaaagggccatccaaggtccaaagattctttttaataaagccaaattaacggctgggctcaaagattcgaaggtcagagaatcagatgagactcctcgagccttgcataaggcagttatcaaggctggaaaacatagcctcaaggagtcgggctgagctataaaagagatctgacctgacatgaggggccccaagatcatatccctctgcattacaagcccgtagattaacatagccctatccaaagtaatatctaaag

SEQ ID NO: 26305 - DNA, 467 bp, Glycine max
gacactataaaaaactcacgcgtctacttatgtggcaaggcgggcttacaacattttcttgtctgaaacgcgagctgtgaccactgtgaggtcttgcaaagatgcatctgtccatgtccgcctgaatgggctgatagactaaaccatacttaccacgatttccttgggtatttatcaggctagttatgccgacgatgtctttgcctaatcccatcccgggttcataagcgttccccaacataactagagccatcattactgctgcatgggacagacaaggttgcccagagagggagtccacggaggaaatgctgaccacctaaaaagactggaaagcagtttctaacgatacttctgcggcttccacataaggcatagaggatgggcagcttaccaagatgtctttctcggctgacacgatgaccaagtgccccctcactacgaatttcaaacttttggtggagcgt

SEQ ID NO: 26306 - DNA, 701 bp, Glycine max
  unsure (1)..(701): unsure at all n locations
nttgatgcatgctattccggaccttagaaactcagctttcgtgaaatgaaatggtctagcccttcacactgttgttcgattcacgcgcatcatatatcgagacgctcgaaaattaccaacggaagctctcgagaaattaaaattgtcataacttccacttggaagggccgattcaaaccccatcccttttggaaaccctcaaaatgaaacaccggacccttttgaaaactggaaatggccatacttttcaatccggaggtccaattcggcgcacttttttatggaaaggccaaaaatttaaacaacgacaccttgcaaaaattaaaaggggtattattttttacaccggagggcgctcttgtggaccatcccttttttatttccgaccgttatctatccggggcgggcccgcacaaaaaaaaacgtggtatggtttacctcccacgggggggtgccgtgtcccttaccctttactatactttttactctttatacagaagaacccccccccacaacctaaaaagaaaagggtccgtccctcttctcctcacgttgtttgcgcttctcactcggacccctcacgggagcccccgttattctcgcgacacgcaaccgttctgaaatttcccctcggcaccccgatctcgcccgctccactcccacacccgccacgtactaccgctcctcgctctcggacactc

SEQ ID NO: 26307 - DNA, 460 bp, Glycine max
  unsure (1)..(460): unsure at all n locations
cctgcagtgcgtgctacctttatgcaaaacncatatatgaaatatcttttttatggatgatcaagacagggtgaagaggcttagggagaggatattaaataggaagggaatgccaatggaagtagcgtaaggtttggcctagagatatatgttaaaaaggggtttttaagaaaaattactgtgtggtaatcgattacctcaagatgganatcgattaccaggtggccaaaactgatgtacaacagctatgaaaatttgaattcaagaattgcgctgtgtaatcgattacgcatatatggtgatcgattaccaggaggtattgaacggtttatggcaaatggtaaagcttggaatcgatgacatatgtacgtgagttggaataccacgagaaaattttcagaagatactctcaagacacacatgtttttacttggtttttaaattggccatcaaatgctta

SEQ ID NO: 26308 - DNA, 652 bp, Glycine max
tgtaatacaactcaaaataatgaacaattttcaagcttatcaagcatacacttttttttttgttgttcaggatgtgtatcctgacagtaaccagaatttcaacctagaaatcaggagtagtgtttatgttgcttaaggcttagatagttacaatttatgtttgcttatgctcaattttattggataacacaattcaagagatcttaagacttattttgattcacagatccagccacaactcaacaccacaactcaatttcttcataggcatcatataggaaacttagaaaacaaaaaaaatagttcaatgagactacttctaaaaattgattttggacatgttatgaactaaataacatgcatgaattagactcaaaattcaaatgataggctaagaattgcaagaatactttatcaaatgtatctagaattcaatcaacaaaatcaaaattcaacacaaacttagaacataatgtgacaattattatcactaaacttgactctaagacaacatgaatgaagtgatttacacttagatttttgtgttttcttttctaatcaacattttgccagaaaattgagatctaaaggtttatcaaaagaatattatgacctgaaaaagatagaacctaaaattcataaaaaaacatga

SEQ ID NO: 26309 - DNA, 488 bp, Glycine max
agctgctatttatgctgaaccatcttattattttttttctcgtcgagttctattctaaaaatcagagttttatctgtattactcttacagagagtgacactcctagatccctgagggtattaagaacaccctggcgggtccaaaggacttccacaacctctgtatgtgtccctcgctggaatgacagattctttccttgcatccatcatcacccttgtgctttccgaccacagctccacaaaatccacctctgccctcaattatctggtggccataactcccattttacgcactcaaattaagtgattcttgatcctaaattgaattgccaaaacgagaactttcacctcgttttggaactccctcatttggagccctgtagcttcaggtattgacattactatattactgttcagccaccacttaaccgaggttttacgcttccatttttccatttttgccaagaaccaccttatttaaaacccacg

SEQ ID NO: 26310 - DNA, 487 bp, Glycine max
ggaagccgaacagcggacgctctacgaaaactgcattttttataacttatcacacggaggtgcaattgaggcgcataatatgtccagacgctcgaaattaaacaacgaatactctcgagaaattcacatggccgtaacttatcgcacggaagtccgatttaggcgcataatacattgagacgctgaaaattgaaccacgaatgctctcaagaaattcaaatgggcatagctaatggaacgggaggccgatttatgcgcataatacattgagaagcttgaaattgaacatcggaagctatcaagaaactaaaatggttggaaactgttacacagaagtgcgactcaagcgcataatacatggagacgctcgaaattgaacaacgaattctctcgagaaattcgaatggtcataaaatttcaaacggaagtccgatttatgagcataatatagcgagaacgttgcaattgaaccacgaatgctctcgag

SEQ ID NO: 26311 - DNA, 318 bp, Glycine max
agcttgctcttatcgattaacacacttccttttttacatatgcctcatttttaaaggggaaaacaacttaatttactgaattaccattacccccccccctgtgggggggtgtgggtggtggggggggctagggggggttgtgggggattcgtggagagggggggggaggggggtggggggttgggtgaacgtagggggggggagttgcgtgcgtggtggatgtgggtgggggcgggtgtgggtgtggggggagatggggggggtgggagtgggggggacggagggtgttgggtagggtttgggggggggagcgggggg

SEQ ID NO: 26312 - DNA, 589 bp, Glycine max
tgctggtgcttttggcagaaacgaaaaaaaagggtgatataatagagtagataaacatagaaaagagagagataaagtgtatggaaatagatgaaaaatagagtagaaattgagatgtttgttttaagggaaatattgaaaaaaatagagaagcgagatatagaagaaaaaaaaaacatttgtagtcaattaaacaacttgatgattgatcttccctcaaaatctaaaataaccattatcaaactttataatcaatactcttaatgtgaaaaataattgataatcgattatgcagaaaatttattcggaaaaaaaatattatgtagtcttgaatcgtctcaaccaatatttgtataaggattatgataattttagaccatttaataattttttgtacttgtaaaggggagagtcctaatgttatatagactcggctgaataatttggccttatactaatttagaatagcattaatagttttcaattgatagtttatatttacctggtcttggatatatatatatatatatatataatatatacatatatatatatatatttatatatgtatttatatggggtggatcaa

SEQ ID NO: 26313 - DNA, 662 bp, Glycine max
agctttaacctcattgtctctcacagtctttattatttgggagccaatccaatccttgtgtccggactctcagccacttatgatagtcgccgatgatcccattactgcttcccctaagctctctgtcctttcttcacgccgcatcccatgccttgcgaactccttggagtaccctcgcgttgtggtcactgaaaccccgtgcgatgaaaggcgtgatgctttcgtctaatggcactcctctcatggggtagccaagctgtcttatggcgaggacgggattataattaatacaaccccatgttcccatcaagggaacatttggacatccttcgcatgaagatagaatcctgattcttccttccttctagcgagggaaccaattaacagacgcccctccatgctagccaagagttggtcccaattcgcctttcctttttcgacgcacgaacggtgaccttgtagcggatagacgggcctaccttcttggagaaaaaggtgtgaaaccaaccaaacatagagagccagtgcacaacaaacaatttttgcgctgctcttttaacactcccggtcgaacgtgtcatacatgaccaaatggcgatgaccgggcttttcttgcctgatgaaaagcgaggaaagcgtcaatgctgctaggccactaaccc

SEQ ID NO: 26314 - DNA, 544 bp, Glycine max
tctaaacgatgaattaatcacctatctcactactttttttatggttatgtatgggcagatcaaggatcatactaattccttgtaaaaaaaaaaacacatttaagagataagaattgttagctattacccactttcaaagataaggatgattactcaaatcatcaaccaaccaaggaattcaaacatgtatatgcatacacccaacaaaaataagtgaagataaataagatatagatttatataaagaaaattttgtcaaaataaaagacaaaagtgacaaaaataaatgcttaagcaagataaataagatgcacatctactatcttctactatctactatctatataataaagcgatgtaacactcaaattacaaaattatcctttttaaatttttgacatcttttaaccagagaacttattgtatatttttttgtttttttttcttcattccttctttcatctctcttggacattttttctttttttttttcttggttaaactactcatttgaaccctataggggcacgattcttatattttt

SEQ ID NO: 26315 - DNA, 420 bp, Glycine max
tggagaggattcttcaatggaggaaaagaaagagtattgggggagcacaaaattgaaggaggaaaaaggggagagaagttgaactttgagttgtgtctcacaagactcttattcatcaaagttaccacaagtgttacacatgcttctatttatagactaggtagcttccttgagaaacttccttaagaagcttccttgagaagctttcttgagaaacttccttgagaagcttctttgagaagcttccttgagaaacttccttgagaaacttatttgagaagcttccttgagaagattcctagagaagctagagcttatctacacacacctctttataagctcaccctcatgccaaaaatacatgaaaatactaaaaatgtccctactacgaaaactgctcaaaattccctgaaatacaag

SEQ ID NO: 26316 - DNA, 384 bp, Glycine max
catgcgagcttgctcttgatgtttcctcatttcttttacatgcgtggaacactatacttagccttcattgaacatgcctttgtggcgttggcgtaccacgactctaacgaagttactttcgacacctactgttcgttggtttcaccaatgctgttatgagaagggcgcgacgatcctttgaaaccttattgatacattctgagaggtgcggttggcatgtggccatagtcgacgttcttctctatcgtaagccatcgggcattttttctttgatatgcgatccattcatgtggctttggctggactcagttgacgaaagttgtgtaaattcggatagaagtaatgtgcttgcatggagtgtttgctgcatgcgattagttatga

SEQ ID NO: 26317 - DNA, 469 bp, Glycine max
ttaaatactcagcttataattgcagcagccaatccttgaagtttcctgtttcttcctgtgaaataaaagaaaaaaagaaattaaacctaattttggtcaggtaaggaaaagtaggacaaacttacctaatgcaaaatggcaaggtaaaagtttgccaagtctcttcaatgtggtcatttcatcatctgttagtttaggattcacaccatatggaagaaagcgaaagggctttctataaccatgaataacagcaggcagaagatcagcatcaacaggcaaaggatcacctccccaccaatcagtaaatcgaggcccaagccctgttagcaaacagtctgtatcttctgcaaactctgcttcatctggcagttgaaatcgtactttattgtgagtaccaacacctattattaaagctggttttgctgtttcaccatttgaattttccacaccacatgcccctgaatttttt

SEQ ID NO: 26318 - DNA, 638 bp, Glycine max
agcttgcaaaccaaatgctcaccactactttatgagaagccttcaagttgtttcatataaacctcctcctctatatcaccattaaaaaaagtcattttcacatccatttgttgcaactcaaggtcaaaatgagcagctaatgccaagataatacgaagagaatatttcttagatactagacaaaaagtctctctatagtcgattccttctttttgagtaaatcccttagcaataagtcttgccttgtatctctcaaagttgcctaatgaatcccttttggtcttaaagatccatttacatccaatggcctttgccccattaggcaactctacaaggttccaaactttgttactctgcatggaattcatctcatccttcatggcattataccataaatttgacactttacaactaatggcttgatcaaaagtttcgggatcattttcagctccaatattataatcagattcttgcaaatatacaatataatcactaggaatagcttattttcttactctagtagacctctttaatgctgcatcaaaatttttttggggatcattgtgccgaactaactgttcatcattctcaggaatttgatgatcaactcgatctactggattatcagccacaggttg

SEQ ID NO: 26319 - DNA, 652 bp, Glycine max
tgcatgatttacattctccccctttctcaagcaaattcttaattcttcttgacatcatcaaaatcttcatgatttacattctccccctttttgatgatgacaaccacttgtaggttaggagcaacaacaaagaaaaaatatctatttgcatatagtttactcccccttggttttgcaatgattgcttatatgagacagttgaagatttcatatttttcatatgtaaacaaattgtctcataaacaatagataatttttcttactattttatcttttatctttctctccccctttgtcaacatcaaaaacaaatcatgaatagagaggagaaagatgttaccacttgttgcaatgtatgagaatcaagtgataccaaaagacattaaaacaatcattcaatattaatcaagcaaaaataagtacaatagcacatcaatcaaacacaatcaaatacaatcaatcatcaaacatttcaaatcaaattaattaaatttacaatcaactaactatgcacaataatttctatttaaaaaatattcaattttcaaatttcaaaatacaaatttcaaatttcaaaattcaaatttcaaattttaaattttaaattttaattttttaaattttaaatttcaaaattcaacttccaacttcc

SEQ ID NO: 26320 - DNA, 483 bp, Glycine max
agcttataagaacaaaattgccttaatcactttcaaatatgcatgtgaattaggacgcatcaacaagaatcaagccaaggctattgtgcaagcaatcaatggggcaaaacacaccaaatgattataatgatggatggctcaaattctcacaaaggtaaaatcatcactttcaaattgagctttcaaaactatcatgacatgtagagaagaatcaaggatttcaagtcacaaaatgtcaagaactcttattttcaaaacaattacccatttcttgaacatatcctataattcaaagaaaaacatgcaaaggcgtatgtgcacacaaaattgacccaaaatattaaactaaaaatccgacgaaactaacaacattaacaaattaacaccactaacaaattaacaaaaccatcaaaactagcaaaaccaaagaacactcgcccccatacttaaacaacacattgtccctaatgtagcacatttaaa

SEQ ID NO: 26321 - DNA, 520 bp, Glycine max
tgttataaatgttgtcaacataagggcccttgagttatttagtgaacttgtttgcaagttggtcactaaagccgacaaagttggtgatgatttctcctgaaagcaccttctctctcacaaagtgacagtcaatctctatgtgtttagtccgttaatggaagagcgaatttgaagcaatgtgaatagcatattgattgtcacatattagtttagtatcttgagtgtctccaaattttagctgttggagaagtttcctaagccatgtaatctcacatccagctgctgccatagcacggtaatcagcttcagcactagatctaacaactgttttttgcttcttgctcctacaagggatcaagtttcctccaatgagaacacaatatcctaaagtggacttcctatttgatggtgatcctgcccaatcagcactagaatagcaaacgatgacagcatcacaatttgtatgacaacatttcaatgactatcacatgcaaatgtgatatctggtctagtgacaatg

SEQ ID NO: 26322 - DNA, 592 bp, Glycine max
agcttgtgcattcaatatgctgataagggtgtttcatatgttctcaagactggactaataaatttgctgcccaagtttcatggtcttgcagatgaagatcctcataagcatcttaaggagttccatattgtctattcctccatgaaaccccctgatgttcaggaagatcatatctttctaaaggcttttcctcattctctggagggagtggcaaaagattggttttattaccttgctcccaggtccattaccagctgggatgaccttaagagggtgttcttggaaaaaagtttccctacatctaggaccactaccatcacgaaagacattttcaggcatcagacaacttagtggagagagcttgtatgagtactgggaaagattcaagaaattgtgttcaaggtgtcctcaccaccagatttctgagcaactccttctacaatatttctatgagggacttatcaacatggagaaaagtatgattgatgctgctagtggtagagctcttgctgatatgactcctgttgggctaagaatctgattgagaagatggcttccaactcccaacaattcagtgcaagaaatgatggct

SEQ ID NO: 26323 - DNA, 511 bp, Glycine max
tatcaggtataaactatttaaaatcgtaaggaatttctttttataagattgaactgaaaataaataaattttggtggataaaaatcgtaacaaattgtgaaatcgtaaactcaatgaacaaagagggactaaaagtaacttttcgaaaatttgagggactaataaaaataattttttttgagaactaaaaaatacttaccgaaatttgaaagattaaaaatatatttaagccttaaatcaatcttataaaatcagcttgtaagatgaaagatgtcccacacttatatacactaatttgactatatctctagacaatgtgatctcgaacacaacctctcatgtcaaagataggatatctcgtgcgtgaagtttgcaggattggaagtttatgggtagtgtgatagatgtccggtagagggtggcacaataggcctaacaatagattgctaggataaactttgatatcatcttaaaatgtgggtttgaacctaactcaaccttaaaaactagc

SEQ ID NO: 26324 - DNA, 929 bp, Glycine max
  unsure (1)..(929): unsure at all n locations
cccccccacgcggcccgcggagatgncgacccggggtagcaggggaaataacgagaagcgaagccgcgacaccgcagacaacgaaagngtnttncccctagcaacccccaggcgnncccttggtagacatcgtagaacacgcaccacacagaanaccccagcccaagaanagcagcagcccaaccaggaaaggaaaccgattattacccgcgaaaaaaaaagacaaacaggaaacgacagcccccacagccggatcagaggaacagacaaagaaaagagcaaacccgaccctaatgccaaaagaggcgaacggcgagaggggatgccacacgcgtccttcacaacgagggacacaaacaagacagcaagggcaaggaacaaggaagccacaaccgagacgagaagaaaagcggaaaaggggactcccgacaaacaccgaaaagacaaagaagcgcgaaggaacacaatcaacaaggcgaaggaccagcgcccccgccagaaaaaagaaacgaggccccaagacccggggagcccagaaaggcggaaaccacgtggaacaacaggaaacacccggccagaggaaccccccccggcaaccgggagacgccaacagccgaaaaagccaaccccggtaacgccagccccaagcggctggaaggtgccagacacacagaccacccgaaacctccattcacaacaggggggggccgcaggctacaacacaaggaggtaccacccagggcaaaacatgcgcgcaaaaagaggaaataacaagcgggggcacccggccggggaaaactgccccagagaacaaaggaagggagaccccaggactcgcgcgcgcccgggaagcaacaaaagagcggggaggcgaagagccccccaaagaaacaaggggncccccgcccttgttagaagacgaaagggct

SEQ ID NO: 26325 - DNA, 542 bp, Glycine max
agctaggttctacaataatagctatttttttgtctataatattggggctcgactttaagacagacttcctcacgtcgtgaaagacgagaattctgaacaatagagaaacccacatacctacaatttttgcctaaaactggtcttgggcttttatcatgggaacccttgaattgggagactcaagagacactgtgaaaaagtgcaagcgtcaccttcccccctataggtatttatggccaaaagacatgtcggtcaagaagctattccctgcaactatggcatggatctttatgggaaaatccgctaaagagaaaaaagatattgggcgagacgccgaatgattaaaaaaccttgccatggagcacatggggaatcttattaaatcattaaggaacagggaaaggctgtaatatttatcaacgccaaaatctgagacctgggaaaaagaaaaattctcctcccaagggggagcagggggaaaacttggaaggcatggccaaaatttgttatttccagtctaacgaaggcgctagaagatcagc

SEQ ID NO: 26326 - DNA, 830 bp, Glycine max
  unsure (1)..(830): unsure at all n locations
cacccccaccgcgacacgcgaatagggaatgggggtaagaggaacaggaacatgcgcaaccccgcaaataaagacacacgaaccgccncaccccaccagacggcccttgataacttggaaaacgcgcactctanaaacacaccccccagaaaaagcagaacacgccaacaagaaactgagattttataactgaaaccggaaacaaacccacactaaaagcgaccaaaaagcgagaaagacaccgaaaggccaaaagacaggaaaaagagaaaaaggcccgacaaggcgcccggcgtgcaaaaagagacaataatccaaacaccggtgaataagacaccccctgagagagcaccagaaacaatgttgacactggggaagcccgcggagcagagaactccagcacaggcgcgggcaccggcgaagcccgggggaaccaccactagagaggaccccgaagagtacacccaagaaacgggggcagaccctggggcaaacaccggggcaggctgggcccgggagaaaaaggggtgaggcccaggggggacaccccggagaaaacccccatacaaaacccactgggcaccaacagaaggatccgggggccaaaaaaggccccacccctcccacaaaaaaaaaaaaaggagcgggcctacgggacaagggaacccggggccaagaaagacaacccaacccagaaaaaagggccccgccgaacccaggaaaaagccaaaccgggcataacacaggcgcaacacccccaataggagaaccctgcacaaaaaagaaaccgggaacccggggggaacaacaaccgaaaaaaagaaaaaagc

SEQ ID NO: 26327 - DNA, 457 bp, Glycine max
tagcttgaagtgagaaagcgtggaagagttagtcttcctacttttatttggggaccacagagtggttcctggagatatgttgcggaggtcaggagaccttggggatgtcaggaggggtgctatttcccaaaaccaagcttgatcaatcccgacccaacccgggcatattcagtcaatgagaacctgtgacgttcctaaataggcgagctcatggcagtcaaccaataatagaacaaataccacaaagcaaggatgcttgtgtggtggctggccagctatggatcttgagtggtatctagaatttggcctctggtaatccattaccaagggtgtgtaatcggatacaaggcttaaaattgaatacaggaagttaagatgggctctggtgatcgttaccaaggggtgtaatccatctcctagcttagaaatggaaaaagatgttggagtggcctctggg

SEQ ID NO: 26328 - DNA, 539 bp, Glycine max
  unsure (1)..(539): unsure at all n locations
ttatggtagaatccttcccgcaagagagaataaacctataaaattgacagctaaattactaagtgtctacactgatctaagcctattgagaacttcaggaaaatgtaacaagtagtaggtcaatgaacatcagcagctatatccattgcaccaaaagcaatgaacaagtaaagaatgcaataacttttgtcttatggtttatttttcttggttggtgattttgcttacagctaaagcaaagattgcatcgattaaataaacaaaagctcttcatgtgtacagtaggaaacaggagtttcatagcagattgttaattctgaagttgaaaccatttggaacaaaggaaacacccacttcaaagtcaacattgataatattattgctaaggtttcaaagtcatcactagaccacaactcatgatgtagctggtagtgactagtgacaactgatactcattctctcctggtcagntggtgtatcaacgcatgtgttttattttgtccaatatttgcacaaaaatgtatttatacctatgatct

SEQ ID NO: 26329 - DNA, 591 bp, Glycine max
tgagtcttagtgtatttgctacatagtgcttgtgtatttattgatattgattgatttagtgatattatgttttgatctttgaatacgtgaatgatgtgaaaatgaatgagacgtgttgtgttgtgatgttatgcgacaaagtggtggaattaagtgagttatgtttaagtaagttgtatctcatttacatgacatgtatatctagttgtctcatttctctcttttagttaggaatgtgataactcactccccgtgtgctatttatgtttggatcttgtgatgatctcgaactttgtgttcgttggagcagatggttaggtgaatggctatggagaacctcatgctagaagacgcaagaacacaatgatctgataggatgtgacattgggatataggtttgtatattaattgcatgaagtcttggacggtcttgtttgagccgagatgattttattatttattggacacgttttattatgatgagaaaaaaatgaatgtgagtcttttacccttttgaaagggatttatttaaatatggtttaagaacctttaattaattataatttctttttcttttattaatagtacata

SEQ ID NO: 26330 - DNA, 616 bp, Glycine max
agcttaacggtattgattctgtgatattcctcttgcaccaaaaagataagaattctgttagcagaggatagtataaataagtatgtaaataaaatcagaatcataaatgagaatatatttccttgccttattccttctccccttccttctatggaggccctggtcctcgaaaccagctaattagatctccccccctaacagtcaatgtgtttgattgcgagaaggacatcaacgtgccagttaccgttgttttcgtggttgaaaatcgagcccgaggagccagagtggatcgtttccttcatcttgtcacagagtgtgacgacagatttagacaaatccgtgatggtggctgcgatcaaatccaactttgaggagtgggtgtccagtttcgtggtctgtgctgccatggtggtcgcgtgagactgaagcgtggacttaatggcctcaagctctacttccaaagcgtcaagtctctgagaagccatccttgtacacgtacacgattgaggtgaaactctcaacgaaagcaccaatgatacatattgtatcaagggtatctggagaaaatggaaataacagttaaggaagaagaaaaaaaggttccagacgctataac

SEQ ID NO: 26331 - DNA, 650 bp, Glycine max
  unsure (1)..(650): unsure at all n locations
ttagaacaagctaaacatgcaaactaaaaactgaaatttaaaactgaaacagaaatataaacccaaattataaagtgtactaaaagcaggaaatgataataaaagtgttcaaaagacaggaaaataggataaaagtcctgtcatgggtcctgtcgtgcaaaagggacataatccatagctgctgcatcatcctcctccttagagagctccagtaccagtgttgtcactggggatgcctgcggagtagagagctccagcacaggtgtggtcactggtgatgcctgtggagtcgtctctagagtggcctccgcagtgtcctcctgagtagctgggtcagtctctgggtcaacctctggcatgtctggctctgggatatctggtgtggcttctgggtcgacctctggatcatcctccttagcagcctctggctccacctgaggttcctgggctacgaaggcctcacctcccccaaaagaagaaggttggtctcttggctaggtcacctgtgccatgaagtcatccatgctgataaaaggcccatgctgagccgagtcatgcatactctgcatcaccaggcataagccacagtggatgctctgcaacatangaactgtgacctccgtgcattagcactgaaatgatgatgatga

SEQ ID NO: 26332 - DNA, 695 bp, Glycine max
agcttgccttgccccttgatatatttgagggtctcatggtcactatgaatgacaaattccttgggataaaggtagtgttgccatgttttcaaagcccgtactaaggcatacaactccttatcataagttgaatagttaagggtaggaccacttaacttttcactaaaataagcaattggatggccttcttgcatcaacacagccccaatcccaacatttgaagcatcacactcaatttcaaaagatttttgaaagtttggcaacgcaagtatgggggcattagttagcttttgcttaagaacattgaaagcttcttcttgtttctctccccatttgaaaccaacatttttcttgagcacttcattgagaggtgctgccaatgtgctaaaatccgtctataaaaacttgctaagccatgaaaactcctcacctcggtcacagacttaggtgtaggccattcttgaatagccctaaccttctcctcatcaacttgcactccttttgaactcacaacaaaaccaagaaacacaacatggttagtacaaaagatgcatttttcaagattggcatacaattgttcttttctatgcacaggcaaaaccagatttaaatgatcaatatgccaatcaagtggcgtgctatagataagaatatcatcaaagtacaccacaacaaacttgtctatgaactctctt

SEQ ID NO: 26333 - DNA, 630 bp, Glycine max
tttaaccttgacttggtagaacctcttgccggtttgttttgttcccatgcttgctaaagtgagacaaaagctggtgcaaatcaaaactccgatatctcatgggtggaatggatgaatgcatgaaggaatgcatataacacagatgtaatctaggaatgcgggggtccggggaattcgtccccttcttagacacaatgtctaggggtagcaaagtgccccaacgtacgtttttaagaaggcgacacggaccctccgttggtttgtatacagaagggatcaagacagaacccatatgcgatgcctatgcaaaagacacaatgcgggaatgtacacagtatgataatattcactgaacataagcaaaagggtatatgatacttatgcatggcagtgtaaaaatggcacgcagcgtgtttgctccgtgcccctatttaagggacctataagggagagaactaactaggcatttagtgataacccccaaggtagtcatatctcttttgatggtttctagaggtatcattctctttgaaaaatatattgcagcagtagggactactagcaacaataagcttttaaagaaaaaagctctagatgagggttcactgttatcaagcaagtcggagacct

SEQ ID NO: 26334 - DNA, 649 bp, Glycine max
tgtgcaaatcaagtcactcccgcattttatctctagcatgcattgtatgttggtctcgtcctttgtcacgggaagccggaaggtccatatcaccttcttaattgtacacatggggcactgcgcccccaaatgcacaagtaagaagagataattttccgggctctcgtgtccgtaaaatgcattcatatcatgcaccacataagcatctcttcataacatcataatggacatatcctgcatttgtccgttatcatattccagcctcacattttgcatgagtcatggcatcatcatgcatatgcgttcaacaaactttttgatctgcaaaattgcataccatttgttttcatgtttgctcatccttgcgttttcctctacaaaacaaaaacaaaaaagggggaagcgtgaaacttcacactacattcttagtttcatgtgttaggcaccacgagccaaccatgttgggatcataaacccgtttcacttaaaaacaaaataattgaacatggtacctaatgcatggttaactatgaaatggtgtttcttcgggcatctcaatttcataattacattttccatgcataagcttaaagtatgcccgagtcattcatccctgtgagatgttgttgaagtattggcgatcagaatt

SEQ ID NO: 26335 - DNA, 346 bp, Glycine max
ctctatagaacactcacgctatgcagccgccatgaattgaatggaggatcttcctttttatcgaaggcgaaacgggctcagcttctaacactgtggtagagagagaaaaacgacatgtttatgtaccatactattatattattattatataccgtaatcatctacgaagtaagagatccactccgcaaccggaggcaaatcactttgcgacacgggtcttgaactcgggcaacagttttctcacactgacctatgttggattggggaggaaaactaatctaaacacgtgcttgagaacattaagatacaagtgtgtattcttagaaggataagatgaaaagttaac

SEQ ID NO: 26336 - DNA, 631 bp, Glycine max
  unsure (1)..(631): unsure at all n locations
tcttaaagacaaggaaataggttgggagcgtaaggtgatttaggctaaggattatgccacgcttgcttggattgaggtggggaagctgaaaaagtctttacttgagaagaaccatattatagatattgagaggtcggttgaggtgaaagtcgagggatttgcgtccttagctaaaggcgaagtcgtagagcagcatacgaaatggtttgaaaaggctaagagacatgtcatcttccttggttttactaatgtagttgatcttgatgtcattaaagatgtttatgactgtgaaattaggccccttgctgaggtatcacatggcttccatgatacgcctgcaactcacgttaccaatgttgctaagccagaagtggaggcttttgaggtgccatctacccctaccaagacttgtactacgcactcagaggagattggcgaaatgagcaagaagaggaacatgtctttgacagtgatgaggaggcttangatgttttcctattgcttggctactaagtgcattttgcattggtatgttttatttattttgaaagatgttgaacccatgttatgggattttgtaatggattgaatcttttgtttgtagggaaggatttctaaaggttggaaactt

SEQ ID NO: 26337 - DNA, 626 bp, Glycine max
agcttgagcttcaacattctataattaatttttataatttctctttttttgttaacatttgatttcattctaatatatccctatcgtctccacgtcatgatactggcagaattgatgaatcctatagctagcaaggtatatgtaacactattatctttctttattttatgtagttagatttgaacttttttattgttaggtaacttgtttattaattatattagttaatttttttttcttctctttcttgttgagaacaataactcttgaggttacttgcacataaaggaggtaaattgcacaaaaaggttaaagagttcataaattgttcaaattacatatcctatttgacaaagaataaaacctaagtttgacaacattattttgtatccctttttcatgtatctcttgattacttcattcttttgttagcattattttatgtcttgactttcatggaatgatttggtattgtatagattaattgcataccagagagttggaaattggtgtatataattcttcggaaacatttggcattatgattttattattttcattactataatcattatacatttggcttcaaaattgaatgactttggtattgttggtacctaaatata

SEQ ID NO: 26338 - DNA, 645 bp, Glycine max
  unsure (1)..(645): unsure at all n locations
tgttaaagccccttttaatgcatctggtcgtgtatttttggaggtattccccacatttgttgctcagtggtttacgattccgtgcacgtctgtcaaaacttgttttgtagcactttcatgataaatattgaagagtaatattatgtctttttactattcctcttaatattttatgaaaaggatgttaaatgacatagtaaattaataatgtaatattttgacatctttaaaagctttcaatattttggttgtcgtctaataagtaagaaagatttagaattgtttaagaaaactctatccaattataaagagataaaatagaagtgaaagtataaaataagtatataattgttaataaaaaaaggtaataataaaggactgcaataaaattaagtttatacaaaataaatcttaaattattataattttaactgttaatttttaactaataattattagtatactttatttttaaagtcgactactcaagagtcaactcctataacagaaagtgttgcctaattaattgacaccaaaaatagtgttttctaattagataaaaaccctatgcatcgaacatgcacgatgcctctcttcgtttagagtagatggggaatggccactanaattccatttttgtacaat

SEQ ID NO: 26339 - DNA, 653 bp, Glycine max
agcttcttctgttccaaggaaggtgagatttttatatccgaatcttgaagtgagatattcaagtttttattttgttgcacaacaaaataggtctaagatttttagtcctgccaaacttagacttgtaaagttttctggtatgcttctaatcttgtcattcttgcttctaaattaatgttgattgtgtgatccaggacatatcatgtatcaaggatctaacatttctatatgaagttgccactattgaggatatataccgtgcatatgaacagttgaaagtggatgagaattctttatattcatgcattggaattgctggtgctcaggctgcacaaaaaatagcaggtgtagtaatataaccaatggctaatattggatcttcctttgctaatttctccaaggaattttgaaacttaaatctttcatcttttcctaatttgagcagtagctttgacaattgtttcaatttctaaggttgaacttgagtattaaaattttatttttcgaaagaatatttcacacttagaaagtgaaacatgaatattcccaacataacaagtgagaaaatgggatccccatcttggccttaaactttgatgccctacatagggcatcaacacaattttttcctttaaaacttgaaattttgaact

SEQ ID NO: 26340 - DNA, 648 bp, Glycine max
tgaagaatggaggaacgagaatgtctcatcaagattttttagtagtgatgatttagagccaggtaacatggaacatggaatagatgctactccaataacctattgtgcagaaaacaatagcctttccaaactgcgtttgcaatcaaataagtttgaagtatctattgggggaaatgatgccggtccgtcctcgcaggctaaggtcaaacctctaaatttttttaactgtcaggaaagcagcaaaaataacccagtggagactaaaaattattccatcttgggccatagtaaggacaaggaagaagtggcatcacattcatcttcaaccaaacgaaatacagatgataatgataacatcgattccaatgcactacctgatagaaaggaagaagagaatatttgtcacagaagagataatctgggaagtctgtggataactcgtttttctccaaaattcactgctcccttgagagaacaacctgccaatgacacagaggcctgtactgatcttaaggaagaatagggaaataatgatcataaatcaatgtatatgttcaaacccctttcatctttcccagggctcaaaaatttagagccaatggcttcaatgtttgcaaggagatttagtgccatcaaacatatcatacc

SEQ ID NO: 26341 - DNA, 687 bp, Glycine max
agcttgctagaataataatatacctgatggtttcatacacttcatctagaatttgtttattaaactgtatctatctcataagtgacattactagttaaaaaaatgttaaggtctattagtcatgaaattcatatattcagttagttatttccttgttttaattcaaacatttgtatgttctatttaggcagtctagctgtctgccgtgtttacttgaagttgtcatatttacatgatatagttttggctgctactggtagcaactacaactgcagacaaaacccactgtcttcaggatctgaatgaagagccaataaattttctttttttgtttttcaaagttagtttaatatatttgttaattcgcataaatattccaaatgtttaataatattcatttaggtcttgatatatctcaaagtttcaaaaatgatatgtatcatcatttacaaatgacgagacatatatctaagtatatcagatcttagaatgattgttaatgtgacatatctaaatgcatgtcttatcatcattaaatgatgatagatactatttaaaataaataaatttatgaggactataattgacaaaagaattttttaaagactaaaatcaaaattgtcatatttgtgaaaatttaaaacatatttaaacccttcaaaggtttattcattaatatacctgcaa

SEQ ID NO: 26342 - DNA, 515 bp, Glycine max
tgactaggcgagtttattttagccttagtttcactttatttattagtcaattcgattaagaatgagaaatgccaaagagaaaacgtccgattgattttccgctttattttactaaaaaaaagatgttttttgattattatattatttttcatctctttttgttttccaacgtggttacggcacgaccgaacggtcgaaattcattttaaccgaagtttacggatcatacaattcaaacgttcggtggaaatttattttatttttaagttaagcgagaaatgacttaagtaaaatggcttaagcacgtcaacagggggtatgaaaagtaaatgaaacgagaacagaaatacacaaaacacaatttggaccaccacgagtacatagaatgaatcgaaaagcatggttcgaggtacttacccgttgaagatcgaagaacgaatgaagaacgtcgaagaacggttgaaaaccttcgcgaaattcctcacggaaaacgttacggaaacgtttcggaagcg

SEQ ID NO: 26343 - DNA, 579 bp, Glycine max
tttacctctcgttttaactctcagcatctcctgactttcaatgtcaaagataaggcaatgttgattttcaaaaaggatactttaaatcctttttctatcaactaacctacgctaagaaaattttggtcaatatcgagtacataaagaacatatgagattgtctttatacctgaacttgttgagattacgatggctccttttccttttgccgaaatataaccaccgttcccaattctgatttttgagactttagtaggcttcaaatccttgaagagtgttttgtcatatgtcatgtggtttgtacaaccactattaatcaaccagcattctgaactactccttgctgaaaaagatgttgccacaaacatttgatcttcttcatcttgctctatgacctgcgcattgacttcatgctgtagaaacttgcttttgcacataacaacttcatgtacaaactgattgcatttgctgcactttgcatctggacttctcccgcatttgaatggcgggttacccattttgccacaatggtgacaaagtgggtaattttttcttatacccttacctttactttgggca

SEQ ID NO: 26344 - DNA, 465 bp, Glycine max
agcttcattaaatgtacatactccttttttcttcaaaccaccttcctccttaggtaaacatatagtttcccattttacccaggggattttcttgtaatccttggcttccccccacagaaaattactttgcagagttaccaatctatgagctacctttcgagggatcttgaaaaaggaaagcaaatatattggtaaagcattgaccaccgaattgattaaagtcaccttccctgccatggaaatatttttctgtgcccacttagataacttggatccatatttactaatcaaaggttcccacaccatgttgcttgaaggtttagccccaatcggaattcccacataatataaaggggtgtggagctgcctacatttcagaatttgggcagcatgattcacccaattgactctacctcatataatcccaaactggctttttgcataaataatcttcagacctgaggc

SEQ ID NO: 26345 - DNA, 601 bp, Glycine max
  unsure (1)..(601): unsure at all n locations
tgagaatgtgcctatgaattggtttttagctatgtttataaaccagccctgagagaatatggcgagtgaaattccgaatgacagattctattagggcaccacaatgatcacggacatatttattaattgaaccaggatgaacatattccagataaatataaaaacggtgctcaacctgcaagcacatatgttaagggtttaatgctggtacagaataatgattattaatcttgagtagctaattatgaagtaggagattgcttactatttcactgccaaaatactgtacgatgtttgaatgttttagattnctaagaactttaatttcctggagaaaaagaataaactaataagaaggataaagaggatatacaaaataacatatcttcaaaactattacggaacgataaatatatataggcaagcagcccaagccattattaataaaaacaacctcatcaagtattcaactacagtggacactaaaaccaaatgannnacctcacttgcaaatatatgatatcggccaaggcctacaatatatatatatatatatagggaaattaatagactagttaatctgagctgaacatcttaactg

SEQ ID NO: 26346 - DNA, 454 bp, Glycine max
gagcttatgaacccaactttttagctaaattctttataacatgctcatgactatgaacccaaaatttggttctataattagaaaagcatgaaaataaggacttgcttgtaagaatttgggctggcccatgattggttctttgcacttaagtaacgtgggaaatgcttttaaatggggtgacgatatatgtgtaaatataacgggcataaaatttctaccaaagtgggaatgattgtcctcctaaatgaatgtatgatagcacggaattcccttttgaatgcaagtgtgggcataatgtaaatacgcttgccaatatgaataaatgtggatgaaacaataaaaaacattttgaatgatatatatttcaaacatatgtaagtagtttggaaatagcagatgtttaggatataaattaaggggtaagttagacgcaaccacttgagcataaaaaatg

SEQ ID NO: 26347 - DNA, 557 bp, Glycine max
tgaaaaaataatgaagaagaatggcttcctctccctcttgttaactcttgaaaatgaggaagaaaggccccaaaatttgcttttaaagaattatgaagataagatcaatgacttttgcctgaaagaaatttgataaagccttattgacaagcttaattatcaccaagattgaatacttggaagccaagtttaatgtgccaagacatgcctcttataggtgttattgcttttgaaattttagccaaaaatggaagtagacataagaaaaaatggtaaaaactacttttgctaaaactggtaaatcttatcttaaatgtaagattaatgtgctaacttcctagattattttgctagtctccctaggaaaacatgtactcagagtaaacttcacacataatctactcatacaaagacaaattacattgtgactcagtgtgcagtgtaattcttgcaaagatgaaaatctagctcagacagtttctatttctctatcaagtttcactaaactaaacacgaaaagaatgttaaaagaaacatataatcatggtcattaaata

SEQ ID NO: 26348 - DNA, 674 bp, Glycine max
agcttattgcaaaaatgtatgagctggtatgattaaccaacgcctgagagcctgtcaacagttccagaacgtacataagattttggttccatgtatgaaaagataaagaatttcatgtaggtgattggcacattatgcaagtttatattcacctgagtgcatataaattgctgccaaaacagaaacaatataattgagcagcaaaattccacaaccaaggaaagcaatgttccgaactcctaattttgtagcaaagagttgatatctgatacctgaagctagatatgacatggcgatccatattagatacagcacctaattaaaggttggaagcagattatgctttatacacagaacatacacacgcacgcacacacacacacgtatatgactataggtacatacacaaatgcaaatttgttgaaatagacgtgaaatgcgatatcagcaacccgggcacccgggttaattagaacagtgcactagattgtttacctactggataccaaacttacttgcgatcaccttcgacatcaggaagattttttgtttagcaattaccagcgcaaaaatgttcaaatgtggtaataaaacccaagaaactgcgggcgaaattcagagccaatttttattggtcccaaaaaggaaccaactcctaaaaaaacttgaatgaa

SEQ ID NO: 26349 - DNA, 576 bp, Glycine max
tgttaaagaacttagaaaaaatcaagaacaagcttgtttacacatcgttcgcgtgtatgatatccactccacacggattgaagtagaggagaccttcaaccatataacgcaacgtggcggacaaaagtgggcagttaacttgaatggtcatcattgtcaatgcggaaggcattctgcgcttcactatctatgttcacacattattgcagtttgtggttacgtgagcatgaactactaccaatatatagatgttgtttacacaaatgagcacatcttaaaagcttactccgcacaatggtggcctcttgggaatgaagcggctattcctccttctaacgacgcatggacacttatccctgacccaactacaaatcatgcgaaaggttagccaaaatcaacaaggataaggaatgagatggattggcttgaaccgtctgagcaccggtgaaaatgtagtagatgtgaagcagaatggcacaactggcgacgatgtccaatgcaatctgagcgtgggagtttgtcatttaattgatttatgtatgaaaaaacgaagtcttgtattggttaaagttggct

SEQ ID NO: 26350 - DNA, 624 bp, Glycine max
agcttgatttgtgagttgattttagccttagtttctctttggttattagtcaattcattcaaggaaacttccaaagaaaaacgtccgattcatttttttattattttattcaaagatattttgattattttattattattttgctttttttggtttaaccgaggttacagcgtgaacgatcggttagattttgctttaacagtgattaaacgacattacaacacaaatgatcagttgaaattcattttatcatttattaggtgagaaacggcttaattaaacggttaaaagctcgttaaaaggggtacggaaaataaacgtaatgaaaataaaagtacacaaaataagtagggaccactaagggtgtatagaatgaattgaaagattcgatttcgggaacttactagttgaagactgaagatagaacaaagaacggtgaagaacgatgataaacgatgaagaatctccacgatatcgcttacgataacgtctcaaaagtgttaccgaatcacctcggcttggatttttttcacggaacaatttttctcactaatttgagagattatcaataccagaaaggctgacccatttgctctgccctccttccctatttaatagataaaa

SEQ ID NO: 26351 - DNA, 597 bp, Glycine max
gacctataaaactcacctattaaagacataccagcattttattgaaccgtttttgaccacaatattgggcccagacacaatatacacaccctattccaccacataaaagggtacaaagaggaaggccaaagaaaaatagaaggagatcggtagatgaggacaatgtcacaggacataggctaaagagaaaattggctgactttacatgtggaaggtgtggccaaaccaatcataacattagaagctgtaaaaatattggagttcctgttaggccaaagaaatatgttgcaccatcaacttcaaatgaggacaaccacctattatctcaagatgaacaagctttgaatgaggctgaagaagctgctgctcatgttcaacaagatccggtggagattaatttatctcagcctcatttgtcacaagatagtgacatggagttgatggtaaatatttgtcacaacaaagtagttttatctcaacctaatttgttgcagcactccatttttatatattataattattcatgtttggcatttgcaagtatgtccctgcaactattgtttcaccaatagcaaggaataagctaaccataacaat

SEQ ID NO: 26352 - DNA, 578 bp, Glycine max
agcttccaacttatgagctaaaaccaacaagtttttctcgctttcaatgtgtgctgagaaaaatcacacagacaaaaggcgtagcttagtgagagagagagagttagcaataaaatatagtaataaatcattttaaaaagttgcttttgcatgcgtgtggaataaaatagagcacgaaaaataaaaaattctgatacttgcggtaggtgatatttatgcttggcggctcacgttttattccgaccttagggatatactaaattctatggaaaccataaggttgttttaatggggtcattattcttggagattaatgtgtattatgggctcttatattatagctacaactttctataaataataaagagctattccgatctccttctttacttaaagcaccttttctttctttctttttaaattctttttaaccctccctctttttgaaatattaaacatgtccttgtgttatgaaaccatcatttttctatttctgtccctatgactctattttaactcccctaagctggctttttccatttggatcctgccaaatttttattccttactaccccgta

SEQ ID NO: 26353 - DNA, 588 bp, Glycine max
tagaggatcactcaaactgggtgtatttgcctccattgtctacactccgaagagtccattagggcctctccctcctgattcaggtccaacccagaaaacattttaacacacaaactctatgaactgtacaaaacacacgactcatcaattgttctcacaataattttatcttgtcgcgcttgtgattaaacttgtcgggtccccatagtggttcccatcataatattcgtcgtgcattaacttgtcgcccttaaagagtcttatagtcgtgtgattgtacgattcatagctcataactcaatgcacacaacatctcaatgcacatgtattacaagtcaatacatactcaatttatcacatacatttggtctcaatcacaatggtataatctcaatttaacatgttatcacacctcatgaatcatatacactttaccaatgaactgtgcaatacacacaactgctcaattgtttttaaaatcattttaactcattgtgcttcaaagtgattcaactcgtcgggttcccacagtggatcccatcacgatactcgtcacgcaaaaactcggtgcccttgaagggtcttaca

SEQ ID NO: 26354 - DNA, 735 bp, Glycine max
agcttaagaaaaagcttaacaaacttagaaatcttgtgatcatgtattccgaaatatagggggagaaaacggatgcacgttttatctatatacaattgtttgttgcttgcttgaatcttgatttcaggtattgtattgtcatcatcaaaaagggggagattgtagatgcaattggctttgatgttttgatgatgatcatgatgatgtgttgcaattgatgcaaatgggcttttcaagattaaaattcaagacaatacttcaagattacaagtcacaacatcaagatgatcactagaatattaggaagggaattcctaattgaattagcaaaggtttggccaagtgatttaaaataaaaagtgtttttcaaaggttttactctctggtaatcgattaccagaggatgtaatcgattaccagtggccaaatacgttttataacagctataaaaatttgaattcgaaattttaaaagctgtaatcgattacacaattgtggtaatcgattaccagcagttagtaaacgttttaattcaaattttaaaagctgtaatcgattacacaattgttgaatctattaccacacaggaatttcagaaatatatttcaagagtcacaacttcttcaaagcttttactatgaacaccaatggcctatatatatgtgacttaaacaccaaattgcccacaaatttttctcaacaacaaagtagttatccttcaaaaagcaatttttt

SEQ ID NO: 26355 - DNA, 613 bp, Glycine max
cgccaattttggtctagatctaaatagacaattaattttttttttatgatgttcctcaatttttatcaaatgctattttagtggatgtgagttatgttgctttttcgcagatttttaattgttttttgggggtaatttcccctccaattcacccaaaaaaatgttaattgttatggaactattaaatcaatgcaaaaatggcagaaaaattaatataaatagataaactaagaaagcataaatctaatatgaacaaaaaaatcaccaactaagtcgaaaatgctactcaaaagtgtgatgtgaacatgtgaattgcaacaccctgaaatggaataaaacaaagaacatctttcagcgttggatgttaaaagaacaaaataataagccaataaatgttgaaccatataatgataataaaaaaatgtttatgtctatgcactaatagtgtaaaataattttatattgttatccaatcacaaatcacccttttgaattactttaagataattactttaaaagtcaacaaatttcccatgcatggtgtcttatgacatgatgtctgggttaaacattttacattggcagtgtataaccctttttcttataaaaaaaa

SEQ ID NO: 26356 - DNA, 374 bp, Glycine max
agctaatcacatattaccttacgaacgttttcttgcacaagacatgctatggacggagagaaaagcacccatatacaaagaatgcagcttcattacgcacatgatttacatgagctggcacggaggagtgggaacttacatcacacacatctccttggctggatttacatacatgcgtactcaaagcattttggggtaccaaaaatagcacatgcgctcatcttggtatttctaatacctatacatataccaaccgcatgatgaatcttgactacctacacaataaggggctacatttcatgcttttttttttttcaagtgttcgctacctaaagccgcatgcagattcaagcatattttccttcactgactag

SEQ ID NO: 26357 - DNA, 566 bp, Glycine max
  unsure (1)..(566): unsure at all n locations
tgtattgtcactcggatcttgactagttataactttttgaataaaatgagtttatcccatgtttttgctccaaagtcagtgcgaatcaaatcactcttgcattttatctctagcatgcattcattattttttttacctactcctcacgtttggttttttaggaaaaacaccataactaaacgcgccccaaggcatccctatcgcaccagatccaaatctagaacgatgggtgatcaagaggagacacaggaatagatgaaagctgacatgtcggctctgaaagaacaaatggcttccatgatggaggccatgttaggaatgaggcaactcatggagaaaaacatggccaccactgctgctgttagttcggctgccgaagcagacccaactcttctagccaccgcgcacaatcctcccccaaatgcggtaggacgaggaaggagcacactgtggcacaacaacaacccctatttgggatacaaccaggtggcttacccttatggattgccgcctagttacacgccgncagtcatgtatgatgacgcgggtcatgtttcttcccccat

SEQ ID NO: 26358 - DNA, 453 bp, Glycine max
tgcaagcatgcaagcttgctctatatttacattggtgtttgtttttatgggaggagggtgtatgccgcttttgtgttaaaattagtgggcaactgggaaaactaactttccaaattttcgccttcgcacgaaaagtccccgcagaaggctgccttcaaaaggtccacgaaggacaaagcatccgaaggaactagttccgctccggactatgacagtcaccgctttaagagcgctgtacaccagcaccgcttcgaggccatcaaaggatgatcgcttctttgggagcgacacctccaactcatggacgactagtatactgatttccagtaagaaatatggcgccggccgtggtcatcactgggtactcccacgggcaagttcgatccaaaaatagtccttgagtttatatgccaatgcttggccaacagaggagggcgtgcgtgacatgagatc

SEQ ID NO: 26359 - DNA, 484 bp, Glycine max
tccttaagaagattcctaaagaagctagagcttatcttcacatacctctctaatagctaagcttacctccttgagatgagaagctagagcttagctacacacctcctataatagctaagctcaccccatgacaaaaaacatgaaaattcaaaaaaaaagtccttactacaaagactactcaatagaatggccaaaatacaaggcccagacgaaggaaaaacctattctaatatttacaaagataagcgggctcatacttagcccatgggcttgaaatctaccctaaggctcatgagaaccctcaggccttcccttggatctctagcccaatctacttggagtcttctacccaatgcccttgtggggtaggattgcatcattccctccaccttggaaaggatttgaccttaaatcccgaggttcttcatactctgggctccttccctcaacacctgtaaaaataacaaaaacatatgtattagtg

SEQ ID NO: 26360 - DNA, 287 bp, Glycine max
agcttgggtccaattcaaacagccctaacttttgacattgagatgctagaaattgagaaatggaagttcttgagaaattcaattggtcataacttttcactcggatgtcagattccagagcaaaatattcagagacgctcgaaattgaacaacggatgctctctagaaatttaaatggtaaaattttttcacatggatgttatattcagacacataatatatcgagacgttcgaaattcaagaattcagaaattaaaggtctcaagaaatatagagatgaaaaattt

SEQ ID NO: 26361 - DNA, 619 bp, Glycine max
tcatgagagagtcaaagatcaaattgagaggaattttttaaactatgctaaacaagccaacaaagggagaaagaaggttgtcttcgaacccggagattgggtttgggtgcacatgagaaaagaaaggtttccggaacaaaggaaatcaaagcttcaaccaaggggagatggaccatttcaagtgcttgaaagaatcaatgacaatgcttacaaagttgagctgcccggtgagtataatgttagttccaccttcaatgtctctgatttacctctttttgatgcagatggagaattcgatttgaggacaaatccttctcatgagggagagaatgatgaggacatgaccaagagcaagggcaaggatccacttgaaggacttggaggacctatgacaagggctagagcaaggaaagccaaggaagctcttcaacaagtgctgtccatactatttgaatacaagcccaagtttcaaggagaaaagtccaaggttgtgagttgtatcatggcccaaatggaggaggactaaatgacaccactttgtttcaattttagagtggttagtttgtctaaataatggcccaatccttgtaaagttggctgacccaaaatatgttttggg

SEQ ID NO: 26362 - DNA, 499 bp, Glycine max
agcttgctctaaatttacattgatgtttgtttttatgggaggaggttgtatgtcatttttgttttaagagtagtgtcccactggtaaaactaactttccaaatgtttgccttcgcaggaaatggccccgaggaagcttgcctcaaagaggtccaggaaggacaaggcatccgaaagaactatttccgctccggagtatgatagtcaccgctttaggagtgctgtacaccagcagcgcttcgaggccatcaagggatggtcgtttctccgggagtgacgcgtccagctcagggacgacgagtatgctgacttccaggaggaaatagggcgccggcggtgggcatcactggttactcccatggccaagtttgatccagaaatagtccttgagttttatgccaatgcttggccaatagaggagggcgtgcgtgacatgagatcctgggtatgggttagtggattccgtttgatgccaacgctattcgccaacttctaagata

SEQ ID NO: 26363 - DNA, 505 bp, Glycine max
tttttgctgcaaaattccttccttggttggtgtttttttttgtgctaaaggtggtgtttggcagtggttgtgtggtaggcaggctttgtggctgacctattgatggcctttgtggatgattgggtggtgggtaatgaggagggctgatattggctgagtaatgatattgttgagcaagtgggaaatttggccatgtaggaatggcagccagaacatgggttccttgctccttctcgttctctctatttgccccaggctttttacttgtcaaagcgagacaatcaaatttgcctcttctcaaacccacttcgacccttttaccaacgaacactaaatcagtaaagcttaaaggcatgtaacccaccatcttctcatagtaggacactgataacgcatctactatcatcgctttcaactccctctccattattgggggcactacttgagctgccatatccttccacctttgggcgtaccctttgaaagattcatgctcccttttgca

SEQ ID NO: 26364 - DNA, 646 bp, Glycine max
agcttatcaatgttccagtttaattattcatgttctacctttgcctcacgacctccttcatctttctctatgcaaagggagaaacctacattgttggtgacaattatgggtggtgatgttctatgtaaagttagagtttcacagtaaaaaatatgtcaacatcattattataatattttttattggtaaaattaatgtgagacttacaaaattaaaagttgaactctcacgatttaatgaatttcacatattgttaacaatctctgaatgatagaaacaatatgtttggttatgcatccgaaaacaccaagagacttgtttgatgtctttgaaagtagtgtcaaacatgattattggtgttaaacacaattcatcattttattgaataaaaagtcattttagattttttagtgcatattaaaaggaatcaaaagtggaaaaaaaattatgataaaaagtactaccaactatattgtgatttttagtaaaaaatttgtcacttacttttgtcaaaccttcgagactttcaaaaccattttaagaaataataaattatttcaatatatctcacatgttctcctttcaggaggaattaaattttccccatgaacaaatttcgaattattcattaaattcttaagtttat

SEQ ID NO: 26365 - DNA, 595 bp, Glycine max
tctaagttctaatagggtgataaagagcagaattggtttatgtgaaccacaagtatagagttactataatacactaaagctccattaaaaactgaaccatgagtacataatatactacattgcaactgcattaaacatgttattgttattaaccaatttcaggacctagaggaccctttcccttatttgtgagaaaactagcttaatataatctagttctataattaactaaggagttaagagaagctatcccaaaaacgcaatatcaccttcttatgtttgttcacaaagttgaatttggaattaactaagtgataaggaagggattccacaaattcattcatcctctaaggtgcttcgacttttttgaattctcttttgtactacataatcaggacatagctttttcccatgatggattctgcacatttttcctttctgggggcttgaagcctgcattaattcttaatgggacttgtttttaaccaaatgggcatgtgcattcttactctactgctatctcatctatttttgggtatatttacgtaacgtaaactcatttaacttcaaaatttcatttcatggtggggaacat

SEQ ID NO: 26366 - DNA, 468 bp, Glycine max
ccttaagaagattcctaaagaagctagagcttatcttttttacctctctaatagctaagcttacctccttgagatgagaagctagagcttagctacacaccttctataatagctaagctcaccccatgacataaaacatgaaaattcaaaaaaaaagtccgttctacaaagactactcgatagaatggccaaaataccaggcccagacgaaggaaaaacctattctaatatttacaaagatgagcgggctcatacttagcccatgggcttgaaatctaccctaaggctcatgagaaccctcaggccttcccttggatctctagcccaatctacttggagtcttctacccaatgcccttgtgggggaggatggcatcattccctgcaccttggaaaggatttgaccctaaatcccgagggtcttcatactctgggggtctttcctctacacctgggaaaataacaaaaa

SEQ ID NO: 26367 - DNA, 414 bp, Glycine max
agcttctcccccaagggtctataagtagggtgattatgtgaattagaaaagggttcagccctcctggtaattcataatcacttaaaagtactgagaaagattggcgccgtgaagaaaatccaagtccgaggcgcttgcaatacggtagcccgaggggattatgcaaatgtcttttaccggtcttcattaactcctgggcgtgtgttcggtctttaaccgtggagatccctacatctaactgtttaattcattctatgcacccttaatgatcctaatttgggtttacaggctttcattgaaatttaatttacttgccaaacacccttttgacgtgctagaggcatatgctaaaggtagcgtcgcggcatatcagaaaaattaaacaaatttccaccgatcatgtaaatggtaata

SEQ ID NO: 26368 - DNA, 589 bp, Glycine max
tcatgcttaactatgtatgtcaaaacttcattactgttgttcaagacatacaagtgagcttgtaacaaatcttctacacttggagtgatcatatgcagtcctcttgaacccttaccacccactctgtcatcatgccgagactcaggaagcccaacaggtttaggcttctctaagtattctgaacaaaattcaatggcttcttctgcaatgtacctctcaacaatagatgcttctggtcaatatagattctttgtatactcttttaagatcttcatgtatcgctcaaccgggtacatccaccgtagataaacaggaccacaacatttgatttctttgaccagatgcacaatcaagtgaatcatgatgtcaaagaaagcagggggaaatacatctccaactggcacagtataattgcggcctcattttccaactcatcaaacttgactggatcaatgactttgctacatatagcatggaagaaaaagcacaagtgagttatcgctaacctgactttgtttggcaagatgtctcgtatagccacggctaacaattgttgcatgagcacgtgacaatcgtgagactttaaccc

SEQ ID NO: 26369 - DNA, 421 bp, Glycine max
agcttgatatgatgaagtgttgaagggtgaaacttcctgcttttattgctgaccatagagtggtacctgaagatatgtcgcgggggtcaagagaccttggggaagtcatgtggggtgctattgcccaaaaccaagcttgaccaatcccgacccaacccgggcatattcggtcagtgagaacctgtgatgtacctaaacaggcgagctcctggctatcaacagattaaaggaacaaagaccacaaagcaaggaggcttgtggtggctggccagctgtgaattttgtgtgatatgtggattgtggcctctggtaatcgattaccaagggtgggtaatgcattacaaggcttagaaatgaagacaggaagctaagatggtctctggtaatcgattccaatgggtgtaatcgattaccatgcttg

SEQ ID NO: 26370 - DNA, 485 bp, Glycine max
tttctttctcaatcaatctgtctactgtctaacaattctaattgcaagttcacattcttgttctttctttgtctaacatacacacttgctcaaactcatgataagaaacacaaactccatcacaatcatgcactcaattcaaaatgaaagcatacaaccattttcataaaaagataaaagtgttttactgccatgtcataaaaacaagtcaaactgttcaaaatgtttcaggataagcaaactaactacccataaataaaactagcagtgtatgtagacctaaaggaaatactgtatgaaaaccaaaataataataataataataaatcaaaaagcaaaaagtatcatcaggaatcaaaattcacgtgactagtcctaggtgccctgtgtctagccatcctcctcatctgtcagctgaagcactggagtagttggaggagaagtgtccacagctaggactggtgtagttgggtcctctgacatct

SEQ ID NO: 26371 - DNA, 636 bp, Glycine max
agcttattccgagaacagtttactatcatgcactgtctgcgagaattggcacaccatagtccaattataactatggagcatttccttgagcgagtagcctggcctaaagctcaacttccactggtgagacccaatgaggttgcttctcctgagcccacacctgcacgggttgaaccagcgccagttgatccataatctccagtggtgaatccatcttcttctcctgagcttgaagtagttcccccatctccacctttgattatcatcttcgattccccatctagagaagctgctgctccccctaaatccccaaatagagaagctgctgatctttctgattccttatctggagaagctgttgctctctctgatttccctgtttttccatctgatagatgaggaggaggctcagactccagatgccccggacctgtctcagggattttaaattcctgaggattttgctttttggatattttttatataattattatattctagtacagggtcttagttattttggttaatgtttatatacacttatgttctttttcttctgtttggtattatgaatgcttcgaaacatatgcaacagtttaacttgacttggatgattctccagtgaaaccattttta

SEQ ID NO: 26372 - DNA, 628 bp, Glycine max
tttaagtgaaaggatgtgactcttcacatttgaatttttatttcaacgttcaagggcactggtaattgattaccaaaacattgtaattgattacatccttttgaaaataattggaacattgtaagttcagtttgaaaactttttcaaactcattttgctactggtaatcgattacaacaatatggtaatcgattaccagagagtaaaaactctttggtaaaaggttttttcaaaaactcatgtgctattccaagttttgaaaaaactttttaatacttatcttgattgagtcttctcttcattcttgaatcttgagccttgaatcttgatcttgattcttgagatcttgaaccttgaatcttgattcttgtctctagactttcttcttgagtcttgaattcttcttgattcttatcttgaacttcttgaattgttcttgattgatctttgagctttttgtcatcacctttgtcatcatcttttggtatcatcattgttatcatcaaaacacctttgaatcacctttgattcacatgaagctttgcttttacagttcactttttttctctcaagggtttccctcttttttctactcttaaaggtttgctcactttttcttttggctttc

SEQ ID NO: 26373 - DNA, 563 bp, Glycine max
agcttgtcttggtcctcgaattccaagacgtttttttggttcccgagcccatcaaaaacaccttgtcctcaaggagttggattttcaaactatggccttatattcccgatcaagcaagacgtaacactacaacctcatatttacaaatgaccattccacgtcacgcatccgcttctatacagcctcatatctatgagtgcaccactccacgttacgcatccacttccttagttggagatctgaatgttggcataaacagtgcaagaacaatccctgaggcaaaaatcctgacactcccttgggttcatgctcctgttcacaaacacataggttgtctacggtaacttcacgttctttacatgcaaaaacttgtcactcccacaatccaaattcttgttcctttcatacccatcagacccatctgtcaaatttcatgcctgctggttcctcagtctgaacactcccacgcacgtgcataccgttgaagcgttgtgatttaccaactcataaggaccacgcgctctggtggcattacactgattcttaggcgtgtactaagacgt

SEQ ID NO: 26374 - DNA, 362 bp, Glycine max
cgcaggcatatattccaccatcttttcataatagaactttggcaacgtgtccattatcatctctctttctgccataagaagcactacctgagctgctaggtctcgccacctctaagcatactctttgaatgaatcattgcctctcttggataggttttgcagttgcatttggtctggcgccatgtcagaattggattgggattgcctaatgaaagcattcatcagatcccttcaacagcgaattcgagagggttccaggttagtataccagataatagctgccctagccaggctttcctaaaaagaatgcatcagccgcttcttgtccttcgcataagccctcatccttttgcaatacattc

SEQ ID NO: 26375 - DNA, 535 bp, Glycine max
  unsure (1)..(535): unsure at all n locations
agcttgaattctagatgtgtgcttaaatgcttgttcataaagttatcattctatgtctagcaatgatttccttacgatatcttttctttttgttctattagcagttaccttctgtcgagcgtctaacccctaaaactaatgcatgcatatcttctttatatctttattagaagttaccctctatcaagcacctaacccctaaaagaatgtaaagatgaataatgcatatgaggtaaatagaaaagacaataggatagaagacacatgttgcattaataaatagtgagaagtacattatacatcgctttggctttttaggcctgtcaaaccctaactaggggtttagcctctcatggtcattgagggccttccactggaatgggggtataagaactaatggaaaaaaggggtgaaacaaagaaatggagaaaatggtgaaagagagaagagaattccttaaggaagagttcttaggctttggatagtagtgagaatgctcanagactccgtgtgtcatttccccttgacctgactc

SEQ ID NO: 26376 - DNA, 460 bp, Glycine max
tgcttgtggagcttctatggaggctggatctttgatctttaatggggtcctttaatggtgattttccaccatggagatgcagcggaagacaaaggaaaataggtgagaggaggcgccatccattaaggaataagccatggaagaaggagcttcaccaccaagatgagccttggataacaagcttggagaagatgcttcaatggaggaaaagaaagagggagagaaagagagaggggggagcacgaaattgaaggaataaaagaggtatagaagtggaactttgaagtatgtctcacaagactctcattcatcaaagttacaacaagggttacacatgcttctatttatagactaggtagcttccttgagaagctttcttgagaaaacttccttgagaagcctttttgagaaaacttgcttgagaaactagagcttaactacacacacccctgtcataact

SEQ ID NO: 26377 - DNA, 370 bp, Glycine max
agcttctagagagttctacactactctatagttctctaggacgctctagaaaactctacactgttctagaaagctctagaattttctagaacctctccaattaatgagggatcccaccaccatccatcattattgggcattgtgccaagagaatgatggggcttgtatcacaaaattatgttgtattccacacaatatacagatatgtatgtggattcctatgtacagcggcagatggttatctaaaaatattaattcccttgcggaaaagttgtattggtatctctacgtaacttttattctcacgctcatgagaacggagatttacattctcacgagaatgtgagaaatgattttataattcgactat

SEQ ID NO: 26378 - DNA, 538 bp, Glycine max
  unsure (1)..(538): unsure at all n locations
tcgtggcaagccagtggttggaggacaaggctggtttgtgaagttgatttgtgggattcataatcatgaattggccaagtcattagttggacatccatatgctgggcgattgactaaagatgaaaagacacttattgttgatatgacgaagtcaatggtcaaaccaagaaacattctgttgactctgaaagagcacaatgccaatagttgtacgaccatcaaacaaatatacaatacaagaagtgcatatcgttcttccataagaggaagtgatactaaactacaacatctaatgaagctttttgaacgagatcagtatattcattggcacaaattaaaggattaagacgtggttcgtgatatcttttggtgtcaccctgatgcagtgaagttagtcaacgcatgtaattntgtgtttttgatagacagtacctacaaaacaaataggtataaactctcattgctcgattttgttgaggtgacaccaactgggatgacattttctgccggttttgcatatctgaagagtgaaaatctt

SEQ ID NO: 26379 - DNA, 428 bp, Glycine max
agctcagtaaagctaagcactaacagaatttgttcaatgcatcaacattcaattgcgagcttctcgatatattacgggactcaatcatacatccgagtaaaaagctatgggcgcttgaatcggcttagaacgtcgacaatcagttgccagcatctctatctcggacgggaccgaatcagacatccgagtaaaaagtcattgccggttgaatttgctcagacgctacaacattcaatttcgagcgtctcgatatgtgacgagactcaatcagacatccgagcgaaaagatattgtcggttgaactggctcatagctgtaacattgaatgtcgagcagctcgatatggggaaagactgaatctgacgctcaaggaaaaagctggtgtcgggtgaaattgggggaaaggcgtataattcaatttgtagcgt

SEQ ID NO: 26380 - DNA, 462 bp, Glycine max
ttataagcgcgggttcgggagacaaaggcgaggcgtttgcgatatgcgaagatgatattccgagtactttggatttggtacgaccatgccctcctgatttccagctgggaaattggcgagtggaggaacgccccggcatttacgcaacaagcataatgtaaacctttacggttttaaaaagctctatagttgggcctaggctttagagttttcattttgttaaggctttgtgtcttttgtttttgaatttataatacaaggatctttcttcatctgttcctggtctctacccattctcattcatttgcatgtttacttctttttctggaacggcagatccgatgacgagtcccccgaaggtactaatacctgggacccgtctatcgacttcgagcaagaaatgaatcaaacggaagatgaaggaaatgagggtgtgggacttcccccagaactagaaagaat

SEQ ID NO: 26381 - DNA, 570 bp, Glycine max
  unsure (1)..(570): unsure at all n locations
agcttttgaatcttgtggagatgaatcatcttttggcttgtgatctagaagctggtggctgtggcaagctcaaccacatccatcactttctctcaactccaccccatgtttttatgacaggtacctcagttgttgcttttggaatgttgttgacttttttttatatatgcttttggtactttttcttatacgtttgtaatttacagttctaggttggcaaaatacaagtgagagtgccgatgatataacagagactctggctgccctaagcaccaagatagataccagtgtcctttattgtggtttagatcctaaatgcgtccataacttggtgtcagtggtatgtattttattgttaatatgtaaggaatgtttatatntagtttgactgcttattctttgcctctttagtgatgaattttgctttattgcaaaaggaacacaatacaatataaacatttccccagtgatttttctttaaaaatattgctttcttattgaagtcctgaaaggactgccctggacagtgaaaaagttcaattgtatactatatgagcttatctttccata

SEQ ID NO: 26382 - DNA, 306 bp, Glycine max
tctattgataaatgtagcttatgttaacttgaaatctatgaaatcagcttatcacataaaggatattcataagcttgactggaaaattgttaaagtatgtttaatagggtttgttttagttagtttatgcgaaaaaaacttaaagaattaagataaagaatttatgtgaagctattctaatcacctcctaaacataattggttgctatgtaatatgtatgggtccatgaagccagcacatgaattactgcagtgacttttgcacagcatatacaatactcttaaattctctggtttattctatata

SEQ ID NO: 26383 - DNA, 474 bp, Glycine max
  unsure (1)..(474): unsure at all n locations
agcttaccagaagcgccaatcagaggacttttttgttggcgatnttgactgagctatcatgagtaaagatcggttacccactcattaatacaactagcttattgctagaaaaatcgaatcatattcataggtctaatgctttcaatgtgaatttccttatagcggtaatgcttcctctgatgatgagatggcttttgatctgtggatgaatcttctccaccccgaaaaggatcctgcagtgcaagattgaccaaagttgacccaaaaaagtcatgcgtgtccatttttttacaaaggaatacacttttttgaatggaaatgaccttgtaaggaaactgcattccctactagcaatgtgttgatagatattttagccaaattctattgttaaaggggaaaaattgcaatgttatccttattgttctttaagcaaattctatcggtaaaaaaccatgaaaataccctttgcacatt

SEQ ID NO: 26384 - DNA, 463 bp, Glycine max
tataacaaatctaaaacacaaagtttgaaaccaatttgttgactaaaacctcgcctatcttttcctctttttaaaagaacaagaaaaatacagaggaagggaatccctggaggaaaccaggaagaacaaaaaactcagaattgaaagaacatgcaatggtcctcttgattgccccatatttcaagcgtaatatcgtttaactacatcggagttcacgggcgagggcaattcctcgccatccatgtgggtgagtatcaaagcacccccacaaaaggctcttttcaccatgaaaggtccttcataatttggggcccacttgcctcgtttatctttaacagcgcgggaaatcttttttaacacgatgtcccccttgttgaacttgcgcgggcgtacctttttgccgaatgcgggctttatcccttcgttgagacaaacgcccatggcttatggcagacaaaacgct

SEQ ID NO: 26385 - DNA, 660 bp, Glycine max
agcttattgcttggaaaccaacacttgatattataccctgatttttgaatttatctcacaagaataccatcaatgacaatgaagtattgtgtgtgggatgtgttttgactgtaaatatacttggcacttgttctttgaatgcaatttttttctctagagtttggtgcggttactttagctggtggggtattcattttgcacaatataatgactctccttcgaacttctcacaattcgtgggtttgccaagttgcaatgattagaatgagttaccgtgataacaatttggtttgtagtgttttgggcaaaatggaggactcgtagttttcttgtttttaaaactataagaatgagttttgatcaaattgtttaacagtcaagatacacctttgtcaattaattagtactatatgtgatttttttttactgtccctactcatgttggtttgtaaactcaaaagtttatttaggtatacaatgaaaacacaacaacatagccttatcccattaaatgagatcatttacatgaaccacatcatatcatttgcacaattaaaaataaaatttttgggaatactttatatcataagatatcccttgaaaaattctcaagtctttttaatgttcactcctccttttatatgccaattaactcaatac

SEQ ID NO: 26386 - DNA, 262 bp, Glycine max
cgcgaacagaacaacgcgtgcttagaatgcaaagcgagggggacgagaaccatggaccagcaacaggtatacatagcaacaccagcgtagaaaagaaacaaacaacatcacaaactccctaaaacaaaatgggcgggtagagaacaagcaaagccggcaaaggtaaacaggactcaacgcaagactatcaaaaaaagcctcacacagtggaaccctaggatgaacacccaacgagaagcccaaaaaccgatacccacgaaaa

SEQ ID NO: 26387 - DNA, 830 bp, Glycine max
  unsure (1)..(830): unsure at all n locations
ccaccccgcgcaccatctcgtagttctatatngaatcgagtgggagaaagagtgggcagcgcgtggacaatgactcctgctactagtgagatgggaggaactnttcctgtagccccacaccaaagccncttggtagccttctgagcacgnccgccatagaaactcacgcgcatacgcgcggggactggagacaaacgagaagctttggctatatgcgaacatgggaatgacaagacatgggactgggtactacgacgaccaaatgagggacgaccgggaaaaaggccaatggaggagcaccctaggggtaaccggccaagaatacggaaggaaactacggaacgaacacggtccaaactagggcacaagggatggagaattaaagacgatcaggcatggcctctttttgatatgggatacatactaaaacgcacgtttctttcatttgatgcgcggactacaacccatgacaattcaacccgcgcggtccctacctcatatggaacggccgatggaatgacgacacctccgccgggacagagaccgggggcaccgacaataagacagggcaagaaaggttatcaagggcagaaaaaagaacggacgggagagggactaacccccgaggaaacaagaatgggcgcccgtgagggcccacaaacggggggtagacaacacggagcggcggctaggaccctagggaatggaacgggaacgggggcgcgccacatatggtggcggactaccggcccgagccgtagtcaaacacaaggcggcggttagggaaaaacccttagagttctgggggcgccacagctcggaatggaacg

SEQ ID NO: 26388 - DNA, 496 bp, Glycine max
agctcgaaagcaaactggatgcattttttttcttggtaacccagctggccttgaatcagaaatctgtacctgtcgcaagggtttgcggattgtgctcctctgctgaccaccatacagacctttgcccttccatgcaacaaccgggaacaattgagcagcctgaaacttatgctgcaaatatttacaatagacctgctcaacctcaacagcaaaatcaaccacagcagaacaattatgacctctccagcaacagatataaccctggatggaggaatcaccctaacctcaaatggaccagccctcagcaacaacaacagcagcctgctccttccttccaaaatgctgctggcccaagcagaccatacattcctccaccaatgcaacaacagcaacaaccccagaaacaaccaacagttgaggcccctccacaaccttccctcgaagaacttgtgaagcaaatgactatgcacaacatgcagtttcagcaatagactag

SEQ ID NO: 26389 - DNA, 420 bp, Glycine max
tgagactaggacattctgaccgtagtagtgctatttttgcagaacaagtatttgagaagacacaagccaagtttcctctgtactctacatctagtctaggatgatatatattcactttccaatgggcaatggggaataaagaagggtaatgtgggtctttagtttattataaaaattaagggggtgtaggattatgaagtgcgggaagtaataactaatggcatactgattatcattgcctaaaacaattattagatctcacaacccaaaccagaatttatataatttgctgggataaaaacttcaaacttgataggcttaaatatgattttggtccctgctatataccccgttttggcatctactccctaataaattttttctttcgaatcaagtctctaatattttaaaagttttgtc

SEQ ID NO: 26390 - DNA, 524 bp, Glycine max
agcttacaaatctgtttcaaatccaagcccatatattaaataaaatcaaatatagataagataagataagataaggtctaaatgaaataatatctagatgagatcaaatctaaataatatctagataagataaagtctagataagataaaattttgtagaataaaatagtctgccctcttcaagtccaagcccaattatggattcaagtccaatgcttcattaattcctgaaattagattaaaaacatcaaattagctaaataagcccaaataataaaactgcctaattaatttgacaattaagactaatcagtaattaaaaaggtgcaaaaaaggttaagaaataggagaaaataatggcacattaaaacccccgatacttatccttttgcactcctgggcaaaatgaaacaaagaacaaaatccaaggatatcatagagagacaaacaaaaacatttacatatttgttaatgagcattaagaaatgaaaggaatgggtaacaacttacatgaagagatccaa

SEQ ID NO: 26391 - DNA, 563 bp, Glycine max
tttctttgtacacctacattcctatacacgataaactttctttgtatacacatgtatgaaaaactctttctctttatatcaacacggtctatataacaactctattcctgttcaaagacttctttttcgtttttcaacatacaaatcgtggtttatacaaaaacttctttatatacactcatggctcacacacaagaattttttttcacacattatttacacacacacaaaatctttccatacactttttacatataaaaaaatattttcttttctttatatatagacacgacatttgttcacaacccctctttctttttctctttttttttattcttggcgttatcatgattttttgttcgttatatttttaggacgacgttcctaaaggaaaactctacaaggtttaagaatttcaacaaacattatcaacaataacaaagtaagcattaacgcaacaggccaaacaaaatgtatgcacaaaacaaaagacaatcgaaaaaacaaaacaaacgttagtcccttcagtcatagaaacaagataacattccaatgataaatga

SEQ ID NO: 26392 - DNA, 469 bp, Glycine max
gagcttgaaagcaaactggatgcgtgggtcaattttttaacccagctggccttgaatcagaaatctgtacctgacacaaggttttgtgggttgtgctcctctgttgaccaccatacagacctttgccctatcgtgcaacaacctgcagcattcgaacatcctgaagcttatgctgcaaaaacttataataaacctcctgaacctcagcagagaaatcaaccacatcaggagcaattatgacctttccaacaacagatacaaccctggatggaggaattaccctaacctaatatggggcgatcctcagcaacaacaacagcaggctgctcctttcttgcaagaaagctgttggcgctagcagacgatacatttgttaaccaatccatacaacgagaacaaccccagaaacaacctacagggagggccctccacaaccttccctcaaaaaactggtgaaggaatgactatg

SEQ ID NO: 26393 - DNA, 548 bp, Glycine max
cgtgcaaatcaaatcactcctgcatttcatctctattatgcattctttctttctttacccactcctcacgtttgtttttttagggaaaaacaccataactaaacgcgccacaaggcatccctatcacaccagatccaaatctagaacgatgggtgatcaagaggagatacagtgtcataccctaatttcgtccggggacctttgcttgatgacatgcgacctttctttggtccttgtgaggtgcttggaacccatcattaggcaatttgtgaaattccaggacatgccggaaaaccaaaaaaaatattgatgcacaatccgtaagtttccgtgacacaccagaaatcaaatggaagcatcgttgcataattaagtgagattccgtaacattccgtaaatcataaaggggatgattatgtaatccgcaaagtttcgtaacattacggaaagaaaacaagtattcgtaccaaattcgtaagtttccggcactttacgaaaaaagaatcacagaaaaaaagcagaggggggtgttcttagtaaaaatgggg

SEQ ID NO: 26394 - DNA, 668 bp, Glycine max
  unsure (1)..(668): unsure at all n locations
agctttgagccaaaatcctgactcaccatatttcttgacccagggtgagaatgtcaatccttaccctcggaagcaaaaaaggaagagaaggaaaatttccaatcaaaggaaaaaagagaggaaaggaaattcccaatcaaagagtgggagaaagcaaaaagaaaagaaagaaaattcccaatcaaagaatgggagaaagaaaaaaaaaagagaaggagaagaaggaaagaaagctcctggtcaaagatcgaaagaaaacagaagaaatatgcagagaggtctttggaccagacaatatctgaacaatacggaattgtcaccaaatgaacaaaagaaagaaaaggaaaccataacctaaaagtggtcttctccctttgattaccaaccaaaatcatgtgcatcggtgacttgttcgcctcgcgtcaaacaaaaacagaaaaggaaaaagccaacaaaaaatcaaaagccaaaaacacacaaaagccgaaaaaacccatcaaaagaacccattcccaagggaagtcctattgatccatgatcacgcatgtaanttttgatttgataggagataatttgcaaaatcaagtcatgacatatctatggttcgaaattcgataaaacacttacctgtgcaatattgatacactntgagtggatttcttttgttt

SEQ ID NO: 26395 - DNA, 542 bp, Glycine max
tgtaggattatggggtacccatcacatgtggtactatgtggcggtcgggcgatggtgcacaacaagttttccacatccacaatgcgcgcataaacccaccatcccctgttgcccacctccaactgaactcacgtactcccacgtagcccatatcctcgtttctctccacccgggtccccatcaatcctcccaagcttccacaacatccaatcaaaacaacattcaaacagcacaagctatcacagccaagcaaaacagagcaaaggcagaaaactctgctcaacacatcaaccaaaatcacagcttttctctcttaaggaccacagtaacaattccttcgatccaattcgttaaccgttggatcgactccaaaattttactggaagtctatagtgcataagcctacattgtgaccgttgggatcgactagcaaacatccagaactcattctgtactactctttccacagccaaccacacacaagcattttctgcaccaagctaaaattctgctgcacctattttgacagcaaaattctgcat

SEQ ID NO: 26396 - DNA, 364 bp, Glycine max
gagagggccgcccaccgactaatgcaatacatgccgagccatactacgcaggggggcgaaccaagaaaggacccaagtaaagaacatggtcgagaagcccgccctaacgggacaaaacgcccgacggcaggcgtcgccaaccaaatttgacatcgcccatgtcaccctgaaagcgataaagggaaacaccctggcagataatcgggcccaacaacccctcaaagaatatcagccaatgcatcctaagttcccagatgaggacatccaggccccaatcatggaaaaactggaaaacgaacacaaggacaaacacgcccgatacgccgacggggcaaacacgctcaaaatcaacaggtgggggcaa

SEQ ID NO: 26397 - DNA, 495 bp, Glycine max
tttgggctgaggatatatatataacagcaccagggttttagcagaggagattgtggagataggagagaaaattttaaggttttgcatttttcatgcacacagttcacgtagcaataaaatttcattttctgcttcaattgcaatctcgttttctgcttctgcccttgaattcattttcgttttctgctgattaatggaaggttgagtttccagtgttgttttctcttgaggatcaagcatagctctctttgaggtcttgttattactattgaattctgatcagtttttccccttcaccaattgctctgtattcgttgctattaatccatgcatgcttaatgcttgattaattgtctctgtgcttaatttacgttcatgcttaatgatcagttttgttcatgcttaatggacatgtgagagggattaattggtgtatgcgttgcttaatcacataatgacaaccttatgttaatgttcgcttagtcaaataatttc

SEQ ID NO: 26398 - DNA, 330 bp, Glycine max
  unsure (1)..(330): unsure at all n locations
taaaccgagcccgcatgcatgctanaccctacataggtgaaggacactttttttttataccctgtttcttgaacttatctcacaagagtaccatctatgacaatgagcacatcgagtataggaagaagcttgactgggagtctactcgtgactagttctttgaatgccacacttttatttatagttaggggcgggtactttagatggtggtgaatacacaaagggaatgtcatgactaatcgatgaactactttcgattcatgggttttgcacgttgcaaagaactaaaatgagttaccgtgataacacattggttagtaatgttttggg

SEQ ID NO: 26399 - DNA, 582 bp, Glycine max
ctctcataagtcctaaatgacatttcaagctaggatttactcactttaacctccatttaccacagaattcagacttaaccttccaactctcaaagcctcactctttttccactcataacatcacattctcactttctaaccctaggttaactctaccattcatctctaacagttttccataagcaatttcagcatataaacatcacaaacatcatcacaaaaaccctaaaacagaatgggtatgtctaactcatccaaacatggcaatttcaacaagctttcaacaaaagtcttcacaaataatcatcacacagcagaaacctagcaagactacccatcatatctccccaaaccccatacccacgaaaattaaaggagaaagaagtccacccaaacctgaaatttcgaagtcccactcgtagccacgcacttcacgactccaaaaacgccctcctttcacgatttggggcagaaatgatggccaaaggttggagctctgttggggtttcaatggagaatggaggagaaggaaaaagccacatgaggaagaaggagagcttctgaaattttctgctttggctg

SEQ ID NO: 26400 - DNA, 560 bp, Glycine max
agcttttgcaagctggaatcatttatcctatctccaatagccaatgggtgagtcccgtctaggtagtcccgaataaaaccagcctcacagagatcagaaatgaaaaggaggagctgattcctactcgggtgcagaataattggagagtctgcattgactataggaatctgaaccacatcaccaaaaaggaccattttcccctgccattcattgaccagatgcttgagcgcctggcaggtaaatctcactattggttccttgatggttatcctaagtatatgcaaattactattgctcctgaggatcaggagaagaccacattcgcctgtcccttcggcacttttgcctataggaggatgccttaaagcccgtgcaatgcccctggtaccttccaggggtgcatgaatagtatcttcagcgaccttctagaaaacagaatagaggtgctcatggatggatttccctgtgtatggaccctcttttgaagggagtttggataaatttggcaaaagcattcgatagatgaattgaaactaacgatagtttcaaatttgaaaaat

SEQ ID NO: 26401 - DNA, 517 bp, Glycine max
tcaagaaaaagatggcctcagcaaattccttatttctataaggaaattctatcaacagacctccaatctttaatggagagggttaccactactggaaaacccgaatgcaaatttttatcgaggcaatagatctaaatatctgggaagccatagaaatagggccttatatacccaccacagtagaaagagtttcaatagatggtagttcatcaagtgaaagcataaccatagaaaaacctagagatagatggtctgaagaggatagaaaacgagtacaatacaacctaaaagccaaaaacataataacatctgccctaggaatgggtgaatatttcagagtttcaaattgtaagagtgctaaggaaatgtgggacactcttcgattaacacatgaaggaactacagatgttaaaagatctaggataaatgcactaactcatgagtatgaattatttacaatgaatgcaaatgaaaatattcagagtatgcaaaagagatttacacatatagtaaatca

SEQ ID NO: 26402 - DNA, 409 bp, Glycine max
agctttgtgtcaacctttgaaaagaaccttattacgccggatggggtgcacaatgctactgactctaccaaagcttttctccaaaggagtttggccattgtggaggacaacaaactgtggaaccaagaggtggtgcaaaaggttgtgtccttagaagtggaagccgccaagtatagggctactgctcagactttatgaccagtggagagccttaaagtggctaatgccatagttgcttttgttgaggccgaacaagagaaccactaactgtagatgcgcactctgttagatggtgatgacttcttaagacgatgtatggatgtgcaggctgaaaagatggacctacgcggcccagaggagaacatggcggctgaaaaagatgaacttgccaacacagtagctgagttac

SEQ ID NO: 26403 - DNA, 387 bp, Glycine max
tggaggggtcgtgcttttcattaagttaccgggtagggttgggtcgggtcagcccaactcctaccgtggacaaaaaaaaaaaaattctgccattttccgcctcgccaccatatccgccatgaccgccatggcgccgccatcttcaacccgccacgccaccactattcggtggcgttttttcaaaaatccgctacgcaactccgtcatgacagccgccatggccgccatttaacaacactgatcctttctcatctaatcttttgcatgtcctttcatgtttgctgaaagtttcaattcccctccttttggtttctcttcttctgaagattaccataaatttaaagaggactcacgttgaaagcccgtttttaatttaaaagatttttt

SEQ ID NO: 26404 - DNA, 450 bp, Glycine max
  unsure (1)..(450): unsure at all n locations
agcttctattttcaattacgagcgtctcttctcattacgggactcaatcggacaaccgaggaaaaagttattgtcgcctgaattcgcttagagcttctgttttcaaatttcggcgtntcgatatactatgggacacaatcagacacccgagttaaaagttattgtcttttgaatttgctcagagcttgtattttaaattaccagcggctcgatttattacgggactcaatcggacatccgagtaaaaagttattgtcggttaaatttgcttagagcttctgtttcaattgcgagccgtctcgatatactacgggacacaatccgacacccgagaaaaagttattggccgttgaatttgctcagagcttccatttcaatttcgagcgtttcgaatttaaccggactcactcgacccccgagtaaaaattattggcgttctgatttgctaat

SEQ ID NO: 26405 - DNA, 530 bp, Glycine max
  unsure (1)..(530): unsure at all n locations
actctatagaacactcgcgcgttgagaaaaatcaaacgacaataacttttgactttttgtctgattgactcccgtaatatatcgagaccctcgtaattgaaaacagaagctctgagcaaattcaaacgacaataactttttactcggatgtccgattgagtcccgtaatatatggagacgctcgtaattgaaaacagaagctctgagnaaattcaaacgacaataactttttactcggatgtccgattgagtcccgtaatatatcgagacgctcgtaattgaaaatagaagctctgagcaaattcaaacgacaataacttttaactcgggtgtccgattgtgtctcgtagtatatcgagacgctcgtaattgaaaacagaagctctgagcaaattcaaacgacaataactttttactcggatgtccgattgagtcccgtaatatattgagacgctcgtaattgaaaacagaagctctgagcaaattcaaacgacaataactttttactcggatgtccgattgagtcccgt

SEQ ID NO: 26406 - DNA, 546 bp, Glycine max
agcttagaacaatatacttgtccttcatttttctgtctttgggcttggcgaccacgatcaacaaagtactttcgacacctactatatgttgatttgaccaatgttgttatcggtatgttgcggcaatccttcaataccttatttatacattctgagaggttcgttgtcatgtggccatatcgacatccttctctatcataagcaatggtccacttttcctttgaaatgcgagcaatccatgttgctatggctggactcagttgacggaatttttctaaattttgataaaaataatatgcttgcaaggagtgtaccctgcatgaaattagttaacaacaataatttgaaagatacatgaaagttaaattaaggtgatcatgataaatgaaatcttacccaattttcttcaacatatttttttgtttggcatttttgaatttgcgattgaaattacttgctatgtgtcggacgtagtaaacatgataaccgtatggaagttgccaaccaagtgctttgtttccctcagacactttatactctcgtgac

SEQ ID NO: 26407 - DNA, 518 bp, Glycine max
cccttcacaaagagaatcatcttgatatgataactttttttgtcctctgacaaggctatgcttttgaagctttgagattaaccttaagctagcatgaccaagcttcttatgtcaaacccaataatgctctttgactgaaagtaggcatgaaacttttggactagacagatcaccaagtttaatcttatacagatttccttgtgtcttagcctagaagagtgaagagttttccttgttctcaatgatacacatatccttgttaaaagtgacattgtatccactatcacataatttacttatgctaagcaaattatgcttcaaccctttaacaagcaaaacattatctatagaaagataaggaggaatacatactttacctacaccaattatcagacctttctgattccgttcgaaagtgaccaccctactaaaaatagggcttagggattgaacatagacttttcacttatcatgtgtcgtgagcaacccctattcatgcaccacgactgatgtttctt

SEQ ID NO: 26408 - DNA, 591 bp, Glycine max
  unsure (1)..(591): unsure at all n locations
agcttagcgccagtaggcgcttatttttttttaaccactggaacttaattgacttagcaagcaggctcaaaaatttgaattctgtaaaaatacatgcaacaaatttctaataccattgtgcttcaccttaattgtgcctagcccttttttacatgcaacaaatttctaataccattgtgcttcaccttgcagttgaattctgtaaaaatacatgtttattaccactgtgcttcaccttgcagttgaattctgtaaaaataccattgtgcttcaccttacagaacccaaaattcagtttatgggtgaccagcttcctaccaaagcctttgaaagccctttaatgcaggtggttaaggagatgcatatacttattactagcctgngacatggttattctagtttgttttagacagtactttatgtgtatctccttaatcacaaaaataaatctgtcattttttgtattataaagatagtatgactaaatttctaacaagattatggacattgcttttatctagaattcactacattatcaattccggaagttacatcatgccagtacacttcaaaaaataaaaaagaaaaatc

SEQ ID NO: 26409 - DNA, 512 bp, Glycine max
ttagaattttgatcgtcctacttttgagtgcatttttcgtatgctctttcttccatatgaatttgcgtcttgttttaagttcagtggttatttaacgcgtgaaatgattaatgtattgacatgtgaagcactcaagaaagttactagcaatttgtgagtaaaataatcaaaaagcatagtgatgattatgttatggtggttgtgtgttgctcaaatgccaactatggtccttgcttacaattaagtacatgaaaggaaattatcttttttgcctaaaattgcttacttttttaattgtttagatctgtcctttacattgatatccataatcattggctccaaaatttgctccattgaaaaaccagaacgtacagattactaatgtagggactaattagtctgcattatgtgcaatttgtacaggccattgctcaattttaaaactgtttactcttatgttggcgagagcaaggcatttaattcttattttggtgcaatacaaaacacactga

SEQ ID NO: 26410 - DNA, 528 bp, Glycine max
tggaagaagatgagccatgcttgtttactaagcacaccgcttaatcttactaagtgcaccacttcagcacatctgctaagcgacaaaagcacgcgctaagccaaaattcactaatgtgcgctaaacggtccataagtgcgctaagcgcgcgagcacgaataaggccacctatttaggcctgaaattagattttaaaggggagtttggactgggattcaaagctttgtatgtctagggtttctagagaaagaaaggtccaagttccagagagttttgagagattttgctgtctgaagatctgcagagaccagagcttgaagcaggagccgatttgagagcttaagatgagtttatgagtgattgtgagatccttcaggtgaaggagacatccctcccacttgtatttttgcaatctttcatcttgaccttctctttgttgaaaaaaacgcttcctggtatggaaagcctaatcctttgttggaatctccttgtaggtacccgatggaaaaatattttaatctatttaat

SEQ ID NO: 26411 - DNA, 494 bp, Glycine max
tggagaggatgcttcaatggaggaaaagaatgttggttagaaagagagaggggggggaggatgaaattgaatgaagaaaaagggagagaagttgaactttgagttgtgcctcacaagactctcattcatcaaagttacaacaagtgttacacatgcttctaatatttacaaagaagagtggatccaaccttgacccatgggctcaaaaatctaccctaaggttcatgagaatcctagggctttctttagtagctctagcccaagcctcttggagtcttctatccaatacccttggggggtaggattgcatcatcccctccaccttggaaatgatttgacctcaaatcccgaggttcttcatactctgggctccttccctcgacaccagtaaaaagaatacaaacatatgtattaatggtgttgggtatgctagagtagggtaaggtctgaaaaacccctttcatggacctctttccatggggggaacatgggtc

SEQ ID NO: 26412 - DNA, 620 bp, Glycine max
  unsure (1)..(620): unsure at all n locations
agcttgcctaattaacctgaaattgagagataatgattattaaacacataaaatgaaaatactaagtatttattacctatacttaacagaaaatacttataacactacaaaataaccataaattgggagagtttgatacaatttgtacaagttttatacacaaaagttagtcgttttcaccgactaacagctatccgtcagactcacgggtccggtagcatgcagtgactaacgtcatcatctgcacctttgtcaactagaggcaagcgagcctgttgatcgagactattttagtctcacaactttgtcatccagagacggaaagtccaatgacatgcggagataccttatagttatccgcaccttttgtgatgcgatcctaccccccaagggcattggatagaagactccaagaagattgggccaaagatgcaagagaaggccctatggttctcatgagccatatggtagatttcgggcccatgggctaagtatgagcccacttatctntgtacatattagattaaagtttcattatttttgggccttgtatttagggctccataatgtaggtagggtacgctagaaatataggatttttatcccatgattttaaggca

SEQ ID NO: 26413 - DNA, 510 bp, Glycine max
tcatgatgatgaaccatgcaattttgatgatgccaattgctctaactagttgattcaagattgattcaagacttcagaatacaatccaagattcaagattcaagagaagaaatcaagaaccaacaagtcaagacttcatataggataagtattaaaatattttttcaaaaaccaaatagcacagttttgttttacaaaagaattttctcaaattttctaagttaccagagtgattactctctggtaatcgattactagttggcagtaaagtttggttttcaaaatgttttcaaatggtttacaacgttccaaaatgattttcaaatagtgtaatcaattacactatattagtaatcgattacaagtgaatctgaacgttggaattcaaatccaattgtgaagaatcacaacttttcataaaatgaagtgtgtaattgattacacctttgtggtaatcgattaccagtgaacagttttgaagaagaagtgaagagttattactcttaacat

SEQ ID NO: 26414 - DNA, 281 bp, Glycine max
ctccaaaaatcaaacaacagctcaagtgaatcaaagaacatctccactgaatcacgaacaaatcatgagttcaagaatcaagaataattcccgactcaacaagagagcctacgatcagaatacaagattcaagatctcaagaatcaagatcacgattcatgactcgagaatgaagacggaatacaagactccatcgagattagccttaaaaaggcttttcaaaaccttgaatagcacatgagtttttgataaaacctttaccaaagagtgtttactctctg

SEQ ID NO: 26415 - DNA, 681 bp, Glycine max
agcttatagtaatcgattacacaattgtttttgagacaatgattgatttttttaggagtctatgttttaattgattaccaatagatataatcgattactgctcttttaaaaagtgtatcagaagtgattaagaacactttaatcgattacattaaggatctaatcgattacatggttcttgaaaggtttccagtttttgggaagaacacttcgatcgattgaaatgataatataaccaattacttcttcaaaacaattgattacattgtatatttaatcgattacatgcagttataatcattttctctataaatagccaccttgtgttttcacttcaaagaacttcagtatacaagtctattaagtgcaaaattatatgagctgaaataagtgataagaaaagaagaaaaagtgcttagaaacagtgactcacaacttctaatctttgattatgaagatcatattgtaaaaaatgagttgtgatactttcttgagttcaaggacactcattcattcaagcaagattcttgcaaaggattgatcagattgtgtctatctttgactctactttttcgtgtgttttacaccttacttgtttgtgcatgaatttctgaaggcatgctataataggtttttctagtttgcaccaagagtaagtttctcttatgctcttattcatag

SEQ ID NO: 26416 - DNA, 529 bp, Glycine max
tccgcgaagagcaacggtcgttgaggaggttagcgcgttcactgtcgaggtaagcaccgtgaaccttacctttttttgctccagtgttgtcggcgatggggaaaagcgctgtcgaaaatcgctgggagctttacggatcaagtgatccgtaagcatcttctggatcaacttgattcggaaaatgtttacggatcacttgatccgtaaaactcacagtttgattttaattcaaaaattgccaaatattatttgatacctctgaatgcatgttaaatatttgataaatagtgtcatgaatatctactgtttcatacaaattgccatgaatgtatgctaattatttgctaaatactttatttgatttaatgccaatatgtaattgccttttatgtgattacatacaaattcattcctttaactaagttatgactaatatgattgatatccctataagctaacttccatgtgctttcatataagccaacttccatgtactttcttttaactaagttatgacccatatgattga

SEQ ID NO: 26417 - DNA, 624 bp, Glycine max
ccttaagtaacctgcggcatgcaagcttgtgaaagagaagggcatttcacagctatttattgagactgattctacttcagcagtggattatattttaaataaacgcgtgcagaaaggtgatccttttgctcctcttgttgagtccatacttgagttgatgataggaaattggacgtttcgagtttcccattgttatcgtgaagcaaacacagttgctgactggttgtctaaatatgcgcatactactgcttttggtcttcatgtgctcgatgttcctcctcatggttgtataaaatacttaactgatgactctactggagtttatagactccgtactgtacgtgttattgactcatgagggacatgctcctccttgagagtgtgaaaagctaatatggccatctatagatggttttcaagtaaatcaatcttgattattcatgatatatggttgattaattcttctcaacccctgacttatcccttgaataatatattgactggaaatttttgctaggaaatctacgaacatgtttcagccagaatattatcctttcttgtggcaaacaaggaaatgaggtctgtggctttttcacatgataaggtcatgaagagagggaacac

SEQ ID NO: 26418 - DNA, 486 bp, Glycine max
tttataactaaatttagtgatcttacaaagatcaagatttatcattttaaatttcagatggataaaaataaaagaataatttaaaggcaaaaatcaaaattacctcatttaacaaaaactaaaaccatatttaattatattatttaatattaaaacactagtcaaactttcccttgaatcaatctcaatgagcatggttggatttcttgtatcatgaattgtgctttctctcattcaataaccatcactacgtctaaacaaatacataaatcaattatttttttggttaggggaaggggcatttattagccctcaatacataactccatagaaaaagaaagcttaatccgacaaacatcgggaaggcttagcattttttctttttgaaacctcaaaactggtccagcaacccgcagacaattgcaaagatctcttataccttgacccgtgcccattgctttgtcaaacacagaagttgcagcttta

SEQ ID NO: 26419 - DNA, 564 bp, Glycine max
agcttgcctcaaagaggtccaggaaggacattgcagccgaaggaactagttccgctccggagtatgatagtcaccgctttaggagtgctgtacaccagcagcgcttcgaggccatcaagggatggtcgtttctccgggagcgacgcgtccagctcagggacgacgagtatactgatttccaggaggaaatagggcgccggcggtgggcatcactggttactcccatggccaagtttgatccagaaatagtccttgagttttatgccaatgcttggccaacagaggagggcgtgcgtgacatgagatcctgggtaaggggtcagtggatcccgtttgatgccgacgctatcggccaactcctaagatatccgttggtgttggaagagggccacgaatgtgagtatggccagaggaggaaccggtctgacgggttcgatgaggaggccatcgcccaactgctatgtatatcgggacaggattttgccccgacttgctgcgggaggcgagtgcgaatcatgcgcaccaacatgaccaccctgacccagatatggatgacgttggtcc

SEQ ID NO: 26420 - DNA, 610 bp, Glycine max
ttgttagtttccaccaaagaactaagctagccatgtttagtgtagtctctcttttcaatcatgttcttgtatatgcaaaactcgaatctgagatgctggttaatggatctaaactccgtttcacttgaaccaacataatgttggttgagattcatggtttaaatttatttctagaatgaaaaatttaaaaagaattataaatataaaattaaaacatctattaattaagatattaaattttattgaaaaaattaaacaagtttaggtatacatgaataatatctagaatattaataattgtttctattattgtacctttataataaatagtcaaagacatgtccaaaaaatgtttttgatgaaaaacaatactactcattaaattcaataataaaatattaattacctttaacaaaaatagttgataactatcaaattttaaaataaatttattaattaataatgtaatttatcaaaatattttaaatttaatatcagtggtaagttttgtaaagaggcctacaaatttttgtgttcattctctcacaaaggggtcaatcttgtatgctagctagctctcaaatctttgatcaagccattctattccctc

SEQ ID NO: 26421 - DNA, 629 bp, Glycine max
agcttcagaccaaagcaattcaaaatctatgtacctaaaacccatcaatttagtggattttcaaggtttgagaagtgaaaatgacaatggggtaattttggggtaaactctcctctcaatcaagtctgtaacatcgatttagacttgctcaaactggttttaaggtgaaaactccatcgattcaaaatttgacccctcaacacccaatttaccctagaaatgactcttgctttcacatttgtcactcatttttctcatttgctctgcccaagctttcctacaagtcccaattgacattttaaactaggatcaactcactttagactccaatttacactaaccccaaatttagcttctctaaccctcaaaatctcacatttttctacctacaacattggcattctcacatttaaccctaaattaactttccccatcatctctaccaattttccatcaacaatatcagcacacaaacatcacaaagcatcattataaaacccctaaaacagaatggggaaattttgctcacatcaaacatgttaagttttacatgcctttcacaaatttcttcccaataactaccataaggattaacctattaaactacccatctttcttcaaaaaaccca

SEQ ID NO: 26422 - DNA, 633 bp, Glycine max
ccgcttcatgatgaatcaaaaatgattcaaaggtgttttgatgataacaatgatgacaacaaaagataatgacaaaggtgatgaacaaaaagctcaaaagatcaaagaacaactcaagtgaatcaaagaacatctcaagtgaatcaagaacaagtcaagagttcaagaatcaagaagaattcaagactcaagaagaaagcctacaatcaagattcaagattcaagatctcaagaatcaagatcaagattcaagactcaagattcaagaatgaataaaagactcaatcaagataagtattaaaaagttttttcaaaactttgaatagcacatgagtttttgataaaacctttaccaaagagtttttactctctggtaatcgattaccatattgttgtaatcgattaccactagcaaaatgagtttgaaaaagttttcaaactgaatttacaatgttccaaatattttcaaactgtaatcgattacaatgtttttggaatcgaataccagtgtccttgaacgttgaaattcaaatttaaatgtgaagaatcacattgtttcactcaaaagctttgtgtaatcgattacacttattttgtaatcgattaccagtgtttgtttctgaaaaatctaaa

SEQ ID NO: 26423 - DNA, 458 bp, Glycine max
agcttgccacccatggcgagctcaactcgctcattctagctaggttgctttcaccgccttctggagaacttcctggaaagcccaagtgggcctggttgctatttgaccccctgtttactaaatacacccccttgcctttttttgatgattctttttccttaacgttacagaaacttatgaattacgtgacgatacttgttttctttccgtaatgttacataaccttatggattgcgtaatcatccccttttttgccttccggagtgttacggaaatttacggattgcgcactaacgctttcttttaacttccggcgtgtcacggaacttcaccgtttgagcttcaatgctttcgtttgactgccaacttggttcgaacctccacgatttgcctaacgatgggcgcctaacaccctgaataggtcgaccgatggtggcattccaactacagatggtccc

SEQ ID NO: 26424 - DNA, 468 bp, Glycine max
caccttccatcaagtgcggaccctcaaggaaatccaccattttttccatttttcggagccccataaatgttattgcctagcgctattcatgtgtcctccaccttcgagtttggagctatgtttcatgattgcctaagtgcggaccctcaaggaaatcctccattctccccctttttcggagccccatgaatgttattgcctaacgctgttcatgtgtcctccaccttcgagtttggagctatgtttcatgattgcctaaaagcggaccctcaaggcaatcctccattctccccctttttcggagccccattaatgttattgcctaccgctgtccatgtgtcctccaccttcgagtttggagctattgttacatgattgcctaagtgtggaccctcaaggcaatcctacattctcccccttttttggagccccattaatgtgattgcctaccgttgtgcattggtcctc

SEQ ID NO: 26425 - DNA, 535 bp, Glycine max
ctgccgcatgcaagctttgaatctctcgcatgtctaacattttatttatcacatccctgggaaaacatcacgatggaaaattggacgctggtaaatcttgagggaggaatgaccctggctatgaatttctcctcctcctattgccaagtgtggaggcattgatatggatgtgattggagccatgtctttgccatacctgctaatgaaaatggaaaagatctgaggtaaacagtttcaacatcctcgtaaaaagctcccatcatactgcattgtgacatgaaggcatacaaatgtgtgttatggatcctcatgatccatttcagctaagagatgtgagccaattagactaagcagtgctggctttaattgcacacccttggtggtgacataaggaatgactatgctattgtaatgatgtgggccttgttgatacacatattcccccaagagatctcctccttggtgagtttattggcttcttctgactatttgaagtgtggtatcttctacaaatggcataatagctccaagatca

SEQ ID NO: 26426 - DNA, 424 bp, Glycine max
tatcattgggggttcagctttgtacagatgtattattttatcattctgacaacgcctgattaaatgattgcttatatatggataatttctacttacaggggaggatgaagctacttcaactcctataagtattgattaatagcaagacgacactttgagcgagatttactctctataagtattcgtatcaaaagtcaaatgctatcgaactggataaatgcacattataattggtgtgcatcaagaagcctattttacctcctaatgcactgataaacactgagtagagctacgagtttgctgaaaaccattgaatttacgagaatttgatgtacattgattctcagcaggtccatctgtgctagtaagaaaatttgctagactggattctctctctttcccgcttgacgatctgtgaatgaat

SEQ ID NO: 26427 - DNA, 734 bp, Glycine max
  unsure (1)..(734): unsure at all n locations
agctttctcggggccatttcctgcgaaggctaacatttggaaagttagttttaccagtgggatactattcttaaaacaaaaatgacatacaacctcctcccataaatacaaacatcaatgtaaatttagagcaagcttatgcgcatatttccttacaaacgttctcttgcacaagacattctattaaccgaaaaaaatgcacccatatacaatcaaggcagcttcgttacctagattatttacacgtacttccaaggtgtatttgttacttacatcacacacctccttggctaaattcacatacatgcatactcaaagcattttggggtaccaaaaattgcacatgtgcacatcttggtatttctaacacctatacatacacaaacttcatgatgaatcttgactatctacacaataaggtgctacatttcatgctcttttcaagtttttgctacctaaagccgcatgcaaattcaagtatattttnctttgctgactaaaattgtattcaaattaagaggtatacantttttggtaatgtatcttctttacataacatgcaacatatttatgtatatttttgtgagacattttgactaccaaaaaatatatgtacatacatccaaatattttgctatcatacccaaagtgtaaatggccaaagtattttgctacctattcttaaactacacacttatgatgaacaaaattcctaacgatctaggctaagggaa

SEQ ID NO: 26428 - DNA, 663 bp, Glycine max
  unsure (1)..(663): unsure at all n locations
atntacannngcccctacgaagagcaatttttttttctcaaacgccaaaacggcatgaggaacattataaatctattggctcgcctcgaccgtacgccctattacaaaaacccgcaccctactatgtgctttgcatcttatactgagaacactatgtttactgtttcatgaatggattacaattaacaacgcaggacttgttgatacataaaatgggctgatcgtcttacacttggcacgccctcctggctctttgtcgtggacccaacgggatacaaattcgaagttcagggccgatctcatatcggctactcaacttaattccaagttaagctattcactctcgagcaacggcggagaaaggtcaacttaatcgctccttggaacctggaaacttggtgcgcagccctgccttgatttccgagtattcctcattcattggggcccgggccgtggaaccgcaaatccattcggtatgcgagtttcacacaagatcggaatacggggggcgcggggatacccacaattacagggccccaaccggcggagaaggatgtcctcccccatttcctcactcgaaagcgtacaagtataaggaaaatgtcaatgcggagtattccaaattcccttttcaaactcgggacccagcacagcaatctccct

SEQ ID NO: 26429 - DNA, 531 bp, Glycine max
agcttgcttagcctttaagaaaaccatcacctttctgttgtttttaagttgaccaaagccaggagtatccctgctcttttacctttcaatggcagaagaggccatcaactcagccctcgtccaagaggatggaaagcaccaaatacccatctattttgttattcgtgtccttcatgatgttgagaaacggtaccaaatgaccaagaaggtagcattggcactcataacctctgctcgatggtcttgctctttactagaaacatccttttgaatgtcatactctcaatttctcctccaacttcataaatgtggaggtgcataaaaatggtttcccatcttggaatctcacaagattctatggttttcttgagtgggataggagaaaggaatatggaatctcatttgtaatctttctcattcttccttcttccatggtgcatgttattttttgggatgataatgatcttatgtctacaaatgagataattgggaacaaagaacaatctaattttctcagtcaaagctttcaag

SEQ ID NO: 26430 - DNA, 571 bp, Glycine max
tcgcttaacaacattaagtgcaccatcatcaaatcatattctttataaaaagacaatacctgatttagaagcatgcttttactcgaggaagtcaaggatgcacagtttattgccctgaaatcttttaagtttggtggaagccctctaattttctgaagatgctcgcaatcactcacatcaagagttcttaaaaatttcagttctttgaagaattcgggaaggattgtgaaattattccccgatagatctaaatattctacatgagtaaacctcttggaacctgttaaaaaaaaatcatcacatagattgcaattcatggcacgaaaccaacgtgcctttgaagatagtattgagcccactttttcttcaccttcttccgattctacccattgccacctgttgcaatattcaatatggagttgaaacaattcgggcatcatcactaatctgcatggtaactcaacaattaaacagctccacaggtataacacttgaagtccaataagattttgatatgaaaatggcaattcttttatgggaaagtctctcaaaacaagttgctttatgtttt

SEQ ID NO: 26431 - DNA, 573 bp, Glycine max
agcttcacatttgaagttcaacaaagatgtttctgaaaataagtttgggaacacatgtttcaagtagccaaacgaaggatggcctaatccacgatgccaaagtaaaacttgctccattatgttggttcttggataatgcatgagatgcgctcggcctacactgaaatcctccatattgtaaagtccccctctcttagtaccacacccaatgatctccttcgtgagaatatcctgaacaaaacagaaagatggataaatttgcacaacacagttcatgtcctttgtaacttgactcactgacaaacaacttatgagatagagagggaacaactagtgtattttgaaagcaaaacggatggtgataacatcacagttccagccccttgtaccgctgataaaccaccatttgcgttggcaatacttgatcgccgaggggtttaaacgttagaaaaatcagcagcatcaaacgtcatatgatcggtagctccggaattaaatttccctggcatatgagtcattagcatgattattttgaaatttaaactttacccttcagggagggggaacttgatt

SEQ ID NO: 26432 - DNA, 640 bp, Glycine max
tgcaatcctcatcaatttaagatactgggttgttctttgttaatgagcaacaattggtgcaaccaattccctcaaagtcctattttgttcaaccacaatatcaagatgcaaattacaaacaagattactaaaaatagcattagaatcagattcaaaataagaaacataactactattaactacactactatcaacgttctatgatctacaagttagtattcctatcatgtctatgcaacctataaaatgttctatttatttcaggatcaaatgaaatcaagtcatcaagagtaggcctagtcatgcataatgacaaaacaacaagcacgtgcacaataatcaatgaatgtgtcaaagctactagtatatataaataatgataaggaaaatgcaaaacttatgaaaccattttttttataaaaaaaaattctttctataacaccaaattaaaaaaaataaaaaataatacttagagaagaaattttgaccttaacctaacccccaaaaggattaatttttcttataatgaaggatattctttggaaatcaaagtgtgcaaccaaactccacaatgaaattacctattaaatggaaaaacaaaggaaaccactaaaacacttcccagaacatagttcatttg

SEQ ID NO: 26433 - DNA, 654 bp, Glycine max
agcttcatggtgaatcaagaatgattcttttatgttttgatgataacaaagatgataacaaaatatgatgacaaaggtgatgacaaaaagctcaaaggtcaatcaaaggatgagttcaagatgttcaagaaggagtcaagaacaattcaagactcaagaggaaaagttgaagaacacttcaagattcaagaagaaggatgaattcaagaatcaagattcaaggatcaagctttaagaatcaagatcaagattcaagattcaagactcaagaatcaagagaagacttaatcaagataagtatgaaaaggatttttcaaaaacagagtagcacatggatttttcacaaaacatgtttaccaaagagtttttactctctggtaatcgattaccacattgctgtaatcgattaccagtagcaaaattttttgaaaaagttttcaaattgaatttacaacgttccaattaatttcaaaaagctgtaatcaattaccatgttttgggaatcgattaccagtgcctttgaacattgaaattcaatttcaaatgtgaagagtcacatcctttcacattaaaagtcttgagtaatcgattacactgatttggtaattgattaccaatgattgtttctgattaatcaaaagatgtactctttaa

SEQ ID NO: 26434 - DNA, 447 bp, Glycine max
gcgcttgcttctacaattactagcactttggtttctttttttgtatttgggtatattatgacatttggataatttagtatttctttatttgcatggcttgattgaacaattatgaattttgttatatgactatgtggtttttatatatttgatctattcatgtttcttgcttcatgattggtttatattcttcaatgtatgtcttgtgaatgattaatagtatatgattgtcttatacttgttacgcacttttggctttttgttgttgccaaaaggggagagaaataggaattaaaacaagaactcacataagtaatcaacttagtttcaagtaaagcataaactcaaaaaccaagggggagaatggaaaatttaagtgagtgatcgactaggaaaaagtgtgtgtttgtgtttcttgatttcagagttgtcatcatcaaaaagggg

SEQ ID NO: 26435 - DNA, 405 bp, Glycine max
agcttggttatttggctcagtcagagataaaaaaaaaaattctttcgtctctacccgttgtctctcactatccctttgtgtgtgagatattaagatctaagggagcataagatgcaaggttgaatgtgattatactattcttatgatccatcataaagagaaaagtgtattccatatgcagtgaaaagttgaatatccatgaaaccccatataaactgcatccaaatgaattgcagaaagaaatcagtatgcaaacaaaattccccaaaagcactggttctattatcagtaataaacacaagtaaaaccaactttccaaaatcaaaactttaaagaaaaaccaaaatcccaattgcaagaaagcgcctataaacacaccttcaaagtccatagataaatgccttg

SEQ ID NO: 26436 - DNA, 431 bp, Glycine max
  unsure (1)..(431): unsure at all n locations
tgaactcaanagagaaataaagaaaagacactcataaggcttaagttgtggaagaaaaatgaaaaaaaatactctgacaaggcttaagctctatagtttaagcttgatactagaagaaaaatgaagaaaatggacttacaaggcttaagctcaaccctagaagaaaaatgaagaanaggcacctacaacgcttaagctttgagccttaagcttgatcttggaagaaaaatgaagaaaattggcttacaagatttaagctttgtagcttaagctcaagcataaaagaaaaatgaagaatacgggcttaaaaagcttaaggtttatggcttgaggttggccttggaagaaaaatgaagaacagactctaacaaggcttaagcataagtgcttaagttcaaccccgaaagaaaaatgaagaaaaagaacttacg

SEQ ID NO: 26437 - DNA, 405 bp, Glycine max
agcttagtgcaaagaaggcccatcgagaagtccaaaggcacgtgaccaccttactcagcctagacattgtgacgctcaacgcatgatcacctcgctaagccctgaagaggtgtgcttagcgcaaggtccattggattttaagctaccttgggcttaggggaaagacacactgagacctagaacactctaatgaatacatccaaagtctgagcatctctaataaggggaatcttcttgtttttagccattctccccctcttcctttatccatcccttttacaacatactcttgttgtgcaggatcctcatcacttttccaagatgatacagatctttctataccagtttatatgttcgatcctattttcattctcggaatatgtgtatcacccggataatcaaaac

SEQ ID NO: 26438 - DNA, 301 bp, Glycine max
tgagctgtcgagaagcataggccactacttgtccccgctgaataagcactccacccaaacgcatcttatatgcatcacagtacaccacaaagggttcacttgggttaggtaacactaaaactggtgcagtggccaacctttccttaagggtacggaaactattctcacattgggcatcccacacaaaaactagacccttacgagtaagcttagtcaaaggtgaggctagcgttaaaaagccctctatgaatatacggtagattcctgctataccacagaaactccttatctcaaacactga

SEQ ID NO: 26439 - DNA, 372 bp, Glycine max
tctctctctcccccacacactttttcattctccaagttgcttctaattatgtctccagaaactataattgagaatttaacagattaagtatgtagggcttgatgtaggcacagagaaagcgttccagcttgagccaagaaagtctaaaccttctatgtagtacatccacaacttctcagctctttcattgcaactcaccacccaacaatgttcactctccctaggtttaagataatagggcttgacacctagcggcttccttttacgggttgtctaccgatctcactggttcactcccttgaggaatgttcctcgagtcgcactgtgtttctgaattgagtccttaattcttatagcagcaggcatattctt

SEQ ID NO: 26440 - DNA, 436 bp, Glycine max
gagaccccctagcctgcacatgtgttgtccgggctgcttcagtcaagttgcccagggtggacatgttctttggctttgcaagcaagatttgacatgtcagttgagggaagcctctatatttgactactctgcccttttctgaccattggagagagtattgaagacatatattacattttgtttgttgttgtaggtatgtgcggtgcatgtgcaatactcttgcatacatgtcactcgtggagcgggcacatactgagacgtaatgcatgggtaagtgtggttatgtcgtggtgcaaaaaattagggcaccactttagctcccaccagttaccgaagagtttgcctcttttttaaatggagtggatgtttgattcgtgaccagcgtcactttaaatttctacttgccctttctaaatcttctttattcctgtactta

SEQ ID NO: 26441 - DNA, 389 bp, Glycine max
agcttcgaattattattattattattattattacacatacatataaattcgaatagttctactgataaaaaatcgaatagtttttttaagggaaaaattgaatagttctgaatcatgattaggactaattttcatttgacggttatgcaattttcatttaaaaaaatgttttctagatttgaactaacattcacgtctcaaattaaacatgcagattactttaccatctcaacccatcatctgtaaatacttttccccaattctttttatactctatttcataaaattaatcgtatacgcttgattgaactatagccttttggatcccacaaactgaactttaaaacacataatctgccatcttttctgaaaaaattgtcccaacctta

SEQ ID NO: 26442 - DNA, 364 bp, Glycine max
ggtattgacaagcgtgctattgagaggtttgagaattaagctgctgagatgaacattatgtcattcaaatacgcctgggtgcttgacaagcttaaggctgagcgtgagagaggaattaccattgatattgcattatggaagtttgagaccaccaaatactactgcactgttattgatgctccacgacatcgtgatttcatcaagaacatgattactggaacttcccatgctgattgtgctgtccttatcattgattccacaactggtggttttgaagctggtatttccaaagatggacagactcgcgagcatgctctactttgccttacccttggtgtcaagcaaatgatctgttgctgtaaca

SEQ ID NO: 26443 - DNA, 387 bp, Glycine max
agcttgtgactgttggcaatttctttaaaactagtcactaataaagttgtgacttttgaaaaaatcttcagaaaagaattgtgacttttggaaatgtattttttgaaatcagtcactggtaatcgattaccattaaggtgtaatcgattacacatcaacagatgtgactcttcattttgaattttgaaaattaaaacgtttagaagctctggtaatcaattacaagtattgtgtaatcgattacacaagtttaaaatactttaaacatgagtataactcttgaaatttgaaatcttaacgttttaaaacactggtaatcgattactaccttctggtaatcgattaccagagagtaaaactctttggtaatgaatttgtgaaaacttc

SEQ ID NO: 26444 - DNA, 442 bp, Glycine max
  unsure (1)..(442): unsure at all n locations
tctacttatgtggcaaggcgggcttccttcaccttcttgtttcaaccgcgagctttgactaccactcttccttccagcgatgcttctctttatatctgcctgagtgggcttatagcctaaaccatacttcccatgatttcctttggcatttatcaggctagttatgccgtcgttgtctttgcctaaacccattccgggttcttaaccgttccccaacataactcgggccatcattactgctgcatcggacaggcaaggctgcccagagaagaagtccacggaggaaatgcttaccacctcacaagactggaaagcggtttctaatgactcctctacagcttccacataaggcatagaggatgggcagctcaccaagatgtcttcctcgtctgatacgatgaccagatgcccttccactacgaatntcaacttttggtggagt

SEQ ID NO: 26445 - DNA, 391 bp, Glycine max
  unsure (1)..(391): unsure at all n locations
agcttgttaggagctgtcggtgaataaaggtcctcaccatccatttcaattttctccaactccctaccacatatggtaaaaataaacattaacttctatcaaagacacattgaaaatttaacataaaaatccacaataaaaataagccttcagacanttggccagtacctccggataccagctcggcgttcttctttagggagtggaaatagtacaccagagatggatgtaactttgtcaaagaaatcaaactctcttttaaatatgtcaagtgcctttggattaaaaccatcaattatacgctgccttaccgctggcagcaggtctagaaatgaaccattctgaaataaaaatacagagataaaatctataaagtatgatgtaaaaaaaa

SEQ ID NO: 26446 - DNA, 427 bp, Glycine max
  unsure (1)..(427): unsure at all n locations
ggaacatngaattaagcgtatgaattcgaaagtgaacttatataattcatcaataattcaactcatttacgtccttatctcaagaaaaagaatattaagtagtatgctttttatgaagtttgaacaagaaaaaaaaaaaaaagagcaactaagtgtgtatttggattagttgtggaaaaacaaattatttaataattagttatatcaaataaattttatatttagatatattaagtgaaatttgttctaagataatctatttagtttggtttgtactgtgtgaataatcattattaagagtttgaaaatacttttagtaattaattttatatttaaattaataaattgtttcgtataaaatagaaaaagcaaaagttagccaaaaaaatattttatatattagtttctaattacaatcttcaaattt

SEQ ID NO: 26447 - DNA, 389 bp, Glycine max
agctttttctaaagcaataaaaatattatgtgattatctattttttcttctttacctttccatcaacctccataaaagatagtttgttatagactattttgccaaaaaaccaaatttgattctctatgatccttgtttcttttttttaatctatgttcaatcaccttttcccataatttcataatatgactcaaatgttatatctttgtagttagcacaaatttgaatatgtctttaaaatttttttgaaatatataattaggggtaggtatacggtccatcccacgaaacctgcattttagacatgtcggataagtctagtccacgaaataaatggactttctttcaaagttcgtatatgggcccgcaaaacccacatatacacggac

SEQ ID NO: 26448 - DNA, 404 bp, Glycine max
agtgataaaatccataaatatatcctcctaaacgacctttatcaacggaataggttgcagtaaaccaacaaaggacatggcttgatatttattttttctaacacatgtcacaatggcgaatgtaaaaaaattacatgcaagtcatttatatattttaatgaaactagaataccttctggtgacggtgtcatggaattcattcgacaaaacatgaattgaatcggaattcttagagcgaactaatcaacccttaaagaaaaatagcttatccttaagagtataattaggcatggatgaaggatttgtgaatgtatgtgcatgaagcttttgatgatgccaagataaaagcaacacaaagtttatttcaagttccaatctagaccaagaaaacaaagatcaagaag

SEQ ID NO: 26449 - DNA, 376 bp, Glycine max
agctttggaatatttcaagcaagagtttggagtgcacattgaagttacaaagatgtggagagctatgaaagaagcaaagcaactagtggaagggaatgagaggaaacaatatgccaaagtatttgattatgcacatgaattattaaggagcaatcctggatcaacagttaagatcaacacagtgccaagtccagaaggtccaccacaattgcagaggctatatatttgtcttgctggctgtaagaaggggtttgttgctggatgtagaccattcataggtctagatggatgttttctaaagagtgcatttggaggaaactttctctctgatgttgggcttgatggaaataaccacatctttgttattgcttatgtt

SEQ ID NO: 26450 - DNA, 331 bp, Glycine max
tgtaccttggaaacacatcaaatattcacttattagctacattggattgggcttctaccaattcaattaaatttattttcaaccacacacatcaaatattcacttagtgcatgtgaaattacaaaactacccctaatacaaaaaactagtctaggtgccctaaaatacaagggctgaaaaatcctatatttctaaagtactctacctacattatggagccctaaatacaaggcccaaaaataatgaaaccttaatctaatatttacaaagataagtgggctcatacttagcccatgggcccaaaatctatcctaagactcataagaaccct

SEQ ID NO: 26451 - DNA, 380 bp, Glycine max
agcttaaacattcaatttcgagagtctcgttatattacgggactcaatcagacatccgagtaaaaagttattgtcgtatgaattggcttaaagcataaacattcaactttgagcctctcgatatattacgggactcaatcagacatccgagtaaaaagtcattgccgtttgaatttgctcagaggctcaaaattcaatttcgagcgtctcgatatattacgggactcaatcagacatccgagtaaaaagttattgtcttttgagttggctcagaggttcaacattcaatttcgagcgtcccgatatattacggcactgaatccgacatccgagtaaaaagttattgtcgtttgaaattgctctgatcttcaacattatat

SEQ ID NO: 26452 - DNA, 335 bp, Glycine max
aactttttactcggatgtccgatagattcccatcatatatcaacacgctcgaaattgaatgttgaagctctgagccaattcaaacgacaataactttttactcggatgtccgactgagtctcgtaatatatcgacacgctcgaaattgaatgtcgaagctctaagcctattcaaaccacaattaccttttactctgatgtctgattgagtgacgttatatatcgggacgctcgaaattgaatgttgaacctctgagccaactcaaacgacaataactttttactcggatgtctgattgagtcccgtaatatatcgagacgctcgaaattgaatgt

SEQ ID NO: 26453 - DNA, 383 bp, Glycine max
agcttgtgctcgttttatttaaatctccaggatcatgagcaactaggtgcgtcctactataaaaagtgatcaaataacaagcatagattcaaaaggtactaggttgcctcctagtagcgcttctttaacgtctttagctggacgccttatgacttgtcggtcactgacctagtactttgcttacctttggctttggacttggtcgcttattggtcggccatgggtcataagcaacgctctaacctttttgtggatgagctgaggtgaactctagaggtgatggcggtgcgtctgttgcccgctgccggccatccccaggctgctgtggtgtttcgccctgcgcctgcctggagacgcagtacttcttgatgaaagctcgatta

SEQ ID NO: 26454 - DNA, 393 bp, Glycine max
tggttttggtttaaatactatttatacatgatttaagacttgtaggatgcaatttgagcaaaattgggtgtgggcaagagggatttcgaaatctgccctattatgcagaaaattgttgttgaattgtgcagcagaatttttgttcttgtgcagaaaatgcttgtgcattgctggttatgggaaagatagtacatattgggttctggacattttctggcagatcccaacggtcaaaatgtagacttatgtactaagaacctctagtacaattttcaagtcgatccaacggttaacgaatcagaacgaatggaatgttactggggtatatgagtaacgaaagctgtaatatgtgaatgtgttttgggcagagttttctgcctctgccctgttttc

SEQ ID NO: 26455 - DNA, 289 bp, Glycine max
gtatacaaaatatagcccaggaaagtaaaaaatttaatgactgcccacacatactatcttgtggggggtatgaactgcttgacaagaaacttatggaggagaatagcaggcgtcgacatgaggaacatctgtttattgaaaacccaacactcaaatttgacccaccatccccagtggcaagacacttgaagtggaagatcgcccacacaaagcggtatggccaaatgacatctgaagtggcacaagaaattgcagacaaaattgtgaggtcatgtattctttggttact

SEQ ID NO: 26456 - DNA, 414 bp, Glycine max
tcattaatacgctacctcatgaagcatactcgtggctttttagaagctagattcttatctatccacacccttctattaactaaattaacctctttgaaaataattacggataaaaataacacaataaataatcaaacatcaaacataattactaatatatatatatatatatatatatatatatatatatatatatatatcagggtgttacacgtaacaatcaggaggtctttgaacgactagaattattggagaaccaagcaaatcagaatactatacgaactacaggtgggaacagaggtaataatggcggtaatgacaaaccgaggcaaaaccgggttgagggagtaaagctcaatgttcctcccttcaaaggcagaagtgatccaaatgcctacctggactgggaaatga

SEQ ID NO: 26457 - DNA, 372 bp, Glycine max
agctttgatcctatcatccaacccaatgaatgagggtatacctctgaaggcacttatcctgcattctgtccaatgccacaaccaaagggtaactaattgtaaaccctagctccagccattgcaacattttactagctcaaccaatcaatacacgaatagagggcaatttcacacattaatacaaaagagtatatatatatcaccaagaaggatatggatgtgagtgattattgtgtcttgtttgttaaggaataatatttatggtgatggctccacccaagcttcttttaaattagtataggagcacttcaaagtcatagcccacttgcactccattgctttagtaattcaatcatagagcaccaattttta

SEQ ID NO: 26458 - DNA, 420 bp, Glycine max
  unsure (1)..(420): unsure at all n locations
ngatccttgaatcttgattcttgatccttgaaatcaactttcctcttgaatcttgaagtgttcttcaactttcctcttgaatcttgaactcattctttgattgacctttgagctttttctcatcaccattgtcatcatctttgatatcatcaaaacatctttgaatcaatcttgattcatcatgaagctntgcttctacaaaaacaaggttgtccaagacctcatacaattaatatagcaacttataccctaatgtcacatcatatcagagcattctgtcccaacgtctttcagcacaaggttccttaaagtaattcacctagtcatctgctcccccgaacacatagttcaagatcataacaggatcaaaacacanacaatagagggagtgagttatcacattcctaactattagagaaa

SEQ ID NO: 26459 - DNA, 406 bp, Glycine max
agcttttgtcatcacctaaaaaccatttttaaaggtccaacgccttgatatggtcctcttcacttttattggtcaaacgtggacttttaaaatcctaaaatcaacacgtagctttgtcatctctttcaaaaaaaaccaagagatcattaatggtccaatgccttaatgttttctctcctttcaaaagaatcaaaagatcgtttaatggtccaacgccttaaaatgaccttttttgttcagtcaaaatatatcttgcaaaaaagggataaaaacaacttaaccagcgtttagttctcaaagaactacgtaggtttgatttccttatcacaattgaggaatacctaggagcaagggaaacacccttgtcgaccacaaaaagataaaaaatacaaaaggcataaaaaga

SEQ ID NO: 26460 - DNA, 326 bp, Glycine max
  unsure (1)..(326): unsure at all n locations
aaaacttctcatggaagatacgctagtctataaacagaaacatgtgtaacacttgctgtaactttgatgaatgagagtcttgtgagacacaactcaaatttcaacttctctccctttttcttccttcaatttcatgctctcccctctctctatctctccctctttcttatcctccattgaagcatcctctccaagcttcttatccaaggctcatcttggtggtgaagctccttcttccaaggcttattccctattggatggtgcctcctctcacctattctcctttgncttctgctgcatctccatggtggaaaatgaccattaat

SEQ ID NO: 26461 - DNA, 405 bp, Glycine max
agcttcatggaagaagcatggtatatatttagattccttagatgattttggaatgatggaaaagagtgaaataaaatagttacaattatttggacactataaattgtagtggattttatttaatttcatttaatacttgtattctttttcgaaatctgtatattacattctattaccccctattagatatgcatatcataagtgtaattaacaaagacatttatcccttcaacgaaggttgatataatagcgtatttgtgccaaaatcgtacgtgtttgtattcaactgtggtagttttttttttgggggcttgtattttttttttccatggtggataatagtttgtagtatattcaaagcttttgcggtcgcagacctggatcaatgcctgtagtcgtaaattt

SEQ ID NO: 26462 - DNA, 449 bp, Glycine max
  unsure (1)..(449): unsure at all n locations
agctgaactgtagagttcttaaaaggtggattatcaaaaagtatatgcatcatgtcggcatagataatacaaattaattcatttgaatcttcctcaattgtacagtcttatacccgtataatttctggatccctctctttctagtgtgattcatcgaaatattacatatccatcaactttcgtttgattcatcctcgaactatacgtgctgggacaaagattttctctgataccatttgagttacatccccatgttccaacttcccaccatcatcgatatactctttatagaaggaaacatttgtgtagatctttctactaagaaaaatgtctcattattagtgtcatgatcgcatccaggctacacccaacaacttcttgattngtcatgaagttaaaacctcaccatttaagatagacatggcaacagacacggttcaagtttaaaa

SEQ ID NO: 26463 - DNA, 396 bp, Glycine max
agcttgcttgtggggcttctatggaggctggatctttgagcttcaatgaggtcctttaatggtgattttccaccatggagatgcagcggaagacaaaggagaagaggtgagaggaggcgccatccactagagaataagccatggaagaaggagcttcaccaccaagatgagccttggataagaagcttggagaggatgcttcaatggtggaaaagaaagagggagagaaagaaagagggggagcacgaaattgaaggaagaaaaagggagagaagttgaactttgagttgtgtctcacaagattctcattcatcaaagttacaacaagtgttacacatgcttctatttatagactatgtagcttccttgagaagctttgttgataaaacttccttg

SEQ ID NO: 26464 - DNA, 436 bp, Glycine max
tccttacaacaaagagaagaaaatgaaagcttgcagaaatagaagtagtggggatttcgcctccacctctaggacctcacaatcactcacaaactcatctcaagctcataggacgacttcctcttccagctctggtctctgcggatcttcacacaacaaattctatcaaactctttggaacttggacctttctctctctagaactctccaattatgcagaagcttcaagaaaaggcccaaactcccctcagaaatctgattttagacttaaataggtggccttgttcgtgctcctgtgcttagcgcaattctgaaccgcttagcgtgcattagtgaatttcagcttagcgcggcttttctcgctcagcggatggactgaaacggtgcacttagcgagatgacccttcgctcagcgaacatgcacagctcatccttc

SEQ ID NO: 26465 - DNA, 371 bp, Glycine max
agcttgtcatcgattacacacatactgtaatcgattaccagtgtagattttcagaaaatattctcaattgtcacatcttttcatttggctctcgaatggctatcaaaggcctatatatatgtgacttgagacacgaatttgctaagagtttttcagaacaaaaaaaggtcttatcctcttaaaaagaaaaatcgttttatcctcttacaaattccttggccaaaacacttgtgattcaataaggaattatttgagtgctcaaattgttcaatctatctctttcaagagagattacttcttttcttcttctttattctgaaaaagaattaagagaccgagggtctcttgttgtaaagaaatctgaacacaaa

SEQ ID NO: 26466 - DNA, 444 bp, Glycine max
gacgctgtaatgattatagcatgcacacacacacatatatatgtatatgaattgttttaataaattaggaattaatagttcaaataataaaattaaattgaaggaaattaatatattaagattcaatgataaatacttttaatgcatttttagtttaatcatttattaactctttttaatggaaaataatatagttcaatttaatatatgcatgttttgtgccatgtaaatattaatattgtgtgatgtgtatatgattcatgaggtgtgataacatgttgctttgggattataacattgcgattgaaattgaatgcatgtgataaattgagtatgtgttgaattgtaagatacatgtgtattgagatgttgtatgcattgagtagtgagttatgaattgtgcaatcacacaattgttagaccatttaacatgtagctttgggg

SEQ ID NO: 26467 - DNA, 400 bp, Glycine max
agcttagcaaacttgacagctcatcttcttctggattcttcctcgcgcttagccactgaaggttgcgcttagcgaattcttgctaagtcagcaacttggcttagcgcaagagtgaaaaacagcactttgccaaagttgcctatgtaacctgaaattgagagaaattgattattaaacgcacaaaacaaaagtataaattatctattacctatatgtaaaaaaaagtacttatagtattacaaaacaaccataaattgggaaagttttatacaatatacacaggttttatacacaaaagttagtcgtattcatcgactaacaactcccccaaatttactgttttgcttgtcctcgagcaaagagaatagctcacttgtcctcaagtggtaaaacatgcagg

SEQ ID NO: 26468 - DNA, 416 bp, Glycine max
  unsure (1)..(416): unsure at all n locations
gctctccccatttcttataatagggggagaagtgaagataaatttcgttcagccctcctggtaattcagaatcacttaaaattagtgaaaaaaattggttccgtgaagaaaatccaagccgaggcgcttccgtaacgtttccgtgggtgatttcgcgaaggttttcgaccgttcttcgacgttcttctttcgttcttcatcgttcttcggtcttcaaccggtaagttccctaaatcaaacttttcaattcattttatgtacccttagtagtggtcctcatttgcttttacgtgctttcatttacatttcatttactttccgtagccccttttgacgtgcttaagccatttatttaagtcatttctcgcttaacctaaaaataaaataaatttccaccgatcgttngaattgtatca

SEQ ID NO: 26469 - DNA, 381 bp, Glycine max
agcttgcctttagaggtccaggaaggtataaagcggtcgaaggaaccagatccgctcccgagtatgacagccaccgatttaggagcgctgaacaccagcagcgcttcgaggccatcaaggggtggtcatttctccgggagcgacgcgtccagctcagggacgatgagtatgccgatttccaggaggagatagttcaccggcggagggcatcactggttacccccatggccaatttcgacccatacatatccctcgaattctatgccaatgcttggcctacggaggagggcgtgcgagatatgatatcctgggtgaggggtcagtggatcccgttcgatgcggatgctatcatccagttcctaggatatactttagtgctgg

SEQ ID NO: 26470 - DNA, 346 bp, Glycine max
ccatgctatgtgctcgcgacggagccctctcattcgttcagaacttgagttcattattgctaccccatagagctccgcgaaatttgttccggccatactcttccttgcgagccctcttggtctcttgttcaagggcttttgcgggaatggcattctcttcccgtaacccggcgcactccttccgaacgtgtgtagcagccaacttgaacttctccttggcgagttttgcctttcctaactcgcttttgagagcttggacttcttcgtcctcttccggtgcttcaaaattctcttcgctgacgaactttaacttggcgagccaatctaaacctcgtatgcgaacttt

SEQ ID NO: 26471 - DNA, 393 bp, Glycine max
agctttgagccaaaatcctgactcactataaaccttgacccagggtgagaatgtcaatccttaccctcggaagcaaaaaaagaatagaggggaaatttccaatcaaagaaaaagagaaggaaaatttccaatgaaagcaaaaaaagaaaagaaggaaaattccccaatcaaagagtgggagaaagcaaaaagaaaagaaaggaaaattcccaatcaaagaatgggagaaagtaaaaaaaggaagaagaagaaggaaagaaagctcctgatcaaggatcgaaagaaaacagaagaaatgtgcagagaggtctttggaccggacaatatctgaacaatacagaattgccaccaaatgaacgaaaaaagaaggaaagggaaccacgacctaaaata

SEQ ID NO: 26472 - DNA, 426 bp, Glycine max
  unsure (1)..(426): unsure at all n locations
tctacttatgtggcagggcgggcttccttcaccttcttgtctccaacgcgaactntgaccattgttcttccttcccgcaatgcttcttttcatgtctgcctgagtgggcttatagcctaaaccatacttcccacgatttccttgagtatttatcacgctagttatgccgccgctgttttttcctaaacccatcccgggttcaaaaccgttccccaacataactcgggccatcattaccgctgcatcggacagacaaggttgcccaaagagggagtccacggaggaaatgctgaccacctcaaaagactggaaagcagtttctaacgattcttctgcggcttccacataatgcatggaggatgggcagcttaccaagatatcttcctcgcctgacacgatgaccaagtgcccctccactacgaattt

SEQ ID NO: 26473 - DNA, 382 bp, Glycine max
agcttaaagtgagcactcaaactggtgtatttacccccaaggcctacactctgaagagttcgctagggcatctccctcctgattcgggtccaactcaaaaaacattttagcacacagactctatctatgaattgtacaaaacacatgactcctcaattgttctcaaaataattttatctagtcacacttgtgattaatctcgtcgggttccctcagtggttcccatcacaatactcgttgcccttaaagggtcttatagttgtgtgattgtataattcatagctcacaactcaatgcacacgacatgttaatgcacatatatattacaagtcaataattactcaatttatcacatacactcggtctcaatcacaatggtata

SEQ ID NO: 26474 - DNA, 386 bp, Glycine max
tgtgaaatcaatggaatccaagatttcattggacacatgttcaattatgttcttagaaatgtgacctaagcgcttatgccataatgctcttgagtttgtattatcaattctatgcttagtaccacacaattctgcattaaaggattcaccataggaagctacagtataaagtaaatatagattatcattaaccaagagtgaaccattttcaacaatatttgaattaaaagacaacctgaacacattgtttccaaatgaacataaataacccaatttgtccaaataagaaactgaaactaaatttcgtctaaatgacggtacaacaaaagtctttcaaatcaaaataaaaaccagtgcataataataatctaaaatgccttatagct

SEQ ID NO: 26475 - DNA, 382 bp, Glycine max
  unsure (1)..(382): unsure at all n locations
agcttgtataatagaaatgtttacatantagttcaaataggttatgtgccataacgggagtaatattcactactttttgcacacaaaacaaaaccttgaatttttttgcctcatcggcataaacattagcatgtaggaaaatgaaagacaaaaatattttgttataataatgataaatgacaaaaacgtagacgcagtttcttgggtgtttacaatgttgttctcataaatgctactaccttcataacccgcataataagtgtttactttaaaggacagcataggttcctgaggtattggagatagaacatcaccaaaagcacataaagaattacatgtaagttttgaccttacatcaattgctagcactctacattgggtt

SEQ ID NO: 26476 - DNA, 418 bp, Glycine max
aggtttgttctggttggtgaattacttgatagcattcaatccattaaccttgtagttaacctaagttagtgaaaacttatacaatgctcgagtttggactataactaaactaagtaacgctttggctcttttcttgtagtccttttagatgtgaaaagagcagggaaaactgaaaagcataggagtcctaataagtgataatgaaaagttttgttgtaacatataaagtatttgttcaaaatttgcctaaatgggttgagtgtagttggttgagttttaaggttacattgacatgttccttcctttgtgaaattctagcatatgtgggactaactcttttcctctcttgcctgcatcaggaatttcaaaaactagtccttcatctgttccttccaacttatctattctgtcatatagt

SEQ ID NO: 26477 - DNA, 358 bp, Glycine max
agcttgaaattgaacaacggaagctctcgagaaaatcgagtggtcataaattttcacacagatgtccgattcggggaaataatatatcgagacgcacgaaattgaacaacggaagctctcgagaaatttgaatggtcataacatttcactcggatgttcgatccggggacataatttatcgagacgctcgaaattgaacaaccgaagctctcgacaaattataatggtcgtaactcttcacgcgaatgttcgattcggggacataactcatctagacgctcgaaattgaacaacggatgctctcgaaaaatttgaatggtcataagttttcacacggttgttcgattcgggaacataa

SEQ ID NO: 26478 - DNA, 371 bp, Glycine max
  unsure (1)..(371): unsure at all n locations
tcaagttttaagttctttctcaaactgtcctaagctaagttcccaaagtcctattaacaacttccgtttgcccatcggtttgtgggtgacaagcggttgaaaataacaatttagtgcccaacttgctccacaaagtcctccaaaaatgacttacgaacttagagtccctatcactaacaatgctccttggcaaaccatggagtctcacaatctccttgaaaaacaaatcagccacatgggaagcatcatcaacttttttacatggaataaaatgagccattntagaaaacctatcaacaaccacaaaaatggaatctctaccattgcttgtttttggcagccctcaaacaaaatccatggattaaataatt

SEQ ID NO: 26479 - DNA, 336 bp, Glycine max
atttgagaagctagatccttatctatccacacccctctattaactaaaataactttcttaaaaataattacggatgaaaataacgcagcaaatattcaaacatcgacacataattactagtagcatataaatatatatatatcagggtgttacgactcttccagccttatagaaatttcgtcctcgaaatttaccttactcacacaaggatgggtgagcttctcacatctgactatgtaattcccatgtggcatcttctactgatgcacctccccagatcaccttgaccaacagaatctctttccctcttaggtgttatgttcgcctatcctcgat

SEQ ID NO: 26480 - DNA, 402 bp, Glycine max
tatggggtgcccatcacatgtggtactacgtggcagtcaggcaatggtgcacaacaagtattgcacatgcacaaaacgcgcataaacccatcatgcactgttgcccacctccaactgagctcacgtactcccacgtagcccataacctcgtttctctcaacaccgggtccccatcaatcctcccaagcttccccaacatcaaagtaaatcaacattcaaacagcacaaattaccacagccaagaaaacagggcaaaggcagaaaactctgcccaaaacaccaaccaaaatcacagcttttctcacttaaagaccccaataacaattcctttcatccaattcgttaaaccgtggatcgacttcgaaattttactggaagtctatagtacataaacctacattt

SEQ ID NO: 26481 - DNA, 342 bp, Glycine max
aatgttgttgcatcagcatggactgtatagacactcgtctcactatgctttagaaggaaggttgtagttggtccacgactgccggctgttatgcagttagtcacagatggtggataggggtaagaatgaatagaatccttgggccatcaacttttaggaacgaatgaccatgcacatgttaaagctgatgcgctctagaacatgaggagaataggtgaatgccccataaatgggtatatgtggagcaggacaggacatcatactgtgctgagatgagataacagataatgtggatgagcctatagtgcttattctcgataccatcatgatataaattggtcg

SEQ ID NO: 26482 - DNA, 353 bp, Glycine max
tgagtgtgaggctcctagcagctggagcacttatagcattggcgacgtgacgccaaacaacgacatctgtttggctctccgggcataatagtgcaacatatagccaccttctggcagataaagcaggaagatcactacccacgtgtggcacatgatggggagtggcaacctatacaacaacagcataatgtatctgtcatacgattgcatccactctgtgagaataccaatggactatgaactgatacacaaaaaagtacatgatgactgacatgccattcttaaatgcttgataagaatgtgacatgattctctcatcgtctgagaatgtacacacctgacgaatgtaccac

SEQ ID NO: 26483 - DNA, 404 bp, Glycine max
agcttgggacattggggaagggttttggaagaaagaaggagaaaggaatggttgttttccaaggctacacgaaaaataagacttgaaacactctagtgtttctactctcgggaaaagaagcgtttctcacacaccagaagacatatcgcagatcgcaacggtcagatcgtggacatctatcctgtgaacctgcagaccaaagttcaagaagatccaacggttaacgaatgtaggagggcacatttaccgagacagctcagacaacttccttgagaaactttctcgtgaagcttccttgagaggcttctttgagaagctaaagtcttaactacccacacccctctaataaataaaataacctccttgaaaataaaacatgatgaaaataacacaacaaataaaat

SEQ ID NO: 26484 - DNA, 392 bp, Glycine max
gctggcgctgacacattaactgccctaactctgttagagtggtgatcactcgtgtcttgaccgtgacttgatagaacctctatttaagcgaaggcgcctgacacgatcccatgttttactaaagtgaaacaaaacctagttcgaatcaaaactctgacatctatcatgggtggaatggatgaatgcatgaagaaatgtacatgacacagatgcattttatgaatacgggagcccgggaaattgtccccttcttagatacaacattcgggcagcatggcgcccgacgtatgcattttaaaaagcgacacggatcctccgtcggtttgacaaagtgaggggatcaagatgcaatccgcgcataatgcagatgcgaaaggcacaacacgacgatg

SEQ ID NO: 26485 - DNA, 399 bp, Glycine max
agcttagcgcaaatccttgtagcaatggttaggcttagcggtcgcttgccagctaagccgattatgcagaagctgaatttctgcaactttcgctaagcggcctcacatgtcgctaagcggtagtgtgttttttgtgaaggctagctaagcggaccatgtcttgctaaacggccagtgtctttttcagtatttgaatttgaataacttgtgtcctgtttaactgtttggttcttttatttgcagatagcttataggaaatgcaagaatattggttcaagacccacaacacaatatgatacaaggagatttcactccttagatgcttggaaccggtacacagataatgtcctagggagaaaaacatcttgcctgagaggaaggtggagctctaccacactg

SEQ ID NO: 26486 - DNA, 393 bp, Glycine max
agctttaaagttctatcttttttgaatttcaaactagtcttttgtccgtgccgacctccgagctcatactcctatttaaatattaccaacacataagcaaagtttaataaggatgcttatttgtatgatcataatgttaagctatgtttagaaaaagtaacataaagtaagaatacaaacaaacccaatgctattgtagattgttggatggtgttgttctagtaatgaaagagaggttgcacaataaagagagataaataaatatatacatcaatattcacctgaaaagtagacatttaaaatcaatatactttagtggaggtgatataataacaaacatctaatagttgtcttggttatgtgatattgcaacataaagaaatcgtttatagt

SEQ ID NO: 26487 - DNA, 434 bp, Glycine max
ctatgaacaggcagccaaagttgaattaccattggctgttcgtctgcttcattactatgctggtgagagagaccagtaagacccatataagatttttatttatgtacctatttatgagtaaatactatatgcattgatagtgtaaagagtttttatataataattcaattacaaacataaatttattgatttttatgataagtatcttaaagtcagatcagcaagaatttatgtggaaactaaactctttattcattcacatatacttggttaagtgatttttatgattatttccgcccttaattaattcaggttgggcagataaaattcatggtctaacggctccagctgacgggaattatcatgcacaaacatcttattttttttattcatggagaagtcatatacttctacatttcatgcatgcatgtttc

SEQ ID NO: 26488 - DNA, 398 bp, Glycine max
agcttccttgagaagctagagggggtttactcacacctctttaatagctaagctcaccccatgccaaaatacatgaaaatacaaaaattaaagtccctactacaaagactactcaaaatgccctaaaatacaaggctaaaaccttatactactagggtacccttaacttgtacccttaatttgtagggttccctacaaacctaaaatggccaaaatacaaggcctaaaagtaggaaaacctattctaatatttacaaagaaaagtggacccaaccttggcccatgggctcagaaatctatcctaagtttcatgagaaccctaggaccatctttagcagctctagcccaatcctcttggagtcttttgctcatggctctggtgactgatcccttcctaa

SEQ ID NO: 26489 - DNA, 407 bp, Glycine max
gtcctagaggatggaccttttgtagacaaaggatcatgctgaaagttttgatgatgcttatggattacatgaatcatatgcttctcaaagatttactcaagacacagcaattagagttaatcaagatggatgatcaagacagtctatagagtcttagaaaggatattaaaatggaatggaattccaattggattagcaaaaggtttggccaagaattttaagctaaaaagtgtttttcaacaaatttactctctggtaatcgattaccagaggatgtaatcgattaccagtggccaaaactgatttacaacaactattaaaatttgaattcaaaatattgcactgtgtaatcgattacacatatatggtaatcgattaccagcagtgtctgaacgttataattcaaa

SEQ ID NO: 26490 - DNA, 387 bp, Glycine max
agcttgcaagcaccaagaagactattctccttaagaccatcattcaagtgacactccaagcaccaacgattgaaaccaaggaggtcatgatgggagaaaaagaggaatcagactatatgaccccctttaagaatttcttaactcaggatgtgttaccaccaaacaaaaatgaatcccaacacctgaaaaggaaggccaattactacatcatccttgacggagaactataaaaaagagggttgactgcacccttgcttaagttcctgaatagccagcaaacagactacgtcatgcaaaagttacatgaaggaattttcaacctttatacaggggggcgctccctggcaacctaggtagtacgcgctatctactattggcttacactca

SEQ ID NO: 26491 - DNA, 411 bp, Glycine max
  unsure (1)..(411): unsure at all n locations
tgtgcatggaatatttntgagtttataatgctgaactgggatcatccatttctattttctagtttagttattaattcatgaggctgcggtaaaactggtttaccttacagtttacattggaggttaaaaaaagataatgacatttatattatgggttatttaaggctcatttaaagttaagcatagggtttggttatgagcttctctctctctcccggatttagggagatttttttttcttttttcctgaaagtcaacatggatttcctgtattttgactntgtctttgtgaaggtattaaaattttaaaggcaacaagtgatggtacaataaatcttattgcatttactattaatttagctattctgaaaaataataataatgatacctcctatgtatatcaattagtgg

SEQ ID NO: 26492 - DNA, 233 bp, Glycine max
agctttgtttctctagagacctttagtgagcccaactgctagggttataggggggtctcgtattgtacacgtgcatggtactgtgcatgtaccaactccattttcgttgtctgcttcacattccaggaccattttctgatcctagcttccaatatgcagaaccattatccgtgtaacctgcagaaccatttttgtatccgccgacggatgtctaaggtatgatggcacatctg

SEQ ID NO: 26493 - DNA, 375 bp, Glycine max
  unsure (1)..(375): unsure at all n locations
aatactcacgcttntcgattcattctatgttcccgtggtggtccacattgtgttttgtgtatttttatcctcgnttcatttactttntataccccctcttgacgtgcttaagccattttatttaagtcatttctcgcttaacctaaaaataaaataaatttccaccgatcgtttgaattgtattatccgttaacttcgggtaaaatgaattccgaccgttcggtcgtgccgtaaccacgttggaaatcaaaaaagaggtaaaaatactataataatcaaaaaaaatcttttttagtaaaataaagcggaaaatcaatcggacgttttctctttgggatttctcattcttaaccgaattgactaataactaaagtg

SEQ ID NO: 26494 - DNA, 358 bp, Glycine max
agcttgtatgattatggggtacccatcacatgtggtactaggtggcggacgggcgatggtgcacaacaagttttccacatccacaaagcgcgcataaacccaccatcccctgttgcccacctccaactgagctcacgtactcccacgtagcccatatgctcttttctctcaacaccgggtccccatcaatcctcccaagctttcccaacatcaaagtaaaacgacattcaaacagcacaagctatcacagccaagcaaaacagagcacaggcagaaaactctgccaaaacagccaccaaatcacagctttgcttacttacagactacaataacaattccttcgatccggttcattaac

SEQ ID NO: 26495 - DNA, 377 bp, Glycine max
  unsure (1)..(377): unsure at all n locations
ggccgccacggagttntccgactatgctcttgtgtggtgtaacaagctacaaaaggagagagcaagaaatgaagagccaatggttgatacatggacggagatgaaaaagatcatgacgaagcggtatgtgccggctagttactcaagggacttgaaattcaagctccaaaaactaacccaaggcaacaagggggttgaggagtatttcaaggaaatggatgtgctcatgattcaagcaaatattgaagaagatgaggaggtaactatggctcgatttcttaatggtttgactaatgatatccgtgatattgttgagttgcaagagtttgttgaaatggatgattcgcttcacaaaacaatccaagtggagcaacaat

SEQ ID NO: 26496 - DNA, 383 bp, Glycine max
agctttaactctcatcgtccctcacagtctttagatttgggagccaatccaatccttgtgttcggactctcagccacttatgatagccgccgatgatcccattactgcttcccctaagctctctgtcctttcttcacgccgcatcccatgccttgcgaactccttggagtaccctcgcgttgtggtcactaaaaccccgtgtgatgaaaggcgtgatgctttcgtctaatggcgctcctctcatggggtagccaagctgtcttatggcgagaacgagattataattaatacaaccccttgttcccatcaagggaacatttggacatccttcgcatgaagatagaatcttgattcttccttccttctagcgagggaaccaatta

SEQ ID NO: 26497 - DNA, 415 bp, Glycine max
  unsure (1)..(415): unsure at all n locations
nttaaatntaaatttatacgtgcggatcaagttgtcaatggaagcaataaggacgattggaagcaataacaaacaagataagggacaataggccttacctcgatgaagaacgaaagagcagcacctcgcggaagaatggaagaagaagaggcacttgaaggagggagaagcagcagctcgcgcagaagaagaatcaccaagaagaagaaaagcctcgctgaagaaggagaagaagaaaagcctcgcggaaaggaagaagaaatggctcgctgggtgcactatttttttttttaaataacaaggggcatttgtgactnttcgcattaagtgctgggtgtactagcaataacgttgggtgcacctagcaacaacctttntcaagcatggagaagttcctcgaatcaaattctgttcg

SEQ ID NO: 26498 - DNA, 331 bp, Glycine max
agcttgtgtattgttgcattctacttatatatggaattgcccattgctttgcctgagaataacaattgcttgaccacaacagcgctgggggcggcaacggacaatggtctttcaaataaacctgttgtacatgaacaaacattatatcatgcgctgaccgtgccaaacgaaccagcgaagtcattgcataattgttacactaactatattcaatgtacctgaacaaaatgatttccaaacacgtgaccgacacatatgatgcggtggccagaatagtcaggtggtggttgacttctaagagggaaaaatgtcatgctttgttgtgggacaa

SEQ ID NO: 26499 - DNA, 409 bp, Glycine max
tgcaatgtcttcaactgtgaggttggggtctacagcatgttaaccttgatggttgaagcgatcaaggtgtatgagagatagacgtgcttcaaaccgaactacatcgtccatatcggcaatggaagtctattgaagcgatcaaggtgtatgagagatgtacttcttcttcttgaggaggatagtctcagtctgtcctaggctttgttcaaactattgaatagttaaagtctgttgtcaaacttgtggaatatcaactggaaaagggttgttggaagcatcatcacgaatggaggattgctcaccctctggacactcgggtcgttgggctcctttatttactcatttgccaatacgaagttgacgagaaggagtcatgagaatcccaaagctgcccaaatacagggaccta

SEQ ID NO: 26500 - DNA, 385 bp, Glycine max
agcttttgcctctccacctatatctatccttcacattaaccagaattaacaccactgacaacaatgtcaatgacttcttgcactccggatacaaagacttcttggaatcactttccaatatatcatatgtaggggcatgtgcttgctaaaactactcttatccaagatcacaaatcatttcctctaagtgatcccacattctacatcaaccggttcagattgggaccccctctgcatttatatcaattaaccatgtcatataattctttgtaatcccatcacatagaagatgttctcgtatgtcatcgagtacttgtcgtctctcattcaaatagtttatacaagaacaaaaatattttttatcctcatccgatcgacttctttt

SEQ ID NO: 26501 - DNA, 316 bp, Glycine max
ccttaaatctagctggatgtatgtcacatttattgtgtgaaaaccgtcttaaattatggagatcgtggtatggtattgtaagtgacatccttggccagagtggatttgattgggatggcactcagtacatgatcacagttgagaatgaaaatgcttggaatgaatattgcactgctagtattctgtaatatgttgctatttgttattcaaagtagattggattcgactttttctttagattccagttgcataaatcggctaaaccgcttcgattcaaggtgcttcaaaattgggatgatataaggaatttgtgtgc

SEQ ID NO: 26502 - DNA, 278 bp, Glycine max
agctttaaaaaccttcattgtagccttcatgccattttttcacaccttctccttgcttatggataaaatcttgtcttttaaggcacttaaggcaaaccatcaataacacaagtctaaaggacttagaattttcttcttaaaagttggctatcattaaaatactttaatttagaaaaggttttacttcaacaaaaggttgctctctattattataaagagcacaaaggttggtattttcctaatcatgactaaatgttacaagttgaaaataaaggttg

SEQ ID NO: 26503 - DNA, 263 bp, Glycine max
attgaaatgcaagtcaatgtctagcttttatagactcttcatgtcaagtcaagaacaccatcggaagattataaccttgagaaaaacctgagaaccattggaagagttacatctcttaactcttcattcaaaacttgtcactggtaattgattaccaaaaccatgtgatcgattacacaaagcattttatgaaaagatatgactcttcacaattgattttgaatttcaacgattagatacactggttatcgatgatcaatata

SEQ ID NO: 26504 - DNA, 296 bp, Glycine max
agcttgaaggataaagggaagacatgtattcggttattccagtcgttgatatatacgactacaacccatctgaactcccacgtgaaaatcttatgtgtatatatatatatgcatatatatttccctcatgtccctctttctcttttcgattttataaggtttttttcctttctatcaaaatcgagcttgacttgaaagctatggcacaagttgatttattgcatatatatagaagcaaagcacattctggataatttaaggtgacatacatatcttttaattattcttaatgactg

SEQ ID NO: 26505 - DNA, 415 bp, Glycine max
  unsure (1)..(415): unsure at all n locations
ntagcttaatgctaccattaaatagcaacgtgtgaggtattccaatgccaaagtcgtccctcatattttattattaattctattggaagttacgctgcatgcgggttctatatataaacaaacccatgattgggttaaggagttatttaccgctttgtttttattgattagggtatcaagcaataattgaaaacaatgaattattagtataaagggattagtttatttaaataaaaaaatcataacaactacataatgtaagtacataaaagtttatacaaattacaatccttgcattcgttatatataattccacttcgatcagaaggtaattaatacgacaaggttagctcccgcgcttactatctagtcaagttttttaaaggggtgggttaacttatttaaataaaagaaa

SEQ ID NO: 26506 - DNA, 394 bp, Glycine max
agcttcggaattccatttcgagcaactcgatatattacgggactcaatcagacatttaagtgacaagttattgtcgtttgaatttgctcagagcttcagaattccatttcgagaaactcgatatattacaggactaaatcagacatccgagtaaaaaattattgtcgtttgaatttgctcagagcttcggaattccatttcgagcaactcgatatattacgggactcaatcagacatccgagtaaaaagttattgtcgtttgaatttgctcagagcttcggtattccatttcgagaaactcgatatattacaggactaaatcagacatccgagtaaaaaattattgtcgtttgaatttgctcagagcttcggaattccatttcgagaaactcga

SEQ ID NO: 26507 - DNA, 360 bp, Glycine max
atgaggaagagtcgaagggtgaactccctgcttttattgttgaccacagagtggttcctggagatatgtctcgggggtcaggagaccttggggacgtcatgtggggtgctattgcccaaaaccaagcttgaccaatcccgacccaacccgggcatagtcggtcagtgagaacctgtgatgtacctaaacaagcgagctcctggcagtcaacagataaaaggaaaataagaccacaaagcaaggaggcttgtggtggctggccagctgtgaattttgtgtaatatgtggattgtggcctctggtaatcgattaccaacggtgggtaatcgattacaaggctttaaattgaggacaggaggc

SEQ ID NO: 26508 - DNA, 395 bp, Glycine max
agcttcaccatcagatggatgacatatgatggtcaggtccctttgattctcactatgccatctcatgtgagatgtggtggccattgaagagtacaatctttgaagtcttggaattagaggaaaatatcacattttttaatcaaaattttcttttcaatccctttcattgtgatagtcatgtactgacccttttgatagacaaagcaatttgttatgcttttatctgggttttttttccagtagcatgtcacctacatattgagataccgttctgacatattataattagatttgaagcttatagcttccaaagtatctaacaattcttttttattctcacatccttcccatagaggtgtttgagaaacatcaagcatataaaagaattcttgagc

SEQ ID NO: 26509 - DNA, 406 bp, Glycine max
ctacgtgataaaacctaaatgtaaataaaaataaaattatttttttataaaaaatctcatacattatatcattataattttttatggaaatcattatttttttttttgcaaaataaatattgaaacaaaattaagaaaatgaatgaaaaaatgtaaatttaataacacatactcaaacgattaaaagtcgatacaatattatacccatgttaatttgaagatgtcataaaagatttaattgaaattgagaatatttaaataattaaatccatatttactgactttcattgcttaaaataaataaattagtgtgagttaaatttggaatgaaaaaaaaaggtggacatcctttaactagcacggatactctcactcaacaactatcttttatataatatatgatctg

SEQ ID NO: 26510 - DNA, 391 bp, Glycine max
agcttccaagaatcaagatcaagatttaagaatcaagaaaagaattaatcaagatttgtatgaaaaagttttttcaaaaactgactagcacatggatttttctcaaaacatgtttaccaaagagtttttactctctagtaatcgattaccagattgttgtaatcgattaccagtagcaaaatggttttcaaaaagctttcaactgaatttacaacgttccaattgatttcaaaatgttgtaatcaattacaatgttttggtaatcgattaccagtgtgcttgaacgttgaaattcaaattcaaatgtgaagagtcacattctttcacaaaaaagctttgtgtaatcaattacactgatttggtaatcgattaccagtgatagtttctaaac

SEQ ID NO: 26511 - DNA, 448 bp, Glycine max
  unsure (1)..(448): unsure at all n locations
gcttctatggttntccttcacttgagactgtattgtgatgataacattatgaagactcgtgacctcagtcttaagagttgtgaccttagcctccatcttgtttgatggcatatgtcacttgttctgaatgctagttcctcactcaaattcgaagcaggtcagactagttttttaggaacccaactcaaagaataagataataacagtaaataatatatgtgattgagaagagaagttgtgttatgactataaaaggaaaaatacaaaggaaatgaggttccttctgcccaaagcaaagctccttcacaggccaaatgtagcatgtggcaagcaggagggaaaattggctcgtgagtcagttacaaaggaaggacacgtggttgatgatccacatgtgggggtcagaaagagcacacgtgttaggagggagaatatataaggttgcatg

SEQ ID NO: 26512 - DNA, 358 bp, Glycine max
agcttgagatgaggaagtgttgaaggtgtggaacttcctgcttttattgttgaccacatagtggtacctggagatatgtcgcgggggtcaggagaccttggggatatcaggtggggtgctattgcccaaaaccaagcttgaccaatcccgacccaacccgggcatagtcggtcagtgagaacctgtgatgtacctaaacaggcgagctcctagcaatcaacagataaaaggaacaaagaccacaaagcaaggagggttgtggtggctggccagctgtgaattttgtgtgatatatgggttgtggccaatagtaatcgtataccaagggtgggtaatcgattacaaggcttaaaaatga

SEQ ID NO: 26513 - DNA, 453 bp, Glycine max
  unsure (1)..(453): unsure at all n locations
tccttaagaagattcctaaagaagctagagcttagctacacacacctctctaatagctaagctcacctcattgagatgagaagctagagcttagctacacaccccctataataactaagctcacccccatggcaaaatacatgaaaatacaaaaaaaaaatccctactacaaagactactcaaaatacctcgaaatacaatgctaaaaccctatactactagaatggccaaaatacaaggcccaaacaaaggaaaaacctattctaatatttacaaagataagcgggctcatacttagcccatggactcaaaatctaccctaaggctcatgagaaccctagggccttcccttggatctctggtccaatctacttggagtcttttatccaatgcccttgcggggtaggatngcatcattccctccaccttggaaaggatttgacctcaaatctt

SEQ ID NO: 26514 - DNA, 365 bp, Glycine max
ttcaagtaggtgctccttaaaacctccattaatttgttgctttaccttctcttccattgttgtttcttcatttttctccatgtatctcctcacatgtcctgtgctaaatgttattaacatgattctttagaatttccaccgattaatcttgctatagaaacttaatcaaaagtaaaagcgataattaaagtgcacataaaaaattaaagagtgtagggaagaagacaaacacaagagttttatattggttcgacaataatccgtgcctacatccagtccccaagcgacctgtggtccttgagatttcttttcaaccttgcaaaatcctttacaagcaaagatccacaagggatgtaccctccctt

SEQ ID NO: 26515 - DNA, 464 bp, Glycine max
aagcttgttgttgctatcatgtgatgtgaacaaccttaggaatgtatgcatgtgttgaattgattaagtgttggtgtagagttgataatcttaggttttggaaattgtcatcatgtgctatgcgcatagttgcgtgctaagcgtgtatgtattgttgcaagagacacacttggcgcatgatagctcgctaagcgcacataaactctcgctaagcgcaaaaagccgtgccgagcccaaaaatctctatgcatggagtcatttcaaattgggcttagaacaagatagcctgctaagcaccccaaaactctcgctaagtgtgaagcgtcgcgtgaagctcaaaatcccctatgtctagaattatttcaaattgggcttagagcacctaatacgcaaagcccaaattcctttctgtttggagcttccatgtattgggcttagcgtgcgaagcgcacacttactagcat

SEQ ID NO: 26516 - DNA, 376 bp, Glycine max
agcttcaactttcaatttcgagcgtctcgatatatgacgggactcaatcagacattcgagtaaaaagttattgtcgtttgaattggctcagagcttcaacattcaatttcgagcgtctcgatatatgacgggactcaatcagacatccgagtaaaaagttattgtcgtttgaatcggctcacagcttcaacattcaatttcgagggtctcgatatattgcgggactcaatcagacatccgagtaaaaagttattgtcgatagaattggctcagagcttcaacattcaatttctagcgtcttgatatatgacgggactcaatcacacattcgagtcaaatgatattgtctgttgaatcggctcagagcttcaacatt

SEQ ID NO: 26517 - DNA, 427 bp, Glycine max
  unsure (1)..(427): unsure at all n locations
ctgagccaattcaaacgacaataactttntactccgatgtctgattgagtcccttcatatatcgagacgctcgaaattgaatgttgaagctctgagccaattcaaacgacaataactttttactcggatgtctgattgagtcccgtaatatatcgagaccctcgaaattgaatgttgaagctctgagccaattcaaacgacaataacgttttactcggatgtctgattgagttccgcaatatatcgagaccctcgaaattgaatgttgaatctctgagccaattcaaacgacaataactttttactcggatgtctgattgagtcccgtaatatatcgagacgnctcgaaatgaatgttgaagctctgagccaattcaaacgacaataactatttactcggatgtctgattgagtcccgtaatatatc

SEQ ID NO: 26518 - DNA, 310 bp, Glycine max
agcttgtttcctctcaaagataagattatgtataaaaacatgtacaatcccttctgctcggctgctagctatcatgtccacagaaatccatatactagtatgtcaatagagattgtaaagtaatcatcacaatatcacatgctatttgctacggcctacgggaaagctcgggccagcaaacttgcttggggagaatgctgactctcataagtagtccattactacactggacagggagtttcggatcaatgccttttgttttgcgtgaaaacacaaatgcaaatcaacttggccactatttcaaaccgtg

SEQ ID NO: 26519 - DNA, 425 bp, Glycine max
  unsure (1)..(425): unsure at all n locations
tgttcccatccagctntcttattcttttccacctttgatcgttcctcttactgctaagtggcaccaaatgtctgcctttgtgtaagctctttttctttctttctttctttccactaattaacaatcttcttgtatggatcttacgtacctattaaacactggatttccaaatattctatggcgccgtacgttcagttttctttcttcttcctgcatgttaatcaccaattgttgccactttgtcatctatatcagtcactaattaatgctttaattggtgaatctatatcattagtcaggttttttattcgttgtatcattaatcaaatgatttctccatgttaattaggaatacttcttctaacaaacaccttntctatatatactcttgacatgaagtcactctgtgtccctattatatatta

SEQ ID NO: 26520 - DNA, 255 bp, Glycine max
agcttctagtttaaaggactaacctttaattaattcctttgatagccctacagatccttgtttccctttccttgatttgaaactcactacaagccttatatgaaaaaccatgatatcaccatcttcttaaggaattttggagctctggaatatgttttgcgaataaaagcgggggggggggagcctctccactttctccggactcaatcaaacatctgaggaaaccattattgccggaggaatgtgctcacagct

SEQ ID NO: 26521 - DNA, 333 bp, Glycine max
tgctgacccatggcagcttctactatctcccacactctgtgtggtggtccatactcgtatcgtcttgagcgtctcaagagccactgggaccccatttctaccaactacaaaacctgaaaaaactatattatctacacagcaaagtacacttctctatatttgcctatagggtgatgttcctaaggactgaaagaacttgactgagatgtactaactgatcatctaggctcctactatacactaaaatatcaccaaaatgtacttctaccaatctacctatgaaattccttaagacatgacccataagcctcataaaggagcttggtgcattac

SEQ ID NO: 26522 - DNA, 382 bp, Glycine max
agcttgacaagccggcttgtttaactaacaatattaataacaacaacaacaacaacaacaacaacaacaacaacaataataataataataataataataataataataataactttattttatcaaatcttatcttattcagattttattctatctagattttattttatcccaattttattccatctagattttatttcgtctcgattttatttcatccaatcttatcttatcttgtgcagattttattttatttcgtttatgatcttggacttaaaatagattagtgagctttgggactgatgacctatataacaacaccaaggttttagtttagggagtattttttcggagaggagaataattctaggattttagaatt

SEQ ID NO: 26523 - DNA, 427 bp, Glycine max
  unsure (1)..(427): unsure at all n locations
agctctanatttacattgatgtttgtatttatgggaggaggttatatgccatttttgctttaagagtaatgtcccacaaaaactaactttccaaatgtttgccttcgcaggaatggcaccgaggaagcttgcctcaaagaggtccaggaaggacaaggcggccgaaggaactagttccgccccggagtacgacagtcaccgctttaggagcgttgtacatcagcagcgcttcgaagccatcaagggatggtcgtttctccgggagcgacgcgtccagctcagggacgacgagtatactgatttccaggaggaaatanggcgccggcggtgggcaccactggttactcccatggccaagtttgatccagaaatagtccttgagttttacgccaatgcttggccaacagaggaaggcgtgcgtgacatg

SEQ ID NO: 26524 - DNA, 382 bp, Glycine max
agcttctggcattctatactgcagtttcaggagaacatatgagcgtttggcaaagaaacatatagatttgtcaattttacttatcatatgcccatatccctttgttagtgcccagatcccaaaaggattaaatactgtcggataaaatatctttacaccaatttccagtacaaatgagtaggaatgtattctattatagaatatagaagcatacatacatttgtaatcatcaatagaaagtaaagcagaaataaatgtaagcagcttaatttaaatgaataaaaaactatatttcaacaataatcaacagttaataaataaaccagctgggatctcacactcaaggaatacgaacttatagattaccataccccattcgcat

SEQ ID NO: 26525 - DNA, 402 bp, Glycine max
tcaacatgaagcaaccagctcgcttgggtgagtaggttgcttctggagtaagcctctagctcgcctgggcgagctgggtggcaacctcttcccccatttgttctataaatggacatggggggctgatgggaaggggttcaacacctttggtattcatatttcacttaaaattagtgaggagaagaagaaagaacataaaaatcaaggccgaggcgcttccgtaatgcttacgtgacatttacgtgaacgttctccgtacgctcttcatcattcgttgatcttcaactggttagttttctatttcgaagctttgaattcattctatgcacccttaggggtccattctctgctatgtatgtttccatcttcatctggtctacagccggtattctttttcttcct

SEQ ID NO: 26526 - DNA, 277 bp, Glycine max
agcttgtacgattatggggtacccatcacatgtggtactaggtggcggccgggcgatggctcaagacaattctgcacatccatagatcacgtataacccaccatcccctgttgcccaccttcaactgagctcacgtactgacacgtagcccttatcctcgaacctctcaacgctgggtcctaataaatcctgccaagcttccgcaccatccaggtaataacacatccaatcatcatggactaacaaaatcaagcaaaacagggcaaaggcataaaac

SEQ ID NO: 26527 - DNA, 418 bp, Glycine max
tcaggctgttcaattgctttaaattgttgcacataagggcaaatgtctgtgtggtggtcggcagacgagcataaaccacagagtctggcgaaaggggcaaatttttgattcatggccagttgggttacaaggttaaccaagtcatctagtttaccttcaagcttcttagtctcggctgatgaagatgaattcatggctacttcatgcactcctctaatgacaatagcatcatttctggcactaaattgttgggagtttgaagccatcttctcacattaaattctggctttagcaggggtcatgtctccaagggctccaccactggcagcatctatcatacttctctccatgttactgaatccttcataaaaatattggagaagaagttgctcagaaatctggtggtaagggcaactgg

SEQ ID NO: 26528 - DNA, 331 bp, Glycine max
  unsure (1)..(331): unsure at all n locations
agcttgaagcagtgcccccatctcctccaattattatcatctctgattccctatttggagaagcagctgctccccctgattcgccagttggaaaagctgctattctctctgattcccaatctggagaggctattgctctctctgctttcccagttttccatctgatagatgaggaggaggcttatactcaagatacccaggatctgtctcgggacttttaaattcctgatggttttgctttctggataatgattataactatattaatttcagtacattgtttttagtgattttacttacgttcatatatactngtgttttttgcggatat

SEQ ID NO: 26529 - DNA, 424 bp, Glycine max
  unsure (1)..(424): unsure at all n locations
ntcatctagccaagattatacaaaagtgttacaagagaacctaacggtttcatctagctagcatgctttgctccatggcttccaagtgttgagccaaactcctcttggactttgcgcaagcagctaactctccttttaagatcatgccatgcacccgtgaccggtctctttcctctcttcggagcttgagctcattgttgctaccccacaaagctcctcggaatttctctcggccatgttcctccttgcgggcccttttggtttcttgttcaagggctcttgcagtggccgcgttttcctctcgtaactcgctgcactccttcctcatcttcctccggagcttcgaagttctcctcatcgataactttcaatttagagagccaatccaaccctcgcgtgtgaactcttagccatccatgataac

SEQ ID NO: 26530 - DNA, 304 bp, Glycine max
agctttagtgcccttaattttgaagcaatatttgacattcccataatgtattccctgaaatttcctttgccttgatacttcatggaaatcaagttctaaaggacagtacttgtttccaccttatcgctttttttttttgcaaagcatttttctatttcaacaaggaaatctttggcacgcttaggaatgccacgcttaatgatcataagactcatgcgatttgagtgatcccacttctcatgaagtttcctctattgagaggtactagaatctgtaggagaagagggtttctcaatccttaatg

SEQ ID NO: 26531 - DNA, 401 bp, Glycine max
agctttcaagaaagcctaactgtttggacgaagttgcataggagcaacatttatctcgatcaaaacaccacactaaaaatcggtaaagggcaaaataatttctaaaaagtcattaaaaatgttctcataagtatatgtaaaatcaagttgatctttaccagcactaagataaacccacgctttggaaagacaatgatcgacaatgacccagtcaagatcattgaaatgtgttatacttactttactcttcaagtcggcaattgagctagtgtgttgaaagatagaagaatacacaacgacctctccagtcacccaagtatagttagagatagtaactagaggaaacttaattccttttctccctaggcttcttaggacttatatttttctcttattcctta

SEQ ID NO: 26532 - DNA, 427 bp, Glycine max
tacaataacctaacttatctacaaaagtactggcgttccatctacctacgactattgtgatgctcacgcacacaaagtcacaaaccttccacacctccccttgttcaaaaagtaagtgacaacgacttccacttgaacggaggcccaaaatcacgaggaagaccactgtcaacaatgactctaaacacctcacgtgtctcacactctagggattcacttcgggttcttgcttcgaattttgggatttcatagttttgggttctaggaagaaggataagtttagggactttcaacttgcctaaggtaattactgatgaaggttgaggtaattaccataaatggttaaaagcgtgcaccaaaaaatcatccaatcaaaccgcaacacgtgacagtcaatgctcgcaagtaatagtcaacatccaatttc

SEQ ID NO: 26533 - DNA, 370 bp, Glycine max
agcttttgagcaattcaaatggtcataacttttcactcggaggtccgattcaggcgcataatatatcgagacgcttgaaattgaacaacggaagctctcgagaaattcaaatggtcattacttttcactcggaggtccgattcaggcgcataatatatcgagacgcttgaaattgaacatacggaagctctcgagaaattcaaatggtcataactttcaactcggaggtccgattcaggcgcataatatatcgagacgcacgaaattgaacaacggaagctctcgagaaattcaaatggtcattacttttctcaccgaggtcagattcatgcgcataatatattgagacgctcgtatttaacaacggagc

SEQ ID NO: 26534 - DNA, 423 bp, Glycine max
tgatcgtctcgatatattatgcgcctgaatcgcacatccgagttaaaagttatgaccttttgaatatctcgagagcttccattgttcaatttcgagcgtctcaatatattatgcgcctgaatctgacctccgtgtggaaagttatgaccatttgaatttctcgacagcttccattgttcaatttcgagcgtctcgatatattatgcgcctgaatcggacctccgagtgaaaagttatgaccatttgaatttctcgagagcttccgttgttcaatttcgagcgcctcgatatattatgcgcctgaatcggacatccgagtgaaaagttatgaccattttaattgctccagagctttcattgttcaattttgaacgtctcgatatattatgcgcctgaatctgaccttcgagtggaaagttatga

SEQ ID NO: 26535 - DNA, 391 bp, Glycine max
agcttcaagaattatggcctcatcaaactacttgtttcccgagggaaattctataaacagacctcccatctttaatggagtgggttaccactactggaaaacctgcatgcaaatctttatagagacaatagatttaaatatttgggaagccatagaacaaggaccttatgttccctctataatagccggaagtgcaacaatagaaaaacctagagtagattggactaaggaagaaagaagattagtacaatataatttaaaggccaaaaatattattacatctgccttaggaataaatgaatactttagggtttcaaattgtaaaagtgctaaagatatgtgggatacactacaagtaacacatgaaggcacaacagatgttaatagatct

SEQ ID NO: 26536 - DNA, 413 bp, Glycine max
aaaggaagtcgtcgtgagagcttgagatgagtttgtgaatgattgtgaggccttagatgtggagaagacatccccgctacttgtatttctgcaatctttcatcttcctcttctctttgttgtaaaggaagcttcccagttatggaaaactaaatactctgttggatcttccttgtatgtacttgatgtaaatatctttttatctatctaatgatgttttgtgtgttctctgtgctatcagtatttcattctagtatgcttttaccttgatcacgtagacgcatgctttgttagggtccttcaacagtgaaaactgatatgattcttagaacttgataggacacggctagtttgtcgtactatcatgagggatcagggtacggtaacctagctgttatatgtttgtcttaatgt

SEQ ID NO: 26537 - DNA, 395 bp, Glycine max
agctttaagaaaatagaaaaataaaaactaattaacttaaattatgtaaacctacgtactaattaagaaaatagaaaaataaaaagtaatctaaaattaatgtaaactcgtatgtactaattatgcccacgaccaaaagtttccaaggcacttgcaaatgcaatatctatgaaacaattaatgtatacgcgtacgctgagaaacaattaacttatcatcatttgtcaaatctcttttattttattttttttcaaaaaaaagaagagaagccttaagattttgaaatgtgtacataagggaccaagctacaactaatgtgttaaaaataaaaatagttatcaaactatttgacagtaagaaaaagttaaaaataaaaaggagtcaatttatgggct

SEQ ID NO: 26538 - DNA, 456 bp, Glycine max
gctaataaattcatctatggattgaaacaagcctcttgctaatagtatctaaaatttcatgagatcatcaattcatttggtttttaaaagaacatcataaatcaatgtatataccaaaaggttagtgggagtaagatttgttttcttgtattatacgtgaatgatattttgcttgcaactaattataaggatttgctatatgaggtgaaacactttccttcatagaactttgatatgaaggatatgggagagacatcttatgtcaatggcattaagatccataggaaaagatctcgagacattttgggtttatctaagagacctatattaacaaagttttaaagagatttaacatgaaaaattgttcaccaagtgtagctcccattgtgaaaggtgacaaactcgatttgaattagtgcccgaaaaatgattgagtgagaacacatgaagaatatg

SEQ ID NO: 26539 - DNA, 226 bp, Glycine max
cggcatgcattctgaatctctaaggggcattactagaatgatattccatgtaacatccattgtcttgatactgattggaagtctatatataaaagacagtactcgtctacaccttatcgctatatttttttgcaccgcatttacctatttcaacagtgaaagaaatagcacgctttggaatgccgcgtccaacgatcataataccaatgccatttgattgatccca

SEQ ID NO: 26540 - DNA, 401 bp, Glycine max
  unsure (1)..(401): unsure at all n locations
ttactttacactctgtgcttgtatgtatgtagtcagcataattgtatttatcatacaatatagaaaagtaaaaacatcataaattgggaggatgcaatgatgaaaaagtatatatagaataaactntgaagaaacaaggcacaaacctacttatgaattattcattcattatttcttataaaagttttctataaatctctatattgatattaagctcttaaaataccttgtaaaccttgagagaaaatactaaagtgttgagtgatatattcatttgtaagacgagacgatcacatattagtcattgtgcagattttcaacanactttattgatttgtttagagccagtagtagtttggtatgataagaatactaagttaagtcaagtttgagatagagct

SEQ ID NO: 26541 - DNA, 309 bp, Glycine max
agctgtgagataatatcaaacgacaataactttttactcggatgtctgatagagtcccgtaatatatcgagacgcgtcgaaatgaataccgaaacgctgagcaaaatgaaacgacaataactttttactcggatgtgtgattgagtcccgctataaatcgaaaagcttgaaaatgaacgttgaagctctatgcccattcaaacgacattaacttgtgacttggatgtctgactgagtcccgcaatatatcgacaagcgcgaatgagaatgtagaagctctgaacgaattctaacgacactcaactttta

SEQ ID NO: 26542 - DNA, 424 bp, Glycine max
  unsure (1)..(424): unsure at all n locations
tctacattcaatttcgagcttttcgatatattacgggactcaatcggacatccgagtaaaaagttattgtagtttgaatttgctcagggcttcggtattccatttcgagcgtctcgatatattacgggactcaatcggacatccgagtaaaaagttattgttgtttgaatttgctcagagcttctgtattccatttcgagcatctcgatatattacgggactcaatcagacatccgagtaaaaagttattgtagattgaatttgctcagggcttcggaattccatttcgagcgtctcgatgtatgacgggactcaatcagacatccgagtaaaaagttattgtcgttagaatttgctcagagnctcaacattcaatttcgagcttttcgatatattacgggactcaatcagacatccgagtaaa

SEQ ID NO: 26543 - DNA, 380 bp, Glycine max
agcttcatgatgaatcaagattgattcatggagttttgatgataacaaagatgatgacaaaaatctcaaaagtcaagatcacttcatgataacaaagatgatgacattcaagaatgagttcaagattgagtcaagaacacttcaaagatcaagaggaaatttgatttcaagaatcaagaatcaagattcaagattcaagattcaagaataatcaagatcaagattcaagactcaaagattcaagaatcaagagaagacttaatcaagataagtattaaaaagtttttcaaaactttgagtagcacaagaagttttcacaaaatcatttccaaagagttttactctctggtaatcgattactagattatagtatcaattac

SEQ ID NO: 26544 - DNA, 434 bp, Glycine max
  unsure (1)..(434): unsure at all n locations
tgaagggacgcccacatttcctagtcccagtatctcttctaacaaattctttcttcctacacctatactcgccactcctttcacaaccaattaacacaaacgaagtccttcctctactaccagtgtttgtgttagaccttataatcaccgtcacaaaaccattttcatgagcaacaaatcgagcccaccgcataacatcctctcggctgtcaaacacctaccaaacaatccagataatttcagtttcctacaacatattcattttattaaatcactcacagtcatgaacattattacttgagaagtattgaacgcatccgaacaatcaacatgtggttcattcacaccacattcttcttcattttgataatccatatccacttcttcagacattatactntcataaatccacttatcttcgtccatcttaacaa

SEQ ID NO: 26545 - DNA, 381 bp, Glycine max
agctttacagcagattttagtaatgacccactaacctagaattaaaataacttaatgccattaacctagggaattaaaaaaaacttaatggctgagtgtaactgaaattgtggcaaccaaaagtcacccccaacagccaacaagtcagccaccatttggtctcccaaaaggctgatgcctaggttgccaattgggcccttattacaacttgaactaaacctaactaaagcccttttagttgattaacccaaaacatatttttggtcagccaactttacaaggattgggccattatttagacaaactaaacactctaaaattgaaacaaagtggtgtcatttagtcctcctccatttgggccatgatacaactcacaaactt

SEQ ID NO: 26546 - DNA, 424 bp, Glycine max
  unsure (1)..(424): unsure at all n locations
cggtgataagcttcattgtaagagacaaaattggtactgaaaaatagctgtaattttgtgaagttagtggaatttggtgttaaccaagaactggatgtaatcccaatgatagaaatgaatcagtataaatctttgtgtcttatgtttattctatttatcttatgctttaaacttacttaggttttgaatttgattttggttggaaaacatattctattttgcaaaataaatttctatggtctgaacttgttgtgaaaatttgttgtgagctttgaaaacttatacttcaaacggtaactttgtttttcccaaaaaaaggttntaaaatttataaaatcacaatccaatcctcttcttatgatatttgtctttatagattggtatcaaagttcaacctctaaggattgagcccctaatagtgtct

SEQ ID NO: 26547 - DNA, 381 bp, Glycine max
agcttgtatgttacagtgacaacgattgggctagagataaagatgatcggaaaagtaccaatggatttgtgtttttcatagggaacacaacgttcacttggatgtcaaaaaagtttccaatagtcactctttcgacttgtgaggcagaatacatagcagctgcttcatgtgttttccatgtagtttggctcaggaatttgttaaaagagttgggcatgtcacaagaagagacaaccaagatttttgtggataataagtcaaccattgctctagcaaagaatccagtgttccatgatcgaagcaaacatattgatacatgttaccactacataaggaagtgcatagcaagaaaggatgtacatatagaatatgtgaagtctc

SEQ ID NO: 26548 - DNA, 359 bp, Glycine max
ctaagcttcttactcatagaccttgtaagtcgatatgaaggctttgctcattctatatccttgtttgccgattttatagtaattcataccatctcattatttgtaaacatggtgatgctgtctccaaatcacatatctacatgtgagggtggagccgtgcatgtctgagctcctctaaattcaccaagcgcatcatcttttcatatcatttatagggaacaaagatggccttcaaggttactagaatggccacctgccttagatacgtatagggacgaaaaaatgtactgtgatctatgcatttatataagataatatagatcgaccttttgagtagagtgaatgtttctttcttaata

SEQ ID NO: 26549 - DNA, 244 bp, Glycine max
agcttgtgctacctgccctacaacataactcctaagcctcaatttcctatgcttcacagaagatacttatgacgttgccagatacactgtcaatcgcgggaggatgattcatttcatccgtgatatgtacacacgacttagccgctatcactagacgtccagggttcatactctgtcatccctgaaataccttactttgtcttccacgtatcacagaacgtgcgcttgatgccgagagcttgca

SEQ ID NO: 26550 - DNA, 52 bp, Glycine max
tgacattatgaaatgattaagggcggtatgtcctgctttctttcattgagca

SEQ ID NO: 26551 - DNA, 369 bp, Glycine max
agctttgaggggatttttgggcttaactggttactacaggaaatttgtgaaagattatgggaagattgctaaaccactcagtgatttgttgaagaaaggagcttttaattggagtgcagcggcaactgagtcctttaatgcacttaaggacgcattaacccactctccagttttgactttaccaaactttaaggaacctttttccattgaatgtgatgcttgcggaacagggatcggagctgtgttaacacaagggaaacgtccagttgcatatttcagcaaagggttagctacttcagttttaagtaaatctgtgtgggagaatgtggatgtgattcagaatctatttcctgaaattaaccttgagga

SEQ ID NO: 26552 - DNA, 418 bp, Glycine max
taggggcttatgtactgtccagggtctacaaagtggacgtggcaagtgacgtggcactccaatacacacatcagccttccatgtcaaccctggcacaagagcacagacgcatcacccttagcagttgggctcctaaaccgacaagttatctttaagcacttcattatttgaatattaatgataatattgcaacctccttatgacatggcggatattcaattatttgtaagcttcaattatctacttgctatcatctacaaattagtaattatctgcaatgattattacaacaccataatagtccctacaaacaaggatacacaactcccactccactctataagtactaggttctatctcacccttttcatctttcattctcaccctactcacgtacttacttaagtgtcagagtcct

SEQ ID NO: 26553 - DNA, 397 bp, Glycine max
agcttgcctaattaacctgaaattattaaaaaatgattattaaacacacaaaatgaaaatactaagcatttattacctatacttaatagaaaatacttataacattacaaaataaccataaattgggagagtttgatacaatttatacaagttttatacacaagagttagtcgttttcatcgactaacagggtcttcattaggtaatccttggaataaattcccctgtattaaatgaatcaaagaatgtggtagttgatgttgtgagcttgcacttcaggacgtgcaatgctagtaaagaattgcagcattgagttgcttgaataatcctcaagggtgatcctctagtgttgctcatctgccatgatagtggcttcaggcaattgagtagcggattc

SEQ ID NO: 26554 - DNA, 400 bp, Glycine max
  unsure (1)..(400): unsure at all n locations
tacggacatctatgaatctgaagcttctcccncaagtttctataaatagggggagaagtgaagtgagaaagggttcggcccctgagacacttctctctctttcgaatttgcttggaaaaattgtttccgtgaagaaaatctaagccgaggcgcttctaaaacgtttccgtaacgtttccgtaaggaattttgtgaaggtttcgaccattcttcgacgttcttcattctttcttcatcggtcttcgatcttcaacgggtaagtacctcgaaccaagctttttgattcattctatgtacccgtggtggtccacattgtgtttcgtgtatttttattctcgnttcatttactttttatacccccttttgacgtgcttaagccattttatttaaagcatttctc

SEQ ID NO: 26555 - DNA, 396 bp, Glycine max
agctttcaagaaagcctaactgtttgtacgaagttgcataggagcaacatttatctcgatcaaaacaccacactaaaaatcggtaaagggcaaaataatttctaaaaagtcattaaaaatgttctcataagtatatgtaaaatcaagttgatctttaccagcactaagataaacccacgctttggaaagacaatgatcgacaatgacccagtcaagatcattgaaatgtgttatacttactttactcttcaagtcggcaattgagctagtgtgttgaaagatagaagaatacacaacgacctctccagtcacccaagtatagttagagatagtaactagaggaaacttaattccttttctccctaggcttcttaggacttatatttttctcttatt

SEQ ID NO: 26556 - DNA, 400 bp, Glycine max
ctaagcttaatacaataacctaacttatctacaaaagtactggcgttccatctacctacgactattgtgatgctcacgcacacaaagtcacaaaccttccacacctccccttgttcaaaaagtaagtgacaacgacttccacttgaacggaggcccaaaatcacgaggaagaccactgtcaacaatgactctaaacacctcacgtgtctcacactctagggattcacttcgggttcttgcttcgaattttgggatttcatagttttgggttctaggaagaaggataagcttagggactttcaacttgcctaaagtgattactgatgaaggttgaggtaattaccatagacggttgaaagcgtgcgccaaaaaatcatgcaatcaaaccgcaacacgtgac

SEQ ID NO: 26557 - DNA, 395 bp, Glycine max
agcttgtcaaacattggtaaagcatctataattcattttaataaatcttactaaacttaactgagttttgtgccaacaactataagaaggaatgcaacttaaaaaagaaaaatgcagttcaatcattctttatccttgtgtttctttccgtccctcctaaaaacaccatatcacaaatgatgcaatcttaccccacaagggcattggatagaagactccaagaagattgggccagagatgcaagagaaggccctagggttctcatgagccttagggtagatttcagacccatggacaaagtatgagcccgcttatctttgtacatattagattaaggtttcattatttttttttccttgtatttagggctccataatataggtaaggtaccctag

SEQ ID NO: 26558 - DNA, 403 bp, Glycine max
gagcaattcccttatgttatcaaacataaaaagggaaaaggtaatattgtagccgatgctctttctcggcgtcatgcattactttctatgcttgaaacaaaattgattggtcttgaatgtttgaaaagcatgtatgaaaatgatgaaacttttggagaaatttttaaaaattgtgaaaaattttcagaaaatggtttctttagacatgaaggctttcttttcaaagaaaacaaattgtgtgtgcctaaatgttctactagaaattttcttgtttgtgaagcacatgaaggaggtttaatggggcattttggggtccaaaagactctagaaacattacaagaacatttttattggcctcatatgaaaaaggatgtgtagaaattttgtgaacattgcattgtat

SEQ ID NO: 26559 - DNA, 370 bp, Glycine max
agcttaaacattcaaatttgagcgtttcgttatattacaggtctcaatcagacatccgagtaaaaagttattgttctttgaattggctcagaggttcaacattcaattttgagcgtctcgatatattacgggactcaatcagacatccgagtaaaaagttattgatgttcgaattggctcacagcttcaacattcaatttcgagcgtcttaatatattacgggactcaatcagacatccgagtcaaaagctattgtcgtttgaattggctcacagggtcaacattcattttccagcgcctcgatatagtacgggactcaatccaacttccgattaaaaaggtattgtcgtttgattggctcaagctttat

SEQ ID NO: 26560 - DNA, 404 bp, Glycine max
  unsure (1)..(404): unsure at all n locations
ttttactcggatgtctgattgggtcccgtaanataacgaaacgctcgaaattgaatgtttaagctttgagccaattctaacgacaataactttttactcggatgtccgattgagtctagtaatatatcgacacgctcgaaattgaatgttgaagctctaagcctattcaaacaacaataacgttttactcggatgtccgattcagtgacgtaatatatcgggacgctcgaaattgaatgttgaacctctgagccaactcaaacgacaataacgttttactcggatgtctgattgagtcccgaaatatatcgagacgctcgaaattgaatgttgaagctctgagccaattcaaacgacaatatacttttactcggatgtctgattgagtcccgtgatatatcgag

SEQ ID NO: 26561 - DNA, 398 bp, Glycine max
agcttctaatgatgttgctatgttacatgatgtaaaaaagtgtccctctaataaatttgaaatgaaagatatggttgaggcatcctatgtgataggaatagaaatattccatgataggtcacaaggattgttgggattgtctcaaaaaggatataccaataaagtactaaagagattcaaattggaaaagtgctctacaaggattgttccaattcagaaaggggacaagtttagtcaaatgcaatgtcctagaaatgatttggaacgaaagaaaatggagtctatcccctatccatcagtggttgggagtttgatgtttgcccaaacgtgtacacgaccgaatattagttttgttgtaggaatgttgggtcgatatcaaagcaatcctggaatagaac

SEQ ID NO: 26562 - DNA, 448 bp, Glycine max
ttgagaagattcctaaagaagctagagcttagctactcacaccccctataatagctaagctcacccccatgccaaaatacatgaaaatataaaaaacaaagtccctagtacaaagactactcaaaatgccctaaaatacaaggctaaaaccctatactactagaatggccaaaatacaaggcccaaaagaaggaaaaaccaattctaacatttacaaagaagaatggatccaaccttgacccataggctcaaaaatctaccctaaggttcatgagaaccctagggccttctttagtagctctagcccaagcctcttggagtcttttatccaatacccttggggggtaggattgcatcaatagtgctaagcctgaatcactcactgtaagttgaagcttgatgtacgctaagccaagcatctcaagctaagcgcatattgcagaaagat

SEQ ID NO: 26563 - DNA, 375 bp, Glycine max
aaactgcacattgcgcactacatatatgaagagtatacgcgtggaacccttactcgtcagagacactgacaaaaactaatctgctatgatcaggacaatgaatagcatgctacgagccagtcaattctttttcactcagaccatggacgccactcgtgaggaaagacccctatcgactatgacccgagggatatcataaccatgcgttatcgtgacttgaatgttcaggagcgatcttgtcacactgtgccatacgatgttctagacacgcatacctctacacaatgcctaacatgtataacataccagctcggagaaacatagatgctggtcttcctcgtccatatacgactcatacttttatcctatttctta

SEQ ID NO: 26564 - DNA, 425 bp, Glycine max
  unsure (1)..(425): unsure at all n locations
tcattcttagaatgaagtatgtagcgatacatatatcgtgaataatcatctataaagggtatgaagtatttcggactattngcatccatgtctggacaacatatgtctgtatgtatgatttctaataaattagaactcctctgtgcaccctctttagacttgttagtttgcttacccttaatgcaatctacacaagtcttaaaatcagcgaaatccaaagtactaagtactccttcatttactaatcgcttgattctttcaatagagatatgtcctaatctccggtgccacaacatagaggattctttattcacaatacatcgttttaacccaacagaaacgtgcatagaagtagcgtcatttttgcaattaatcgaataaagaccatcaaccaattgaccacaaccaattatttcagatttatt

SEQ ID NO: 26565 - DNA, 343 bp, Glycine max
agctgatattttccataaggcgcgttatctgcgaatcctatgaattaaaccactctctgacaaaggcgcgaagatccaaaagctcgcttagaacatcattcagcatggaataggagggatctcttggtggaggagaaggattgcgatcatcgggagcattacgcacgaggtattgattacgaacccatttgacatccagatcatcactgtaccgagggacgcaactgcactacttcaatgacaaatgaacgtttgaccttgacagaaggttaattaaccacaggaatattgaagtgctacaaaattatagtaataaggtggggatgagggagaagtgcatttg

SEQ ID NO: 26566 - DNA, 398 bp, Glycine max
  unsure (1)..(398): unsure at all n locations
tctgttcccgagagcatttcttatttaagcacttccgcctttgctttcgtgtagcttaagaaaaacgtcatttcttcttctttctttgttccaaagtcatttgtaaagtcccaagcactgtctccatgacccatagccaccattagccaccacgaaccatcggtgttctacattgaaacgccgcaccgagaggaacgcttcaaccgaagcggaatcttccaacttggcgggcggcttcggtagagaacgaagccctaagctgacctttcagtttctttcgaggtaaccagggatctatgcttgatgcttgtgagattcatcttgactgtgcatatttgctgactatggaactgtcattgcatgtgttatgcttgcttngaaaaaccttagagaaagag

SEQ ID NO: 26567 - DNA, 377 bp, Glycine max
agcttgatgtgcgctaagcctcgcatctcaggctaagcacatattgcagaaagatttttggtgttgcagaaagcgctaagcaccgctgccgcgctaagccccaaatgcttactggattttacaacttcaagttgggcttagcgcgaggctaggctaagcgctagtgttttaaactcaaacgtcatgttggcatgctaagcgcagctgcgcgctaagcacgccatatgaattttagtttttaaaaagtataggtagaggcacttgggttgctacctttgaacccaaacctctgcaacctctcatccctaaacattcttttgtttctgctgtgtgcttactgctcctctgcatcctttttgtttccttgcaaagacaat

SEQ ID NO: 26568 - DNA, 196 bp, Glycine max
agggagcatgaaagattttcaaaacaactagcacatttttttcaaagagtttttcaaaattccaagtccaagtttactttgtatcataccattttgaatcataccgtgcaagtaatttcaaactttactaattgcacgtcatgttttaagggtatcattcattatggtacgatccaagattgacgtgaatcaatca

SEQ ID NO: 26569 - DNA, 384 bp, Glycine max
agctttcatatagtgaaatcaggtgcattcatctccctaagagtcctctcacgaggtggaggttgagccatgttctcagtatgaaaattagtagtggaatgctcaaaatcagaatattcagaatcaccctcaatagaatgctcagaatgctcaaaatgcacagaatgaccaggatgcacactatctatgaaaggttctatctatttcaagatcaaagggttgtaaatcacctggattgcccctagtcatgcactatatgcagcaaatagtgtgtttctcaacaagcacctaacaagggggtaaaactacaactatactcaaacaatatcaaaatgagcaaaaattttgtgaggaacaccctaaaatcatgaaaagatagcacaa

SEQ ID NO: 26570 - DNA, 414 bp, Glycine max
cgctttgaatcctagagaatctatgatttgatagaagcctattcccattactatcctagaaagtccttcagattcattttgcgtgttcattgttcgatgacatgagatgaaatgcaaaggttgggacttgtgttagttgtttatgatgcaatgagcctaaacacttaagcttgagtgaaacaatgactgtgaggttgtggttgatgatccttccttgatttctgccatccttactagcttattttagttgtgactctaatgtgtatgttcttatctttgaaaagctgcatgtttgtgaaaatcaattgattgaagcagtccataatattcagttcatatggttgaatttctctgtgaagcaaacaacatttttgagtgaccactgtagcttgtcacttgaggacaagtgaacta

SEQ ID NO: 26571 - DNA, 382 bp, Glycine max
agcttataatcctttttgagtgacttataacaatcctaagtttgcttcaattgttgttctttacaaaatttgtcttttctgaacacatttaagcaaactcatcagtaggcataaacacaaaatgcttatgatttgtgtccataagatttgtcataattaaaataccaagggttttggactcaacaagcctaatctagcccactttatatttctataaccccagcctgacttgttaccctcatgagcctatttattagacctgaccctagcttttctagaagcccttttgttaacctatttaaaggcttgtttcatataagtgttgtgtaaaaatacaattattgtataataataaaattattatgcgttgaaatattagagt

SEQ ID NO: 26572 - DNA, 442 bp, Glycine max
  unsure (1)..(442): unsure at all n locations
agcttgaactntagtaaatattgttttaaagaaatttatttatttttaaagataaaataacaaaaaaataagtgtaatttttagaaaatttaatatttataggttgtagctcgattattttgtctaacttttaatttaaaaggagtttttaaagtataaaaatgaaagttaatgaacaacttctacttatttttttaagttctatttttttatttaacttattagtagcttttaagcacaaaaaaagttgggccaaacaaaacctaaggctatttcagttccctaacctaaaattataatttatttatttttattaaattnttctaacttaattataactctattatatttattaattnttctttaattntttataactttatcaatataatatttaataattatttttatacaagataattaaaaaattgatcttaatatg

SEQ ID NO: 26573 - DNA, 378 bp, Glycine max
tgttgcaagcttggtgtatcttgcaaaaggagtggatatggccatgcgttgttacacggaccacatgttacatctgccatacttgactccacatagtgctagtagatagaccagaagaagtgcccattactgtagaccatatacattgacctgctatatcccatagggattcacatctcgcccaaagctttgttattatgcaaattctcacttgtatttggactagaaaaaccacgccatgatttggaattcctattgactccaatggagtatgatgggcggggcaacgtttgtcgatacaacatggagcaagtgcacctaatagagggtttaaaagatcaaggagaccatgcagacatgtcgtccgatgagttcgag

SEQ ID NO: 26574 - DNA, 419 bp, Glycine max
  unsure (1)..(419): unsure at all n locations
tgcttctataatctcccccttnttgatgatgacagcttctgaaatcaagaaacacacacacacactttttcctagtcgatcactctcataaatttccattctcccactttgtttttgaatttatgcttctcttaaaattaagttgattactcatgtgagttcttgatttattccctatttctctccccctntggcataaaaaaaaaagccaaagtgcgtaatgtggcgtccctaaataatgactggtttaatagtaacaaattaaatagcagaaaccatggaattttttggtctttttctcttttttttctttctctctttttttctttatatctcgcactgttattcagttcacggtaattgaattcagaaggaaaattatcactatagagtcctgaatggccagttcacaactctat

SEQ ID NO: 26575 - DNA, 370 bp, Glycine max
agcttggattcctaggcctaagtcatatttttggctctttagtctagcttctacaaactgtccacacattcacaatggcagccatatgtgcacaattcgttccacaagctaagttccacaaaatcatgtgcaaatgccattgaggcgtttcaccaaacacttggtgggtgcatgtttagacattaaaaaaatgaggcacgggacaatgcgaactgcccattcatttcagaatacacaattggcctacgaccatcccatacaaccccccaattcaaacaaacaagcatgaatccacaaaatttgcaaaaacaagcaactaaagcactaaaacacatcaatggagagccaaagaatcaagggaaagtgcact

SEQ ID NO: 26576 - DNA, 399 bp, Glycine max
  unsure (1)..(399): unsure at all n locations
tgaggcgagcgacatgaagtttgccttgaattggtttatactttgtcaagagatcttcttctttcttgaccaattctgctntagatcgctctgtttttttttttattggcccttgtattagcataagtttttccttagccttctgaaaacctttttgagcttgaattaacttatttcaatcctgctctatagaagactctatttcaacaatataaattgtatgttgactatgtaattgatgagctntaaaggcattattgaagatattaaggaaagattccattttccttttgaatctcatcaaccaccaagttttgaaatttgaaaacctcattgattgattgttgaagttgaggcttgtaatttggattggaaagagagtctttgagagattgatcg

SEQ ID NO: 26577 - DNA, 191 bp, Glycine max
cttgcgttttaaccattcgtttattggctccaatcactgccttaaaaaaattattgtcgcgccctgccattcatcccaggactgttgaagcgcatgtaatcttttgtctgtatagattgtatcacggctgcatgatggagctgattaatcatcaggataccctcttgactcttgtctttgatttcgcgatg

SEQ ID NO: 26578 - DNA, 399 bp, Glycine max
agcttgcttctacacatctgagtgattagtcatagtattgagtaagagatgtgatggcttcaactgatgcttctatcattgctagatcccagatcttcccatataccttcctaaaagcctaacattgaacttgatccatctgctgccctagctttttgcaagctggctacttgttctaaccccatgtttgcaagtgtcgcaacctacccttcagtgggagggcaacgtgagactcacgggtgtgtcttccaaggaaggaaaacgcggggagtcgccaccaaaatttattcgaggaaaacgtcgggcaaaccaaaacatgtggtctacaaactttaagtgtgaaaggttcgggagttgtttttacacacagggaaggtgttagcaccccacgcatccgtc

SEQ ID NO: 26579 - DNA, 430 bp, Glycine max
gagtagaaacatgggaccaactcatttaatttcaaaaagaaagtcgtatctagtcaaggtctgagagaccatacaagtttcctaacgatttctaattatgtgggccattaagtctatcatatgctgacaatagccgagaagcccatgaatctcttcgggggcggagtaggtgtccgccattgccttggccttcgctaacaagcggggaagttcttgactcccgttcaaggtaagagcaaaccgatccatccacatggttgcctcttggtgtaaagagtcgatcacccttcctctagcctctttttccgcgtatacttgagcatactcatccgcgatcctatgctcgtgggctgtggctagacataactcttcttggtacttggcgatgatagctagcatgttggtctccgtctcgcataaacgctgagac

SEQ ID NO: 26580 - DNA, 447 bp, Glycine max
attgaaaccttgctcgtacccgggatccttaagtcacctgtggcatgcaagcttgtcatactgaatttatgttggcattgtgatttgattaggatcaattttggtgttgtctaacagttgcctataaggtttttagtttttcaatatttatctttgaaaatataaaatataaaatcaaaacaaacatattttccaaatcttaaaaatttgaaaatgagaactatttttagaaaatgaaaacaaaaaatgttttctcaaatcaagtgccacctaaaattaatggtgtgcaaattaaaaattgcatgaatgaaaaattcacatcttaaagagacatttaaaaagtcaaatgttgaaatacatttagttgaatctatcaatgatcaattttttgttagattagggatgaaagggaagtattacatcaaaatggaaatgagcttttggctg

SEQ ID NO: 26581 - DNA, 380 bp, Glycine max
actatatcacagcaccaagggactagtttagctcctctcttctctctctcctctcatctctctcctgtcttcggctgtagttttaggcttttcttcttttagacactctctcattttgctatatgagattatactgtacgtgtcatcgattaaaacacatgattgaatctattactaccagctctattgaataacggaatgctaagtctccaacgctgttttctctcgaggatcaagcatagttctctttgaggctctattattactattaaattgtgttcaatttgtcctcttcactaattactctgaatttgatgctattaattcatgcatgctgagtgcttgatcaattgtctctgcacttaatacacgtgcatgat

SEQ ID NO: 26582 - DNA, 397 bp, Glycine max
agcttataagaacgaaattgcctaaatcatttccaaatatgtatgtgaattaggaagcataaaaaagaatcaagccaaggctattgtgcaagtaatcattggggcaaaacacaccaaaagattatgatgatggatggctcgaattctcacaaaggtaaacttatcactttcaaattgagctttcaaaactatcatgacatgtaaaggaaaaacaaggatttcaagtcacaaaatgtcaagagacttttattttcagaacaattacccattacttgaacatatcctataattcaaagacaaacatgcagatttaacacaacaaaactaacaaaattaaactaacataattaaactaatgtaacacaactaacaaaaccaaaacccaagaacacactcc

SEQ ID NO: 26583 - DNA, 431 bp, Glycine max
  unsure (1)..(431): unsure at all n locations
cctgcgagaacaaacatttagaagttagttntacaagataatgcttatcttaacgcaaaaaatgtcatgctaatccctctggtttagaacgaactcatgcgcacgtttaaagtaacacatttatgcacatgcgtatgtgtagaatatcctactatttatatcaacatagaggccatccatcacattctaattgtcatacatatatatgcatttgaaaagaacacacattctcacgctcaaggcattgcgtcaaaatttacacttaactatgtcctaaacatttgctatcacaaactacctacacacactcgaaatatatataccatacaaactttcattgtttcactcacacttacacatattggcaagctatttacattatgcacatacttgcattcaaaagggaatcccgtgctatcatacattcattt

SEQ ID NO: 26584 - DNA, 375 bp, Glycine max
catgcaagcttcttgatatattatgtgactgattcggacttccgttttataaagttataaccatttgaatctctcgacagctttggttgttcaatttcgagtgtctcgatatattatgcatcttaatcggacttccgcgtgacaagttatgaccatttttgttgctcgagagcttccgatgatcaatatccagcttctccatatattatgtgcctgaatcggacctccgtttgaaaagctatgactatttgaatttctcgagagcttaggttgttcaatttcgagcgtctcgatatattacgcacttgaatccgaaattagtgtgacaagttatgaccatttgattttctcgagaacattcggttgtaatttcca

SEQ ID NO: 26585 - DNA, 248 bp, Glycine max
  unsure (1)..(248): unsure at all n locations
tgcgcctgaatcagacttccgtttcttatgttatgaccatatgaatttctccactgtattccgggtgacaagtnatgaccatatgaatttctcgatagcattcattgttcaatttcgagcgtctcgatatattatgcgcctgaatcggacttccgtgtgacaagttatgaccatttgaatttctcgagggcttccgctgatcaatttcaagcttctcgatatattatgcgcctgaatcagacttccgt

SEQ ID NO: 26586 - DNA, 385 bp, Glycine max
agcttatattacaaaattgccttaatcattaccaaatatgcatgtgaattaggacgcatcaacaagaatcaagccaaggctattatgcaagcaatcaatggggcaaaacataccaaatgattataatgatggatggctcaaattcttacaaaggtaaaatcatcactttcaaattgagctttcaaaactatcatgacatgtagagaagaatcaaggatttcaagtcacaaaatgtcaagaacttttattttcaaaacaattacccatttcttgaacatatcctataattcaaagaaaaacatgcaaaatcgtacgtgcacacaaaattgacccaaaatattaaactaaaaatccgacgaaactaacaacattaacaaattaacac

SEQ ID NO: 26587 - DNA, 507 bp, Glycine max
  unsure (1)..(507): unsure at all n locations
nattgaagacccattgcatatnnaccnnccnttgatnnccttagtaanncccgtgacactatagaatacatacgctctgtctatttgcagccctttttcttcccatattcaatttgcaataccgtattacaccagcttcattaatcttaaaataaaattgaggctaaaaaaaagacaaatttatcaaatatcatatgcaaaataatatatatatatatatatatatatatatatatatatatatatatatatatatatatatatatatatatgaaagatagggtttctaagtggtgtagatataactaattgacatacctttaaaattgtttcaaagcaatcatcaaaataagctttatgtacgcttgaaggtccacaccatctatcataatccataagagataatttgcaatcaactgctagtgttccaagaaatcctgcaagcaaggcctgtgcttcaccaaatgctgtgccttggtcatcaaaattcacaatgatgcataactg

SEQ ID NO: 26588 - DNA, 383 bp, Glycine max
agcttgaggctttggaggaccacatttaagccatccttttagaggaaacagtagtaagaggatgaagccatattctagaaacaagggaaaacaacctatgtctacgtccaacatgagccaatcaagggggactgggttataatgtttttagtgtgggggaccacatcttaggaggaattgcccacaactccaacagacataggagaaccgttgttatgtttgtggcaaggtatgccattatgctcgagaatgtagggtgactgggagaccaacggtaactgccaattccaacaccgtcaatcgtggacccactaattcctcaaggagcggtaatgttagcaacaacaacaacactagtggtggaagacaaaaggtaccctccc

SEQ ID NO: 26589 - DNA, 423 bp, Glycine max
  unsure (1)..(423): unsure at all n locations
ntctcaagagacttctttgagaagctagatccttatctatccacacccctctattaactaaattaatttccttaaaaataattacagatgaaaataacgcaacaaataatcaaacatcaaacataattactaataatatatagatatatatatatatcagggtgttacaattggaattgatcttggattagtgggctgaaccataactaaaattcactaatcataattactgaaattttggctccaaagtttggctccacaaattcaatttcaaattcaagtaaaatttgaattgaaattcaaatttccctctaattttgtgtgacacttaggctataaatagaggtcatatgtgcgcatttttttaactttgatcatttgaatattaaacttcagatttcaaagctcttntagagcacaaaa

SEQ ID NO: 26590 - DNA, 382 bp, Glycine max
agcttggaatgatgcttcaatggaggaaaagaaagagggagagaaagagagaggggggagcacgaaattgaaggaataaaagagggagagaagtggaactttgaagtatgtctcacaagactctcattcatcaaagttacaacaagtgttacacatgcttctatttatagactaggtagcttccttgagaagctttcttaagaaaacttccttcagaagcttctttgagaaaactttcttgagaagctagagcttagctacacacacccatctaaaaactaagctcacctccttgagaagcttccttgagaagctagagcttagctacacacacccatctaaaaactaagctcactcgacaaaatacatgaaaatacaaaaa

SEQ ID NO: 26591 - DNA, 390 bp, Glycine max
  unsure (1)..(390): unsure at all n locations
tgttataaaatgagtacttcaaacaagctacaatatcatcaaagtagtcaccagaataggccttgtacggtttggataatgtacacaagatccttaaaaacacacacaagttaataaaggaaataagaaggaaacttgccattgtattttacaaatgaatgaatatctctacgaccagtatctctaaataaccttatgcttatttgaattaccctttcgagcccgtgagaacatattcattgtccatttgagagaagcaacacacttttaaagttgtcaaagggtaacacaaacatgctatctgtcaaagaaacctccaagctgagattgaatgcattggggtccctatccatcccactataagacacttgccattnttttttctatagt

SEQ ID NO: 26592 - DNA, 345 bp, Glycine max
agctttgcattgctatagcgacgtctatgtataaatccgctggcataggatgcacgtacacctcaggaatgttgctcctctttcttccttcttccatatattctaactttttcttttaaaatgaattaattttgctggaactccattttttactcttgatttaaaagcgtgggcctatctgctaatgaaagaaatggtaatcttatcactcctctactttgtgtctgcctttctattagaacaacggaagaacaggttaaccatttttatattcttaaaataaacactctaaaatctaataactatcaatacttacaattatcccctctctggcgtgcgcaattt

SEQ ID NO: 26593 - DNA, 482 bp, Glycine max
ttgaaaccatgcattacggactgatgccatggatgccgtgaccggccaaactagcctagcgaactccacgatgtttttatatgctagataatgctctatctatctcagaaaggtctagcctatcccgtctgtcttaggacgaactcttgcacacgtttgaagtgacacattcatgctcatgcgtattggtagaatatcctactatttatatttacacagacggccttcgtatgactctcacgccatactgatacatgcatatggctaaactctctttcttacactgagagcgagtgtcgatattatccgcttaccctttggccagtgatatggtatcgctaaattgctacgctcattcgacaccttatatcatcctatcgttaatggaagtacgatctcactcctcgattggagcatatttaccgtgtgtcgggcttggctggctaaggaatgctgtcgatatacgttctctgaggagcatc

SEQ ID NO: 26594 - DNA, 374 bp, Glycine max
agcttagaagcaatctaaaatgggatctcacttaattggcttcaacacaaagtgagcttgataaattgaagcaagaaaatgaaaaacttgtttcaagttataaagccaccggttgcgtttatactagatctcttaatatggataattacaaatctttgtaagatgagtttgaaaagtttaaaaatgatcactatgaagaatgcatgaagttgcaaactgagctttcctgtcttaaagatctttttagaaaaatgaataaaggaaagagtgatcttaatcactaactcagtgtgcaaaagcatgctactgataagactgatgtgccatcattttcttctattttctaaaccctttttgcaccattttaatcattg

SEQ ID NO: 26595 - DNA, 428 bp, Glycine max
  unsure (1)..(428): unsure at all n locations
nnttggagtagaaacatgggaccaactcattntatttcttaaagaaagtcgtatctagtcaaggtctgagagaccatacaagtttcctaacgatttctaattatgtgggccattaagtctatcatatgctgacaatagccgagaagcccatgaatctcttcgggggcggagtaggtgtctgccatcgccttggccttggctaacaaacggggaagttcttgactcccgttcaaggtaagagcaaaccgatccatccacatggttgcctcttggtgtaaagagtcgatcacccttcctctagcctctttttctgcgtatacttgggcatactcgtctgcgaccctacgctcgtgggccgtggctcgacctaaatcttcttggtacttggcgatgatagctagcatgttggtctccgtctcgcataaacg

SEQ ID NO: 26596 - DNA, 392 bp, Glycine max
gttcctttctcgagtatgtgtatgaatatggctgttgtccctttacatctgctatggaaatgttttattctgatacattggcactatggccgatcgacatagtccaaatagtcttgtaaaaagtaaaagttggtcaggatagaatcgaatattctttgtagatatgctctcataaattatgcccctagtcagaaacacactccaaattttgattacctctgactgtctactacgagtctcatgggaatctttgcttcaaccatgatggcccagtcaatcgagaattcaagagatagctaatttactatcagaatgcgttaattgaagaaatgctttaatgtgcttgatattactatcataagaacacaattccttgatgggtgtcacgacag

SEQ ID NO: 26597 - DNA, 308 bp, Glycine max
agcttgtgacttccgtttaaagtgatagcaaaccggtccatccacatcgtcgcttgttgatgtaatgagtcaatcactcttcctctagcctccttttctgcgtacacttgggcgtattcgtccgccactttgtgctcgtgggcggaggccaaatctaattcttctttgtactggctgatgatggccaacatgttagtttcggtctcacataactgctgagacaaactcctttttgaccttaggcaagtctttaatttgtccttcaaaattatgccatctaatcgcaattggtccctttcctctctttt

SEQ ID NO: 26598 - DNA, 431 bp, Glycine max
  unsure (1)..(431): unsure at all n locations
tcacaattctgaaccacaactaagaatagatataagaatctttaatgaaaaggttagctgaggaaggtgattagggtgaataatagacaaaatgtaaagaatgatagctatcttagctagaataagttgggggataacccttcaatgcttgaataatcaagagttgtttaatataaaacaaaaaccaagaagagaaagagagaggagtctaggtgttaagaaaaagaaagagcagggtatagcataaacatgaaatatattaggaaaagaaactaaaagtgaatttaaggagtgataggctcaactcaacaaagaaaaatggagaaaattntcttaagagtgttggatgtaatacgtggttaatattccgcaagtacagaaataagttatgatgtttcctaatgtgaaatttcgtgtaacttctcaaatac

SEQ ID NO: 26599 - DNA, 431 bp, Glycine max
gatccttaatgcaccgtggcatgcacgcttgaccagtaattactcgtatggtttgcacgttgaatccaggttgttcctggtgtggagatgatggtacagccggcgaaccacaagctgaaatttcttttggcgaggccgccatggaaaagcggagcgtttggaatgatttacctgatctcagagaattatcggaaaatgctgccgaaaacactaatgccatgctgatattaatttgaatgaagaatgtataggggcgtgtgaagcaaccgtcgaattcatcttggcttaacagtgaacgtgctattaatgttaactgattcgatagggcacggctcagattgcagtatctgctataattcctctagcaaacaaatgcccatcttgcccctcagttattcagactgatctgcatccaaagcctttgtgaaaat

SEQ ID NO: 26600 - DNA, 424 bp, Glycine max
aggaaaaggcgaaggcattgtcggatcaaggtgattgggtttcattcattgacatcttggcactattgatattcggagtcgtcctctttccaaatgtggatgggatagtgacctagtggcgattgatgctttccttgcttatcgccatagcaaggaaagttcggtcgcttctattttggccgatgtctatgacacgttcgaccaaagatgcgaaaagagcggcgcaagaatcgtctgttgtacatctgctctctatgtgtggctagggacgagaagctattgatgcatttcttccaagatagtttggccggagcagcggtcatctggtataccaatctggaggcttctcgcacccgctcatggaaatatttgattactgctttcatttggaagtaccaatacaacactgacatgactcccgata

SEQ ID NO: 26601 - DNA, 391 bp, Glycine max
aaaaagactgtccatagaacatgggttgggtagaggccttcaatggatggtgctacttgttaatttaaagagcaaataaaaagtaaatactacatcttgtgtttttaatatttttaagaagatgacaaaaattttgaaagtcatatagcttgattgtccaacaattgagataaacctgatttggatgcaaaacaaatcatctagcagttaagaagaaatcacctaatcgaacctaggccacttagtttaattaattaattacttgaaaattgaggaagcacaatttcaatgtgtgattgaagttgctatgtacatgtacattgttccatggctcagttcattgcatactaaaaccaattattctccgggttaattattcttttctactcga

SEQ ID NO: 26602 - DNA, 396 bp, Glycine max
agctttgcttcacgtcacgacgctattgtaatttctcctctgcctcgtggtgttcccttctcctgcaactacaactctttaaggcttctcatgagctgttagatgcctctggttgattgtgcatcttccactgtgaggtcttgggtttttagtttttttactgttgacttaacaatgagcattttagtaattttgtgtgcaaactttctcttgcctagaattttctaagataagttgaacataaaaaccacgtagtctgatttagttgtgggcttgtggctttcatttgaactactctggttagatcaaattttttgcattcactctatggtgggaacaaagaccttcccttgcctggaagcactctatggtgggattctctctctttgcatcttg

SEQ ID NO: 26603 - DNA, 448 bp, Glycine max
  unsure (1)..(448): unsure at all n locations
gctggcttaaagatgtctctgattaattaattattttaaaactctagtgaaatactaactaaaaaaagaaacttataaaatttcatataaatattgtacaaatccaaaaataattgataaacaaaatcatattgaattcaagtcgttaaagcacaaagtataataaaagaaaataaaaagagcataatattaaaaaatgtatggattaggtcctcagcctcaaagcttacaaatctattttaagtctaagcccataaacgaaataaaataaaatctagacaaaataagataagattggatgaaataaaatctggatggaataaaatctggataaaataaaatctagatggaataagatatagataagataagatttgataaaataaagttattattattattagttaaacagaccgacttatncaagctcaacaaactttttttatag

SEQ ID NO: 26604 - DNA, 387 bp, Glycine max
agcttataactaatctaaaatctttcatttgcagatgtccggtggactagaacgagtttgagagtctgactttgaatattatgtatatgaatattataaagcaggaagcgctgtacataatagaccaggaaaagtggtcaatgatggatccagaaacatttacaatgataaatttggaatagttgtgaatgacagaccagaaaatgttgtcattgtcaatgatagatcagaaaaagttgccaaaaaccaactatttgtctggccttggatgggcattgttgcaaacattgccactgaatttaaaggcggaaggtgtattggaaatattggttccaaactaagggatgagtttactttgaaaagatttcatcctctaaaggttcaatc

SEQ ID NO: 26605 - DNA, 424 bp, Glycine max
  unsure (1)..(424): unsure at all n locations
tctgacttctcctccaagcgcttccctggtaaccctacttctcccaattcctattttgcttcactcggtctaactcttgtgtcaagatcttgaccacttttgctactcttgccatggaagggtagaatctggaaaaaagatatggcttccttcctcctagcgggcatcccaatatcccttcgaactcttctatggttggtaccaactgaaagtccccaaacgtgaagcatttgagcgactggttgtagtattgagtgagggatgcgatggcttcaatagacacttttatcatggccaaatcccagattttcccatacgccttgctgaaggcttgacgtcgaacttgatccatccgctaccctagctttcgcaagctgactagttctaggttcttgactntgacatgatagaaccttnttttaaa

SEQ ID NO: 26606 - DNA, 369 bp, Glycine max
  unsure (1)..(369): unsure at all n locations
agctntgcggatttggtctttgccagtgaaaggatcgatgtgggtctgaaaagaggcaaatttagtcatcctgcttggacgaatgagaaaactggggcaaatgaagagggtgaggatgaaggagaagcccgtgctgtgactgccattcctatacagccaagtttcccaccaacccaacaatgtcattactcagccaataacaaaccttctccttacccaccgcccagttatccacaaaggccatccctaaaatcaaccacaaagactacctactgcatttccaatgacaaacaccacctttagcatacaccaaaacaccaaccaagaaatgaattttgcagcgagaaagcctgtagaattcaccccaat

SEQ ID NO: 26607 - DNA, 338 bp, Glycine max
  unsure (1)..(338): unsure at all n locations
actcagcttgttcttttataaaataagaagttctggactcattacgttatctaaaaaccttggggtggatccaagtgctccgatcatccattggcatactcatgttttggtggcatactcaccgctgtttatttctttaggaatttcatcataactaagaaaacaccaaggcacccctataacactcgatccagaaaaatggataatgaagagggcgtgcangaacagatgacggccgatctatcggccttaaaagatcaaatggcttccatcttggaggtcatgttaaaactccagaaaaccataaaggataaagccatggcaaccgcctccagtat

SEQ ID NO: 26608 - DNA, 381 bp, Glycine max
agctttaaagcacaacaacacagaatctatgtgtccaacacccctcaattcaatgggttttctaggtttgaaaagtgaaattgagaatgaggtaaatttagagcaaactctcacctcacacaagtctttaacatcgatctaaacttgatcaaactggatttacacctaaaattccaccgaatcaaaatttgactcctcaacacccaatttggccctagaaatggctcttggttcactttggtcatttgtttttctccctagcacagtccaagctttctcataagtcctaaatgacatttcaagctaaaataaactcactttaccttccatttacccaaaaatccagatttaaccttccaactctcaaagcctcactctttt

SEQ ID NO: 26609 - DNA, 437 bp, Glycine max
  unsure (1)..(437): unsure at all n locations
aaactcagctttcatcacacctgcacataatctaagtgtccaacacctctccattcaatggcttttctaggtttgaaaggtgaaatttagaacgacgtgaatgtgaggcaaactctcacctcacaccagtccataacgtcaatctaaacttgcccaaactggaattacacctaaaattccaccaaatcaaaatttgactcttcaacacccaattttgccctagaaatggctcttggttcactttggtcatttatttttctctctagctcagcctaacctttctcacatgttctaaatgacatttcaagctagtattgactcactctaacctccatttaccacagaattccgacttagccttccaactctcaaagtctcactctttttccactcataacatcacattctcactntctaaccttgggttagttctaccc

SEQ ID NO: 26610 - DNA, 383 bp, Glycine max
agcttgcccgtagaggttgatgagtgaaagaaacgccaaattgtaaaaaggagcaaaaccctcaaagggtaagtagtagataaggaattgcatttcatgctccacgtgtcccccaatggaatatgcaaccgcataaaacaatatttagtagtattatgcttttatatttcgtcattcgtgatgtgtgataaatttttacggtgaaattactacttttttattttgtaattgatgtttaaataatttgtttttttatttcgtaagagcacacacacttttttcactaaggttggaaaattttatttttgtacttaggtggccttttaattctttgattataaaaaaaattaatttaatttacagaaattaataatatgattgca

SEQ ID NO: 26611 - DNA, 411 bp, Glycine max
ccttctatacccaacatttatgcttacggatggttcactaaatagcctacattatgagcaaagaagagactaaatcttcataaagcatgtaaaacaagtattaacgcagaatagaaaaactagccccatcaggcaacagtatttttccacaatcaatgtaaagcaacataaaatggggaaagagacaagaaccatagaaaactatgacaaattgacaaagatccagtggatctttgctgcattgcccaactacaagggtaaaaaaattctgcatcataaacaaataagtaaaggtgaagaagaaaagcaaaatgactcgatgtcatgggttattgatgatgattctaagccagccaaacggaagaggtacaattcacagatgatagaaggattgactagtgatgatatctt

SEQ ID NO: 26612 - DNA, 383 bp, Glycine max
  unsure (1)..(383): unsure at all n locations
agcttgcacaacagagtgctaggttccttgcacttgatggccaatttttatcagcatatactaatgaatcacatctagaaagcttagcaaaaggtgttttaatcgtgttatcaatagatactaaatgcctttcaacaagatttgctcatcattttctgctcaaaatttgtacaaatacacttcattgtcagtctcagataaataaataggtgctattctatgttaaatgttatatcatatataaaaaaatcaatattttctctgtaatattaagttattctgattcactatcctaaagaagcgttgatgacttatagtggtaaacaaaccaaatgaaattatnttcacatgatctaaatttccttttttaaaacaatatgaaa

SEQ ID NO: 26613 - DNA, 429 bp, Glycine max
  unsure (1)..(429): unsure at all n locations
gtttccattattctgtttttgaacggatagagtctcattttctgtgccttatgaaccttgatggagtggtgaacatctgactgactacctgtaatgacagattataaggcgatgcggatttgatgcagttattggctcgaaggtggctagtttcgctggtgcttgtttggacgactcgtgttggtttacgaatctatgatcctgtcttgttttattattaggctttgcattgttattgctaggatgtccatttgcatctctatgtatgcttgcatatgggtatacattaagattcatccgatgggatccgtaggatttgtagatgttactttttggtaggctagcttcatttacatatgcattacgtgttctggacctgtacatgtcttgctcgtagcacaccttgtgatgntttatatataatatata

SEQ ID NO: 26614 - DNA, 379 bp, Glycine max
agcttcacaatattagcacactgttttcaaaaaccaaagtttaagatttgttccacaaaatttttaaccttggagtctttggcataagttgagcatgtctagtccctacacgtcaccatagctgtcaattaggggtgggtaaatgggctcaggtccatggactggcccgcggtccgtgcaggctatggaccaattttttaaaaaaatccatgtctatataggattttaggcctgccctgcataatccatggaatatgtgggtttggcccgccaacctgcaaccacttgttatgcctaacccaaacccaattaatcttaaaagctcagtccaaaatttctctgcatttatgttgaaaatttatttggttgtgtaaaattt

SEQ ID NO: 26615 - DNA, 408 bp, Glycine max
tggaccttcttctagtaattccgacttacagcagcctcctatacctcttccatccccacctagagcaattccaaacaaaaagatggaagaagtggaaaaggagatcttggagaccttcagaaaagtcagattccaagatatgccaaatttctaaaggagttgtgcacccacaaatggaagctcaaaggcaatgaaaggattagcatgggcagaaatgtgtcagcattgataggtaaatttgttcctcacattcctgagaaatgtaaggacccaggtactttctgtataccttgcattattgggaacaataaatttgagaatgccatgctagatctaggagcatcagttggtgtcatgcctctgtccattttcaattctttatctcttggacctttgcaatctatagat

SEQ ID NO: 26616 - DNA, 371 bp, Glycine max
agcttgctctgtgccaagctctggtcttgggccttcctcatttcaattctccctttgtcattaaaactgatgcttccgggattggtatgggggccatcctctcacagcatcatcatcctcttgccttttttcagcaaaccattttgctcgaaactgctccgcgcttctacttacgtctgagagattgctacaatcattgtcgcggttaagaaatggaggcagtacctcctagggcatcattttatgattctcacagatcatcagagcttaaaagagctcatggctcaagctgtgcaaactccagatcaacaaatttatttggcaggcttaatgggctttgattatacgattcaatatcgagccggaaaagc

SEQ ID NO: 26617 - DNA, 310 bp, Glycine max
tgtggttgtctattgagacttagacagacaatggcaaggttgcgactaccacaattccaagctcacggcagagtgaaggagccaggtatgaccaaacttctcctctagtttaacaaaccaagcaggaagatgatatgtcaagttgatcgaacgtgcaagataagtgcaaaatcgcgaattaaatatgaaaatttcaaggacggtgctgggtataaatcgcaagtaatcttctaacatacaaagccgatttttataaaaccgcctttgtaacattcacatcaaaggcggggttataaaaatcttcgtaaat

SEQ ID NO: 26618 - DNA, 318 bp, Glycine max
agcttggagggatgatggggacccgttgctgagaggaacgaggataagggctacgtaagagtgcatgagctcaatttaaaggtgggcaactggggatggtgggcttatgcccgacttgtggaaatgggagagttaatttgcgccatcgcccaatcgccacctagtaccacatatgacgggtgccccataatccaataagcttgatgtgagaaaacgtggaagagtcagtcttcctacttttgtttgttgaccacagagtggtacctgcagatatgtcgcggaggtcaggagaccttggcgacgtcaggtggggtgcta

SEQ ID NO: 26619 - DNA, 412 bp, Glycine max
taggtctgaaaattccaagtccacacctaaaccaccttctagctttgggcaatagaccaatttctattctgtaagtgctcattaaaccttaagacttatcttgcccctagtaattaagctccctagacccaattcacataaacttttttttattaaaaaatgttttaaatgagattattgtgcgatgagtaagtgctttatgcaagtgtgatgagaatcaagagttgaacaagcacactcaagaatcttaaggaatcctttacaaattccaagtaggcctattcaaagtggaaacattaaatggacttgttcacgacatttggcccaaccataattctgtccaatctaagtctgagcttaaacaaaggtttatactaatttgggctaaagatggagctgaagaaagagtttt

SEQ ID NO: 26620 - DNA, 372 bp, Glycine max
agcttaaccatattgcaaaaacaattttgttgctaagaaacgacaatatacatacaaaatttgaaaacaaaaaggatcacattctctgcaagtattttcaaatcaatgaagacaattgcctaaaattgaaggtgttattccttatccctatgtttggcagatagaaaataaaatatgaaagaaaaaaaaattgaaattaaattgaagaggaaatagaaagaaagaaaaattaaaatttttgtctcatgaagtcaactattcctttagtatttctttcagtttttctatcaaatcaaataaaagaaacgacatcagacatcgtgatccatgttttttttcatctagtgatttctcttcaaacagaccataaaa

SEQ ID NO: 26621 - DNA, 315 bp, Glycine max
  unsure (1)..(315): unsure at all n locations
ctattatttggtgttaaccatgaaacgtcttctttcagttttgagtgnaactacaaggaagtttcttcttctgcggttgatctgagattcatcttgtgtatttaagaggtcggctatgattatatctaatcctatatcatgtgtccagctacagtttggcttcactaaatacggtcagagatacagcttgtattgctgacttgttataaagccgtacttccattttagggggtgcatgcagttcttgtttgctgtttcaagagttggacgtggatcttcaagcaatgcagttctgctgttgtctgagatattggg

SEQ ID NO: 26622 - DNA, 436 bp, Glycine max
  unsure (1)..(436): unsure at all n locations
agctngtattaagggttttgtgtttctaatttcattgtcaacaactaataatggtgaacaatctttcacagttgttctaaagtcaaattatttggcagtggaaggaggaatatatatttggtgttagttttgggagctactaggtgctgatgacaactactacaatgttcaaagatggatgagtgtttggtgtgaggcaatggcaaagcttttggtagggatgtgcaaaatttagttgttttatttatttaaaaattaaactgaacagaactgaattgtttaaaatagttggtttcttaattcaaataagcaaattggtttagagaataagtcccaaattgattntgaagaaccaattctaaattgattntgtattaaactagtttcgaattgatttaaaaatttaattggtttgaactaattctaaaatctaaac

SEQ ID NO: 26623 - DNA, 428 bp, Glycine max
  unsure (1)..(428): unsure at all n locations
aagacatactgagggccttttgatggtggcaattcatttttntcgggaactactgtttattaatagaacggagattagtcaagtggttgtgtttttcactagagaatagtttatgctttagtcgatgtgtatttattggtaaactcgtgttgtgtcaacatcatcgacttatgtttatgttttgggaatattttgctgcatgatcgtctagttcgatgttcactagtctcatcatttangtaccgtagtagtgatgcaaatttaggaggtggagacttgagtacccgagtgacaaattntaaggtggattgtgttttgcataagataaggaaaccaaacggtcctgcttcagtgctttgtgtattggaactctgcgagggtgaccacagtaacgagtaatatttctcgcaatntactcttgttttatt

SEQ ID NO: 26624 - DNA, 379 bp, Glycine max
  unsure (1)..(379): unsure at all n locations
actgcacgcgtgcaagctcatacttatgtgtcagggcgggctttctnctttttcttgtctcagacgcgagctctgaccactgttcttccttcccgcgatgcttcttttcatgtccgcctgagtgggcttatagcctaaaccatacttcccacgatttccttgggtttttatcaggctagttatgccgccattgtctttgcctaaacccatcccgggttcataaccgttccccaacataactcgggccatcattaccgccgcatcggacagacaaggttgcccaaagagggagtccacggaggaaatgctgaccacctcaaaagactggaaagcgngttctaacgattcttctgcggcttccacataaggcatggaggat

SEQ ID NO: 26625 - DNA, 377 bp, Glycine max
ggaggcaccatccactagggaataacccaaggaacaaggagcttcaccaccaagaattgccttggataagaagcttgactaggatgtttttatggacgaaaagaaagagagaaggggggagcacaaaattgaaggaatacaagagggagagaagaggaactttgaagtgtatctcataagacactcattcatcatagttacaacaagtgtgacacatgcttctatttatagactagttaacttccttgagaagctcgcttaagaaaacttccttgagaagctgtcttaagaaaacttccttgagaagcttctttaagaaaacttccttgagaagctagagtttagctacacacacccatctaaaaactaagctcacc

SEQ ID NO: 26626 - DNA, 458 bp, Glycine max
  unsure (1)..(458): unsure at all n locations
agctnggagcgctatccgcagactcaacattagtctgttgggaaagttatcagactatgngcacgaatcttatacccagtgggttattgataggaccaagagctttggcctaccctaccgcttacccagatacctatcgtccaccatcccaccatcatccttgcctatcccctttgatactaaggaagagtttcatgaacaattaaccaaagaaaggcaagaaaaagaaacttggaagaggagataccaggagctcgagcaagagaatgagattttgaaggggaagatagcccaacagagccgtgagctttttatccagaaccagaggatgattgagaacgacgacttgcttcgtcgganagacgctntgctccaccgagatgctagaagaaagaggaggtttatggatttgttctcccgtgcacattcagattccgaggatccatctactccgggag

SEQ ID NO: 26627 - DNA, 496 bp, Glycine max
  unsure (1)..(496): unsure at all n locations
cttctcgctgaccaaggagaattattntctgacccaagtagatattggagttaggcagatttctattctgatccaattgtaacaagaccaggcatcttttgttgtaagtgtggtcattagaatgcagatgtcagaattctgatatttcttagaggatcactagtaaaaggatggattagtgtttgagaacagagggcataaggagattattacctatacttaataggagatccacatatggatattgtgttctattaggagtgaatctctttcatggaaaacctcatgaagcaaaatgcggttgcaaagtccagagctgaagcagaatatcaagctatgactctcactacttgtgaactaatatgtctaaaaacaaataaatgactcattaaagagctaaaattntgtgaggtangaactgagactaatntgtgataatcatgcagctcttcatattacatctaacccagttttcgatgagcataccacacatata

SEQ ID NO: 26628 - DNA, 300 bp, Glycine max
  unsure (1)..(300): unsure at all n locations
ttattcgnngaccacagagtggtacctgtagatatgtcgcggcggtcaagagaaccttgggatgtcaggtggggtgctattgcccacaaccaagcttgaccaatcccgacccaacccgagcatagtcagtcagtgagaacctgtgatgtacctaagcaggcaagctcctggcaatcaacagataaaaggaacaaagaccacaaagcaagaaggcttgtgtggtggctggccaactgtgaactttgattgatatatgggatatggcctttggtaatcgattaccaagagtgggtaatcgat

SEQ ID NO: 26629 - DNA, 509 bp, Glycine max
  unsure (1)..(509): unsure at all n locations
aatgaaccagcggccggatgagacatgacacccgaagangagagngaccgggacacgccgccccattgcagacgcacagagaggtaccttgagagnacgcccgcgggncaggagacgctgaggacgcgaggcggcgcgcaaccgaccaacaccaaacgngaccaacccacacccaaccacggcatacaccgncagcgaganccccgagacgaaccgaaccaggcgagctcctggcggccaacagaagaaaggaaaacacgaccacagagcacggaagctcgaggaggctggccaaccgtgaaccacacaaacatgtgagacatggcccccggacatcaatcaccaacgcggggtgagcgagcacaagggcgaaaaatgcacacacgacgctaagagggactcaggcaatcgctaccacggggagaaacgatagccagcccataacgaggcaagaacatacgaacctctagtatcgctacaaaggaggcagcgaaaccggccaataggcg

SEQ ID NO: 26630 - DNA, 358 bp, Glycine max
  unsure (1)..(358): unsure at all n locations
agctntgaccattcgaattcgagagtgttcncttgttcaagntttatcgtctcgatattntatgtccacgaatcagacatccgagtgaaatgttatgaccattcgaatttgtcgagagcttccgttgttcaatttcgagcgtctcgatatattatgtccccgaatcgaacatctgagtgaaatgttattaccattcgaatttctcgatagcttctgttgttcaatttcgagcgtctagatgagttatgtacccgattcgaacatccgagtgaaatgttatgaccattcgaatttctcgagagcttccgttgttcaatttcgagcgcctagattattaatgtccccaaatcggacatct

SEQ ID NO: 26631 - DNA, 222 bp, Glycine max
gacttcccttgccagcgttatttttgtgttgtaaagaataatgtcgtagggtagataagcactagtaaaaatagaaggaagtttcccttatagattgattattcgcaaccgaaaacactttctattcataaacaataagacgaaaaatagtaggggcacctcctagggaaatgaaaagtaggtacatttcaatagcactcagaaaaccttgctttaacagat

SEQ ID NO: 26632 - DNA, 356 bp, Glycine max
gagaaagcttcctaacaaaaattttcatgcaggaggaccttcttctagtaattctgacttaccgcagccgcatatccctctttcatttccacctagagcaattccaaacaaaaagatggaacaagcggagaaggagatcttggacacctttaggacagtagaggtgaacatacctctgctagatgccatcagacagattccaagatatgccaagtttctaaaggagttgtgcacccacaaaaggaagctcaaaggcaatgaaaggattagcatgggcaaaaatgtgtcagcattgataggtaaatttgttcctcacattgctgagaaatcgaaggacccaagtactttatgtatac

SEQ ID NO: 26633 - DNA, 337 bp, Glycine max
  unsure (1)..(337): unsure at all n locations
ataatggaaatgatgatgaataagctggtatatcataacaagtgggtatactcacagttcttgaggatgcactgttgacattggtggtggcagttctatatatacttcaattactttgccaacatttgttgggaaatgaactactatctcaaggagaaaatacactntggttctcataaggttgttcagctgtagcagagaaatataaaggaaaaagtattgaaatatgtgcatgagtgttagttgtttaaaaattaagcactcataanggctttttggggtcttaatttcctttacttgtgtgacgttaaacctttttctaatgtatcacattctt

SEQ ID NO: 26634 - DNA, 237 bp, Glycine max
  unsure (1)..(237): unsure at all n locations
caagtatgtgctccttaaacctccattaattnttttgctttaccttctcttccattgntgnttcttcatttttctccatgtatctcctcacatgtctagtgctaaatgttgttaacatgattctttagaatttccaccaattaaaatagctatagaagctagatttaattntctatggttcaaatttcttgttcatgttcttgaaccatgagttgtgttgagtttaagttcctttga

SEQ ID NO: 26635 - DNA, 419 bp, Glycine max
  unsure (1)..(419): unsure at all n locations
actcaacttaactgaaacactaataagtttcaactcaatgcattctattttcctttaccctcatctgttttacaggttacaggttgcacactctgtggtggagctcatangtcaggcttgtgtattcccattgaagaaacatctcatgaagttaattacatgggaaaccaacctagacaaaattntaatgcaggtggattttctagattgcaacatggccaaccttactaggaacataatcaatggagaactcaccctggtaatcagttcaataaagaccagggtgggtcacctaacaggccacaacaacaagggcctaacttatatgagagaacaacaaagctggaacaaactctngctcattntatgcangtgccattgactaatcataagagcacanagtcagccataaaaaatct

SEQ ID NO: 26636 - DNA, 407 bp, Glycine max
  unsure (1)..(407): unsure at all n locations
agcttgaaagtggggttccccttangttcatctgttgtttggattgaactgcctattgtcatcttgccagatagaacatgaagaatgattactccaaatgtgtatatgtcacgtttctcagtaaagcatcttgtggtgatgtattcaggagctaagtatcccatggcaacactaacttttagagctaagaaaacaacttcatctgcaagaagcttaggtattctagcatctatgatcaataggttaaactatgctctaggagaacattttccactgaaatattctggtggactattgtaggtttactttcttatttgatatgaagatatccaatgcctggtcataaatgaataacaaataccaaacaaaaaaaagaagcagatattatctacaactattaatatttt

SEQ ID NO: 26637 - DNA, 452 bp, Glycine max
  unsure (1)..(452): unsure at all n locations
tcctcggtgccattcctgcgaagggcaaacattggaatgttatctntagtggggcattactcttaaagcaaaaatggcatgtaacctcctcccataaatacaaacatcaatgtaaatttagagcaagcttatgcgcatattttcttacaaacgttctcttgcacaagacatttaaccgaaaaaatgcacccatatacaatcaaggcagcttcgttacctagattatttacgcgtacctccaaggtgtatttgttacttacatcacacacatctttttggctaaattcacatacatgcatactcaaagcattttggggtaccaaaaattgcacatgtgcacatcttggcatttctaatacctattcatacgcaaacttcatgatgaatcttgactatcttcacaaaaaggtgctacatttcatgctctntnttcaagtttttgctacttaaag

SEQ ID NO: 26638 - DNA, 428 bp, Glycine max
  unsure (1)..(428): unsure at all n locations
agcttatgatcgttgngttgggtcttgtcttttntctttggttctttggtagaagaaggaaaaatgtatgtcgagggatccattaagggatggtttcagatcaatggttgagtcgggatggagttaccgacactagctggtgtctagttcttgcgagcaaggtggtaggcagtaatgttagtatcagtttgggccatgattcttgaaacaaacaaacacacaagtcaggaaaacctaattcgatataaaaaaaacataaagaagataaacaattcacattcaagacccctaataggatttggagactttaaaaagttaactatgggcatggcaggaaggcatccagggagtaactcaagaaaagccaagtttccaagctcctcttcgatcaaatactctacagggtactcattataccaatgtgacac

SEQ ID NO: 26639 - DNA, 477 bp, Glycine max
  unsure (1)..(477): unsure at all n locations
ngagcttggttcaaccccgtaatccaaggaatgggaaatttgattgccaatacttcaacaacatctcatagggatgaatgactcgggcatactttaagcttatgcacggaaaatgtaattatgaaattgagatgcccgaagaaacaccatttcctagttaaccatgcattaggtaccatgttcaattattttgttttgttgttgtgtgttttttttttagaaatgggtttatgatcccaacatggttggctcatggtgcctaacacatgcaactaagaatgtagtgtgaagtttcacgcttccccttttttgtttttgttttgtagaggaaaacgcaaggatgagcaaacatgaaaacaaatggtatgcaattntgcagatcaaaaagtttgttgaacgcatatgcatgatgatgccatgactcatgcaaaatgtgaggctggaatatgataacggacaaatgcaggaacgatatgt

SEQ ID NO: 26640 - DNA, 413 bp, Glycine max
agcttctcaagtaagcttctcatgttagtttctcaagaagctacctaggctataaatagaagcatgtgtaacacttgttgtaactttgataaatgagagtcttgtgagacacacttcaaaataatgaaagggaaggttgggtttctgatgtaacttttaaaaaccaccaagggccccactggtaatgctatgattgctcaagagcttgtacacttaatgcacaaaaatcaatgatgttcaaaattgtccttaatagaggcacttttaaattttgtcacggaatatgctagataagtcacatggtttttaaaatagtccttgccattaaaattaaaagtattacacatcctttatagtcgcttatagaggcaccactgataatgctgattgctcaagagcttgtacactttatg

SEQ ID NO: 26641 - DNA, 491 bp, Glycine max
ggacactataaaactcaacttctcaaatttcctcttgtgtatgtgcggaaaaagttctgatatatctaagttgtttcatgtcaagaactggaaaagcttcacaaccatattctactggaaactgcaattaacgatttatgtcttgtagaactctgtagtaaggtgtgtttggatgcattaaacaaagataaagcacaggagctcgtaatagcaccttcactaattatgtaagctaaaataaacaatatatcccacattggaaggtgaagccctaaatttttcttgcatcaatttcttatcttgcatctaacattgtgatggaaagttcgttaactgagcacagtctgtgattttccaacgcttcagatgtaacatctgttccagtgtaaaatccaggaacctttggctgtggcagtaatttgtcaccattcaacattaataccactgatgacatgtgtggcctatcttgtggtctattgtgcacacataat

SEQ ID NO: 26642 - DNA, 120 bp, Glycine max
  unsure (1)..(120): unsure at all n locations
ttcacgcttctcattnntggaacataagttcttggaaggggtgggacgacactataatgtttaatgaacaatcaaggttctttgttttttctaggatttgaaaaccaaaggaagatagag

SEQ ID NO: 26643 - DNA, 360 bp, Glycine max
  unsure (1)..(360): unsure at all n locations
agctgagggtttaatttcacgatngtcacgtgctcatgcaacaattgttagtcgtggctatacgagacatcttgccaaacaaagtaaggttagcgataactcgcctgtgctttttttttccatgctatatgtagcaaagtcattgatcctgtcaagtttgatgagttggaaaatgaggccgcaattatactgtgccagttggagatgtattttccccctgctttctttgacatcatgattcacttgattgtgcatcacgtcagagaaatcaaatgttgtggtcctgtttatctacagtggatgtacccgattgagtgatacatgaagatcttaaaagggtatacaaagaatctatatcgt

SEQ ID NO: 26644 - DNA, 473 bp, Glycine max
  unsure (1)..(473): unsure at all n locations
tcatcttcttcactatacaaccacaaccacaacttatactttcaccacacttgccattattcttacctattcctatctttgaggagcctgaaatggcgggagaagaacatcctacaaggacactnggagactatattgcacatgttgtgcaaaggcacttcatattggaatgtgttattttggctattaaaggttgtagtgtcaatctataattaggattgctcccatcaattggtcttagcacatctctcaatttcatgtaaaaaaagttaatggaccggattgggtaatgctcaccagtacttactaatatattcacacaaaaaaaaaccactacttattaatatttgaaaatgtttaactatacattttcattcaatattggttactttaggtacactaattagattcagtaaaaanaaatacactaattagaaataattattatcattcatttatacattaattatcat

SEQ ID NO: 26645 - DNA, 196 bp, Glycine max
caaaaacttaaagggatttaggggggaaaaaacccccaaaggccacgggtaaaaatgggaatttgaggggggggggggttcccccccctccccttataaagaaagaaaacccacccccccccccccacctaaatatgggggaggggggcctcctcgaaagggggggcccccccaaaaattttttttgtgtgggggg

SEQ ID NO: 26646 - DNA, 430 bp, Glycine max
tagcagtaatgatggcccgagttatgttgtggagcggttacgaactttgtatgggtttaggcaaagacaacggcggcataactagcctgataaatgccaaaggaaatcgtgggaagtatgggttaggctataagcccactcaggcagatataaagagaagcactgccggaaagaagagcgaaagtcaaggctcgcggttgagacaagaaggtgaaggaaacccaccctgccatataagtaggagctctataagcgcgggtctgggggacgaaggtcaagtcgtcgctatacgaagatgatgttccgagtacattggatttggtacgaccatgccctcctgatttccaactgggaaattggctagtggaggaacgccccgacatttacgcgacgagcataatgtaaacctttacggatttaaaagctctat

SEQ ID NO: 26647 - DNA, 437 bp, Glycine max
  unsure (1)..(437): unsure at all n locations
gcaagcttgngcgttntactgccatnnagaattttggttttgtgcatatctgcaangaataggaagacatgcaattaatgagaaataaattaagaaacatgatgcatgatttgataaaccattttactacatagacaactgcatatgcctctgttgagctatgaaacatgatgcatgatttgataaaccattttactacattgacaactgcatatgcctctgttgagctatgaaacatgatgggtggaagtggaactaatcaaattgctgcccagataatgtaaaatccagtagaagagactgtaacttcttgttacttctagtctctctgatgtagcctttatgcccttggttttcatttttgcatgtgtacctttggctntatatcctttgttcaagctgtttaatgtacatgtactattgaaaacaaaaactgg

SEQ ID NO: 26648 - DNA, 333 bp, Glycine max
  unsure (1)..(333): unsure at all n locations
ataatgaactctagttcattttggaaattaaatataggctaacgctgttgcaagatcaattacacatgaagacattgctagcctgctaatgtcccaggcttcatatatgggtttctactctgaatcttaccataaaagactaaaagacttatttgaaataaaaacagaaacaaaatgatattgtagggaggaatgatacttgttgtgccctatacaataatcatatcacaataataatcacctgtatcatatgtattacattgtacgtngtgctttgcttatttcaccaataggcactatatctaatatatatatcaccacaggtcatcatat

SEQ ID NO: 26649 - DNA, 407 bp, Glycine max
  unsure (1)..(407): unsure at all n locations
agctctagccaatggactacctgaattttttcttgatagcccttcagagcctgggggccctttccttgttttgaagctcactacaagccttaagtgaaaaaccatgatattaccatatccttaaggaattttggagctctccaatcgttttgggaataagtgtggggggtttttgtttcattggacaacttgttntgttggctatgcttcatgatgtattttgggccatacttgatgtacattgtatattggttaaatgttggacatgctgaatgaaatgttgtttctcaaaggctaaagagtaaaaaaaaaaaaaaaaaaaaatctaaaaaaaaaaacaaattcgaaaaaagaaaaagaaaagcaataaagttgagtgaataagatcttaaatggcacaagaatga

SEQ ID NO: 26650 - DNA, 479 bp, Glycine max
  unsure (1)..(479): unsure at all n locations
gacttcctcctacaagaaaattccttctataaaaatataactcttntttttacaagcattgtatggtcagaaggctggtttaaacaatatcccataatttctttgggatacccaatgaatctacatttctcagaaccatgccttgttatgtttgagattcataaccatagtgggacaatcccaagccttgttgtgtgtgagattcattctaacctttttcgtatcagacatggagttgtagatattaatttagtagaaactntatttggcaaataacttactgcttctaaagcatatatgcacataaacttactagaagatcatatgtaacttgattctcatagtcaattagcatattaagcatcttatgcatgataacaattcttatgtaaccactactagaaaatntactgttaacatcgttagaataacatcgattntatagaanacagatgtaaatgagaatactgtgcataatc

SEQ ID NO: 26651 - DNA, 405 bp, Glycine max
  unsure (1)..(405): unsure at all n locations
gcaagcttgagacatagtctaacccgaataagtgtngttgatgctcaangaaataaaaaattcacaatgcactcgtatcaaaaacctcaccaattaagattaatcatcgactgagattcttcaataaacttctttaaaaaaaaatttatgaccttctctcgtcattgtcttgtcaaatattttccttgcttctggaccgtacacagctccttggactagaatggggtcccatgctaatacatacacacgtgacctacaatccttaacctaaagggttgtttggttgtgtgaaaaagaaaaaaacgaaagaaaattaaaaataaatatttttaaaataaaaaaaagagatatgaaatctatattattttttcaaaatttattcttgaataataatttatttttttc

SEQ ID NO: 26652 - DNA, 481 bp, Glycine max
  unsure (1)..(481): unsure at all n locations
gagagctcttcaaactatccaaaatgtctttctttacaaaagaattgtttgctagtgtgttggttcatgtatcatgtcttcaaagcttctgatatttataggtctttttcaacaagtgtttattgtctctaaattgatagatttcttcacttgaacttatgtttgaagattgtggtcattagagcanttttatgttgcattgaatgcacgtacttctttatgctataaaatcacttagttagctttcgtgtagaacattttagcaagaaatctcttcctttttgtcagaacaagtttataatagcaaaacgcatctnttgatgtcgtttgacaactaccagatcttgaatatcatttatctntcatatgattcgatagatcttaggagaaaattttgtgaaacgaatatcaaatatattagtctttaatggtactctctctatatcaaatcatgacacatatctattatggtctaaagata

SEQ ID NO: 26653 - DNA, 367 bp, Glycine max
  unsure (1)..(367): unsure at all n locations
agcatcaaaatatggtcaatctgaatatcctgaaatagcatatgagaaagtttctaaaatcctaaagtgacttaaccatgctttcaatgattgtaatcactcacttaaccatgctttcaatgattntaatgattctcatttgtcatttggctttggtgggtttgtgagactcacgcatgtcaacttgtctgattctaactttgaaggggatattgcttcccaaatctctcatctttcgaaatcagtgtcacttataagcaatgcatatatcttaatttcaaagtgaatatcctttttctaccaagtagtgcctgagaaaacataatgtctatatgcgttagaccaatgaaatttgagagaatgaaat

SEQ ID NO: 26654 - DNA, 266 bp, Glycine max
  unsure (1)..(266): unsure at all n locations
cttgaacagnttgtaaaatggcttcgcctttntggcgagcttcgagaggaacccgaacaaggatgctagcctaccattcagtttctagacttcttggacattggtcgggttgcacatctccagtatgacagtgcatttcttttagaggaacatgactntgccttccctgaaagtacatttttcagggttgagacacaactcatatttgcggagttccctgaaaacttcttccacgtctgccacatgataggctatgctttgagact

SEQ ID NO: 26655 - DNA, 330 bp, Glycine max
atgcctataggatggacctcccagaagagtatggagtcagcaccactgttaacatttttgatataactccatatgcaggtggagctgatattgaggaggaggaactaacagatttgaggtcaaatcctcttcaaggggaaggtgatgatgcagttctccctaggaagggaccaatctctagaaccatgagcaataggctgctagaagagcgtgctatagctgctgaagaacgccctacggttctgatgaaccttagggtagatatctgagcccatgggccaacgctgggtccaattatctatgtacatattagactacgatgtcattata

SEQ ID NO: 26656 - DNA, 249 bp, Glycine max
  unsure (1)..(249): unsure at all n locations
agcttgtaggaattatggggaccctatacttgtggtactatgtggcggncgggcgatggtgcacaacaagttttccacatccacaatgcgcgcataaacccaccatcccctgttgcccacctncaactgagctcacgtactcccacgtagcccatattctcgtttctctcaacaccgggtccccatcaatccttccaagcttccccaacatcaaagtaatacaacattcacacagcacaagctatcaca

SEQ ID NO: 26657 - DNA, 475 bp, Glycine max
  unsure (1)..(475): unsure at all n locations
ntgatgncaacattggagatgttaatgaaacaacgagattatgttctccatgagaggttggatcaaatggagaatagagatcataatgaagaagaaaggaggagaagagggaatgatggtgttcctagacaaaaccgaattgatggtattaaactcaacattcctccatttaaaggaaagaatgatccggaggcctacttggagtgggagatgaaaatagagcatgttttctcatgcaacaactatgaggaggaccaaaaggtgaagcttgccaccacggagttttccgactatgctcttgtgtggtggaacaagctacaaaaggagagagcaagaaatgaagagccaatggttgatacatggacggagatgaaaaagatcatgaggaagcggtatgtgccggctagttactcaagggactcgaaattcaagctccaaaaactaacccaaggcaacaagggggttgaggagtatt

SEQ ID NO: 26658 - DNA, 403 bp, Glycine max
  unsure (1)..(403): unsure at all n locations
agcttcaacattcaatttcgaggttcntcgttatattacgggactcaancggacatccgagagaaaagnnataggcatncgcatccgctcagagcatcaacattcaatttcgagcgtgtcgatatattacgggactcaatccgacatccgagtaaaaagttattgtcgtttgaatttgctcagagcttccgcattcaatttcaagcgtctcgatatattacaggactcaatcagacatccgagtaaaaagttatggtcgtttgaatttgctcagagcatcaagattctatttcgagcgtgtcgatatattatgggactcaatcagacatccgagtaaaaagttattgtcgcttgaatatgctcagagcttccgtattcaaattcgagcgtctcgatatattac

SEQ ID NO: 26659 - DNA, 407 bp, Glycine max
  unsure (1)..(407): unsure at all n locations
gacactatgaaactcaagcttgaggatttcaaacgactttaactntntactcggnattctgatctagtcccgtaatatatcgagacgctctaaattgaatgttgaagctctgaccaaattcagacgacgataaattcttactcggatgtctgattgagtcctgtaatatatcgagactctcgaaattgaatgctgaagctctcagcaaattcaaacgacaataactttatactcggatgtctgaatgagtcccgtaatacatcgagacgctcgaaatttaatgtggaagctctcagcatattcaaacgacaattacattctactcctatgtctgatagaatcccgtaatacatcgagacgctcaaaattgaatgttgaagctctcagcaaattacaacgacaatagc

SEQ ID NO: 26660 - DNA, 435 bp, Glycine max
  unsure (1)..(435): unsure at all n locations
agcttgtgtgttgagtnggnttatatctttgatagactatttntaattgcgaacaaagagtcacttaaggcgtcggaccttgaaatgatttaaattttgaaaagctgagagaattgttaaggcgttggaccttggaacgatctcaagtgatatttgataaactgaagaagtttggttgtgaattgattttatcttgattttttttattaactttcaatctctttggagacaactttacaacactagtgatcggttaagattaaattttacaaagaaaacgagatcaccgatgatagatggagaagatgaatgtgcacataataataagagggacccctaagggtacatagatcacattcaatccctaaaaataaaagtaattgactagtgtgaagaacaccgaacaagaaacgacatggagacgatcacagtcgc

SEQ ID NO: 26661 - DNA, 453 bp, Glycine max
  unsure (1)..(453): unsure at all n locations
ntangtacgcctgaaggtccagaccatctatcataatcctttatgtatataattgcaatcagctgctagtgttccaagaaatcctgcaagcaaggcttgtgcttcaccaattgcttggccttggtcatcaaaattcacaatgatgcgtaactccctangtaagctattgactcccttaactttcaccttaatcttcttgatcgtttcttcagagtctttaacaataaaataatttcttaataagaaaatgtaatatacttcatatgatgataattacaaaactaaaaataaaatacaatacttgtatacctattgcctcaacagtccaacagtgtgtagactcacgcccaacatgacgtctagttgtttcatcttcttgtggaacttcagatgttgatacatgagagagagggacattactagttgggacttcangagcttgtgtggaatcac

SEQ ID NO: 26662 - DNA, 337 bp, Glycine max
agcttgccgcccagctcgcccagtttatgctttgttgcttcctctagaagcaacagccttctggaggaatcttctggagggcccaagtgggcctggttgctatttacaccccctttttactaaatgcaccccccttctatttttttgtaattcttttccgtaacgttacgaaactttacgaatttcataacgatacttattttccttccgcaaggttacgaatccttacggattatgtatttactcttttttagctttcgaagaagttacggaaactcacggattgcgcaaaaacacatcttttcggtttccgccacattacagaatttcacggatc

SEQ ID NO: 26663 - DNA, 387 bp, Glycine max
  unsure (1)..(387): unsure at all n locations
actaagctgtgctcggttatttatatttctangatcatgaacaattatgtgtgtcctactatgactggagaaacaaaggtgatcaaataacaagcagagatttaaaaggtactangttgcctcctagtagtgcttctttaacgtcttgagctggacgcatgatgacttgtcggtcacggacctagtactatgcttatctttggctttggacttggtcgcctgctggtcgaccatgggtcgtaggcaacacactaactattttgtggatgagctgagggactctggaggtggcggcggtgcgtctattgcccgctgccggccatccctangctgatgtggtgtcttgccctgcgcctgcctgggggtgcagtacttcttgatgaaagc

SEQ ID NO: 26664 - DNA, 335 bp, Glycine max
  unsure (1)..(335): unsure at all n locations
ctgcagctngaatgttgctctttctatngttgtactgcatgttctgcatagtcatttgcctcacaagttcttcgagggaaggttgtggaggggcctcaactgttggttgtttctggggttgttgctgttgttggattggtggaggaatgtatggtctgcttgggccagcagcattttggaaggaaggagcangctgctgttgttgttgctgagggctggaccatctgaggttagggtgattcctccatccagggttatatctgttgctggagaggtcataattgttctgctgtggttgattttgctgctgaggttgaggaggtctattgtaaata

SEQ ID NO: 26665 - DNA, 458 bp, Glycine max
  unsure (1)..(458): unsure at all n locations
ngtgtctgatgcttatagttgttggagcacttattgcatttctttcttcatgcagcaaaaccactctgtttggcttttgtgtagaataatttagcaaaaagccacttcctttaagttagagcaagtttgtcactagtaatgtgtgtcttttgatggtgtttggaaacttctagaacttangcttcatttattcttcataggattcgatagatcctacgagaatacctttgcaaaatgatctcagacacaaagaaataaatgaagtttcacatgccattctttaatgttgaattaggttatgacttgatcctttntttgtctgatattttagacgcaagatgtatgtagcacagtttagtattgcataagatgcacatnttaactcttgtatttatttgcatatgatcaaaataagtagaagtctggatttatctcaagacacatatgtcttttaactt

SEQ ID NO: 26666 - DNA, 359 bp, Glycine max
  unsure (1)..(359): unsure at all n locations
agctncnnngttgtaatttttcttacctgtttggtgnnnnggctagagataagggtggggtttggtattggatgtgcagcacgcgggctttgtggctggtttaggggtggcatttctagatgattgagtgttcttggctgatagggtggtgggtaatgagaagggataatattagctgagtattgatattgttgagctggtgggaaatttggccatgtaggaaggcagtcacaacatgggttcctccctccttctcattctctccatttgccctagccttgtcattcatcaaagcaggatactcaaatntgcctcttttcaaacccacttttatcctttcaccggcaaaaactaaatcg

SEQ ID NO: 26667 - DNA, 464 bp, Glycine max
  unsure (1)..(464): unsure at all n locations
tgaccaatctcgtattaacctgngcatagacagttagtgtgatcctgtgatgtacctaaacaggcgagctcctggcagccaaccgataaaagaacaaagaccacaaagcagggacgcttgtgtggtggctggccagcaatgagtcttgagtgagatttgggatatggcctctggtaatcgattaccaagggtaggtaatccattacaaggcttagaagtgaagacaggaagctaagatggcctctggtaatcaattaccaagggagtgtaatcgattaccaggcttgaacacgagatcaggaagctaggagggcttctggtaatcgattaccaaggggtgtaatcgattaccgggcttagaaatgggactggaatgatgaaggggcctntggtcatcgattaccaggctgtgtaatcaattacacagaggaataagccactggtaatcgattaccagtcatgtg

SEQ ID NO: 26668 - DNA, 411 bp, Glycine max
  unsure (1)..(411): unsure at all n locations
cgcagctgcagcttcttagaaattccttggaagttttttttaaaactttcttgagaagctagagnttagctacacacacccatctaaaaactaagctcacctccttgagaagcttccttgagaagctagagcttagctacacacccatataatagctaagctcacccccatgaaaaaaaaacatgaaaatacaaaaaaaaaatcgtactacaaagactactcaaaatgccctgaaatacaaggctaaaaccctatactactagaatggccaaaatacaaggcccaaaagaagaaaacaacctattctactatttacaaaaaagagtggacccaaccttggcccatgggctcaaaaatctaccctaaggttcatgagaaccctaaggccttctntatcaactctagcctaat

SEQ ID NO: 26669 - DNA, 470 bp, Glycine max
  unsure (1)..(470): unsure at all n locations
gattatggggtacccgtcacatgtggtactaggttgtggtcgggcgacggtgttatnctattatccacatccacaaatcacacatatatccaccatgcccagatgcccaccttcaactgagctcacgtactcccacgtagcccttatcctcgttcctctcaacaccgggtccccatcaatacctccaagcttccataacatccaagcaatttcaacatccaaacatcatgaactatcaaaaccaagccaaaaacagggcagaggcagaaaactctgcccaaagcacaaaccaataccacagtgtttcttattcaaataccccagtaacattctcttcgttccaatttgttcaccgttggatcaactcgaaaattttactggaggttcctagtacataagtctacnatttgaccgttgggatctgctagaaaacgtncagaacccaatatgtacaaccctntccacaatca

SEQ ID NO: 26670 - DNA, 430 bp, Glycine max
  unsure (1)..(430): unsure at all n locations
agcttagctctctctctctccataaacttttnttatttgcttcttaaaaaaacaaaaaatatgtttttaagctgaaatcgtttagataacacgcactaaaataacagaaagctgcttatttttttttaaataagcattaattttaaaaaataagtttaaacaaactaacacaatatatatagttataagcttgtatatttttttaggggaatttcattccaaatcaaagatcgaatacaagaggaaatatgatggaaaacatgattgcaagcattaaattttgctcctcttgcaagagaataagcaacataattggcttgacatcttacaaaactcaccctagagtttgagaaactcaacaaaacatgtctacattttgctaaaataacttggagatcagattagaaggagaagcaagaatgtcaacaat

SEQ ID NO: 26671 - DNA, 347 bp, Glycine max
atgaatttggcaagcatattatcttgatggcatttgtttaatcacattatgcatatgtaccctagcataatgggctatattagttaataatattacggattgtacactaaatgatactgagccttgatggccatataatgcattgatattacactaatctatacgtctatgggttaatacactaaggatatagtctgatgatttatggtcaatcaatattatgatacgtcactaaagcatattgaaaggggaagctattgaattaagtatgtcggcactaattttttggccccaatatgaattcaagtcattctataatacaatacatcgagatactacctatattt

SEQ ID NO: 26672 - DNA, 455 bp, Glycine max
  unsure (1)..(455): unsure at all n locations
agcttgtaatcgattacacacatactgtattcgattttctgaagagttntttcagaaaacattctcaacagtcacatctttttgtgtggttcttgaatgagtatcataggcctataaatatgtgacttgagacacgaatttgataagagtttttcagaacaaaaaggtcttatcctcttataaagagaaatcgttttatcctcttacaaattccttggccaaattacttgtgattcaataaggaattatttgaatgctcaaattgttcaatctatctctttcaagagagatttcttcttctcttcttcttcattctgaaaagggattaagagaccgagggtctcttgttgtgaaagaattctaaacacaaaggaagggttgtctgtttttgtgtgtntagaaactcgaaaaggaattacaagatagtggaactctcaagcgggttgcttgggact

SEQ ID NO: 26673 - DNA, 489 bp, Glycine max
cgtatggcggaaggcactagatcaaaagctctatcttcatataaaaatggaagaattgttttcgaaatttgcagcaatagtcgaggcgaagatggggaccttatcagagaggttagcacatctcgaagctaacagatataatccacaacaagcacaaccagaagcgacttcattttcggcatcaggatcacacacagcgtcgcatcggatgaagcttgatgtgccgagattcaatggctctgacgccacaggctggatcttcaagataacgcagttcttcgagtatcacacaacaccagatcatgagagactcacgatcgcatcattctatatggaaggttaggcattagcatggtttcaatggatgcaccggaatggtcaattatcgtcttgcccggcatttcttcatgctctccattcgcgattcgcatcaaccacatacgaagatcccactggactgctatgtaaactgcagcagcgaaccatggt

SEQ ID NO: 26674 - DNA, 402 bp, Glycine max
  unsure (1)..(402): unsure at all n locations
caaaaaattgcaaaaaaaaaaaatttcaactcgcctaggcgagtggccagctcgcctgngtgagcatggtctgacgaaaaataaaaagggggaggggtgaagccatatttcaccccatcttcccccattttcttcaaaactcaccaaaggctccccaagacccacgggaaccaccatttttgcaccaactttaagctttttctatgcatttgtctcaattattcttgctttccattcatcccactcaagtaagtgtcatctccatctatttttactttttccttgtggtatttggtgctttatttgttgtttctttgcaatatctgtgagataagttatgtgttaacccatggtttgaatgcttttattaanagctgcaatggatggctctacgcctatcta

SEQ ID NO: 26675 - DNA, 481 bp, Glycine max
  unsure (1)..(481): unsure at all n locations
gcttctagtatttataggccttcatctntaagtattngttgtttctaaacggatataattattctcttgaggttgctatgatgtttgtggtcattggaacatttaatgcttgcattaaatgcatgtatttcttcatgcttgaaaaccactcttgtttactttcatgtagaacactttaatagggaaccacttccttagcattagagtaggtctgccacaacaaagcatgccttttggtgttgtttgacaactatcagagcataaatttcatttattcttcataagactcgatagatccttaaagaatgtcttgtgagactgttcttgaaaaatgaatctaagacataaagtatttgtgacgattntaaaaccatgtgtatttgtttaaaaaattataatacaatttctggcggctaanaaccgccataattaataaaagaaaaataaatgcaatacaaaacagagatagttatggagatat

SEQ ID NO: 26676 - DNA, 423 bp, Glycine max
agcttggactcaaggagaaacttagaatggttctttattagagtaaaaaaaactataaagaaagactcaacaaacctctagctttggcccatgtttttcacgctaattttcaattgaaatttatgaactaagattggtataaaataggaaccaattatagaataaattttgagccaaaacaacaagcacacttccctttcaccttttttttcctggatactgatttttcttccaaattgtgtgatttttatcatttttaaattttatccaaatcacttggttctttttttataacttttttccagatgcctagaaaattcagtaaaaatttcagctcaaaattcgaagtaactaattttcagtaatttttacaagttcgtatgtccaagctgccaccaccagcgatttttgtttttaagcatg

SEQ ID NO: 26677 - DNA, 185 bp, Glycine max
cgacctcactaatcacatatctcccttgttttgattaagcttacttgaataagtattaatatgtgagtcttgattaatccatttctctcccttggctcacaaagccaaggcgtacaattaagcattaatgactaatatcacagacatcatgaaattaccatatgagcaaactgataccaattaat

SEQ ID NO: 26678 - DNA, 391 bp, Glycine max
  unsure (1)..(391): unsure at all n locations
agctntgcataatgagaatctgtctttcatanatgcttngcaatnnggcattngaagtttgggagctcttagaagatgggtctgctaaagctggaggtggggctgaagtagaagatgcaaggatgccagctattggtgcaaaggaagaggggacatcagctactctgagcttggtcttcctgtagaagcaaagcttcatggtgaatcaaaggtgattcaaaggtgttttgatgataacaaaagatgatgacaaaaagctcaaagatcaatcaaagaataactcaagttaatcaagaacaattcatgagttaaagatagaatcaagtcaagagttcaagatagaatcaagaagaattcaagactcaagaagaaagttaagagtcaagaatca

SEQ ID NO: 26679 - DNA, 449 bp, Glycine max
  unsure (1)..(449): unsure at all n locations
gacactatagaaactcaactctccgcaatttctatttttaggggagaagngaagtttattgggttcagcccctctggcacttctctctctttcgaatatgcttaggaaaatagtttccgtgaagaaaatccaagccgaggtgcttccgtaacccttccgagatgtctccgtaagcacatccgtgaaggattgcgtccgttctttaccgatcttcatccgctcttcgatcttcaacgggtaacgcttcgaatccgagactttcaatttatgtcttgttttgttaagctctcatctttatgtcgaccattcattatttcttttcttacgactgtaacgcgccttttaccgttatataagccgtttctcacctaattaatgataaaatgaattcacccgatcatttgtgtagtatctcattaatcactttaaaacgaaactatcgatcgtca

SEQ ID NO: 26680 - DNA, 430 bp, Glycine max
  unsure (1)..(430): unsure at all n locations
agcttccattttcaatttcgagcttctcgttatattacagttctgaataggacanccgagttaaaacttattgtcatttcattttactcagagcttccgttttcaattacgaacgtcacgataccgtacgggactcaatcggatatccgagtgaaaagttattgtcgtttgaatttactcagagcttctgttttcaattacgaacgacttgatatcctacgggacacaatcggacatccgagtcaaaaattattgtcgtttgacttttcttagagcttccgttttcaattttaagcgtctcgatatattagagagctcaatcggacatctgagttaaaagttattgtcgtttgacttttcttagaggttccgttttgaantcgagggtctcgatataatacagggctcaatccgacattccagntaaaag

SEQ ID NO: 26681 - DNA, 249 bp, Glycine max
  unsure (1)..(249): unsure at all n locations
ntaagcagattcaaacgacttatactttgaactcggatttccgattgatccctctaatatagtcgagacgctccctattgaaaacagaaggccctgagcaaatgtaacggacaatcattatcggctctgatgcactaaagtgatcctgagacatgaatacgccatcattagtgcacggggacttagaacactatcaaacgacactgactnttaacgtggatgttcacacgagcccgataatatagtcag

SEQ ID NO: 26682 - DNA, 435 bp, Glycine max
  unsure (1)..(435): unsure at all n locations
gtcacctgcggcatgcaagcttganatgaggaagtgtagaattggngtaacttcctgcttttattcgttaaccacagattggtacctgaagatatgtcgcgagggtcaggagaccttggggacgtctggtgcggtgctattgcccaaaaccaagcttgaccaatcccgacccaacccgggcatagtcagtcagtgagaacctgtgatgtacctaagcaggcgagctcctagcagtcaacagataaaaggaactaagaccacaaagcaaggaggcttgtgtggtggctggccagctgtgaaacttgattgatatatgggatgtagcctctggtaatcgattaccaagggtgggtaatcgattacaaggcttaaaagtgaagacaaaaagctaagatggtctctggtaatcgattaccaagggagtgtaatcgatta

SEQ ID NO: 26683 - DNA, 446 bp, Glycine max
  unsure (1)..(446): unsure at all n locations
tactcaagcttactacacttctgcgagtgtgattgagagctgtcataattcttattgatgcagntatgtgaatgtacagttagcaaagccgatacattctatcgtttgtttagttgagtgcattgatgtctatatcctaccatagctctgctttttatgacattcattatgatcatttgataggtttcttatgagattaacaaaagatgacagtgaggtcaacttagctaatggcgaagcagaacgtgaatgtgcataatggaaatgggcagaccctgaagaagttattgagcagagtgtgtggaaaaaaggagatttgaaataggtgtaatttttntccatttgaaagactaataatgaatgatgactgattacaggcagtggactacacgagaccaagctatgaagaagttatatgaaccttcaagccttactttcaagggagt

SEQ ID NO: 26684 - DNA, 440 bp, Glycine max
  unsure (1)..(440): unsure at all n locations
agctttacaaaaataagggaagatttaattantgaatnccttatatnncactgcatgtcatttcttcaatgcttataatttacatagaccttcttcaagtatctattatctcacaatggtttgattnttccactaggacttcatttgaaatcttatggtcgttagaacatttaatgcacatcctattctcatgtagatgaaccccttttattggctttcgtgtagattactacaccaacaagtcaattcgcataggtcaaagttggttcgaacaataagtaacaataaagcgcatttttaatggttgtttggtacttctcaaatcttgagtctcatttatgcttcataggaattgacagatccagagaatattgtcttgcaaatgaaactcatacacaaaatattaaatgaagttttaaatgtcattcattgatgctcta

SEQ ID NO: 26685 - DNA, 343 bp, Glycine max
tataaaactcagcttctagtctacctgagttttctggatacttcagctttccttaatgacaatagcatcacttctggcactaaattgctaggagtctgaagtcatcttctcaattaaattttaggcttcagcacgggtcatgtctacaagggctccacatctggaagcatctatcatacttctcaccatgtagctgaggccttcataaacatatcggacaataagttgctctgaaatctgtaggggagggcaactggcacataatcttttaaatatctcccagtattcatataagctctctccactgacttgtataatacctgaaatatcctctctgatggtc

SEQ ID NO: 26686 - DNA, 346 bp, Glycine max
  unsure (1)..(346): unsure at all n locations
agcttcctattcatcgaagcagcattatcttatttgcctcttcttagacctacttcgatcctttcaccaacgaacactaaatcggcaaagcttgaaggcatgtaacccaccatcttctcacagtagaacaccagtaatgtgtccactatcattattatcatcttcctctccgtaattgggggcgctacttgaactgccagatccctccagctntgggcatattctttgaaagattcatgctccctcttacacgtgttttgtagatgcattctattcagatccatatcagaattgtattgatactgcctaatgaaggaaaccattatgtccttccaggaatggactc

SEQ ID NO: 26687 - DNA, 374 bp, Glycine max
  unsure (1)..(374): unsure at all n locations
cttgaataatgatttatcatgcagctaaatgtcatgcctatctaataactattgttttaggatttgtacagattcataactattttaagtgtactcatacattaaatctttgcttcttatacaagtttaacataattgtgccttagtctctttctgaacaaattaaattgcaatagaaccctctgctgctntgtggaaaacagccttattcaaatagaaaagatactagcataagttgtgtgaaatgtgaattaatgggttcaggaaaaagaaataatgggactagtgttagttaatggcttgtgtattttttatatcacttacactnttggcaattaatatttttgaattgacaatnttttcttatttttatg

SEQ ID NO: 26688 - DNA, 343 bp, Glycine max
  unsure (1)..(343): unsure at all n locations
aagnccaatccaagaattacctcatacctacaacttgaagattattttagaaaactcaaaaagagtaatttggacagcaaattgtacccaatactaagactcaaaatgcatctgtgtgctagaatttagttgagcgaattacttagctcttggtttaagtagttatttaagtccattttcacatttttcttgtaattntcatacttattttttggggaataagtttaattgtcttttcatattctctaagtcaaattttagtgttttgggcttcctaaaccattatgttagctagtgggacttaatgaaccatcgtgatgttagtggaaagtgtatgcctagt

SEQ ID NO: 26689 - DNA, 390 bp, Glycine max
  unsure (1)..(390): unsure at all n locations
tcatctacgcgcgctcatcttcatccttagcttctattattcatttcgcacctagagctacattcccaattcgaaaacttatagctctcttctcactaggacccagagctaggaggggacctgaggcttctactacatgttaaaattgcaatttgaaagttcacaccttcatctgcacactcttatattcctcctctgcttctaccacatttcttctcacagtttgttgaacggcgcgcggccaacaaggttacaacgcttatttcttagttgttgagcgtttactatattaccgccataccaactgccgtaacattcggactattgaggattntcatcttatgctgcagaacagctttaccactggcacagtgactactcatcctgctt

SEQ ID NO: 26690 - DNA, 435 bp, Glycine max
  unsure (1)..(435): unsure at all n locations
agcttatggaatctagattaacatcngtgtaggcccaagtttgagaatgttctacaattagggctgctcaaaaaaactaattnttaaaaaataactataactagttataaaattataaccagttntatagttatttttatttcaaataactggtttttatttaaaaaaatacatatagttataaaactataactagttntatagaaatgattatttcaaataacttatttttattcattcatagccagttatgtaattgattttagatataaccggttataactagaattggaatgttgtgaagtagagaagaaggcactagaagcagagttccaaccagtacttgatcgaatatatgataaagagactgctngcaaggagacactangtaaaacacaggatgagtctgctagaatatctcanactatcagaaat

SEQ ID NO: 26691 - DNA, 465 bp, Glycine max
  unsure (1)..(465): unsure at all n locations
tcagggcttgaaactatgaaggaacagcctcttttgtgttataccagcatctctaggaaacattncttccctaataaatatcagctttggcaccaactntctcactggctggattcccagtgaattgggcaggctccatgatttgattgagcttgatctcagtctcaaccatctcaatgggactgttccacctgctatatacaacttatcttcccttgtcaactttgccttagcttcaaactctttctggggtgagattcctcangatgttggtcacaaacttccaaaactcatagttttctgtatctgcttcaattatttcacaggtagaattccagggtctttgcataacctcaccaacattcangtcattcgtatggcttccaaccatctggaaagatcagtgccacctggttttgggaaatctccatttctttgcacgtataacattcngtataactggat

SEQ ID NO: 26692 - DNA, 449 bp, Glycine max
  unsure (1)..(449): unsure at all n locations
catgcaagcttggaacacatgataaatatgagnttgttnttatattgactttgtcatatcaccaataataatcttatcatcctcagttagtcgaccaacatatggatgtccagtaaatgacttagtcaacgcatgataatgagtctcacatattaagttgaccatcaatacttcacctcccaagattggttttgttcgcagcttaaaggaacacccacattttctagtactagttatcgttcccactaaatctttcttgtatattctatatttttcactactctcacaaccaattaaagcaaatgaggtcattccgctctttcgagttgatgtgtctaacctcattattacaaccacaaaacaatatcacacacaacagtacgaacccattgcaatacgggctcacgagcaacaaacacctacaaaagggataatacnatgttattctt

SEQ ID NO: 26693 - DNA, 488 bp, Glycine max
  unsure (1)..(488): unsure at all n locations
gcaattcttctagacttagagtgataacatgcagttctcttgatcccttatcttttactttctcgttatgccgagactccgaaaccacaacaagttttatcttttccatgtactcgaaacaaaactcagtagcttctttcgcaatgtacttttcaacaataaatgcttcaggacggtgtagattctttgtatacccttttaagatcttcatgtatcgctcaaccgggtacatccaccgcaaataaatgggaccacaacatttaatttccctcaccaaatgaacaattaagtgaaccgtgatgtcgaaaaatgaaggaggaaaatacatctccaactgacacaagataatagtagtctcattttccagctcatttaacttaagaggattaatgactntgctacatatggcattgaagaaaaaacacaggcaagttacggcatgcctgactntcttagaaaaaatgtctcttatcgccacaactaacaat

SEQ ID NO: 26694 - DNA, 442 bp, Glycine max
  unsure (1)..(442): unsure at all n locations
agcttatcgattgaagtcttagagaaattntttatttggattcttctggatggctcctttgtaactcactctatgaatctttcactcatcccattaatatcaaagatttcttctagataaacttatctagagcaatgtgtgtcacatgcaatttaagttcataaatggtgcagatcatttctatgttgctagtgtaggaaaaaaggtgttcaaaaacacacatggcgaaataaaaggatatattttgtatttaaattatattataatcaaatgacatattaaaaggtgtacctattgatgagttcttgaagcataaaaattcttcaatagtgtaaagactctacgtgtatccacatcgatactgacctctattcgtcaacaactttgacaagtaaaaaaataagaatagagaagtgatttttgggatccattcaacgtacaa

SEQ ID NO: 26695 - DNA, 489 bp, Glycine max
  unsure (1)..(489): unsure at all n locations
taataggcaaacggacaaaaagatacttggtctaatctngtcatgaaaganatgttaaaaaaaagataaaagagagtgaaaagtatgactatttgaaaaagatgaaagagatatgaaatgagaaaatagaaaataatagtgtagtaaaatatttcgtttttaaaaatcatttgtacaattgcaatcttattcatgtgaacttgtattaaataatattttattttgttatatatatatatattccatttgattttgattttgttattttttaaaaaaatttaacaggcataattaattatggagagatagaatcgaatatcattagattttggttaccagcatattattcaattttatttactttcgggtgtacccttgtatttgttatcagcacgttcgattntgttggttcttattgtcgacctaatgctatattgagttgattcccaccctgcttagaatgaaaatatagtccatcttatccggtct

SEQ ID NO: 26696 - DNA, 460 bp, Glycine max
  unsure (1)..(460): unsure at all n locations
agcttgcccgccgcacatccggngcctaatctcattctttagcgtatactcaaaaaggagatttgcagcaaaaagcctgtaggattcaccccaaattccggggtcatatgctaacttgctcccatatctaattgataatgcaatggtagccataacccctgccagggttcctcaacctccatttttccgaggatacgactcaaacacaacatgtgcatatcatggaggagatccgggacattccattgagcactgtatgaccttgaagcgtaaggtgaaaagtctaattgatgtgggctggctgaaatttgaggagaatcacttgtgaatcctaacattgacaagcggcaccacacatggngcaatttgaaggttgttgtttgatgtctctaatgactcattaggatcttcaagtttatgcaattattgagaaccacaattacaatgctaaataatatgg

SEQ ID NO: 26697 - DNA, 402 bp, Glycine max
  unsure (1)..(402): unsure at all n locations
gacttaccttgaattaattcctttgatttctcctttgagccttgtttgccttctttgttttgaagctcactacaagccttaagtgaaaaaccatgatattaccatatccttaaggaattttggagctttggaattgttttgggaataagtgtgaggggtttttgtttcattggacaactcgttttgttgactatgcttcatgatgtattttgggccatacttgatgtacattgtatattggttaaatgttggacatgctgaatgaaatgttgtttctcaaaggcaaaatccaaaaataaaaaaaataataaaaattctaaaaaaaaaaaaaagcaataaagttgagtgaataagatcttacttggcacaagaatgatgaaactcttggntctgctcttcatg

SEQ ID NO: 26698 - DNA, 321 bp, Glycine max
  unsure (1)..(321): unsure at all n locations
aaaacttaatggctgagtgtaactgaaattgtggcaaccaaaagtcacccccaacagccaacaagtcagccaccatttggtctccccaaaggctgatgcctacgttgccaattgggcccttattacaacttgaactaaaccaaactaaggctcttttagttgattaacccaaaacatattttcggtcagccaactttacaaggattgggccattatntagaaaaactaaacactctaaagatgagacaaagtggtgccatttagtcctcctccatttgggccatgatacaactcacaaccttggacttttctccttgaaac

SEQ ID NO: 26699 - DNA, 479 bp, Glycine max
  unsure (1)..(479): unsure at all n locations
gaaaacggaacctctcaagacactcanatggngttatacttgtgacacggatgtctgattacggcgcataaaatatcgagacgctcttaattgaacaacgaatgctctcgagaaattcatatggtcataacttgtcacacaagagtccgattcatgcgcatagtatatcgagaagattgatattgaacaacggaagctctcgagacactcaaatggtcataacttattacacggaggtacgactgatgcacataataaatcgagacgctcgaatatgaataacgaatagtctccagacattcatatggtcataaatgttgaaacggaagttcgattcacgcgaatcatatatcgagaagcttgaaattgaataacggaagctctcgagacatgagatggtataacttgcacacggaagtccattcaggcgcatctatatcaagagctcgaaataacaatgaatgctctcagaattctat

SEQ ID NO: 26700 - DNA, 317 bp, Glycine max
tgtcaatccttaccctcggaagcggaaagaatagaagggaaatttccaatcaaagaaaaggaaagaaggaagatttccaatcaaagagaaagcaaaaaaagaaaagaaggaaaattccccaatcaaagagtgggagaaagcaaaaagaaaagaaagaaaattcccaatcaaagaatgggagaaagtaaaaaaggaagaagaagaaggaaagaaagctcctgatcagggatcgaaggaaaacagaagaaatgtgcagaaaggtctttggaccggacaatatctgaacaatacagaattgtcaccaaatgaacaaaaag

SEQ ID NO: 26701 - DNA, 401 bp, Glycine max
  unsure (1)..(401): unsure at all n locations
tggacttaccttgaattaattccttngattttcctttngagcctatgttccccttttctttgttttgaagctcatcacaagccttaagtgaaaaaccatgatctcaccttaaccttaaggaattttggagctttggaattgttttgggaataagtgtggggcggggggttgttggataacatgttttgttggctatgcttcatgatgtatttttgggccataatgatgtacatcgtatatgggttaaatgttggacatgttgctgaatgatatgctagttctcaaatgctactgtgcaaaaaaaaaacaaaatcaagttaaatcaatcagaaaaagaanaagaaaagcaataaagttgagtgaatacgttctcaacaaanaaaaaaagaatgatgagactc

SEQ ID NO: 26702 - DNA, 404 bp, Glycine max
agcttcttgaagaagcctctaattttacttcttgaggaagctacatgtagctgcctcggtaaaaacactacccagccttctttaaccgttggatcttctcgaaatttggtctgcagcttgacaagacacttggccacgatctgaccgttgggatctttgagaatatgtctggagtgtgctcacagcttccgttcccgagagcatttcttatttaagcacttcagcctttgctttcgtgtagcttaggaaaaacgtcatttcttcttctttctttcttccaaagccatttctaatgttccaagcactttctccatcacccacaaccaccattagccaccaaaaaccatcgttgttctccattgaaaccccacaccgagaggaatcctccaaccgaagcggaatct

SEQ ID NO: 26703 - DNA, 453 bp, Glycine max
tccatcacatggagtcctctatttaggtgcaacaatttgttggtctttgtgtgtcattggacttgatggtctctggatgacgatatggagactaaagtagtcttggtcgataggcattgagtcttcgacaaagagtgcagacgaccatgttggtctctatgatgtagctccattggagcttgtaggccatggatcttcttcatcaatggagtccattgcttcttgaattttaatggcagtggaatggagaagaagaagagttgagaggagacgcctcttcatgaagaagatgagtctagaagaacctcaccaccataggaagccatggataagagcttgaaagtatgagaagatgactggagggagagggagagaaggggcacgaaattttgtgcctcaaatgatgtctaaactttgaagtgtaattctcacatgatcaaagattgaaaaatg

SEQ ID NO: 26704 - DNA, 390 bp, Glycine max
  unsure (1)..(390): unsure at all n locations
agcttcatcagatgctgcatncgtgttctgctcctcttattgaagaacgatatgcacttcttgcattggaaatttgctttatcgnggtgcaactgtcggcattgtgttccttcaacgttagcaagatgtttttcggtttcaccatcgactttgtcatatcaacaataattttcttttcttccttagtcaatcgcccgacgtatggatgtccaactaaggacttcgccaattcatgattgtgaatcccacagatcaacttcaccatccaaccttcccctccatgcactggtttcccacgaagcctgaagggacaaccacatttcctactcccggtgtcttttctaacgaattctttatttctacacttgtacgtaccactcctttcacacc

SEQ ID NO: 26705 - DNA, 472 bp, Glycine max
  unsure (1)..(472): unsure at all n locations
tgtgaactnggtgaacttgttgatnaattatatgaggtgtttgttatcttggtgataaattatatgaggagctcgtgaacttggtcataaacttggtgataaatcaaagactagggtgcggaggtataaatttcaacacacttcattggaaagaagcttgtgaacttggtgataacaaaaccccactttgtagtgaggttgaggggaaaaacaatggggtctctaatggcctctgcaaatcttagctgataactacttgtactcatctctaatggggtctctcatgtcaacaacttcacaaatggcatgttcggattcataatatagaagcatcctgttatttctacaattccaggtagcaaacaaccaaacacttatttgattaatcaactttatgatcaattangcatgctcatctgtgtgaatgaatttcatacatggaagcatgtgattngacacaccacatgttggt

SEQ ID NO: 26706 - DNA, 439 bp, Glycine max
  unsure (1)..(439): unsure at all n locations
agcttgtagactngagtctcgnatctgtttaatcgattacaactatctcataatcgattacattgttgtttgagagaatgactgatttattcaggactctcggctttaattgattaccaagtggattaatcgattacttctctctcattaagtgtttagaggtgaacaagaacactttaatcgattacttagggcatctaatcgattgcattgttcttgagttatttccagatgctgggattaactctttaatcgattacttagataatctaatcgattacttcattgaattaatcgattatgctatagatttaatcgattacaggcagttataattgttttctctataaataaccaacttaagttcacatctaaaaatcaagagatcaatagaggatcctcaatacatctcanaaataacatcttaaccttagaatga

SEQ ID NO: 26707 - DNA, 387 bp, Glycine max
  unsure (1)..(387): unsure at all n locations
ttacctatcgctctttttcttagattgggactcttccaatccttgtgtccggactctcagccacttatgatagccgccgatgctcccattactgcttcccctaagctctntgtcctttattcacgccgcatcccatgccttgcgaactccttggagtaccttcgcgttgtggtcactaaaaccccgtgcgatgaaaggcgtgatgctttcgtctaatggcgctcctctcatggggtagccaagctgtcttatggcgagaacgggattataattaatacaaccccttgttcccatcaaggggaacattggacatccttcgcatgaagatagaatcttgattcttccttccttctagcgagggaaccaattaactgacngcccccatgc

SEQ ID NO: 26708 - DNA, 414 bp, Glycine max
  unsure (1)..(414): unsure at all n locations
agcttctntgagaaaacttccttgagaagttatagcttagctacacacacccctctcataactaagctcacctccttgagaagcttccttaagaagattcctaaagaagctagagcttagctacacacacctctctaatagctaagttcacccccatgaccaaaaaacatgaaaatacaaaaaaaaaagtccttactacaaagactattcaaaatgccctgaaatacaaggctaaaaccctatactactagaatggccaaaatacaaggcccagacgaaggaaaaacctattctaatatttacaaagataagcgggctcatacttagcccatgggctcgaaatctaccctaaggctcatgagaaccctagggccttcccttggatctctagcccaatctacttggagtcttcta

SEQ ID NO: 26709 - DNA, 391 bp, Glycine max
  unsure (1)..(391): unsure at all n locations
agcttagggtcagacaaacagnagtttngtgtactatatgttagttaggttgaattaattagccaatttggtgtttcaaccggcattaggtaaacttataacaacactatttatactcgtgggattgaacccacacctacactatatatacaacataacataatactcaaatgtgttaggtcaaatataattttgtgtcattaactaaattaagaactaaaattgcttgctttcttattgtattcaactagttatattttaatcattacttgtatttacaacatcattgtgtttttttatataacccccaactattcaacatacctttttttaatagtttatttaccataaaantatcattggttatatntatctaccacatattattata

SEQ ID NO: 26710 - DNA, 556 bp, Glycine max
  unsure (1)..(556): unsure at all n locations
atgtncnccggggnnntttgaaacccatgcgannnncnnnatgagatcattgcatgacgcgacctatgcatactcagctttagacgattgcgaatgacaactgcttgacattatatttgctggtgtccaaccaggcctaaatagttcgattgaacacctgtcgacaagacaggatctgtggattcaagtaaaatgaccctatttcggtcacttcttcttcattgaccggatcgacagcaggaaaatagtcagtgaaccaagccgggccaacctctcgactaatgaatggagcatagtggggaagaaacttgcaaagctcacaaaaaatctcatgtactttaggaacagcttttgtgagttttgatctaaggtcttgggtgttaatcgaaccgctctctggccttcgatcgagcgatttgcaacttcttcagcataatactagaggattattgattccatgttcttgtcgaaagtggcattagccaccattggagaaccacataagccccgacactaataatgaagacacatgctgcgatttcttcatatcatcacn

SEQ ID NO: 26711 - DNA, 352 bp, Glycine max
  unsure (1)..(352): unsure at all n locations
ggtataaagcttgacccattactctactcgaatcatctgtgagtttcactatcccatttgactccatttctgctactcctctaagggtcatgatgttgcttcccaagaatccatctggttaggctgagatgaaaccaggatcagaaggaacaacaacacatgcaagagctggaggagcatgttgaggttgggcatgagaccatatgtggaaaatcaaggactttgaatgattacaacttacaagggcctgagccttgaggcttcaaaatattaattgctatgaataaaatagatntgttgtgagtaaaaaaggtggcatataataaataaataaaaggtcacattntgctca

SEQ ID NO: 26712 - DNA, 424 bp, Glycine max
  unsure (1)..(424): unsure at all n locations
ctttaattgcacatttagatatttctagaactggttgcattttcattcttagcaacttatatctctatcttgagcttagaacagctcttcatcggaactcagttcattcttaacaaacatcacaaaccttttgttttcaaaggaaaccgaagttttcagaatctcaattcaacaccccgttcttgtggtattcttgccacttcaattggcattagagcttaactctcacggttaggcacactcgatagtgtgagaggaagatcctggaagaagtgttggttggacatgttccaatagtgttcatacctgaaggtgcctcaaccaataggccttgtggttntgatggaaaagatatgtactattggaaaggtagaataaagctattcctacaatctcaagatgaggatctatgggacatcatata

SEQ ID NO: 26713 - DNA, 287 bp, Glycine max
atgcatcaaatctatgcttttataaatcctcctgcttcatctcataagaaaatattcatgttatattacataaaataacatattcaataaattacttaagtctcatgttcattctcctaagttaagcgtaaattcttctttgcttatcttggttatattaaaaaaaatcgctgacaaaaaaagtataaattctcctacttgattcaataaaaaatgttcatgccaagaatttgatttaaaaatctattttttacggtaaaaatataaaactgtgataaaaaagtttt

SEQ ID NO: 26714 - DNA, 439 bp, Glycine max
  unsure (1)..(439): unsure at all n locations
cgaggttattcctttattcataggagcgnnggatgaggtttnggttcgtaagagcttaagtccttgtgctttgttggtgcccaaaatatgtattatgaggcactaaatccctatgataagtggtatgatgaatgtgttgagtggtgcaaccctcttttgtaaaatcacccatgcatgcaacatcatcatgattcacatacatagggactcattangtaggttttttcttatttttagtttcaattcaaacttaagtgcttatatgggacaccttacgtttgtcgtactttttggtaggaataatcaacatgaaaatacagaanaagtatgttttattgcattatttcgggcccatgggctaagtatgagccgacttatctttgtacatattagattagggattcattatttttgaaccttgcattcagggctccatagt

SEQ ID NO: 26715 - DNA, 413 bp, Glycine max
  unsure (1)..(413): unsure at all n locations
agctntatgtaggccagatcgtaggcccctgtagtcctgcctggcttattcccacccctagctctgattaccatttgatggaagcttgcttgtgaagcttctatggaggctggatctttgagcttcaatgaggtccttcaatggtgattttccaccatggagatgcagcggaagataaaggagaaaaggtgagaggaggcgccatgcactaaggaataagccatggaagaaggagctttaccaccaagagagtgccttggataagaagcttagagaggaagcttcaaaggaggaaaagaaagagagagagatggggggaacatgaaattganagaggaaaagagggagagaagttgaactttaagtgtgtctcacaagactctattcataaagttcaacaactgtacacatgc

SEQ ID NO: 26716 - DNA, 475 bp, Glycine max
  unsure (1)..(475): unsure at all n locations
agtcactcccgcattntatctctagcatgttttgtatgttggtctttttctttgtcacgggaagccggaaggtccatatcaccttcttaattgtacacatggggcactgcgcccccaaatgcgcaagtaagaagagataattttccgggctctcgtgtccgtaaaatgcattcatatcatgcatcgcataagcatctcttcataacatcataatggacatatcctgcatttgtccgttatcatattccagcctcacattttgcatgagtcatggcatcatcatgcatatgcgttcaacaaactttttgatctgcaaaattgcataccatttgttttcatgtttgctcatccttgcgttttcctctacaaaacaaaaacaaaaaagggggaagcgtgaaacttcacactacattcttagtttcatgtgttaggcaccacgagccaaccgtgttgngatcataaacccgtttcactt

SEQ ID NO: 26717 - DNA, 386 bp, Glycine max
  unsure (1)..(386): unsure at all n locations
agcttgaaattgaacaacggaagctctctttaatttcttgtggcataaannntcacacagatgtccgattcggggaaataatatatcgagacgcacgaaattgaacaacggaagctctcgagaaattngaatggtcataacatttcactcggatgttcgatccggggacataatttatcgagacgctcgaaattgaacaaccgaagctctcgacaaattagaatggtcgtaacttttcacgcgaatgttcgattcggggacataactcatctagacgctcgaaattgaacaacggaagctctcgagaaattcgaatgggcataagttttcacacggatgtccgattcgggaacataatatatccagacgatcgaaattgaacaacg

SEQ ID NO: 26718 - DNA, 366 bp, Glycine max
ataagcgacatttatcataacacagtttttatattcgaaatttgatttttctcttgtatcttagtgagagtgattctcctaaattcttgagtgattcaagaacaccctggctgtatcaaaggactttcacaacctttgtgtgttgccctcgctggaaagagtgattctttccttccaatcatctccacccttgttctttcaaaccacaattccagaaaatccacctctgcccaaaattatctcgtgaaaggtctctgtttgaaattcaatctacgctcaagaatcacttaattagagtgtgtaacatgggaattatggtcacaacataattttggccgtataaatggtaaaatgctattattcgcc

SEQ ID NO: 26719 - DNA, 284 bp, Glycine max
atgtacacacttctatcatcatattatgacacttccgaaatcttgcaagcaacgtgagcagcaatgtgcaccttagcttggcgcgaaacggccaaaatgtatatatcggcagctgatatatcatctacgcatggaatatcaactttgggaaaggaatggatggctggaacactacatcgtctaccttcaattctggcatgaatagcaccactccctaacaggttgctcttcccagaatcttattcttgcacattagaccaaaactgagtcattgtatggcatta

SEQ ID NO: 26720 - DNA, 477 bp, Glycine max
  unsure (1)..(477): unsure at all n locations
tgcacgcatgcaagctctaggttggcgcacgatataactattctattttctaccaaacacagggntaagtcttcaatgcaatcactttggatatattgttcctaatataacatcctatcattcatgaatggtattcaaccaaaaaacgcaaagagaaaattgactgttgctaatgagtaacacaagcacacctgatatatatttcttgtgtccaacatccctccagtactctcactatctgaaactggcttttccagctgcactatttgcataccctccattgccttcacctgtggcttcctcatctttgcatgtttctgtgctttcactgccttcacaacctctaataaccaagatacacgacagctatttataacacgaaactgagcaaacacatatgcttcatatacactgactaccacaagatatgcccccagaagccaagaatcgaaccaatttaactaaacactatggaag

SEQ ID NO: 26721 - DNA, 567 bp, Glycine max
  unsure (1)..(567): unsure at all n locations
tgcgncatggggnnntttgaaccccatgcatnacggaatagtacactgaatgacgcgaccgagacaaactcagctctatgacagattgcattgtacaaaagactgacctaatttacgctgtgatacaaccgagccggaatggtcagatcgaacaactgtcgactagactcgtattgagtgcacgtgattaatgcacataatatatccaatgattctgaattgacgagcctactactagaaaatgtgtgagtgacacgaccaggctaacctagtgactacatgaatggagcatagtgttgtgagagatgacttgtacaaagacatatataaaatctctggaagtacttaatcgagactgcattatgcttttagctcgagtggctttgtgtgtgaaaattatccatgaactgtctaagcactgtatgtcattatatcctatcattcataatgcgcggaaaatggtatccacgatcatggttaatatgtcaattgctacaaagctagcaaacaacatataggtcgagatatacaccctgaaaccaatatattaaatgccttctccacaag

SEQ ID NO: 26722 - DNA, 117 bp, Glycine max
  unsure (1)..(117): unsure at all n locations
ctatacgagacatcttgccaaacaaagtcaggttagccataactcgcctgtgctttttcttccatgctatatgtagcaaagtcattgatcctgtcaagtntgatgagctggaaaatg

SEQ ID NO: 26723 - DNA, 428 bp, Glycine max
  unsure (1)..(428): unsure at all n locations
ntgataagtatagttaccgtttggaagctctggaccattctatttatatgtcaaacatatctataacttgatgtcactttctaaattcattggaggtaaagatgtaaactttatattagatgcattataaatgaaaaacaaagaaggaaagggttcaagttattaatatacctgatgaaaaagcacttgattattatggatgtaaagagtagtagtagaaatgagaaaaaaagtgaggaaagatcatggtagaataagtaactgatgaagtcgtcaacataaagacctccaaaactntatacaattttcatactcaaaaatataatttgaaacacaattacttggtcatggcagacagtgttaataatatacactctcaaacattaatagtgaaaaaagaaaatatttcattgcttaagaaaagagaa

SEQ ID NO: 26724 - DNA, 392 bp, Glycine max
  unsure (1)..(392): unsure at all n locations
agctnttgttctcttttataaaattagaagttctgaaactcatcatgttgtctaaaaaggccttgaggtggatccaagtgctctcatcattcattagcatattcatgttttggtggcatgctcaccactgtttgtttctttagggaactcaccataactaaaaaagcgcaaaggcacccctataacacccgatccaaaagtaagatggataacgaagagggagtgcaagaacagatgaaggccgacctatcggccttaaaagattggatggcttctatcatggaggccatgctaaagattcaaaaaactatagaagataatgctacggcggccgcttccaatacagctagggaagcagaaccgctgctacagcccgcaataaacttgggccg

SEQ ID NO: 26725 - DNA, 487 bp, Glycine max
  unsure (1)..(487): unsure at all n locations
tacagatctgttntaaatctaatcccataaataaaataatatctatataagataagatctagatgaaataatatctagatgagatcaaatctaaataatatctagataagataaaatntggtagaataaaatagtctgctctcttcaagtccaagcccaattgcttataattctcctgaaattaaattaaaaacacaaaattaatctagtaggcctaaatgataaaactgcataattaatttgataattaagactaatcagtaattaaaatggtgcaaaaagggttaagaaataggagaaaataatggcacatcagtgagacatgaaaaaagatcatggaactcacaaagcaagaagggggagaattagttctaaatcaaatcaaaccaaaaaatacgagtttgagaaactttctatccaaggatcgtatcacannattgtgctaanaagttctntaaacttcagcaaattgatcaagaatacaatg

SEQ ID NO: 26726 - DNA, 433 bp, Glycine max
  unsure (1)..(433): unsure at all n locations
agcttcatgatgatgaatcaagttgattcttgtgttntgttgatgacaaagatgatgacaaaaagcccaagagaatgatttcaagattgagtcaacaagctcaagatcaagtttaatttcaagtttcatgagaagaaatcaagaagattcaagaatcaagagaagtttgattacaagattcaagagaagatgaattcaagattcaagagaagaaatcaagaagacttcataagggaagtattgaaaagatttttcaaaaaacaaacatagcaaagttttgtttttcaaaagagtttttctcaaaattttctaagttaccaaagtttttactctccggtaatcgattaccagattctcgtaatcaattaccagtagcaaagtttgatgttcaaagcttttaactgaatttgcaacgttccaattgtttttaaat

SEQ ID NO: 26727 - DNA, 411 bp, Glycine max
  unsure (1)..(411): unsure at all n locations
tggtgttcctaggcctaagttctatntntggcacctactttattctctacaaacttcccacacactcaaaaggtagccctatgtacatcaattttttttctacaggcagaaattcacaaagtcatgcacaaatgccattgatgcatttcaccgagcacttggtgggcgcatgtttaagcatgaatatcaagggaatggcggaaatgtggcatgcctaatcatttcaaaacacaacttatgcctaaggccattgccaacaacttcctaactcaaacaaacaagcatgaattcaaggccaaattgctccacggatttgagcaaattcacaccatttagagcacacaaaggcatcaatggaaggctagaaaaccaaagaatgatgtacttacttattggtagtgaaaaacaatg

SEQ ID NO: 26728 - DNA, 264 bp, Glycine max
  unsure (1)..(264): unsure at all n locations
taacatactcancaacactatcagtgggtgagccgtttcccaatagacgaatactagcaatggtgaaagacctcgtttaccagctacatcagagctcattcgaaaaaatatgaatcatgactactatgagtgtctacaattctgacgaacaactgctattgtattctgaacctacaaagaaactggcgttgtgtatacggaactttcagagaaatcgacattaaacaacctactatgtccgccctcacgatcatgatttatgtg

SEQ ID NO: 26729 - DNA, 577 bp, Glycine max
  unsure (1)..(577): unsure at all n locations
aggggnnccggtgnnnnnnattgattacctatagcatnanccngattganntcgttagcactgccgcgacgctctngagaacacacgctcttgtgacagggagaaggatatattcttagagacacttttgctttcaaggatcgcatgcgaangaaagaagagctagaaacgcacatcacagtattgcttgcatagactcttcatgtctggtcgagaagaccatgaagaagaggtatcacttgtacaacaactcatcacctctatgacaaagacagcacgcctcgatgagatacatctcctgatccattcagagacgatcactgggcatcgatgaccagatccgtgtagtcgattacacactgcgttgatagtgaaggatgtgactcttcacatgtgaatacgaacttcaacgatcaaccgcactggtaagcgagtaccagaatatcgtgatgcgaatacagctgtttgcaataaagtggaacatggtgaactcactcgaacacatattcaagatcatntcgtactagtgatcacttcgacactgtacctatcacatacgagagagagaaactcttcn

SEQ ID NO: 26730 - DNA, 239 bp, Glycine max
  unsure (1)..(239): unsure at all n locations
agctttgaagatttattatttgagggttatctcaagatgncgncaaacttcatgaggaaatcaaaaccttaaaaactacattagccaaatttgataatggaacaaataatattaacaaactattaggatattgtagaagttcctcagaaaaattcgtaaatggaaatgatgagaaggtatatgttcatgatgaggacaacattatctattacttttgtggaanaactagacacatgaca

SEQ ID NO: 26731 - DNA, 473 bp, Glycine max
  unsure (1)..(473): unsure at all n locations
gacactatagaaactaagcttgaagcttgctttccataagcttcaacacctagaatttgtctnggataagaagcttagagaggaaacttcaatggaggaagagaacgagggagaaagagaaagtggcatgcaaaattgaaggaagaaagggagagaagttgaactttgaagtatgtctcacaacactctcattcatcaaaattgtgacaaatgttacacatgtttttatttatagcctatgtcactaactaaatgaaatgtgaatttcatttacatttcatgtgaatctaagaggaatattctaagaatatgtcaaaggcatcttagcatattctctttagatgccacacgaatgaaaggtgtgactctagcacatgggaaatgaatatgtcacaagaatatgccaaaccaagagtatgtcaaagacatcttagcatattccttgagaagctagagggggaatactacacacc

SEQ ID NO: 26732 - DNA, 340 bp, Glycine max
  unsure (1)..(340): unsure at all n locations
agcttcaacctttgtccatcatttctgcctcatatcgngaaaggagggcgtttttggagtcgtgaagtgcgtcgctacgagtgggacttcgaaatttcaggtttgggtggacttctttctcctttgattttcgtgggtatggggttttgggagatatgatgggtagttttgttagttttctgcttcatgatgattatttgtgaagacatttgctgaaaacttgttgaaattgccatgtttggatgagttaaacatacccattncagtttagggtttttgtgatgatgnttgtgatgtttatatgctganattgcttatggcaaactgttagagatgaatg

SEQ ID NO: 26733 - DNA, 414 bp, Glycine max
  unsure (1)..(414): unsure at all n locations
tcatgatgatgaatctagttgattcaagaaattttgattatgacaaagatgttggccaaaagcccaaagaatgatttcaagattaaatcatgaacaaattcaagaatcaagagaagtttgatttcaagattcaagaaaagatgaattcaagttccaagagaagaaatcaagaagacttcacaagggaagtattgaaaagatttttcaaaaaacaaacatagcaccatttttttttcaaaagaattttcacaaaattttctaagttaccaaagtttttactctctggtaatcgattaccagtggcaaagtttgatttcaaaagcttttaattgaatntgcaacgttccaattgatttcaaaatggtgtaatcgattacaagatattggtaatcgattaccagtgcatctgaacgt

SEQ ID NO: 26734 - DNA, 390 bp, Glycine max
taagtcacctgcggcatgcaagcttgtctaccgcacttccaatgatgaatactcatctttagcacttacccaaaacatcaaccaagaaatgaattttgcatcgaaaaagcttgtagaattcaccccaaatttcggtgtcatatgctaacttgctcccatatctacttgataatgcaatggtagtcataacccctgccagggttcctcaacctccatttttctgaggatacgactcgaacgcaacatgtgcatatcatggaggagttctgggacattccattgaacactgtatgacctcgaagcgtaaggtgcaaagtctgattgatacgggctggctgaaatttgagaatcacttgtgaatcctagcattgacaagcgacaccatacatg

SEQ ID NO: 26735 - DNA, 471 bp, Glycine max
  unsure (1)..(471): unsure at all n locations
accttgaacaagcaactaactcctctnttagtaccatgctatgtgctcgttactgtttcctctcttcccttcgcagctggagttcactattgctaccccatagagctccgcgaaatttattccggccatactcttccttgcgagccctcttggtctcttgttcaagggctcttgcggtaattgcattctcttcccgtaacccggcacactccttccgaatgtgtgttgcggctaacttgaacttctccttggcaaaattcgcctttcctaactcgcttttgagagcttggacttcttcgtcctcttccggtgcttcaaaactctctttgctgacgacttttaacttggcgagccaatctaaacctcgtatatgaactttcagccattcatggtagccaccaatgatgccattatgaatgcctctaagttcttgatctttccttaacggagtttgccatgccttatggattc

SEQ ID NO: 26736 - DNA, 329 bp, Glycine max
  unsure (1)..(329): unsure at all n locations
ctctctcagaaactctcgggcaaacactngcaaatctattgagagttcatccaggaacttcaaattgtattatccactctaaaggagagtaatctttctgttcttcttagaaagtcaattgtaatcaagagactggtcgtctcttgaaatgtgagtttcctaaacacacaggaaagggattccttgggtgttcacaagttgtaaaacggattttacacagatagtagaaaatctcaagtggattgcttaagaactgtacgtaggcatgggaattgaccgaaccagtataaatcgcgtttgcatttctctcttgccttatctcatttatg

SEQ ID NO: 26737 - DNA, 453 bp, Glycine max
atgtaacctttatttaagattaattttttttaattattactatgtttgtattgtcattttgcattttaattgtttatacgtgtagaatgatatagggtttttgcattttactaatgatgagttattgtgactgatagtaaaagattaggtgtattatatgtatagtgcaattactaatcatgagttattatgtagagttttgtattatatgtatagtgcagttaggtgttgtatgtctgtgttgaaatttatgatttattgttaagatggacgaagatcaatggatgtatgacactataatgtctgaagaagttgatatgaatgatcaaaatgaacaagaatgtgatgtgaattgattgttcggatgcgttcaatacttctcaggtaataatgttctttattgtgagtgatttaataaaatgaatgtgtggtagaaaactaaaattgtctgga

SEQ ID NO: 26738 - DNA, 505 bp, Glycine max
  unsure (1)..(505): unsure at all n locations
nccaatgttcatgcgtgcagagcnctcagagncacctgcggcatgcaagcttttgttcaagtaagagctaggggcttgcntttgtccacaaagtgttttctttagtgtgtatacatgattagggaagtcataatcaataaacccgggggttgagaaacatagacttcctcttttatgtaaccatttaaaaagacacatttgacatccatttggaaaaagcttagaatccattaaggaagcaaaagctagaagaagtcttatggtctcaagtcttccaataggggtataagtttcatcataattaataccttcttcttggctataacctttggctactaaatgggctttatttttggaggttctccattcttagggaagctcgtttgtagattattgacttgtatcaacattttgcttctccaatatcaatggtcttgtctcctcaaggttactagaatttntaaactaccataacttagaatcttcttttgtngtagtcaccaan

SEQ ID NO: 26739 - DNA, 459 bp, Glycine max
  unsure (1)..(459): unsure at all n locations
tgcagccatttcccttagagncttctcacgaggtggaggttttgctatgttctcagaatgtgcaaaatcagaatgctcagaatcagaatgctcaaaattataatgctcaagatcaggatgttcaaaatcaccaataacagaatgcacagattcaccagttatggaatgctcaaaatgatcaaaaggtataaaatgatgcctaactaatctatgaaatgtcctatctatcttaggatcaaagggttgtaagtcagatggattgcctctagtcatacactacattcagcatgcacacaactagttgccttgtcatgtaaataaaggtgtaggtttgaactacagctaccctcaaatgatatccaagtgacttgaaattttgtgagcaaccttatataatgatgagaagatagcacanaanatttcagacaaaaattcanagtctaactatgaaagctaaaa

SEQ ID NO: 26740 - DNA, 427 bp, Glycine max
  unsure (1)..(427): unsure at all n locations
agcttaaacacttatgtaattgattatgttcttcttgttatcaattaaaacaaagagttttaacttgagaagcaattttataactttagaacttttcttctaactccttcatttatgatgcatgatgcacatatgaaatgataaatactaagatgcaacacacaacaacaatcaatacaaatgccatntaagaaagttaggcatgtaaaagacaaaacttcttcaagtcttcttcaagctttcaagactaagtcttcatgttgcttcccctatctctaacaattagcttttcttccccttctttttattttgctacttgttcataactntttggatctttttggcaatgccaaagctatttagccccttgtcttcattagctatagccttggctagncctttatgcttcctctaattgatgccttct

SEQ ID NO: 26741 - DNA, 503 bp, Glycine max
  unsure (1)..(503): unsure at all n locations
gcttcatgcttaactatgtatggcaaaactccattactgttgttatgacatacaagtgagtttgtaacaaatcttctacacttggagtgatcacctgcagtcctcttgaacccttaccacccactctgtcatcatgccaagactcaggaagcccaacagctttagccttctctaagtattctgaacaaaattcaatggcttcttctgcaatgtacctctcaacaatagatgcttctggacgatatagattctttgtatacccttttaagatcttcatgtatcgctcaaccgggtacatccaccgtagataaacaggaccacaacatttgatttctctgaccagatgcacaaccaagtgaatcatgatgtcaaagaaagcagggggaaaatacatctccaactagcacagtataattgcggcctcatttcccaactcatcaaacatgactggattaatgactntgctacatatagaatggaagaaaaagcacaggcgagttatc

SEQ ID NO: 26742 - DNA, 431 bp, Glycine max
  unsure (1)..(431): unsure at all n locations
agcttgagaagctctctgtgaaacgagcnattcatattacctaagtctataatcgactaccctatttttggaaatgcataaccaagagggatttgaaagagttaatcgattacccaatttggtaatcgattaaatttgttttaattgttaaaactataaataccctcacttgttctttctcattagtgactcttaattcgatcttatcttttgaaaaaaaaacttttgagagtcatctaagggaaccaccctgcatttcaacaagagtttcatgatgatcatgattcattcattcttcatcatggtttgagaaagaaaggaaaagcttgaagatattgggatctgcacattcatatgtattcaatcttatttcgaattctttctaggttttgactttgattatgattatctanggtttatgtgagttgata

SEQ ID NO: 26743 - DNA, 436 bp, Glycine max
  unsure (1)..(436): unsure at all n locations
ggatgagatcaatcttgttgggggaggaatcatttcttataatcaatatcctatgcaaaatcagaggcttagaaaagaagagagaaaaccaactcttcaagagaccatgcttcaatatatggcctagaatgaccaaagaatgaagttgttgtcccaattgaccaacatacaatccctcttatcacanagaaagtcaagcaaccttcacaacctagaccaaatcctaagaaggaggatgtcaatgctgtgatgactagaagcaagatgattcanaaggactccgaggagaatgaaggttctttcccaaaaactgtagatgacatccttctaagaagaaccaagcaactaggaaagttaaggttcctactgatgggaatccagtggcaagcaagaagggtgagaaggaggtactgacacctnctcagantaagtgtcc

SEQ ID NO: 26744 - DNA, 415 bp, Glycine max
  unsure (1)..(415): unsure at all n locations
agcttgaggtaaactaaataaatttttttgtgtagnatccctctntatggctnctcatatntttatctttgttgcatacatgctataacttttgaaaagaaaaaaaaaatctgattntacttaagcataacattatctacaaccaaaaggttttccaaatttgttttgatcatcaaaagtagcatttatttttcacaaagaaagaaaatcagaatctgttttgaaacatagtatgtcagtttgaattttttttttttagaacaacttcttattgcataaccttaattgttttttataattgctatttattatataaccaagtatacaaagaaaagtatcattgctcttaaccaaacttctaatattagagcataagcttaaaaagccaaatctcataagcacaaatggtttatgc

SEQ ID NO: 26745 - DNA, 440 bp, Glycine max
  unsure (1)..(440): unsure at all n locations
tgaagctggaataatnttctttcccttgtaagatctttttgtatttggctaatattctcaccaaaggagtgtcaagcagagtgtttaatgagtctttattcaagttgggaatgtgtgatatccatgcaccaacttgagtgggggtgttaagatatgtcaaatattctattagctaatattagacaatcaaatattatgttagctgtaagttaagctttagtacaactgtgagataatttgtgcaactattattcatttaataatgcagctgtgagatgactctntatatatatatatatatatatatatgtgtgtgtgtgtgtgtgtatattatattcttattctttaaacctttccctaagaggtaatcgcacaagttggattcaaagtggctgataccaactagatattgttgcatcagatattgtgtngtgtcaagc

SEQ ID NO: 26746 - DNA, 420 bp, Glycine max
  unsure (1)..(420): unsure at all n locations
agcttcgtcctcatatccctctttttggttatgcccaattgtccaaccctcttaggtttagactaacttaaactgagtttcatccgcagatccctcttgtaagactagactcaactcaagcagcttacgaaagtttagcctaatttagcctaagcttcatccgcagatccctcttgtaagactaggcctagactaaacaacattattgtaacaacacaattaaaaccaaaacttaatccgcagatccctcttgtaagactaagtttcgattctgcttcaatcaagttctaaggtaacagtacatttcccaatgctaaagtcacctaactatacacacaaatggatgatcagaccanaagcatacaaacattaaacattgaaggaagcatngaacacagaanacataatcaattagatatt

SEQ ID NO: 26747 - DNA, 468 bp, Glycine max
  unsure (1)..(468): unsure at all n locations
nganatccttagtatttagttttggtttgacaattctgttatgtttatacatgatatcaattacccagctgttggaaataaagaaaagttttctatgtgattgtataaatgattaccccacatgataattggttattcagttagcataaaaggaacataaatttccagactgaaacaaattaatcaattatccttttgtataattgattaaccagtttctagaaatgcaaaacaaaggagattttgacgaattaattgattacctgattttataatcgattatatttgttttaactgttgaaatttcataaatatccctatgtgttttctttatgagagactcctaattcatttagttntagagaaaaatatttcaaagagtcttctaaaagaataacattgtaattagtttgaagattaaagttgatcaaagaatcattcattttactatcatgaatntatcatctt

SEQ ID NO: 26748 - DNA, 293 bp, Glycine max
aaaatcattaaaagaagacttgcaaagtaaatgaccgattgaaactttattttacattgataaaccaaggttacggcacgaacaatcggttgaaactttattttacattgattaagtgagattacgatacaaacgatcggttgaaattttattttacagtgataaggtgagattatgacacgaatgatcggttgaaatcgctttacacaaagaaatgagattactgattgtagaaacatgagatgaagatgtgaaaagcaacaagagggacctctaagggtgcatagagtgaa

SEQ ID NO: 26749 - DNA, 407 bp, Glycine max
tatagaaactaagctgtcacaaaccaacaattatattgattcttcccgtttgcttttctcattctctatctcccttagctataatacatgttgatatttggggtccctgttcaaccacttctatacatggtcataaatattttcttactattgttgatgatcatactagatttgtttgggttataccaatgtcttctatagctgaaactcaatctcttttacaaggttttattaaatctgctgaaaggcaatttgatacaaaagttaaagttatttgctcaaataatggtgatgaatttatcattagtcatttctttcaagccactggtattattcatcaaacaacatgtgttgaatactcccaacaaaatgggattggcgacaaataacatcaacatctacttaat

SEQ ID NO: 26750 - DNA, 369 bp, Glycine max
  unsure (1)..(369): unsure at all n locations
ctgcggcatgcaagcttgttcgaggacttacccgtgaagttctaagaactatgaagaacgaangaagaacgtcgaagaacagtcgaaaccttcacgaaattcctcacggaaacgttacggaaacgttttggaagtgcctcggcttggattttcttcacggaaacatattttccaagcaaattctaaagagagagaagtgcctaaggggctgaaccctttttcacttcacttctccccctatttatagaaaattgggggagaagcttgccacccagctcgcccaggcgagcaaggttgcttcctccagaagcaacagacttctggagaaatcttctggagggccgaagtgggcctggttgctatttgcac

SEQ ID NO: 26751 - DNA, 416 bp, Glycine max
  unsure (1)..(416): unsure at all n locations
agcttattntagtccatatattgttttctttattttacacactatattttcctctcctgtagaaacaaaccctttgagttgattcatataaacttcttcttctaagtcaccattcagaaaaggcggtctttagatccatttggtgaagctccaaatcaaatgagccactaaagccaacacaagccacaaagagtccttcttagaaacagaagagatagtctctttgtagttgatgcaatcctatcccgcaagggcattggatagaagactccaagtagattgggccagagatgtaagagaaggccctagggttctcatgagccttatgatagatttcggacccatgggctaagtatgtgcccacttatctttatacatatttgattaagatttcattatttttgggccttatattt

SEQ ID NO: 26752 - DNA, 477 bp, Glycine max
  unsure (1)..(477): unsure at all n locations
tcanatacagtgagtgattcatgcttagcgtcactattttcgcttatcgtacttccaatgatttcaaaacaaaacgatgttggcgcttagcgcatcctttcccgctaagctcagcttgaaagctcaacttacaaaatgaatttgggacttagcgtagaatgacgcgcttagtgcaactataataaattntcatagagaggaagtggcgcttagtgcatcatccacgctaagcccactgcttaaggtgcaacttacagtgaagatgttgggcttagcgcaatgatgtgcgcttagctgaaccattcacccaatcaatcangggtctntgcgcttagcatgagcaagctcagcttagcgcgtgaagagatggtgcttagcataaggctttgcgctagcggataagcaatctgaaaattttctgagtcattntttgctatctctcacacataattaaaaacccttttggtcattataaac

SEQ ID NO: 26753 - DNA, 284 bp, Glycine max
  unsure (1)..(284): unsure at all n locations
agcttgacgagggacattctacgatngctatatgacgacactacaatggtatacatgggatatacgacacgaatattcatatacttcgaagttaacacactcccaacggggctattggccacatacaataatgagcaggacagggggtgaatctatctatcagcaccatgacaacactgccatatcatatgatgccagtccagagtgtaggaattgctggagttatattacgacaagatatactagaggcgtgcattaggcagaggaactagaatgtgcaatgc

SEQ ID NO: 26754 - DNA, 334 bp, Glycine max
  unsure (1)..(334): unsure at all n locations
ngtaacttggctgctctggtaaccatccggctttaatatacagtgaaaaacatacagcgatcatcacgatatagcatgccgaggggcacataacaactcactgaaactatctgacatcttccacaaccgagaatgtcaatataagagtgagctcggcgctgactatatccatcaaccactcttcattcatcgatgttagagactgtgtctcactcacaccacattgggtatatgcgagaaactagatacggttttacacccagactaatggcaaacgtatatctgagaaagagagctgtgcgtatactatgatgaatgaagcaacattcatact

SEQ ID NO: 26755 - DNA, 367 bp, Glycine max
  unsure (1)..(367): unsure at all n locations
agctntcatctttatttttttcattnncgtttttttttcttccgnctttaacgcgcttttaccgtttatttaagccgttttctcacctaataaatgataaaatgaatttcaaccgatcatttgtgttgtaatctcatttaatcacttttaaaatgaaatctaaccgatcgttcacgctataacctcgattaaaccaaaaaaagtaaaataataataaaataatcaaaatatcttgaaaaataataataaaataatcaaaatatctttgaataaaataaatcaaaaaaatcaatcggacgtttttctttggaagtttccttgaatgaattgattaataaccaaagtgaaactaagactaanatagact

SEQ ID NO: 26756 - DNA, 474 bp, Glycine max
  unsure (1)..(474): unsure at all n locations
ngccactctgtctctctatactaaaacagcaaactcaattcctcattgaccatatactaactgatcggaattgctaaattcaactgtcagtactatcacaaatgagcctagaaatattctccaattgcttaatgtttcattagcaaatttttggattcagaatccaatgagaactatgggcccatcaccattgttttgaattgtggttgtgattgcaattntggttactgcaatgattcatatatattgctaagttatgttgtgaatttactttatgtgtgcaaataatataacctatcattacaaataccaacaaaaataatataacctatcattactcatttaaaatctcacatctcctagagtagtcctttatccgacatctcatctttccttcagcgtcaactcactatcatcgaanatggtcataagacttcataattccctangcctcatcatgtgatgcagtctaca

SEQ ID NO: 26757 - DNA, 454 bp, Glycine max
agcttaagaaaaagcgatgatttggggccttgacttatactactcttttcctaaatataaacaaaattaactaacttttatgctaattaagttagtaaatatcatctaattccactaattacatttaagaaacaaacttttttcctaaaatacccttcaatggaacctaatatcaaggacaaaaggagtcattggaaatagaatctgaattaattgaagggtatttttgagatagtatcattaaatagggtggaagtagttaggatttacttatatgtgtcaaaaaaggtttttttttttgttgcttaaaattgatccggagggagtaatacttattctaaggacttcatcattgtatttgaaaagaacaatataaagaatccctaccgtcggtggttctggtaatagatatcaagttgggtctggtaatagttatcaagttgataatagatat

SEQ ID NO: 26758 - DNA, 476 bp, Glycine max
  unsure (1)..(476): unsure at all n locations
gctcattgactccagattgctgcaaagaaggactaagatctgaatggtgatctgcttatatcatagaccacagactcttgcaacaggtgtagattgcttattcatggcaagctgggttactaggttgaccaaggcatcaaattttccttcaagctttttatttttagtagatgaagatgaatccatgaccaccttatggactcctctaagaacaatagcatcatttcttgcactgaattgttgggagttggaagccatcttctcaatcaaattcctagcctcaacaggggtcatatcaccaagagctccaccactggaaacatcaatcatactcctctccatattgctaagtccctcataaaaatattgaagaaagagttgctcagaaatctggtggtgagggaaacttgcacacaatttcttgaatctttcccagtactcatacaagttntctccactaagttgcatgatgcctg

SEQ ID NO: 26759 - DNA, 439 bp, Glycine max
gctagaagttagcccatagggtcattttcttgttgcgactgcagataattgcagcagaatgcgggaaaattggatttcctgcgaagatgtatttcagtggttatattttttccgaccattcaatgcggtccagaatgcacgattccttttgtacaataagagttgtttttcaatatattacataaaattttgaatcttcattaacttgctaatcctagaacttatttagcatgttcttcaatatgcatgagtttatcgggtatttctgtatttcatgttgcaatttttttatagtgttttgacttagtgcaatttattttgatttaaagagataaacgagttggtaactaaactgtaaaagtagagatgcacgatcgtgttcaggagaaataatccctgcatcatgactagtgtaccatgtgagatataaactgaatga

SEQ ID NO: 26760 - DNA, 492 bp, Glycine max
  unsure (1)..(492): unsure at all n locations
ttcatactaagcttttggccataattgagtttcaaaagttttctctctattgattaaattaatttttatttaagccattctacccctactatcatgtgtatatcagcatgcatggttttatgcctacttgacgattttctattctttgttgtgtaataatattgtcacataactagttcacaattttacaccattatgggagtgaacatattttagctagtttcatttttgcccataattcttggcttggaaatatgttcatcatcaaataaacagggccatcaaaacaaagaaagcaatttagggttggagatgatggtaaaatattatttgatgaagaagagctcaaaatgatcctagattttaagagaggtgaggactatattgaggttgtttgtggtgctacaaacaaaaaatatggagattatgttgggaggctaaaaattaataacgaaggtcaatatttcatcacttgtgagtgtngccctgact

SEQ ID NO: 26761 - DNA, 378 bp, Glycine max
  unsure (1)..(378): unsure at all n locations
agctntcaagcacaatcccaacacnncagttttctttttttnnntttttgaaggncaaaactgaaatcccttaagctgtgagaatgaaacgacttatggttttattactactattttgcaattggataaaattaatttttcaatcacagattttactttacaccatgtagattatgaaaattaacattactattgctcgagacaaataatagaagtaaaaaataagttttaattcatatattacacaagtcaaatgtaatatattatcattttttataattattaattacaaaagaagtaaaaaattattcatagtaaataattaaagtaaattcttatatatatgtcacatatataaagtttaatcattttatttat

SEQ ID NO: 26762 - DNA, 451 bp, Glycine max
  unsure (1)..(451): unsure at all n locations
ctgagactactatagaattctctaattgttctctgaatgtancttatggccaagtggttggtgtacactatagcactaagagcatttanggacgagcgaccgagaagtatgttgtatgagatgtgggcatgcactatcacatatcaaatcttcaaacctttctattgtatagtcatagacatcccttggttcccactctctcttcggtgaagccgaatagtgggtcatcacggggatggagctctaactccaatatacccaactgcttaaaagtgttctaggataggatgtcagttgaactcccttagtcaataattgtctttctcactatacaattggtgatttctaagcttatcacaaccgagtctattgctttgaagtcagccaaagtaaaggtggtgtggaaaatcatgtttactaaccaaacctaccatatgcacatntttcagtc

SEQ ID NO: 26763 - DNA, 465 bp, Glycine max
ttaagcacctgagctgcagctggttcaccccatacccaggaatggaattttgatcgccaatactcaacaacatttcatagagatgaaagacttgggaatacgtatgctatgcatggaaaatgtaattatgagattgagatgcccgaagaaaaatcatttcctagttaaccacgcattatataccatgctcaatcattttgttttgttgtttttttttagaaatgggtttatgatcccaacatggttgtctcatggtacctaacacatgcaactaagaatgtagtgtgaattttcacgcttccttttttgtttttgttttgcagaggaaaacgtaaggatcatgcatgagcaaacatgaaaacaaaaggtatgcggtttgtagaacaaaaagtatgttgaacgcatatgcatgatgatgcaatgactcatgcaaaatgtgatgctagaatatgataacggacaaat

SEQ ID NO: 26764 - DNA, 412 bp, Glycine max
  unsure (1)..(412): unsure at all n locations
attggtcttcgccagtgaaaggattgaagtgtgttctgataagaggcaaatttaatcatcctgcttggacgaatgagaaaactgnggcaaataaagagggtgacgatgagggagaaacctatgctgtgactgccattcctgtacggccaagtttcccaccaacccaacaatgtcattactcaacccttctccttacctaccgcccatttatccacaaaggccatccctaaatcaaccacaaagtctgtctaccacacttccaatgacgaacaccacctttagcacaaaccaaaaacaccaaccaagaaatgaattttgcagcaaaaagcctgtagggttcaccccaaattccgttgtcatatgctaaacttgatcccatatccactcaataattcaatggtagccataaccc

SEQ ID NO: 26765 - DNA, 365 bp, Glycine max
  unsure (1)..(365): unsure at all n locations
ctgaggcgtgcaagcttaggagaacgatcttggaagagggccttaaatgntttatgagtatccacctgggagcgactaagatgtactacgaccttatgcagatgttttggtggccgggtatgaagagagaagttaatgagtttgtccttgcgtgcctaatgtgtcagacagctaagatagaacaccaaaagcctttagggtagctgcaacctttagagatacttgagtggaaatgggataacatcttcatggatttcatggcggggttgcctaggacccccaaaggtttagattccatttgggttattgtagacaggttgacgaaatctgcttacttcatcctaattaacatcatatattcctta

SEQ ID NO: 26766 - DNA, 226 bp, Glycine max
  unsure (1)..(226): unsure at all n locations
cacaccaatgagctgattcaaccctacatttaaaatacacaacaaacatganaaatatacaacaattaaataccatntattaataatctttactaacaaataaaatcagttcttaatacatgtttgttgttgtgttgcctaagtgcatgaccttattcgtccatgctgtaataatattttccttgtgggggataatccatgtgtcgttaacatagtcaatgaacat

SEQ ID NO: 26767 - DNA, 453 bp, Glycine max
  unsure (1)..(453): unsure at all n locations
agcttgctcaggttaaagggggcctttttttattgctataaatngantctaaagaagngggtaagtgtttgcatagtaatgcatcttgtagtgctatcgggagagaatgattagggagatcgggagattgatgagctcattcataagaattcacctgtgtcatttatcatgaaggaaactcatggatgaatgctntgaccaatttagcttatgatttggagatgaaaatgttggatttgggctcttgtcctatatggagaaaaaggccgaatatgttaacccattatgtctcacttaacccaggggattttcttcttgtacccaacatagttcttcatacacccaccaatgagaggaaaaaaaaacanaaatacccttcacttaacctacactttaaccttctcccctttcaaaccattcacgctacaatttcaccctctccctnttccatcg

SEQ ID NO: 26768 - DNA, 388 bp, Glycine max
tgaatctgaagctgaacaatctggtcggaaaatcaatgtgtgtttctatcagtgtgtgtgtgagtgtgtgtttctgtcacagtgtgcgtgtgtttctatgtgcgtgagagtgtgtgttcctgtgtgtgtgtgagtgtgtgtgcgcgtctcgatgtcagagtgtgacagcgtgatcgtatgtgacatagtgtatctgtgttcatgtgtgcccataattctgggcgtgtaaatatgtgcatgatcaaatctgcgcgtgcatgagtacctacaaatcaatgtaggggtggagacgatggctaaatattattcgatgaataagagctcaaaatgatcctagattgtaacagatgtgaggactatattgagggtgtttgtggagctacaaaca

SEQ ID NO: 26769 - DNA, 261 bp, Glycine max
cacaacaagtttttcacatccacaaatcgcgcataaacccaccatcccctgttggccacctccaactgagctcacgtactcccacgtagcccatatcctcgtttctctcaacaccgggtccccatcaatcctcccaatctttccccaacatccaagtaactcaacattcaaacaacacaaaccatcacagccaagaaaacagggcaaaggcagaaaattcttgccaaaacaccaaccaaaatcacagcttttctcacttaa

SEQ ID NO: 26770 - DNA, 466 bp, Glycine max
  unsure (1)..(466): unsure at all n locations
ntanactcatcgtctctcatgtctntagtttagggagcctatctattccttgtgttcggactctcagccacttatgatagccgccgatgctcccattactgcttcccctaagctctatgtcctttcttcacgccgcatcccatgccttgcgaactccttggagtaccctcacgttatggtcactaaaaccccgtgcgatgaaaggcgtgatgctttcgtctaatggcgctcctctcatggggtagccaagagttggtgcacaacaaacaattcttgcgccgctcttttcacatcctcggtcgaacgtgtcatacatggccaaaatggcgacgaccgggctttccttgccatgatgaaaggtgaggaaagcgtcaatcgctgctaggtccactaacccttccatattcggaaagaggacaactccaaagatcaaaagcgccaagatgtctataaaagaaagcccatt

SEQ ID NO: 26771 - DNA, 332 bp, Glycine max
  unsure (1)..(332): unsure at all n locations
agctttcagaattcgaaggttttcgttttacacagatgnccaanncgggggcataatatatcgagacgctcgaaattgaacaacggaagctctcgagaaaatcgaatggtcataacttttcacacgaatgttcgattcggggacataactcatctagacgctcgacattgaacaatggatgctctcgagaaattcgaatggtcataagttttaacacggatgtccgattcgtggacgtattatatcgagacgctcgaaattgaacaacggaagctcccgagaaatttgaatggtcataacatttcactcggatgccccaattcggaacataa

SEQ ID NO: 26772 - DNA, 324 bp, Glycine max
  unsure (1)..(324): unsure at all n locations
tcattgcctaacaagccaacttacaacagcaagccccattatactcagcataaggatgcacagaccaaagtngcgtatgtaaaaaaattgtatgaccaagtgaaagcgcaaagcgcagacaagaatgaaagctatgccaagcaagcccacaagataaggaaggaagtggcacttgaacccggtgatgatctcggacatttgacgacaaatgccttccaagaaggagggaatgatgataattatgacacaggccaaatacagtctaaaggcccaagcggagaaagacgaccgcccaagaggagaaggacaaagcccccgactgga

SEQ ID NO: 26773 - DNA, 378 bp, Glycine max
  unsure (1)..(378): unsure at all n locations
agcttctgttctgaataataattttaagttcattnnagtcttatgnngaantncatatatatatatatatatatatatatatatatatatatattggtggtcccttaagttagtaagttaatgttattttatctttttcttagtttattttttttaatttgtaagtatgtatttttttaattttgataattgtaagatttttttgtttatttttagtctaatgtaagtttgcttttttaattttgggtatgatatgtgtgaacttatgaaaattataaataaaaaattataattctatagggatcaaaattgaaaaaaatacacatttataagaattaaaaataaataaaatatcttataaataaaaattaaaaaata

SEQ ID NO: 26774 - DNA, 479 bp, Glycine max
  unsure (1)..(479): unsure at all n locations
ntataaacactgttaaagttctatctctaggctatgtgttaatttcataccccttcaagactgcaattaaggcaacccanagaggttgcaattaaggtgggctagaggtgactgcaattaagttggctttctgacacaccttctcatgcccaaggctatgggcttggagcgacgcangtgaccatngatggatctagaaatccgtcttagagtttgggcttagatcccaatacaaccccacaaaatcggcttgtaaggtgaggattatccaagctttataagctttattcaagccatctcgaggcaatgtgggactgaatacactcctcgaggctgcaattaaggtgtctttccaacacttctttaccaattttttttgtatttgttactattagagattagagatgtaacataaaatcaatcataagagtaatgccttcacttaccaacttaagctntnggtatagtatggtcatgtc

SEQ ID NO: 26775 - DNA, 285 bp, Glycine max
  unsure (1)..(285): unsure at all n locations
agcttaggcttttgtttactancaattaaaacatggcgcacatcatcttcaaactcatgcattcgctccatattcagagatccatgcacaaaccattacttactgctggtgttatctcacaattaacgatcacactctcactgggtcgtggctaacatgtgccttcacaatcaacctgactaaccaactaacattatcagacatgaacctatgcccgcgttcttactcttctaatgactgcatctcatacaaagtacatgaattacccacttcaatgcgctcaca

SEQ ID NO: 26776 - DNA, 195 bp, Glycine max
gattctatcgcgaacatcttgaactcattctctgattgacctttgagctttttgtcatcacctttgtcatcatctttgttatcatcgaaacatctttgaatcaatcttgattcatcatgaagctttgcttctacactaccatggtcgattcttggttaatatgttcaaatgtatgtggaccaataaactactcat

SEQ ID NO: 26777 - DNA, 378 bp, Glycine max
  unsure (1)..(378): unsure at all n locations
agcttcgaagggatgagttataccgacacgatcacatagcatggttttaaaagaagatttagccgtttgctcaaggtccaaaagaaacttatcttatagtttatgcgagacagagaccaacatgttagctatcatcaccactgcccacgagcatagggtggcagacgagtatgcccaagtgtacgcggaaaaggaggctagaggaagggtgatcgactcgttacaccaagaggtaaccatgtggatggaccgatttgctcttaccttgaacgggagtcaagaacttccccgattgctagccgaggccaaagcaatggcagacacctactccgcccncgagtagatccatggacttctcgattattgtcagcatatgat

SEQ ID NO: 26778 - DNA, 400 bp, Glycine max
gctcatcaagtacacttagctgattatgacctgcaaaccactttgcctggtaatgtacaagatgcctctgatcgagaggaagtctatgcactactggacaaataaggtatgcagaggatgcaaaactcttcttatggatggtcaagactctccataaagggtgaaatccttatccacaacactagacgattcataagaatggcacaaggaaatgcttacaacattcaacggatactgcacgtggagattcaactgttaatagattagacacaactttcattgggttgaggaagaagatgtcgcacgctcttcatacattcataaagatgactaagttacatcatcttgtgctgagctggatccaccaacctggatcagagatcttcctccaccaacatgg

SEQ ID NO: 26779 - DNA, 342 bp, Glycine max
  unsure (1)..(342): unsure at all n locations
agcttctcaaggtatttttctcaaganagctttctcaaggaagctacctagtctataaatagaagcatgtgtaacacttgttgtaactntgatgaatgagagtcttgtgagacacaatacaaagttcaacttctctccctttttcttccttcaatttcgtgctcccccctctctctttctctccctctntcttttcctccattgaagcatcctctccaagcttcttatccaaggctcatcttggtggtgaagctccttcttccaaggcttattccctagtggatggcgcctcctctctcctcttctcctttgtcttccgctgcatctgcatgggggaaaatc

SEQ ID NO: 26780 - DNA, 373 bp, Glycine max
  unsure (1)..(373): unsure at all n locations
tcctatgcctccacatggccttttgcttatgctattaaagcttaaagagtgttgataaaaatgagagaccggacaaatgggcaaagcagattgaacttgatattatctaaccagggttgtaaatcaattggtagactacctaatactaaatgtcattttgatagggttgtaatgatagagtgacaaagtgataactgataacaatgtttttaaggacaatttccatcttatcacttgttacatgggttactagtgtggggaacttttaaagtggtttgaagttagtatctgatgcagtctttgtgtgcctatgtaacctangaattggctgcatagatgtcaacagcttatattgaacacaaaatattgatgc

SEQ ID NO: 26781 - DNA, 436 bp, Glycine max
  unsure (1)..(436): unsure at all n locations
ttaagtcacctgcggcatgcaagctntgaatgaggctgaagaagctgctgtttatgttcaacaagattttgtggagattaatttatctcagcctcatttgtcacaagatagtgacatggagttgatggtaaatatttgtcacaacaaagtagttttatctgaacctaatttgttgcagcactccatttttatatattacaattattcatgtttggcatttacatgtaggtcccagcaactactgttccaccaatagcaaggaataagctagccataacaagagccaaacaaaggaaggttgctgataaagatgatgcagaaaattgaagaagcattttttgttgcattttgaaggttgctgaagacccattttttgttgcgcattttgaaggttgctgagtttgaaggttgctgatgaagaaaactgaagaagcat

SEQ ID NO: 26782 - DNA, 415 bp, Glycine max
  unsure (1)..(415): unsure at all n locations
atcatgactcaccataaaccttgacccatggtgagaatgccaatccttttctcttgtatgcaaaaaacgaagagaaggaaaatttccaatcaaaggaaaaaggagaagggaaatttccaatcaaagaggaagcaaaaaaagggagagaaggaaaatttccaatcaaaggaaaaaagagaggaaaggaaattcccaatcaaagagtgggagaaagtaaaaaaggaagagagaaaaggaaagaaagctcctgatcaaggatcgaaagaaaacagaagaaatatgcagaaaggtctttggaccagacaatatctgaacatatacagaattgtcaccaaatgaacaaaaaaagaaggaaaggaaaccatgacctanagtagtcttctccctccgattaccaaccaaaatcctgtgcgtc

SEQ ID NO: 26783 - DNA, 453 bp, Glycine max
  unsure (1)..(453): unsure at all n locations
acctgcggcatgcaagcttctcanagaagcctctcaaggaagcttctcatacttatctacctaaacctatttcggtaaaattgttctcccggattcgttaaccgttggatcatcttaaaatcttttctggaggttcctaggacaactgtccacagtttgactgttgcgatttgcaatataacatttggtgtgtgagatatgaattttttacggaagcaaaaaatttgagtgttgcaggctttaaattagtgagattgtcagattaaccgccttgtatatttatgagattgtcagattacatggtgtgccatctagcatagtgtctgatagagatcctaggtttacctctagattntgggagagcctgaacagagcattgggaaccaagcttagactacgttcaacttaccatcctcagattgatggccaaactgaacggaccattcagtcact

SEQ ID NO: 26784 - DNA, 478 bp, Glycine max
  unsure (1)..(478): unsure at all n locations
tgaaggaacttataacaacatgtttggtaaatttgtataatcagttaagtgttactatttaaccctttctagtagccttctgattcatttcaattgggatgttataacactttgaaccattaggataattgttctcaccttgacttaaggccatcaattgagtagcccataccccataagtgttcaatcaggcctcgaagggaatgcttacttggagaagctagaacttcgtaagatgatattatgtgttctaactcatatacatgtattactattacctcaagttttcaatgacttaagtgtgaaatgaggtaaagaaaaaaaagagaaaaaagggtagataatacatgagagttaaagatatatatgaaaagaaaaaggagaggaacattgngaaaagttgaaaatcatgatggtttatagttgccagagtcaaagagggagaaaaaaaccttacttctatgaacaaaagtaacta

SEQ ID NO: 26785 - DNA, 404 bp, Glycine max
  unsure (1)..(404): unsure at all n locations
agctntgagggtgcgtagcccaccatcttttcnattatagtatcgataatgggtctaccatcacgattatcgtctccctttccatcattgggggtaccacttgggccgccagatccctccaccttttgggcgtgttctttgaaagatccgtccccctttttgcaaatgttctgtagttgcatcctatccagaaccatatcaaaattgtactaatactgcctaacaaaggcaaccattaggtccttccaagaatggactcgggaaggttccaagttagtgtaccaggtaacagctaccccagtaagactttcatggaaggaatgtatcaacaattcctcatcttttgcgtattcccccatcttctgacaatacatctttagatggttcttgggacaagtagtccc

SEQ ID NO: 26786 - DNA, 408 bp, Glycine max
  unsure (1)..(408): unsure at all n locations
ttggtttagatatgatttatacatgatttaggactttgttgatccaatttgtgctttaatnggatgaaggcaagagtgatttcgaaaatctgcacttttatgcagaattttgctgttgaaatgtgcagcagaattttgtgcttgtgcagaaaatgcttatgtatggctggttgtggaaagggttctacatattgngttctggacactttctagcagatcccaacggtcaaaatgtagacttatgtactagggacctccagtaaaaatttcgagtcgatccaacggtgaacgaattggaacgaagagaatgttactggggtatttgagtaaggaaagctgtggtattggtttgtgttttgggcagagttttctgcctctgccctatnnttcttagttttgatagttcat

SEQ ID NO: 26787 - DNA, 369 bp, Glycine max
  unsure (1)..(369): unsure at all n locations
caagctttgagattttgtttcttgacatatattattattcatgtttcaactccaaaagactctcatgcaatgcgggcgcattttatatgtatgataaaaacactaatgtctcttatcttagcttaagcttttaggatagttggttcatgataattctctgtcagttatcataataaacaaaaagctttttgggatagtaggttcatgacaattaacaaaaatatgaatgtagatatctctgtcagttagcataataagcaggagacattcctgcaaaagggtgagcaattaacatggggtaagtggtcagtagagtttattcagattttaatgtcctannagtaagatcatactgcatattcactaaat

SEQ ID NO: 26788 - DNA, 399 bp, Glycine max
  unsure (1)..(399): unsure at all n locations
ntgngctcaatagctccaataacgtctattccctatatatattacggccaaggcactgccaagatgttcaaaggtacaagcgaagcattgacattatcaacgaaggcctggcacttgtggcactttctcacacaacaatcattttccatagtgagccagtaataccctgccctcangatcttccgggccatggcatgtccgttggcatgtgttccaaaggatcccttatgcacttccattagcatctgctcagcctccctggcatcaacacatcggagcaaaaccaaatcatggttcctcttgtacaggatatttccacttangaaaaagtcggctgccaacctctgcaacgttctcttgtcattgtcgttggcatgtgttccaaaggatcccttatgc

SEQ ID NO: 26789 - DNA, 402 bp, Glycine max
  unsure (1)..(402): unsure at all n locations
acctagaagngaatctaggatctctatcaaacattgtgatagacgatgtcgcaacctacccttcggcgggagggcaacgcgagactcacgggtgcatcttccaagataggaatacgcggagttgccaccaacgtttatttcgaggaaaacgtcggaaaaaccggaaaagacgtggtctacgaacttttaggtgaaaggttcgggagttgtatttacgcacggtgaaggtattagcaccccacgtgcccgtcacaaaggacgacagcctttaatcaagtgtgcgaatatgacttcaattcgtgttatcttcccttcttttgagttcttatgtctgtttatgcctttttatattttatctttttgcgtcgacacaggtgttttcctcgctcctacatattcctc

SEQ ID NO: 26790 - DNA, 332 bp, Glycine max
ggtacgtgagctcagatgaatgtgggcaactggggatggagggctcatgtccgatttgaggatgtgggagagttgagtctcaccgtcacccgatcgccacctagtaccacatatgacgggtaccccatactcctacgagctggatacgagacaacatggaagagtcagtctacctacttttgtgtgctgaccacaaagcaggacctgcagatatgtcgcgggggtcatgacacacttgggacgtgatgtggggtgctattgcccaaaaccgagcttgaccaatcgcgacccaacccagtcatagtcagtcagtgagaacctgtgacatacct

SEQ ID NO: 26791 - DNA, 481 bp, Glycine max
  unsure (1)..(481): unsure at all n locations
ntgatttgatgccttgctagacccgttgaatnacagccacccgcggcatgaagcttttattcaagccaacctttggtataccccttacaggcaagacactagggatgggccatattcaccctctactttgctcgcggagcattgcgtgggggaagaccacgcataaaagacctcattgaagcacacagatccacgcttcctaaaagccccacaagcacgctgtcatcaagaggatctatgagcttctatggatctttgagcttctattatagggggcttatacggctctttgcaggataagattgcctcacctataatgggtagatgtagaatcaatgccacatcatcgatgaatatactcatgtgtgccatgggcagaggaataatgctagtgtccttgtgacatctatccacagaagcatacataaagcccttagctccatgaacatgaaatcgagaactaacctttgccatactaacg

SEQ ID NO: 26792 - DNA, 403 bp, Glycine max
  unsure (1)..(403): unsure at all n locations
cttcaatcaatctttggctatctacattagtgcaactactcncatcaataaccaaagagcatatcttcctcatgatcatgcacctaggatgataaatgtcctccctctgagttgcgtctctatccttacacacactccccattaacctcctaaccatcaaaagatcaccttccaggggctgtacatcacattcactttcactctcactagaacaactagaagagctagaagaagatgcactagtgatatccccattacccaacacaaccatagtccttttgttaggaaattgggaggcaatatgaccctatcctaaatacttaaaacatctaatagaactcacctttaaagaagtgggagtaggggtagaattatntgtaccaagggcaatactgatttcatg

SEQ ID NO: 26793 - DNA, 391 bp, Glycine max
  unsure (1)..(391): unsure at all n locations
agctngngaggattgatggngacctggngtttatagaaacgaggatatgggctacgtgggagtacgtgagctcagttggaggtaggcaacaggggatggtgggtttatgcgcgcattgtggatgtggaaaacttgttgtgcaccatcgcccgaccgccacctagtaccacatgtgatgggtaccccataatcctacaagcttgagatgaggaagtgttgaagggtgaaacttcctgcttttattgttgaccacagagtggtacctggagatatgtcgtgggggtcaggagaccttggggacgtcaggtggggtgctattgcccaaaaccaagcttgaccaatcccgacccaacccgggcatagtcggtcagtgagaaccttgtgatgtact

SEQ ID NO: 26794 - DNA, 400 bp, Glycine max
  unsure (1)..(400): unsure at all n locations
tgcctcanagaggtccatgttggacaaggcggccgaatgtactatttccgctcctgagtatgacagtcaccactttatgagcgctgtacaccaggagcgcttcgaggccatcaagggatggtcgtttctccgggagcgacgcgtccagctcatggacgacgagtatactgatttccaggaggaaatanggcgccggcggtggacatcactggttactcccatggccaagttcgatccagaaatagtccttgagttttatgccaatgcttggccaacagaggagggcgtgcgtgacatgagatcctgngtaaggggtcagtggatcctgtttgatgccgacgctatcggccagctcctgggatatccgttagtgctggaagagggccaggagtgcgagtat

SEQ ID NO: 26795 - DNA, 421 bp, Glycine max
  unsure (1)..(421): unsure at all n locations
ttacagcactgagctgcagctttgaattataaagatacttcaagttgttcgaagtttaccaagccatgagtaggagaattgatcatcataaggagggaagtttaagcaagggtaataactaggggcaaaagaaagtacaaaaaaatgataatccaacatattaaaagcatgttcggcgtactatttaatctccacaaccaaaccattgaagcttgcacaattcacacgtgtattttatgatatttctgcaactaagtagaatgcttaatgaaagaaaaggaaaaagataacccatgcaacttccaactttgggaaagagtgaacccaatgaattcataaacacggtccatttatctcatcctagcaacatataacancattgacacaatttatcagaatgggtggtggttttaacatgatg

SEQ ID NO: 26796 - DNA, 224 bp, Glycine max
cacacacacaaacacacgcacacgcgcatactctcactgacgcacacacacatacacagtcacacagtgagacggacacactcacacacacggtggaagaagaatgatggtttcgatctggataccgagaaatgacctgcagatgtcagactgggactatgcagagatagaaggaatacacatggctctttaagcactcaacacagttcatgagccgttctact

SEQ ID NO: 26797 - DNA, 327 bp, Glycine max
  unsure (1)..(327): unsure at all n locations
agctcgaacctctagtattctttccaattatcttttacaggacttgttgttttcatggaggactgaaccaccaacttgtttgtcaagatcctcaaaccaagacttgtttggagtcatatgaaatgaacacccagagtccaagatctatttgtctcagtgttcttatgagacaccattaaagcctcagctgaatcataaccatcttcaactagagtagcatttccaggttctttagatcgatcttgcttgtttcctttctgtctattaggacagaatcttcgagtatggccttctctnttacagtggtaacatctaatgtttagtaca

SEQ ID NO: 26798 - DNA, 355 bp, Glycine max
  unsure (1)..(355): unsure at all n locations
ggacacaagaaactcagctttacgctaatttaattcattacatggatttttttacccattaagactataggaacttgatattcgggatgtgctctcttgcgtatcactctcttaaatatagcattgcatataattctataatatgtataagatcttgtgtctattattactccatctcagagaaatctgacattcttattaaattctcgtanatatatctaatgagagtctattaagacactttacataaacttacatatcgggctctaattgctttgcatatattattagcctgcttcacttnttcaatgagacataaagacattacaaaaaatatgcaccatgaaaaatatga

SEQ ID NO: 26799 - DNA, 370 bp, Glycine max
  unsure (1)..(370): unsure at all n locations
agcttcatccacatatctctcatgtaagattacactcgatttagacatccctcttaggtttagactaacttcaactgagtttcatccgcagatcccttatgtaagactagactctgtttaagtagcttacggaagtttagcctaagctntgttcatagatccctcatgtaagactaggcctaaactaaacaacattattgtaacaacataattaaaaccaaaacttaacccccagatccctcaagtaagattaagtttcgatcctgcttcaatcaagttctaaggcaacaatacatttcacaatgctaaagtcacctaactgtgcacacaaatgggtgatcaaaccaaaagcatacaaacattaagcatt

SEQ ID NO: 26800 - DNA, 416 bp, Glycine max
  unsure (1)..(416): unsure at all n locations
tcctcttcttggtgtgaagaacaagaagcaaagcttgttgtggaagtgcaagaacacatacccaatcttaaatgggtacaaacgcaggtcatgatattgacacgagaggttgcttatcactcaagcaatagtgtattgtgtttcttggtcttactgtgacatttataaaagataaaactcccatcttcttttatagctatgtatatatacatagtccaccctgtcttgataaaagattgtgatacccaattttaaaatttaatcaatctttattctatccttattgatagatatggatattatagtcgttaaaaatgtaattcttttgttataaaatataatgtaatcttgctcaagtntgttaaaaaataatagttactcagacaactacaatggttgccctgaataaaaaaaag

SEQ ID NO: 26801 - DNA, 352 bp, Glycine max
  unsure (1)..(352): unsure at all n locations
agcttcagcttgttaggtgagtgtngagaattataaaatttaatgtataatgatttgataggatacgatacattatgtagagaatttgatttagaggaaactgaatatcctctaattatgtgtaatcaatactacctgtctatataaacaagctttgtagggtctctttgacatacaattttactcaattatccctctatattcctctcattttacattgtgaaacaaccattagttgaacaacactatacatctttgttcagttgcaagatgtgtgattaccctatttcaatttctttctattcaaattgtaagacgaaaataactgaaatgaagattataaaattaaaaa

SEQ ID NO: 26802 - DNA, 475 bp, Glycine max
  unsure (1)..(475): unsure at all n locations
tataagaacaaaattgcctcaatcatatccaaatatgcatgttatttangaagcatcaacaagaatcaagccaaggctattgtgcaatcaatcaatggggcaaaacacaccaaatgattatgatgatggatggctcaaattctcacaaaggtaaactcatcactttcaagttgagctttcaaaacgatcatgacatgtagaggagaatcaaggatttcaagtcacaaaatgtcaaaaacttttattttcaaaaaaattacccatttcttgaacatatcctatgattcaaagaaaaacatgcaaagtcgtacatgtgcacagaattgacccaaaatattaaactaaaaatccgatgaaactaatcgacattaacaaattaacacaactaacaaattaacaaaaccaacaaaactaacaaaaaccaaagaacactccctcccatacttaaacaacacattgtcctcaatgtagcaca

SEQ ID NO: 26803 - DNA, 304 bp, Glycine max
aaatacctaatatatatagtacaactacagtttaatgggtgtgtgacactgcttcgatacattaaacaacaactccctgtgatcgatatctgatcttgataaataaggtggtgagatccctgtgtatcatttctgtgatactgtacataacatcagtcctatccaaattgaatggaattgtctagaaggatacatatgctctgcgactaatgaggactattgacaagctatgaagaacatactggtaaccatgtaggacaatcataaccttagcacaatgaggatgttcctatattaaccggac

SEQ ID NO: 26804 - DNA, 224 bp, Glycine max
actcagcttcaggcaatccttctctgctgatggccactactgtatcgtgttccaaaggtcgagattgctacttcagctgctactgtcaataatacttctaatattggttcaaattctaatgttaccttttctcaaaatgtaacctttggcatgctatgctaggacatcctaatgatcatgtgatggagagtgttctcagatagtataatatttctcaactgaat

SEQ ID NO: 26805 - DNA, 487 bp, Glycine max
  unsure (1)..(487): unsure at all n locations
gccagnaaggtgatgctctacggcacnancntaagcgccggtggcatcctggaaaacgtgatggacaacatatatatttctcttcggacatacgttcgcccgctgggaaactgtcctaataccgacacacaatgtcatcggcctgttaccgatgattaactagaatattccttttcatcactaatatttgattttatatagaaagaagacaagaagcactgcccgcgacaagagtgatgctattatggtcagaatgattggccatagtactgaaatgagcgacaaaaagattgatacacatgccactattggatgattaacctcgaacaaacttatatgacagaacattatgcttgtgtgaatatcaaaatggggtgctgaggttgcgcctccttttgtgatggcctacgcctattgggatgtgttgaatagccataatggcacaaatgagatgacttcaaattgcgagaaaaaattacacagaaat

SEQ ID NO: 26806 - DNA, 298 bp, Glycine max
ttacaaagcattcattgtagttcctacgtatattatttttatctttttggatattacactctaaattgatatagactgataaacaaattaaaaatagtatttatattatgagacctattcttaaatggatagattaaaaggtgcaatgtatatatacaactatgaagatgatatcaataatttaatcatatttatatgtaacattgatcatgtctatttgattcataattaattgaatatctcgaagaatggtcatgattagttgataactatagcgaggtaaccaatattattaaat

SEQ ID NO: 26807 - DNA, 318 bp, Glycine max
agcttctgtttcaataacgagcgtcttttatattactggcctcaatccgacatcggagtaaaatgttattgtcgttagaatttgctcagagcttctgttctgtaatttgagagtctcgatatactacggaacacaatcggacatctcagtaaaaagttattgtcgtttgaatttgctcagagcttctgttcttaattacgagagtctcgatatattacgggattcattcggacatccaagtataaaagtattgccgtttgaattgctcaaagcattctttgtcaattacgagcgtttagatatattaccggattcatt

SEQ ID NO: 26808 - DNA, 429 bp, Glycine max
  unsure (1)..(429): unsure at all n locations
ntccttgccccttgatatatttgagggactcatggtcactatgaatgacaaattccttgggataaaggtagtgttgccatgttttcaaagcccgtactaaggcatacaactccttatcataagttgaatagttaagggtagggaccacttaacttttcactaaaataagcaatgggatggcttcttggattaacacagccccaatcccaacatttgaagcatcacactcaatttcaaaagatttttgaaagtttggcaacgcaagtatgggggcattagttagcttttgcttaagaacattgaaagcttcttcttgtttctctccccatttgaaaccaacattnttcttgagcacttcattgagaggtgctgccaatgtgctaaaatccttcacaaatcgtctataaaaacttgctaagccatgaaaac

SEQ ID NO: 26809 - DNA, 414 bp, Glycine max
  unsure (1)..(414): unsure at all n locations
agcttatttgcatatactgaataaaaattatgattttcaaccatacatagtttgtcaaaaagccttagtcaaggaaagtaacccaaaaatgaccaagaatagggtgttgaaagagcataataagactttcctaaattggtttaaagatataatctttggtgatgataatgtttctgaaacgctaaggaagttagtagatgggcctttgagaaatgttataactcggcaaggatacgatatcaaaaattttttgttctgcacgaaatcacaagacgacaagagtacaatgcaaaatagtggggctagtctaagggttaaatctcaacactttgctattgtacatgatgacaaccnctgtgtagcttccatgccttactttggagtcattgaagnatctgggagctttattatgta

SEQ ID NO: 26810 - DNA, 446 bp, Glycine max
  unsure (1)..(446): unsure at all n locations
tgacttgagtcatcaagagattataaatatgtgaccatgtcatgttttntaaaaaaaaaataatcatctatcatctatcatctatctttcaatctatctttcaatatcttctttcatctctttctatagaattttctgagtcatttctcgtcatctttctaaaagtttttgataagaaaagttctttgttaaaaaacttgtgctattcatattttcattctcttctccctttgccaaaagaacaaaggactaactgcctgaattcttttatgtctctcttctcccttacaaaggattcaaagaactaaccgcctgagaattcttttgattctttccttccccttaagcaaaagatttcaaaggactaaccgcctgagatatcctttgtttcccctttacanagattcaaggactaaccgcctgagaattctntgcccaacacattg

SEQ ID NO: 26811 - DNA, 422 bp, Glycine max
  unsure (1)..(422): unsure at all n locations
agcttaggagtctaaacttgtagcttctatgcaaggaaacatgtttatggccaggaatccaaagtttggttttatgattagaaaagcatgaaaatagggacttgtttgtaagaatttgggctgccccatgattggcactttgcacctaagtaacgtgggagatgcttttcaatggtgtgtagatatgtgtgtaaatatatatggcataaaaatatgtatatatgtgaatatatggcatgaaaataccttgcaaagtgaatgaatagtaaataatgcatttcaaaaatgtatatttgtggataggtagcgtaaaaataccttttaaaatatgtatatctgtggataggtagcataagaagcctttcacanaaaatgtacccatgccataaatggcacaagaatgcttcccaaatgaatatatg

SEQ ID NO: 26812 - DNA, 422 bp, Glycine max
  unsure (1)..(422): unsure at all n locations
ttatcaataaacacaagttgttttttattcagaanattagagtttatctcttttatcttagtgagagtgattctcctaaattcttgagtgattcaagaacaccttggttgtatcaaaggactttcacaacctttgtgtgttgccctcgctggaaagagtgattctttccttcctttcatcatcacccttgttctttcaaaccacaattccagaaaatccacctctgcccagaattatctcgtggccataactcccattttacgcactcaaattaagtgattcttgagcctaaattgaatttcaaaacgagacctttcacctcgttttggaatcacctcatttggagccctgtagcttcagttattgtcatttctatatttctgtccagccaccacttaaccctacgtttaccatcccattca

SEQ ID NO: 26813 - DNA, 382 bp, Glycine max
  unsure (1)..(382): unsure at all n locations
atagaaaaaatagaagaaaaagaggttaagggcttcttaccaaggctttgagagaagaagcctcaaaacactaagatggattttggaagaatatgaaaatgggggtctctccctccttgagtgtctcgtgcaaaatggagagaatgaaggtccaagttttggtttttggagagaaaatgatggaaaatgatgcaaggctatagatgtgttcaattgaaaagcttgaatgaccatagtgtaagccatgttggacgtgccaatacttgtcataagtaggtagttttactttttgaattttagccagaaatggataaggtaggcataagcaaaattggtaaacatttgtttcgccaaaactggtaaatcctatcttanacatcta

SEQ ID NO: 26814 - DNA, 481 bp, Glycine max
  unsure (1)..(481): unsure at all n locations
tacgcgacactatgaaactcagcttaaggcaatccttctctgctgatgtccactactgtatctgttccaaatgttgagtttcctacttcagctgctactgtcaataatacttctaatattgtttcaaattctaatgttaccttttctagtagtgttaatctttggcatgctaggttaggacatcctaatgatcatgtaatgaaaattgttctcaaatagtataatatttctcaactgaataaaaacatcacagagttttgttcctcttgttgtatgggtcaagctcataggttacccaaagaaatttgattataatttaattcgtggcgatcataagttgaaagttcatattcttcggtcattgataaacaatttgttggacaatattcaataccatgttacctcaactttngtttattcatctttagaactcattntcactaacctatggngaaccctccatgtacctcttatgttgcta

SEQ ID NO: 26815 - DNA, 326 bp, Glycine max
agcttgatattaaacaacggaagttgtctataaattctaacggtcataacttatgacacggaagtccgatttagtagcataatatatctaaacgctcgaaattgcacaacggaagctctcgacaaattaaaatggtcataacttggcacacggatgtccgattgtggcgcatgatataccgagacgctcgaaattgaacaacgaaggctgtcgagaaagttaaatggtcataacttgtcacacggaagtactatatcgacgcaaaacatactgagacacgtgcaatttaacaacggaaactggtcagaaattcaaatggccataac

SEQ ID NO: 26816 - DNA, 427 bp, Glycine max
  unsure (1)..(427): unsure at all n locations
tcaccttctggtcctcctcatagttggtgcatgattatcttgctctattttcgtctcccactccaagtaggcctccggatcattctttcctttaaatggaggaatgttgagtttaataccatcaattcggttttgtctaggaacaccatcattccctcttctcctcctttcttcttcattatgatctctattctccatttgatccaacctctcatggagtgcatcatctcgttgtttcattaacctctccaaatgttgcatcaaagcttgcatttggaattgcgaaagccccactccatcattaggattagtacctgacatctcanacaaacaaatcaaacgtaataagacaattatagttgttgtttgaatacctcacccactcaagtgtatcacacaattatggcttttctctaatgaaacactc

SEQ ID NO: 26817 - DNA, 433 bp, Glycine max
tatcttgaccaatcccgacccaattctgtcatattcggccagtgagaacctgtgatgtacctaatcatgcgagctcctggcagtcaacagattataggatcaatgaccacagagcacggaggcttgtggaggctggccaactgtgaattttgagtaatatgtggattggggcctctggtaatctgataccaatggtggcgaatcgattacaaagctcagaattgaatacaggaggctaagatggtctctggtaatcgattaccaaggaatgtaatcgattaccacgctcgaacacgaagtaatgaagctgaaggagcctctggttatcgattaccagcctgtgtcatctaatacacatacggacgggtcactggtaatccaatcctatgcatgtgttatcgaattcacatcgcattatggcatatatcatgtt

SEQ ID NO: 26818 - DNA, 372 bp, Glycine max
  unsure (1)..(372): unsure at all n locations
ntggtaagtgcntattttcaccttctcgttaagcctttttgctggcttagtgagcgtccgctaagcgcaacactcttgggctaagcgcgaggaagactctagaagaagatgagctatacaggtttgctaagcgcaccacttcatctcactaagcgcaccacttcatctcactaagcgcaccgctttagttcatccgctaagcgagaaaggcacgctaagccaaaaatcactaacatgcgctaagcggtccataagtgcgctaagcacacgagcacgaacaaggccacctatttaagcctgaaatcagattttagaaagggagtttggactgggattcagagctttgcatgtctagggtttctagagagagaa

SEQ ID NO: 26819 - DNA, 384 bp, Glycine max
  unsure (1)..(384): unsure at all n locations
tgacacataaaactcagctactcctccgcatgtaataaactcactggttttgtaatgccctatggtctncacgcatccattaactttaagtatgccatgcttttataacttanaaactattntattaagaaattataagaggtgaatttataatatattcttgtaagtttttcttttttttgggtttcatttgtgaaccgatgttgaaccttgatttaatgaagtggctccacagtaaaacacctatggagaatgaccaaattgatggagttttagtcaagtcccaatccttacgagaaaaatacttttaagtaaccttggtgatacataatgccaacaaattatgctagataatgaattatgactataatggcatgcatgttg

SEQ ID NO: 26820 - DNA, 393 bp, Glycine max
tcaagctggagaggatgcttcaatgtgtgtttagaaagagggagagaaagagagaggggggagctcgaaattgtaggaagaaaaagggagagaagttgaactttgagttgtgtctcacaagactctcattcatcaaagttacaacaagcgttacacatgcttctatttatagactatgtagcatccttgagaagctttcttaagaaaacttccttgagaagcttctttgagaaaatatccttgagaagctagagcttagctacacacacccatctaaaaactaagctcacctccttgacaaaatacatgaaaatacaaaaaaaaaaagtcattactacgaagactacttaaaatgccctgaaatacaaggctaaaaccctatactactataat

SEQ ID NO: 26821 - DNA, 397 bp, Glycine max
  unsure (1)..(397): unsure at all n locations
gagaggggggagcacgaaattgaatgaattaaagaggtagagaagtggaactttgaagtatgtctcacaagactctcattcatcacagttacaacaagtgttacacatgcttctatttatagactaagtagcttccttgagaagctttcttaagaaaacttccttgagaagcttctttgagaaaacttccttgagaagctagagcttagctacacacacccatctaaaaactaagctcacctccttgagaagcttccttgagaagctagagcttagctacacacacctatctnaaaactaagctcacctccttgacaaaatacatgaaaatacaaaaaaaagtccctactacaaagactactcaaaatgccctgaaatacanggctaaaccctatac

SEQ ID NO: 26822 - DNA, 426 bp, Glycine max
  unsure (1)..(426): unsure at all n locations
agcttgagatgagtntgttttgattgtgagatcctagaggtgaacgagacatcctcaccacttttatttttgcaatctttcatcttgttcttctctttgttgtaaagaagatttcctggtatggagagctaaatcctctgttggatcttccctgtacgtacctgaggtaaatatatttttatctatttaatgatgttttgggtgttctctgtgctatctgcttttcattccagtatgcctttaccttgatcacgtagatgcatgctttgttagggtcattcaatagtggaaactggtctgactctaaagtccttgatagtacacggctaagttgtcgtactatcacgaggaatcacggtgcgataatttagctgtgtatgtgtgtcttactgcggtcctggttgagttagtcttaaagaggaatct

SEQ ID NO: 26823 - DNA, 396 bp, Glycine max
ttacgtgacctataaaactcagcttaaggtttctgccttctacctttattcacctcagtaatcagttatgttattaaaatatcacaaattttgaaaagaaccaaaattctggattcgatatggaacactatctaacatagaaatagtattctgcgggcaaaaagaatgttgattcttattacctaatttttttttttacatttaaatataaaacacttttcttgcgacagaataagaatggaaatggttaaaggtatcgcacagatctagagtcactcaaataatagggagtgttaactaggttgcagacttctgataatagtgttataccttcaccctagtttttccatcattgatagccctctgtgtagcttgtagcacatcatcatagaaata

SEQ ID NO: 26824 - DNA, 419 bp, Glycine max
  unsure (1)..(419): unsure at all n locations
agcttaacagcaataaaaagcatcaaagttattcaaagatttactcacattaactaccacaagcacgattgacagtgaaaaatcataagatttgatttaatgcctaattgcacacctgacatccagtagatcaactctaactcatgatgataagaaaggaaacatgcacaacaacaatttcattaccttcctctaatgaaagctgaattgatctcttctctaactcaacagcatgcttgctaagttcaactgaggacagggagcgaagcactgccaaaggatgagatatcagctatataanatatcaagaacttcataagaaagctttgagggattatttaagggtcctgacatactttgatatatcttcttgtctgattggcccaattctcaaaacatctgcaattgttggatcgctc

SEQ ID NO: 26825 - DNA, 422 bp, Glycine max
  unsure (1)..(422): unsure at all n locations
tgttgttttgaagtttaatggttcttattgtataaatatgtgtnttgacggtcccaagtaagcattcatccaactcctcaaaacttcacacttgatgaatttacactgataaatttttttctgctctcatgtagatctgcaattgatatttgtgatggactgacatatctggatttgatcattaaccagattgaggtgagacatttatacttaatgtacaaattatgataattacacattcttatatgaccattntcctacgcaaatcattggtttattccttgctctttntttatgaatgatctggattgtgcacttgcctcacctacantttcttatgttcgcttgttatatgttgccactgacctgttgttttaactctactatttngctgtgtgatttgtaacctcaattcaatatgg

SEQ ID NO: 26826 - DNA, 440 bp, Glycine max
  unsure (1)..(440): unsure at all n locations
agcttagcacaccttatgaaaanttgtttgtgttataagcgcgacaaccacgcgcttagcgtgagaactcagaattttttttcttctgcagaataggcttagcacaacaggcgcgcttagcctaaatccacaattttccaaaaagagggagatttgagcttagcgcggcaaggcgcccttagctcaacctcataaaaaacatagcacaggcttaccgagcaggctcgctaagccttgttccataaatatgaaaaacaaagatgaaattgtgcttagtctatcagccaggcttagcgctgaacaaaattctgaaaaatttctaagtatctgatacacctccctcgcttagcgcacaggcatgcttagcgagttcaacattgatactcaacagagaagatgaacatgcttagcacgacaaggccgcgcttacggtgttcatc

SEQ ID NO: 26827 - DNA, 340 bp, Glycine max
tctaacctgtgaaattcttttcaagcgttgttggcactgttatctttatgagactttgcaaggattcatagataaatttgagaagtgagttgaaatggtgaaggggttggaggagccatttctgatgaaagtgttcctcaaggggttaaaggaagagattagcactgaggtaaagcttcatgaaccaaagaacttgattaaagcaatggttaaggctcaaagagtggaggataagaacagagttttagggaagttacccttgagtaatagccaggggtataatctgcagaaacctagttattgcggtcaaaaatatgtagtggagtgacgaccaacaaat

SEQ ID NO: 26828 - DNA, 445 bp, Glycine max
agcttcattctacacctgaaaaagaggtttagttatttgcacaaaagagaaagcttcctaacaaaaaatttcatgcagatggaccttcttctagtaattctgacttacaatagcctcatatccttcttccattcccacctagagcgattccaaacaaaaagatggaagaagtggaaaaggagatctttgagaccttcaggaaagtagaggtgaacatacctctattagatgccatcaagcagattccaagatatgccaagtttctaaaggagttgtgcacccacaaaaggaagctcaaaggcaatgaacagattagcatggacagaaatgtgttagcattgataggtaaatctgttcctcacattcctgagaaatgtaaggacccaggtactttttgtataccttgcattattgggaatagtaaatttgagaatgccatgctaga

SEQ ID NO: 26829 - DNA, 281 bp, Glycine max
gtggaagtctggaagcatgagcattgatccagtgtttctttatcacgtgaccaccttggttctctttacgtaaaatattgcatgagcgtatctgcaacgacgtacactgtggtgctattgcctaagacttcaattcaaagccttacatcgcttctttgcataccctgccaaggacaaccgtgacttggatctcacgctatgctatgctcccagggtaacatgtgtcggcccaatgtaaccatctacttgtttatgggagtccaacgcgtattgcaaacaaa

SEQ ID NO: 26830 - DNA, 390 bp, Glycine max
tgagaatggagaattgcactaagcaatcactacgcatagcttcattctcgaaggtggaggacacatgaacgaaaacgcaattcatgggtctccgaaaagattgagaatggagaattgcactaagcaatcactacgcatagctccaaactcgatggtggaggacacatgaatgaaaacgcaattcatggggctccgaaaagatggagaatggagaattgcactaagcaatcactacgcatagctccaaactcgaaggtggaggacacatgaacgataacgcaattcatggggctccgaaaagatggagaatggagaatggcactaagcaatcactacgcatagctccaaactcgaatgtggaggacacatgaacgataacgcaattcatgg

SEQ ID NO: 26831 - DNA, 352 bp, Glycine max
gacttgagtcatcaagagattataaatatgtgaccatttcttgtgtataaaaaaaaaataatcatctatcatctatcatctatctttcaatctatctttcaatatcttctttcatctctttctatagaattttctgagtcatttctcgtcatctttctaaaagtttctgataagaaaaggtctttgttaaaaaacttgcgctattcatattttcattctcttctccctttgccaaaagaacaaaggactaactgcctgaattcttgtatgtctctcttctcccttacaaaggattcaaagaactaaccgcctgagaattcttgtgattctttccttccccttaagcaaaaga

SEQ ID NO: 26832 - DNA, 399 bp, Glycine max
  unsure (1)..(399): unsure at all n locations
agcttctatataagctgaaccattntatctttatacacttgtngagttttattcagaaaattagagtttatctctattatcttagtgagagtgattctcctaaattcttgagtgattcaagaacaccctggctgtatcaaaggactttcacaacctttgtgtgttgccctcgctggaaagagtgagtttttccttcctttcatcttcacccttgttctttcaaatcacaattccagaaaatccacctctgcccagaattatctcgtggccataattcccattttacgcactcaaattaagtgattcttgagcctaaattgactntcaaaacgagacctttcacctcgttttggaatcacctcanttggagccatgtagcattagttattgtcatgtcta

SEQ ID NO: 26833 - DNA, 463 bp, Glycine max
  unsure (1)..(463): unsure at all n locations
tcttgaacgagatcaatatattcattggcatagattaattgtttttacgtggttcgtgatatcttttagcgtcaccctgatgcactgaatgtagtcaatgcatgtaatttggtgtttttcatagacactacctacaaaacaaacaggtacagactctcactgcttgattttgttggggtgacaccaactgggatgacattctctgctggttatgcatatctggagggtgaatgtcttaataatgtgacatgggctttagaacgattccgatgtatatttttaagacatgatgccctccctggagttattgtgactgtcagagacctagcattgatgaatgcagtgaaaactgtatttcctaagtatacaaatttgtagtgcaactttcacataaacaagaatatgaaggccgaatgtatatcattaattggtcaaaaaaatgctngngagtatgtcatggatg

SEQ ID NO: 26834 - DNA, 436 bp, Glycine max
  unsure (1)..(436): unsure at all n locations
agcttggagaagatgcttcaatggttgtttataaagagggagagaaagagagaggggggagcacgaaattgaaggaataaaagaggtatagaagtggaactttgaagtatgtctcacaagactctcattcatcaaagttacaacaagtgttacacatgcttctatttatagactaggtagcttccttgagaagctntcttgagaaaacttccttgagaagcttctttgagaaaacttccttgagaagctagagcttagctacacacacccctctcataactaagctcacctccttgagaagcttccttaagaagattcctaaagaagctagagcttagctacacatacctctctaatagctaagctcacctccttgagatgagaagctagagcttagctacacacccnctataatagctaagctcacccncatgac

SEQ ID NO: 26835 - DNA, 393 bp, Glycine max
  unsure (1)..(393): unsure at all n locations
tgagatgaggaagtgttgaagggtgaaacttcctgtttttattgttgaccacagagtggtacctggagatatgtcgcgggggtcaggagaccttgaggacgtcaggtggggtgctattgcccaaaaccaagcttgaccaatcccgacccaacccgggcatagtcggtcagtgagaacctgtgatgtacctaagcaggcgagctcctggcagtcaacagataaaaggaaaacaagaccacaaagcaaggaggcttgtggtggctggccagctgtgaattttgtgtaatatgtggattgtggcctctggtaatcgattaccaagggtgggtaatcgattacaaggcttaaaaatgaagacaggaggctaagatggtctctgngtaatcgatacca

SEQ ID NO: 26836 - DNA, 423 bp, Glycine max
  unsure (1)..(423): unsure at all n locations
agcttatactaattaatcaaaatgtttgtacnttttctctaagattagacgcacaggatcggtgcttaacatgggatatgaatatatgatgacaattttaaatattttttatttaaaacgaattacatgtatatagtataatttaatcaagataaattaattgactgtgcacatctaaatctctatcatctattattattctaaattcacattattcttgtttcattcgtattgaactcaaagaatcaatgcatctcccatcatggatcctaaaatcttcctttaatttagtatactactattgcatatgttgaagagcaaaattgccgattaagaaatgtcgacaaaaaacaaaatagagtatagatagtcataggttaacacacgaagtgatgacatgaagccaaatagatatcggaaatg

SEQ ID NO: 26837 - DNA, 418 bp, Glycine max
gattatgccctgagctgtagacttgtgacactacattaatatttcataattaattaaaattatattttgaaaaattctataatgcgcttaagttcgatactgattacttaactttagaaaattaatctgataagacattctgacgtgcttttttttcacgagtcttataataactataatcttcagaactaatgtaagtcaagtataaaaataatagattatataaatatgatttagataaattatttatgattcaaaatcaattatttaactaccaattaatctaattaggtcaattttacaactctactcctaatggaccaatattaactatattatctataattaaccaatttctataaaatattatgtcttgatatctgaaccaatttattacaactcaaactaatattttaat

SEQ ID NO: 26838 - DNA, 404 bp, Glycine max
  unsure (1)..(404): unsure at all n locations
agcttctcccccaatnttctataaatagtgggagaagtgaagnagaaaagggttcagccccttatgcacttctctctctttcgaatttgcttaggaaaattgttttcgtgaagaaaatccaagccgaggcgcttccgtaacgtttccgtaacgtttccgtgagtgatttcgcgaaggatttcgacccttcttcgacgttcttcattcgttcttcatcgttcttcagtcttcaacgggtaagtacctcacaccaagcttttcgattcattctatgtacccgtggtggtccacattttggttcatgtatttttattctcggttcatttattttctatacccgcttttgacgtgcttaagccattttatttaagtcatttctcgcttatccctaaaatagaataaat

SEQ ID NO: 26839 - DNA, 256 bp, Glycine max
gatacacttccctttagcatattgtcactctcatagaaagatgcatccccgacaacaaagatttccttactatcatcgctcaatggatgtgtgtgaatctcacacttatgtgctcaagtattataggcaaaggttgacatgttactattctttagtagtacattgtaattcattgagtgagccatagttccccgttgaagaatgaatacaaccactaataccgacagttcggattaattgttgattcaaacttgaa

SEQ ID NO: 26840 - DNA, 432 bp, Glycine max
aagcttcttatttagatgatgctattgtttgtagctacctcatgcactcctctaatgactatggcatcatttctggcgctaaactgctgggagttggaggccatcttctcaattaaatttctggcttcagcaggagtcatgtctccaagggctccaccactggcagcatctatcatacttctctccatattactgagtccttcataaaaatgttggagaagaagctgttctgaaatctgatggtgagggcaactggcacatagtttcttaaatcgctcccagtactcatacaggctctctccactgagttgtctaatacctgagatatctttcctgatggctgtggtcctggaagcagggaaaaaattttctaagaatactctcttaaggtcatcccagctcgtgatggaccttggagcaaggtaatacaac

SEQ ID NO: 26841 - DNA, 416 bp, Glycine max
  unsure (1)..(416): unsure at all n locations
tgtgtcacactntcaattgtcgaagctgaatacatttcttcttgaagttgttgtgctcaaagtctttggatgaagcaacaatgatgtaagctccattggagcttgtaggcctatgatcttcttcatcaatggattcctttgcttcttggaagatgaatggcagcggaatggagaaaggaagagagagaggagacgccacttcaaggagaagatgagtctagaagaagctcaccaccataggaggccatggataagagcttggaggaagaaggagatgaatgaagggagagggagagaagagcacgannatttgtgctctaaatgagctctgagatctgaagtttaatattcaaatgatcaaagttgaaaaaaatgcacacacatgacctctattatagcctaagtgtcacacaaat

SEQ ID NO: 26842 - DNA, 588 bp, Glycine max
  unsure (1)..(588): unsure at all n locations
actaccacctcgtacacactcgtggtgtcgtacanantnnaccgctnacnnnnntcacnntccccacaggggncnnnaacgannntaatgacctgcatagtcagnaccnncgcgancnnnnanagacgacccgcaggcangcaaacaacnacctccacggccnaatttctattatatggcacctcctcacaccaacaaccctgtatcccacgctgcgaccccacggcggaagatcaccatttaagtacattagtgaagcccaaagaaccagcccccatagaagcttctcaagcaagcctcaattagaagtcacatcaaaggagaaggagagtcatgacgaattcccaaacgaaacctcgcggagtgtgagagagcaccctcggcttgcaacacagaaaaattcacagaaaggggtgtcactcctaaagatctcaactggcaccaaaacgaagaaggttctccgacacgctcgccactatgagcggggtgacccacacttcgttaaacttacagcggcaaacccaacgaggcggtgtgtaacccaagacgagcccgaaagcatatcgcggcaggggcagaaccatcccg

SEQ ID NO: 26843 - DNA, 390 bp, Glycine max
tgctctagaacacaatgtctgctcacaggtaatggtttgttagtaagaggttctgaaagtaagaaccaatatacacgatcactctttgagggaacagcggcgagctaatggcattaaagaagcgcttcctgagaggcaacccagttttaatctctgttatatttgtttttcatgcatttaatgtagaagcaagcttcatgatgaatcaagattgattcaaagagttttgatgataacaaagatgatgacaaaaggctcaaaagtcaagaacacttcatgataacaaagatgatgatctcaagaatcaaagaatgagttcaagattgaatcaagtacacttcaaggatcaagaggaaagttgaattcaataatcaagaatcaagtttcaag

SEQ ID NO: 26844 - DNA, 430 bp, Glycine max
  unsure (1)..(430): unsure at all n locations
agcttctttgggaccttgtacatgcaattaactcctctttcaaaaccatgctatgtgctcgcgactggtccctttcttcccttcgcaacttgagttcactattgctaccccatagagctccgcgaaatttgttccggccatactcttccttgcgagccctcttggtctcttgttcaagggctcttgcggtaattgcattctcttcccgtaacccggcacactccttccgaacgtgtgtagcggccaacttgaacttctccttggcaagttttgcctttcctaactcgcttttgagagcttggacttcttcgtcctcttccggtgcttcaaaactctcttcgctgacgactnttaacttggcgagccaatctaaacctcgtatatgaactttcagccattcgtggtacccaccaatgatgccattacgaat

SEQ ID NO: 26845 - DNA, 203 bp, Glycine max
  unsure (1)..(203): unsure at all n locations
tgatcatcatactttgataaatgccacanaaactggggcaaatgaagagggtgaggatgaagaaaaagctcgtgctgtgacagccattcctatacagccaagtttcccaccaacccagcaatgtcattactcagccgataacatactgtcggaacctacccttccgcgggatggcgacacgagactcgcgggatgcgtgttca

SEQ ID NO: 26846 - DNA, 299 bp, Glycine max
  unsure (1)..(299): unsure at all n locations
gatctctaagtcacgctgctgcagcttgccaaaaggttttgtttcttttctttnanagccaaagatgctgttgccacttctatgccctgagagcttctacaccttgacttgtttggaccaaccacaactgcatttttttctggacacacatattgtctggtcatattggacgattacaccaaatggacatgggtcaattttctaacctacaaggatgagtattttgataccttttataaattacgtaaaaatattgaacatgaaagaaataattgtattttttcaatcaaaagtgatca

SEQ ID NO: 26847 - DNA, 233 bp, Glycine max
ctttagctcgtccttcaagaacatgctctttgtttcatgattattcctttcacctcttcagagcttgagctcactattgctgccctataaagcccctcaaaactttggtatggtcgtgttattgctttccggccttcttggataataatatcaaggcttcagcggtggacatattgacgtcccttaactcattatactcttttcaaactttgatggctatggacttgaactta

SEQ ID NO: 26848 - DNA, 335 bp, Glycine max
  unsure (1)..(335): unsure at all n locations
agcttcatgatgatgaatcaagttgatttttgttttttgatgatgacaaagatgatgacaaaaagtccaagagaatgatttcaagattgagtcaacaagttcaaagatcaagattgaatcaagattcaagagaagatgatttcacaagaagattcaagaaatgacatcaagaagaatcaagattcaagagaagatgatttcccaagggaggtattgaaaagaatttttcaaaaaccaaacatagcacagttttgttttacaagaaaagcttttctcanaattttctaagttaccagagtttttactcttctggtaatcgtttaccagtttcctgt

SEQ ID NO: 26849 - DNA, 371 bp, Glycine max
  unsure (1)..(371): unsure at all n locations
gctctgagagatcagtgtttgatgatgacaaaattctttttaatgatgtcaagattgagtcaacaagttcaagatcaagattaatttcaagattcattagaagaaatcaagaagattcaagattcaagagaagttgatttcaagattcaagaaaagacatcaagaagaatcaagattcaggagaagatgaattcacaagggaagtattgaaaaggatttttcaaaaaccaaacatagcacaattttgttttacaaaaagagttttctcanatttttctaagttaccagagtatttactctctggtaatcgattaccagttttctgtaatcgattaccagtgataaaatttgttttcaaaaagtttttaact

SEQ ID NO: 26850 - DNA, 441 bp, Glycine max
agcttagtgcaaatccttgcggcaatgtttagtcttagcgggcgcttgccagctaagtcgattatgcaaaagcttaatttctgcaacttctgctaagcggccttacatgtcgctaagcatttgcatgttttttgtgaaggctagctaagcggaccatgtctcgctaagcggccagtgtcttttttagtttttgaatttgaataacttgtgtcctatttaactgtttggttcttttatttgcagatggcttctaggaaacgcaagagtattggttcaagacccacaacacaatatgatacaaggagattttactccttagatgcttggaaccggtacacaaataatgtcctaagagaaacatcttgcctaagaggaaggtggagctctaccacactgagctagatgattttaagactgaattggagaggtgtaatttccata

SEQ ID NO: 26851 - DNA, 370 bp, Glycine max
  unsure (1)..(370): unsure at all n locations
tgtccagcaattaagtgtagtgtacgactgaattgtctttatttgtggctaccctccccaccattcctcaccttaccacatcctttctttcttggtaacagtaatattttgtatcttcagctgccaggcgccgtttccttttactctctctctttctctctcctcctttnttcaaaatccagtttttactcactgtgatcatggctccactgcctcagtgttctccatagcacaatcaaacactgatccaattttttctcctcctccctcacaatctgacaacatacacaccacaattcaaattacaataccaaaaaaatggtgggtatatatgcgtatacatacataccatagagtcatagtcatatac

SEQ ID NO: 26852 - DNA, 275 bp, Glycine max
  unsure (1)..(275): unsure at all n locations
catattaagactctcagcatggatcctgtacagcccacctattgccccacttatctatgttaacatgttaaacacttaaaccaaaaacctcacaacacattacacatgcaaaatggtaagcaagccaaacaacaatgtaaaagaacaaacccccataaaaaaattaatcataacaaggtcaagaacggatgatattaccatatatcacgcaaaaaacaaacatccgaagaacatatgaaatattntatgagatacataaggagccaggacattta

SEQ ID NO: 26853 - DNA, 391 bp, Glycine max
tgtatttatttaataaataatataataagacattttattttcttaaagaaaagttgttttcatgtatttgaaaatttaaaatttatgattatttcataataaaaaaaatcctctaaagaacattattatcaaattactcccaaatcttctaaccattttttttctcttttacctttacacatactttttttttcgtgattcattatgaaaaggctattttttttgttgtatcaaaatgtaagatccttactcttcgcattctctcaatgtggtcctcatgaagaaaaaagttatttcacgacttcaatccaccttagtttaaaagataaactaagaagattgtcgaaggaagtgtaaatccaccttattcacgtggtacaatgccatccct

SEQ ID NO: 26854 - DNA, 346 bp, Glycine max
agctttctaaagtttctggttccattcttgttaacaagagtgtgctatatcttttcattctcttctccctttgccaaaaagaattcaccaaggactaaccgcctgaattctttttgtgtctctcttctccgttttcccaaagaacaaaggactaaccgcctgaattcttttgtgtctcccttctcccttttcaaagaattcaaaacgacacagtctaagaattcttttgattcttccctttccttaaacaaaagatttgaatggactaaccgcctgagaattcttttgttttcccttcacaaagtttcaaaggactaaccgcctgagaactttgtcttaacacatt

SEQ ID NO: 26855 - DNA, 386 bp, Glycine max
  unsure (1)..(386): unsure at all n locations
tgngaggattgatggngacccggtgttgagaaaaacgaggttattttctacgtgggagtacgtgagctcagttggaggtgggcaacaggggatggtgggtttatgcgcgcattgtggatgtggaaaaaaacttgttgtgcaccatcgcccgaccgccacctagtaccacatgtgatgggaaccccataatcctacaagcttgagatgaggaagtgttgaagggtagaacttcctgcttttattgttgaccacagagtggtacctggagatatgtcgcgggggtcatgagaccttggggacgtcaggtggggtgctattgcccaaaaccaagcttgaccaatcccgacccaacccggcatagtcggtcagtgagaacctgtgatgta

SEQ ID NO: 26856 - DNA, 422 bp, Glycine max
agtcacctgcggcatgcaagcttattagagaatcgcaataacaactactcttcatttacatcattatcaatttcagagagtacattttcagacataaagcaaacgcattgcgatgctatcaccacatcacccgtgtttcatcttctcgaaaccaaataggacttatttgtcacaaggtatggagaagacgaaacacaactaaggtggtgacgacagaacattggaatgtgaggaagaagaggtgcgaggaataggatgtgttgacggcttacctgctaagggagcaaatgcagcggagatgcaaagaggcgcgaggaggcacgatgaggagaacatgtgaggaggcgaacaaacaagaatgcaaggaagagtgcgcacgagagaaaatatggctcgtagagacatttcaaatatttttaaat

SEQ ID NO: 26857 - DNA, 282 bp, Glycine max
ccttccttggacacgttctgtgaggttgcccaggatggtctacacacctcgctgatgtgcgagtatcgttctgcatgacgcctttgatcctgatgctgtgaaagatgctgccacatgctcctccctagatggtgctgtgcctgccgctgttgaggatgtgccagcatcttccacccctaatgaatctgtgcctgaggttgaaaaagatgctcctacctcttccatcccgatgtctgaggcactctgcttctccagcgctgagagatctgcatgtgaggatga

SEQ ID NO: 26858 - DNA, 428 bp, Glycine max
agctgtacacatttataaatcatctaatttatctaaaccattaactaaacaacataaaatcattcaagcaacattttgaatgaatcaaacaaggaacaaaaataaaattaaacctctaacgccaaatgagaccgagggttggacaataactttccagagttgtgtgggttgagactagtgacaggaaggggctgaaacgcggtgggcttacctatcggctgtgtgggctgacaatggaggcagaatggagccgctacaaaggcacgacagtcacaggcagaagattgaggctcggggtcgcgaagcggagatgagacgaatgtcgcacagggagtaacagagggctagggttgggggtcttttaattggggataattgtacatttcgacggatggattccttcagtaaaatccgtcagagatgaatac

SEQ ID NO: 26859 - DNA, 413 bp, Glycine max
  unsure (1)..(413): unsure at all n locations
atcaagtaacttataagttaattctatcaaacatatatcattatcttagttatcattataacacacacacacaatatattattatttattacataaattcatgataaaaaagtattaataggatgaatgatatcctaagaaattattgtattatacctcttttagcttataaaagatataaatttataacatcatattttacttcccattagatttattttatttagacatgctatcccttcattntataaaaaaaattcatacctcgcttatttatgattgtgataagaccccaattaatgtaaattacaaaagaccagtaaatctaattcatattcactttttttttatttcattcattctcngttntaaagaatggaattaaatagaaatagaatagaatggagagagat

SEQ ID NO: 26860 - DNA, 163 bp, Glycine max
tgcacgacctaaaggaggtgatggaacacatactactcagaccacggatcctgctcaggccacctattacggcgattatgaaggataacccgttgctcacactgacctaactatcaagaccacattacacatgcaccctgaatagtcatgcctcacacacaat

SEQ ID NO: 26861 - DNA, 406 bp, Glycine max
  unsure (1)..(406): unsure at all n locations
actcaagcttagaatgcagaagaagcaacaacaatcaatttaanattgttctataaacatgcaaggcaaaaatgatggcaataacataaatgagataagggaagagagaatgcaaacacttatttatactggttcggccacttcccgtgcctacatccagtactcaagcaacccacttgagatatccactaacttgtaaattccttttacaagtactaaacacacaaggacaacccttcctttgtgtttagagattctttacaacatgagactcacagtctcttaatcccttagagaatgagaagaagaatatgaaccaatctctctacaagagatggatgtacatatgagcactcaattatttcttatgaattcaattgaatggccaacgaattttaaaggataa

SEQ ID NO: 26862 - DNA, 428 bp, Glycine max
  unsure (1)..(428): unsure at all n locations
agcttataaacaccagannnctatttcttgnattattgncacgacatcatttatggggagttcaatacatcggattaaaaaaagagtgtcataattaacggagttggattgctaacaaaaatgctactttataaatttatcaagctagtgatcctctggaatactgtctaaagatggctttcaagaagaattcagtccctgatcatcatcaaattcaccaacctctgaaatttttccttctctcaacttcacagcatgtaataattgctccaatgaagagtgttcatccttgcacctcatcatccttttcaactcttcttgagtcatcaccactctaatcctcacacttctagaattacccttacttcctctctcaccttcataagtattatcatgattttgcatcttgaacctcaccttcttcatgc

SEQ ID NO: 26863 - DNA, 400 bp, Glycine max
  unsure (1)..(400): unsure at all n locations
cactatacgaaactcaagctntaggctctgcagtntatcttattaatagagngcctttatttgtgnnaatctttaagagacctcttgataccctttctcatcatttcacccttaattttgtcaatcatttaccaccctatattttttgttgtgccatatatgtgcatttgcatcctcaccagcggaaaaaattagaatctagagtaatgaaatgtgtttttgtgggatacaacaccactcaaaagaagtattaggccaatcatccatctacaaaaaaaaattgcatcaatggatgttacatttcatgagcatgaattgatttttcccttgaatacacttcattcttcaccataaagcgagggggatgggggtgaggtgttttcctaagaaaaatacaatg

SEQ ID NO: 26864 - DNA, 376 bp, Glycine max
agcttgtcaaggaagttttcttattattttttctcaaggaagctacctactctataaatagaagcatgtgtaacacttgttgtaactttgatgaatgacagtcttgtgagatatatttcaaaatttcacttctctacctcttttattccttcaatttcgtgctcccccctctctctttctctccctctttcttttcctccattgaagcatcctctccaaacttcttatccaaggctcaacatggtggtgaagctccttcttccatggcttattccctagtggatggtgcctcctctcacctcttctcctttgtcttccgctgcatctccatggtggaaaatcaccattaaaggacctcattgaagctcatagatct

SEQ ID NO: 26865 - DNA, 413 bp, Glycine max
  unsure (1)..(413): unsure at all n locations
ctttgtnntttggagtgtaagagggcatgaaaatgatagcttgttggtgaggttccctctttaggccaacatttggtgagggttgtaccatgttgattcttcgcacctagatgatgtgaaaatattgttcaccatgtatgtgtgtatatatatagcatgaaattgactgtcaagtgtgtatatatagcaaaaaaaatgccacccaaaatagagtaaatgtaggtagcaaaaataccttgccaatttgtatatgtgtttagataggtagcaaataccttataaatatgtatgtatgttgatataggtagcaaaatacctggaaaatatgcatgtgtgttgatatangtagtgaaaatgtcttgcanatatgtaggtatgttcataaaatgtttctcttcaagaaaaaaatgtgt

SEQ ID NO: 26866 - DNA, 507 bp, Glycine max
  unsure (1)..(507): unsure at all n locations
tgggcncnaacagnattgatactttgatgccttgccgnncccgggatcctcagagtcgacctgcggcatgaagctttaaagacatccttttgtaactttattggtgatatctcaaaaggggtaacaacttgacattctcttaaagaattatgcaataatatggcttttgtgtctatggttgaacctaaaaatataaatgaagccataatagatgatcattggatagttgctatgcaagaagaacgaaatcagtttgaaagaaacaatgtgtgggaactagtagagaaacctgaaaactaccccatcataggaacaatatgggtatttgggaataagttagatgaacatggcataatcattatgaataaggctagattagttgcaaaaggatacaatcaagaagaaggtatagattatgaagaaacatatgctccagttgcaagattagaagccattataatgcttttagcttatgcatccataattgaatttaagctntatcanatg

SEQ ID NO: 26867 - DNA, 274 bp, Glycine max
  unsure (1)..(274): unsure at all n locations
gctcatcatatgaagctactgcccctcctgatacaccagctgaagaacagctgacccccctgcttccccagttggagaaactgctaatctttctgattcgtcatctggagaagttgttgctctcactgattccctagtgtagacactgttgacatagatgattcttgatgatgctttctgattcctttttggtttattattattactattataataattatgggttcgagacaatatcccttttatgttgatatacactgtcagttntatgtat

SEQ ID NO: 26868 - DNA, 432 bp, Glycine max
  unsure (1)..(432): unsure at all n locations
agcttaaagatattagtgttatgtgattgtttaaaaatgaacattctaaggcaaaacgaacaagtgatgtaacgatgtcaatccattggacgaaagaaacttaagctaattgagtgaatatgagctctactaaattagcgagtttcattgtattcaaacccgttggatgaaacccttcatccaatgatatttgtttaagaaaatcttttaatagtttacgaaagactaagtttttgtccttgacactattcaaccctccttttattatgtttcaggtactttagtaacattgttaattgatgatgtaattgtaaagttggcagtccaatgattngtcacatcatctaggagtntggatggatagtcattcgcaatttttttataattgcatgtttaatccttcatncaactagttgatgtaatcaaactatt

SEQ ID NO: 26869 - DNA, 166 bp, Glycine max
gagaaaaagatgcataatgctttttatactggttcacctcaactttaggttacgttcaatctacattcttcaagatgagatattccattaacacaattatttattgcaagactagtcaatcattgggtgtcaacaacttgtcaccaaccaaactgtgcgttaaacc

SEQ ID NO: 26870 - DNA, 304 bp, Glycine max
  unsure (1)..(304): unsure at all n locations
agcgcaaggaattcatattacagctcctattgtcnttttgtatcgaatacacgctcattgagattgtattgtgcgttctctgtggatgttgactgccaccatgaattctgatcatttgaggcacctattattaaagatcatgtgatctatgctgagcttgtaggctcctatattaacatcaacgctatggatctgtataaggctacgagaagaaacatgctttttaatgtatttagactccaacattgtgactatttatgggcttggatgataatgatcactgacttgaatggctcgtttgccc

SEQ ID NO: 26871 - DNA, 306 bp, Glycine max
  unsure (1)..(306): unsure at all n locations
ctaatatcctgcactgctagacgcatgatgaggccacgtaaagccttgcgcataaggcggtccacctcttggctgtccgatgctaccctgtggagaacgaacccactgagggtcagaataacgttggccatgggtcacattcattgngggacgcagatattgaggagacatgattggctgccgctgtgaacccggaaatgatcgattcaaaatgtgaggtctaagatgaaggttgtgcaccgtctgttgttgaggaaactgattctgggagatttggggctgtcattcangggtgtgatcatcatc

SEQ ID NO: 26872 - DNA, 442 bp, Glycine max
agcttgaagtatgtccaaaataaaagatttattatttatgatatccaaaagggttcaattcattattgaggggattgaatagcaaagcttaccataacttcttgtagtgatataccaatgatggttataacgtttgattctgaaaaaggttcttgctttagtttaggaaaaagcaaaacttaaagattaaactggatcttagttcagctagctctaataatcacaagtagattatttttttcatggtgaaggtaatgaatcaaataattatttctacttttttcatgatttcatcatgattttgtagaataaaactaattaattttgtgtgttatccaaacactccgtgagtaaatttagtttcaccaaatgctgtttggttcgaatgtcaattcgtgaaaaatcacaaaactaaattcttaatcaataatcaacaaatagc

SEQ ID NO: 26873 - DNA, 347 bp, Glycine max
  unsure (1)..(347): unsure at all n locations
tctcattgcgtgtattacagatacaccacattgttatagttanatttgcttcctcaaatctggttggggctgctgcaagatgttaaaagcgagttccttaaagcttccaacatcgattatgccattttctatcaactctcaaaggccaacgtgtttccatatttgcttgacttttttagtagagatgaaagtgtgccaagaattctttgtttcattaggacagaaaacgcaaccaagtgtacacaaattataaacaattaaacatatataatccccctatcttctattagttccaattaattcttgccttattgcttaattattctgattaanacaatatattatat

SEQ ID NO: 26874 - DNA, 388 bp, Glycine max
caaattataccctatttgagtaagagtgtcctccacctccataaatatataaatggttaatctcaacctagaaaaattaatccattgaaaaagaataagttgtattcattcaccaaaaacaatagtttatatcttcattgaaggcacatttcctcacattaaatgcttttactttattgtacaccaaatgtacaatacaaaatattgataaaaccgatagaaaaaacaatacatgaaaataggggttctaaaatagtttcacttgatattgttacgctagattaattaaagcgggttttactatttcttctcaacttctcattataacacagctatctttgggtggagtatcgatacatcatgttatgatcatgattcatgatcactg

SEQ ID NO: 26875 - DNA, 442 bp, Glycine max
  unsure (1)..(442): unsure at all n locations
gctgaagttgtacatgaccaatctttagtaatcgctttactttttgcagtttttgtattcgnttaaaatgcatgaagatagatcagtaggagaacaattggatttgtttaataaactgattctagatcttgaaaatattgatgtcactattgatgatgaggatcaagctttgttattgttgtgctatttgcctaagagttactctcatttcaaagagactttattgtttggaagagattctgtttctcttgatgaagtgcagactgctctgaattcaaaggaattgaatgaaagaaaggaaaagaagtcctctgcaagtggtgaatggctgacagcaagaggcaagaccttcaagaaagatagtngaattgataagaagaagcanaagccagaanatcagaagaatggtgaatgaaacatcttcaaaatcagatgttatcac

SEQ ID NO: 26876 - DNA, 421 bp, Glycine max
  unsure (1)..(421): unsure at all n locations
agcttgccccatatgatggagcctttgtttctttctcatcagtntcagatgtcaatgctagccagaatgggtgctgctgggctcggcatgggaatggtcattgtgaacatgaacatggggagatgctacgtgcacccagcaacttttatgaatggacaattctgtcctttaataaaaaattataaaaagcccccccccctctctggaagaaacttttctgctgctgctcattccttccgcgaagcttgttctccgttctccgcgaactgcttcttcttctccggcaaggcaagcgcgaacctcgtcttcttcttctccgcgaacgaggttagtctccctaactcccctttgcttgtatgatacaacattgttatagcgtgtagcagaggaaccttatgatagtcaccttatgatagtaacc

SEQ ID NO: 26877 - DNA, 365 bp, Glycine max
  unsure (1)..(365): unsure at all n locations
ntaggaganaccatanaaactaaggtagttcctaaacatatatctaatgatgaagcttcgccaagtatccccattgaaaaacctttattcaaacctttcaaagttagtgagaaggctaaacgaaaaattagagaacttagaaaaactaaatccttaattgaaagcgtaggtgacaatcatagtgaattactaaacaagattggtagtttacttaaggtcattccagatactccctaagcctcggaaaatacttccaaaatggtaacaagaagtacctccaaattaattaatgttattaatgaagatagtgaccaaaactcagataacacaactgagataggatcagtgtcagaaaagaatataaa

SEQ ID NO: 26878 - DNA, 452 bp, Glycine max
  unsure (1)..(452): unsure at all n locations
agcttgtaggattatggggtacccatcttatgtggtactaggtggcggtcaggcgatggtgcacaacgagttttccacatccacaaagcgcgcataaacccaccatcccctggggnncagcctccaactgagctcacgtactcccacgtaacccatatcctcgtttctctcaacaccgggtccccatcaatcctcccaagcttccccaacatccaagtaattcaacattcaaatagcacaaactatcacagccaaaaaaacagggcaaaggcagaaaactctgcccaaaactccaaccaaaatgacagctgttctcacttaaagaccccagtaacaattcattcgttccanntcgnnnnccgttggatcgactcgaaaattttactggaagtctctagtacataagcctacagtttgaccgtgggatctgctagcaaacatccagaactcat

SEQ ID NO: 26879 - DNA, 283 bp, Glycine max
aatctgttgttgtccggcgcctgagagtgatttcaatgtagattagatacgataagatctagattaaatgatgtctagatgagaaatgcaaatctcgattggataagattggatctagagctcactctgtctcgatgagatattcaaatctagatacgatatgagaggagctagattaaatcatatctagatgagaaagtcaaatctagataagaggagagctcgattaagtagtatctagatgagatcaaatctaaatagtatctagattagataaagatcc

SEQ ID NO: 26880 - DNA, 431 bp, Glycine max
  unsure (1)..(431): unsure at all n locations
agcttatgaactccnagaagttatatgttactaatgtaaaaaaagggatctaaatcgaagatgcttaacccattatgatttctgaatgtcatgctcatccacacctacacaatcccatgcaatcgcagcttaaaaatatatagtaactatgttgacttttaattctacgaaattctatttttttattagaaaacagtaccaaaagtacttaaggaaatgcatgtaagttatgtcttttatgaattttgattaaaaactctctttatttcaaagacattccttatttaccaattaattatatgacatccctagttgccatggccaatatgtcagcacttgaaaccttattctggcagcgaggtacactgtcaaccgcagcattggctttgatcacagtgtcaaacccatcaccagctagcaccacagaagca

SEQ ID NO: 26881 - DNA, 417 bp, Glycine max
  unsure (1)..(417): unsure at all n locations
tgctntntgtcaccagaacatagcatgtaagtagttctttttatgtcagaggcgcagactatggaaaccttaagtttgacagagaaaatattaagggaaatgctaacgaaactcttttactaacactttctctgtaattaactaaaatatgtcggaaatgaccaattttgggaactcttagagaatgatggaaaaaagctttaaagaaaagaaagtgttgctaacatttttttaaatattattatccataaatatgttcctgtgtatgtatctggtacctatacacatttgtgactggttggcgatgttgcttaaatgcaatntaatctagtattccgttgtaaaaaagcacactaatactaactggcaatcttagctattcctgtntcagaattttagtaacacatatctattatc

SEQ ID NO: 26882 - DNA, 440 bp, Glycine max
agcttatagaatatataataaatttctttgacttttgaaaagtctatacatgtttcctttgatgagtctaatgtcattctttcaaggaaggattttttagataatatttcaaattccttagaagatacacatatttatggaaatgactctaaagaaaaagatgaaggaagcaatgaggattctcaagataatggggctagaggaaataatgaacttccaagagaatggaaagcctcaagagatcatcccctcgacaacattattggtgatatatcaaaaggggtaacaactagacattctcttaaagatttatgcaataatatgacttttgtatctatgattgaacctaaaaatataaaagaagccatagtagatgataactggataattgccatgcaagaagaactgaatcaatttgaaagaaataatgtgtggaaact

SEQ ID NO: 26883 - DNA, 414 bp, Glycine max
  unsure (1)..(414): unsure at all n locations
tgacgtggtccatatgaggggggattcgactcatataactcacgccgcccttcttctctgcatctttcaacgaaactttcttcttctttttcttctctttcttcatcaatttcgagttttcttcattgggtgtaattgctattacttcaatttctgtgtcttctttctctgagtctgaagcattcatcaagctgaacaaatgagatctgaacagggcagataatttttctgcaccaacatgataaaacaaggaacctcggtttaatccagaaaatgaagcttcaggcgccaaatgggaagtaacagagagaaaatagatatgaaattgaaaaanaaaatacacagtgatgaaaattgaaaaccccgtaattaagaagccggtcacagtaagagctggaccgttaaaaaaaaata

SEQ ID NO: 26884 - DNA, 393 bp, Glycine max
atctcatgaagagattcttgttttagaatatcatgacattacacatgtgttgtatttttttaactcatatcaacctatatctttttaacaaaatctctttgtgaatttatctacatttccgccttacacgtgctcatagatatttatgcgtatatatttttatcggagatctatctcatatatatttcaatcatgtacaagacattcttagggttgctacattcaaataaaacattaattacatgtagtgctctcacattacataaaaattaaatcaccatactacatttaacttgggctgagaaccatttcctccacaccccatcctatttgcacgagtacctgcccagtgtatacatacttaagaaagtacctctacctcatcaacaatcc

SEQ ID NO: 26885 - DNA, 394 bp, Glycine max
  unsure (1)..(394): unsure at all n locations
gtgatgtgttctaaaagttgtttatggaattcagttatngtatgtaaaattctgaacgcttatgtgatactttatgaattgcttatatttttaaaacttataacttgttatttattattttataattattatttataggttctagatcaattgaagaatcaacgtttactgatgagattgaatccgatgatgaaggtatattcacttttagtggatctaattttttttaatatcattatacatatctaatgtttcacattttttaaaatataagtggatctttggtcagtaacattactcaatgtttgcaagattagtagacattattgttgatcggtanagtaataactatacttatttactaatgtgatgtgtgattttaggatttgaaaca

SEQ ID NO: 26886 - DNA, 426 bp, Glycine max
agcttggctattgaccttgtcattttattatatattggccatctctacaagggtcttatgctctttagacaaccctctattaaatttcttttgaaaattattctttacacaaggatattttggcaagctatacataccaagtttcaacactttggggcaacattcaccttccaaattcacttccaaaaagcatctgatgttgagcttgttgatggttcttgattgaaagatctaaccatcaagaggttgtatcccaatttaataaagtatcatccatcatttgtggggtaccacacgatcctgtcttgatcattgaaagacctaagaaggatgacaaggatcacatttacttggtgctcactgaaagtattcttgatggtggattgtctccagatctggtggagtaaactacgagatataacaccc

SEQ ID NO: 26887 - DNA, 445 bp, Glycine max
  unsure (1)..(445): unsure at all n locations
actcagctngacaaccggcttgtttaagtaataataataataatatattactattatctataccattnttatgacattatgaatgacttcatgaattgagataaagtgcttaaagaattcacttgcatgtgaaaaattttcaaaaagaaaaagactcaagttaaaaggataatgcaaccagattaatactttcaaagaaaaaaatgttttgtaaagacattttcagacaatttaaatatttttatttgactatattagtataaatcatctctaatccatgtattttttaatattatactctctttttcattttcttttgatatactntgtgtttaaataacttgaattcaatatgattntggttatcaattattnttgaattggatattacttatacgaaaatntataagtttcttttttaagtagtatttactaggtntataaa

SEQ ID NO: 26888 - DNA, 410 bp, Glycine max
  unsure (1)..(410): unsure at all n locations
agcttgtaggattatggggtacctatcttatgttgtactangtggcggncgggcgatggtgcacaacaagttttncacatccacaaagcgcgcataaacccaccatccccagttgcccacctccaactaagctcacgtactcccacgtaacccatttcctcgtttctctcaacaccgggtccccatcaatcctcccaagcttgcccaacatcaaagtaatacaacattcaaacagcacaaactatcacagccaagaaaacagagcaaaggcagaaaactctgccaaaacaccaaccaaaatcacagtttttctcacttaaagaccccagtaacaattccttcgttccaattcgttaaccggtggatcgactccaaatttttactggaagtctctagtacataagcctaca

SEQ ID NO: 26889 - DNA, 465 bp, Glycine max
  unsure (1)..(465): unsure at all n locations
ctcagcttctttacaagttcttttaagagttaaaaattcttttgaagcttaagctaaaatcaactcacaaatcaagcttttgtccgcaaaaaggtcatttgaaaccatttcaaggtccaatgccttaacggtcttttttaacttttatcggttaaaatgaaccgtttaaaagtctaaaatcaacaccccgcataattttcttgttttttaaagaactacgtaggtctgagttcctcatcacaattgaggatacgtaggagcaagagcctcgcttttgtcaacctcaaaaagataaaaacataaaaaagggaaaataaaataaaagtcatgattttgcacatttgattaaaggtttccatcttttgtgatggacgcatggngtgttaataccttccccgtgcataaataactcccanacctttatttcttanaattcgtagactagctttttggatttctaacatt

SEQ ID NO: 26890 - DNA, 423 bp, Glycine max
  unsure (1)..(423): unsure at all n locations
agcttttgcatgtttatgtatttttagttatataaaggtccaagttccaaagagttctgagagattttgctgtgtgaagatctgtagagaagcgagttcaaagcggaagccgttctgagagcttgagatgagtttgtgagtgattgtgagatcctagaggtgaaggagaaatcctcaccacttgtgtttttgcagtctttcatcttgttcttctcttagttgtaaaggaggtttccggactatggaaagctaaatcctttgttggatcttccctgtaggcacctgatgtaaatatatctctatctatgtaatgatgttttgcgtgttctctgtgttatctgcttttcattccagtgtgattttaccttgatcacgtagatgcatgcttntgtaggatcattcaacaatgggaactggtctgat

SEQ ID NO: 26891 - DNA, 380 bp, Glycine max
  unsure (1)..(380): unsure at all n locations
tattggagtatagttntagncctatgtatctcttattntctcaatttctggacaacagtagttcagttaggtgttctattctggctttgtatcttagcagttagctgtcatctctaactcactcaatggtagttagagctgagctgctctgtttcattgtccataaataccctatgtaaaaactacttgtataggttgaattcattttctcaataatacaatttctctcttcgaattctctctcaactatattaaagctaattntcattttcataatgagtaagataattatgaagtagcagtgcttaccatattctntatttgggcatggcgtctgaaattgacttatttactatggatgggtcacttcttaattagtt

SEQ ID NO: 26892 - DNA, 433 bp, Glycine max
  unsure (1)..(433): unsure at all n locations
caagcttggcgacctgcattcttaccctttcgaggntatcactctcaacactagacaacatgtgtccatgcttgggggctcaaaacactcatcaccctcctacttatcattatcatgaccgatgacatcaaacaatctccttcgacactaaacaacctctttcgtgtgcaagctggctcagagcttagagggcttatgtactctccagagtccataaagtacatgtgccatgctacgtggcactccattaaacacatcaactctccatgtcagccttgacataggagcatggacaccgaacccttagcagctagactccccaaccaacaagttatctttaacctcttatggcttaaatatattgttatccctttatctcttggcaggtattcaattatctatataagtcacattatctgaacggacaatatct

SEQ ID NO: 26893 - DNA, 390 bp, Glycine max
ctcagctaatgatcgttatgataattggtgatgttctgcttattacataatgaatgccttatgttaaatctcgcttagtaatttaatttacggttggattaagtggttgaactgataaaggataaactttcgtaacctaagataagagatttgcttgtaaatcaaggggaagcaacgtgttttaattctgatattttcttattcacatctattcgctgtttaatttacaaaagcaaacaacccccccccccccaattcgttactattttcctattatctgttatgaacgtttggttgaccattgctcgttgggagacgatctaggatcacttcctagatactgcacttttaatgtttatttgattcgggtacgacctcgatcacttttga

SEQ ID NO: 26894 - DNA, 439 bp, Glycine max
agcttctagagaaagatacatgaagctttctctatatttacgctgccccgtcttcgttaaccgatggatcttctcgaaatttggtcttcaacttcacaagacacttgtgcatgatctaacggatctttgagaagatgtctggagtgtgctaaaagcttccgtttccgagagcatctcttatttaagcatttcagcctttgctttcgtgtagcttaagaaaaacgtcatttcttcttctttctttcttccaaagccatttctaaagttccaagaactttctccatcacccacagccaccattagccaccacaaatcatcattgttctccattgaaaacccacaccgagaggaacccttcaaccgaagcggaatcttccaacttggcttgcggtttcggtagagaacgaataccctaatctgacctctcattttctttcga

SEQ ID NO: 26895 - DNA, 361 bp, Glycine max
  unsure (1)..(361): unsure at all n locations
ntaggctgctcaattgctccaggttgctgcatggaagggttaatgtctgtattgtggtcagcagaggagcacaaaccacaaacccttgcgacaggtacagatttctgattcaaggccagctgggttaccaagttgaccaacgcatccagtttgccttcaagcttcttagtttcagatgatgcagatgggtttgtagctacctcatgcactcctctaatgactatggcatcatttctggcactaaactgctgggagttggaggccatcttctcaattaaatttctggcttcagcaggagtcatgtctccaagggctccaccactggcagcatctatcatacttctctccatattactgagtc

SEQ ID NO: 26896 - DNA, 427 bp, Glycine max
gagctttcacctcctacattgagaacaactaccttctctttatagctgcttaatttagggaagaactccttcttatcagaaatcagataaataataatgctgccatcatcagtattactccatccaggcataacctcgcttacagaatcatttaagatgaagcaatcaagtgagtccaaactagcaattttttgaagaacacttgccttgtcatatggaaggccaacaccataagaaattccactatgcgttctggacaggaagagtgttcggatgagagactcagctactggccggagtaaagaaacagttttatcatcaccactttcagccaagagtactgattcatccaataacacccccctcactatacccatctgagagtggatgcagcactaccaaaacagagaatgagacagttatcatt

SEQ ID NO: 26897 - DNA, 449 bp, Glycine max
ggcagagctcaataattgattgggtagagaatcaaacttttatttttcgcttatatgacatgcttttactcatgatcaaaattaatttaattgttgaaatattttataatttacaacaataagtatcttaacattttcagacaccaaatttgatattatatattaagttgttagttcaaaattgtagaagttttaacttaatattctcccatttcatgtttatccacacagtttctaactaataacatgcataaatgttttcaatatcaatgaaaagagtatagcactacagaaagcacactgaaggaagagtaatcatgaggtgcaacatctgtataataagggaatagaagagataaaccaccatcaaaagtcgtataaaattcaagagtcaattctcaaatcaatagcaatcaagatacagaaaatagtcatgaagggtatatcat

SEQ ID NO: 26898 - DNA, 384 bp, Glycine max
actttgagtcatcaagagattttaattatgttaccatggcgtgaatttaaagatataaaatatttatgaatctatctttcaatcatctctcaacatcatctttcaactctttctacagaattatctgattcatttctcttcatctttctaaaagtctttgttcaaacactttgttttccaagaaaagttctttgttcaaaaacttgtgctattcatctttttcattctcttcttcctttgccaaaagaacgaaggactaaccgcctgaattcttttgcgtctctcttctcccttacaaaagattgaaaggactaaccgcctgagaattcttttgattcttccctcccccttaagcaaagatttcaaggactaactgctgaatat

SEQ ID NO: 26899 - DNA, 250 bp, Glycine max
tggtgaaggatggtgagacccaactttgaattatcgctttttctacaacaactgcagcaagacccacgtatctgcggtgagataacgatgttcgattgaagccttgcatctagtatgagagatgatcatggctatgggatagagagaggtcacatgattgaatccccaagaacattcttatcatgtgaagatgcccttctatatagggtgaaacctcgtgaatacgctaagtatgcttggcttcaccctc

SEQ ID NO: 26900 - DNA, 444 bp, Glycine max
  unsure (1)..(444): unsure at all n locations
catgcaagctaattataacttacttgctgttaatatataacaattatcaaaatttaaatattactttaactatatgcacaaaaaattggtgaacaaaaatcattcaaaattattatatatgtacttgtcataattgagaaagaattgtaataaatgcatagaaagaaaaaagagcttttaatttcatttagacatagtttgcaagaaggcggaaaataaatgatgcaaacttaaggatattcatcatttagttactggcttttcatgtataaaatccaaccttggaatagaatatcatacattacacgcataggaatttaattaatacagcacaaaatgtacataacaacaaaagaaattgacatgctaacaagaaaactatgatnatattggtggcaacagtatataagtatgacatactacatataagaccttctattttat

SEQ ID NO: 26901 - DNA, 385 bp, Glycine max
tgacgatgctctcctccgtcttacccagcaacaatcctctatgatttccaaaatcgatgaactcctcatgcgtctcccgcccctctttcaccataccccgtcctctaccacttcttcccaaccttcaccgtcccctgcatcagttcataaaatgaaattagacgttccccggtttgatgggtccgacccttccggctggatttttaaaattaatcaggtttttgaataccacgataccccagcccatgaacgattaaccatagccttgttctatatggaggggagagctttagcctggtttcagtggatgaccagcaacggtcaactcacctcgtggactgtgtttctgcacgctttacaaacccgcttcgccccatcgcaatat

SEQ ID NO: 26902 - DNA, 379 bp, Glycine max
  unsure (1)..(379): unsure at all n locations
agctttgaaaaacactttntattttaaatcacttggccaaacctttgctaattcaattaggaattcccttcctaatattctagtgatcatcttgatgttgtgacttgtaatcttgaagtattgtcttgaattttaatcttgaaaagcccatttgcatcaattgcaacacatcatcatgatcatcatcaaaacatcaaagccaattgcatctacacatgtgtcctccaccttcgagattggagctatgtttcacgattgcctaagtgcggaccctcaaggcaatccgccattctccctttttttttcggagacccatgaatgttattgcctagcgctattcatgtgccctccaccttcgaggttggagctatgtttcatg

SEQ ID NO: 26903 - DNA, 451 bp, Glycine max
  unsure (1)..(451): unsure at all n locations
tgtgcaaatcanatcactcctacatttcatctctagcatgtattttctttctttacccactcctcacgtttggttttttagggaaaaacaccataactaaacgcgccgcaagggatccctatcgcaccagatccaaatctagaacgatgggtgatcaagaggagacgcaggaacagatgaaagccgacatgtcggctctgaaagaacaaatggcctccatgatggaggccatgttaagtatgaagcagctcatagagaagaacgcggccaccgccgccgctgtcagttcggctgccgaagcagacccgactctcttggcaactacgcaccatcctccctcaaacatagtaggacggngaagggacacactggggcacgatggcagccctcacctgggatacaaccgagcggcttacccttatggattgccgcccaactattcaccacccgt

SEQ ID NO: 26904 - DNA, 442 bp, Glycine max
  unsure (1)..(442): unsure at all n locations
agctttcttaagaaaacttccttgtgattattctttgagaaaacttccatgagaagctagaacttagctacacacacccatctaaaaactaagctcacctccttgacaaaatacatgaaaatacaaaaaaaagtcccaactacaaagactatttaaaatgccctgaaatacaaggctaaaaccctatattactagaatgaccaaaatacaaggcccaaaagaaggaaaaacatattctaatatttacaaagaagagtggatccaaccttgactcatgggatcaaaaatctaccctaaggttcatgagaaccctagggccttctttagtagctctagcccaagcctcttggagtcttctatccaatacccatggnggtaggaaacanagganacaaagagaaagcaataaccaaataccaaanaaatcaaattaatactaaac

SEQ ID NO: 26905 - DNA, 489 bp, Glycine max
  unsure (1)..(489): unsure at all n locations
agactcnacggnnnataaacatcatgaacnacgcgacacaagaaactcagctgctagttctatttctagatcaaatccaatatatacattaagtctgctatggaagngacgancaccnttctcaaatcctntccccgcgcacaagagtctctcacaaaggccagctgggttgcccaggagaccaacgaatgcaggatgcctacaagcgtcatagcggcacatgacgcagaagggagggctacttccatagcgcccccccgaaagaccatggccccagatatggcaaaacactgcctgaagcgggagggaacgtcacgatacagctccggctcgcacaagagccttgtctccaacggccccccgttggcagctccatgaactgcgccacatatacgaatgcgccgtaacgggcggcgggcactggtcttaacccaagtagggcacctgcacgaatcgcctagacagtcgatgcgaaggaacacgcagccg

SEQ ID NO: 26906 - DNA, 439 bp, Glycine max
  unsure (1)..(439): unsure at all n locations
agcttgcttgtggggcttctattttgttggatctttgaacttcaatgaggtcctttaatgatgattttccaccatggagatgcatcggaagacaaaggagaagaggtgagaggaggcaccatccactaaggaataagccatggaagaaggagcttcactgatcgaggccgtacccgaatcaaataaacatgaaaatgcagtaactaggaagtgatcctaggtcgtttcccaacgagcagtgacaaaccaaatgttcataatatacttgcagtaacagtaacgattggggggagtttgtttgttttgtgattaaagagcagaacaagtaaactgaaatacgaaactactaatgttaaaaacgggttgtttcctctgagtcagaagccattctcttatcctgngttatggagaattcgtccctaacagtcaaccacttaat

SEQ ID NO: 26907 - DNA, 396 bp, Glycine max
  unsure (1)..(396): unsure at all n locations
actcagcttgttcttttataaaatgagaagttctggacttttactttatctaattatcttggggnggatccaagtgctccgatcatccatttgcatactcatgttttggtggcatactcaccgttgtttatttctttaggaatttcatcataactaagaaaacaccaaggcacccctataacactcgatccagaaaaatggataatgaagagggcgtgcaggaacagatgaaggccgatctatcggccttaaaagatcaaatggcttccatctcggaggtcatgttaaaactccagaaaaccatagaggataaagccacgacaaccgcctccagtacagttagggaagcggagccggtgctgcagcccgccttgaatccgggcctagacagaaaca

SEQ ID NO: 26908 - DNA, 332 bp, Glycine max
agctttgcggatatggtcatcgttgtttttgatcgatgtgggtccgaaaagaggctaatttgatcatcctactatgacgattgagaaaattggggcaaatgaagagggtgagaaagagggagaaacccatgctgtgactgccattcctatacggccaagtgtcccaccaacccgacaatgtcattactcagccagtaacaaacctcctgcttacccaccacccagttatccacataggccatccctaaatcaaccacaaagcctgtctaccgcattttcaatgacgaagaccacctttagcacataccaaagactcccaccctgaggaattt

SEQ ID NO: 26909 - DNA, 385 bp, Glycine max
gcttcatggcttactgaggatggagaagtgcaagtattgaattctgtggagttggatatttccattagaaagtataatgataaggtgttttatgatgttgttcctatggaggccagccacttactcttgaggggaccatggcaatttgataagagggttaatcatgatggtttcaccaacaagatctctttcacgtatcaaggcaaaaagatagtgctcaaaccattgagtccacaagaagtatgtaaggataaaaaaaaatgagagaaaattcttcaagaaaagagagaaaaataaaaagagagtcaaacacttgagatttaaaaagtgaagacaaaaagagggaaacacaagagagagaaaagatgagtgaaacactttgagt

SEQ ID NO: 26910 - DNA, 424 bp, Glycine max
  unsure (1)..(424): unsure at all n locations
agcttgtagaatggctagacatattacatggcgttgtttggnttggctcaaggataaaagggatgccccacattatttccatgacacaaatgcaaaaatgatgatttggaaattttatgcaaaactggtcatgcatgcacctatgcggacactcaagtgtcaaatttttatggtcatgtgatgctagggctcangattcatttcctctatttttagtcaacccaatgtttccaaaatatgttcttttatcaatttgtgcattcatccgagtccattttgggcgtccgggaaaattttcacagcattcacccttcaggtgtatacacatttttcaaaaactagttatgatcagtgaattctttcaaagaaaagttggaagtcatctcttttaaaagcatgttggtttttcagctagacaacttat

SEQ ID NO: 26911 - DNA, 455 bp, Glycine max
  unsure (1)..(455): unsure at all n locations
tggagaggatgcttcaatggagganaagaaagagggagatttagagagatgggggagcacgaaattgaaggaagaaaaagggagagaagttgaactttgagttgtgtctcacaagactctcattcatcaaagttataacaagtgttacacatgcttctatttatagactaggtagcttccttgagaagctttcttgagaaaacttccttgagaagcttctttgagaaaaattccttgagaagctagagcttagctacatacacccctctcataactaaactcacctccttgagaagcttccttaagaagattccctactacaaagactactcaaaatgcctcgaaatacaaggctaaaatcctatactactagaatggccaaatacaaggcccaaacgaaggaaaaacatattctaatatttataaagataagtaggcacatacttagcccatgg

SEQ ID NO: 26912 - DNA, 428 bp, Glycine max
  unsure (1)..(428): unsure at all n locations
ctgcaagctttagactactggacccttttgttatatagttaaattgcactcgtaaacttgatttcaccatatagccaatacatttatattgaaaaagaaataaaccaaagttaactgtgtgaataaaataaatacaaaaagtacacgcaaggaagttgtaatgtaggataatcataaggagtgacaatactttaatgaagcaactaccattaagtgatgaacaaaataaatggctagaaacctgaagcatggtgaattttattttgacaccttgaaactcaagttccaatacagtatcctgaaaataatataaagattaaaatcataaattgcaatgaattttcttgatcctaataaaatagttatgaggatttcaatattattctttctcatttctacctcacaatanaatgcatatgtagtaagta

SEQ ID NO: 26913 - DNA, 442 bp, Glycine max
  unsure (1)..(442): unsure at all n locations
ntntattgtaatcttgaaattcaggacaacactctgatttctgaaatttttgggataaaaatggtcattgatcattcccttctctctgactaaaccaaattacccagtgacggtgtaccatttgaaggtacactgaatgacgactggaaatttgatttctctgcccatgatgcccgccagttggtttgcaccaacaatgtggatatgaccggacgtcttcttgccgggtcattggcttttgaaagccgcatccttcactatttaattgtgcgtattttgcttccacggtcttccaaccttgcccaggtttctgaggaagatctaattatcatgtgggcctttcatacagggagtcaacttgactgggcacacttagtcaaatatcgcatgcatatggcattgcgaataaatgcttcattaccatatccacagcttgtcactc

SEQ ID NO: 26914 - DNA, 206 bp, Glycine max
  unsure (1)..(206): unsure at all n locations
tatgcagtgcactttctgagtatggtgttcttggatttgaattgcgctactccatggccaatcccagttcatcgatgatgtgcgaggctcagctaggtgattntgctaatggtgctcatggcatatttgacaatttcttggcttctggtgaggctaagtggctccgtcacactgggcgtgatgtgttacttcctcatgtgtatgat

SEQ ID NO: 26915 - DNA, 96 bp, Glycine max
  unsure (1)..(96): unsure at all n locations
ggatcttaagcaccgcggctgcagcttctccccaatttctatattattggagaagtgaagtanaaaagggttcagccccttaggcacttctctctc

SEQ ID NO: 26916 - DNA, 395 bp, Glycine max
ctattacggacctatgaaactaagcttccgtccgagagcattttcattaagcttttagcctttgctttcgcgtagcttaagaaaaacaccatttcttcttctttctttcttccaaagccatttctaacatcccaagcactttctccatcacccacagccaccattagccaccacataccacccttgttctctgttgaaaccccacaccaagaggaacccttcaatcgaagcggaatcttccaacttggctcgcgggttcgatagagaacgaaaccctagtctgacctttcattttccttcgagggaaccatggctctacactagtttcttgttagtttcagcttgtctttgtatcttttctaactgtggaaccgtcattgcatgttatacatttc

SEQ ID NO: 26917 - DNA, 440 bp, Glycine max
agcttaggactcaatgaagtttattctttttctgattattatgatagtttatatactgtttttcccttttctcatagttttcacagcagcagaaacttcatccatcacacaatcccagtccctcagttacagaaagaccctagtttccccaagtggaatcttcgaactcggtttcttcaatcttggaaatccgaacaaaatctaccttggaatttggtacaagaatattccacttcaaaacatagtttgggttgcaaacggtggtagtccaatcaaggattcttcttccatcttgaaactagacagttctggcaatttggtccttacacacaacaacacagttgtttggagcacaagttctccagaaaaggcacagaatccggtggcagagctcttggattctggcaatcttgtgataagagatgagaatggaggaaatg

SEQ ID NO: 26918 - DNA, 429 bp, Glycine max
atgaaaggaaaagactcttgcagttggttggaacatatatcgacaagtttattgtttgtcaaacgaacaagagtattactttcttgtaaatgtgtgagaaaatttttggaaagattcaaatgagcaagatatccaagttgcgaaatccagttaggtattggtccttcgatcccgttgtcagatagatcaagatatattaatatggactgatttatcaagaaactaggaattcgtctcaacttacaggaagccaacattatatgcgtcatatgaggaaagggtgacaggtcatgatcatccctaaagtttatatcaactgacaaattgttatgtgagaggcctagttcaattaaattactcagcttgcgaatcttgtccaattgtattgtgccattaaacttatttgacttaagctgaatgacacgaagt

SEQ ID NO: 26919 - DNA, 415 bp, Glycine max
gaagacttaagtaccattagatttgtttttatctttggcagtactcagaagaatatgtagaatgtggttgattacgatgtacttttagcggtatgtatttgtatatgcccatatttgacaataatattgtgattcatgtaaagacttacttatttgactttatttattatacatgatgtatcttcatactaaaatagtattgagattgtatattctctttagtatggcggatattctaattaacggtcgtacacaccacgaggtcctgttcatttatcgcccatcccattacatccgcagtctgtgcactccataccaaactatgtacctactcttgtcagaaaatgcagattgggtcgctgattttttctgactatcatcgactatagcactaattgcaattgtattgccgatc

SEQ ID NO: 26920 - DNA, 451 bp, Glycine max
  unsure (1)..(451): unsure at all n locations
tcgtacagaaaaccgatgttaacttacattaacattggtttttttgtaaaaaaccgatgttaactttcaacattaatatacattttttgggtgtaattcatattagcaacatcggtttttaaaaaccgatgttaacgataatactatcaacgttggtactttcaacatcggttcaaaaaccgatgttaaaagtcataaataaccgatgtagaaatcatattttctaatagtgttagtctcgcacaatgtcctagaaatgatatggaacgaaaacaaatgaaagtaatgttgtatgcatcagttgttgttgcatctgagagctgaatttgtagtatgtcttgaggctacaattcaggctaattggctgcggaactntatttcagggcttggaattgtcgacagtatcgctaggccgctgaaaaatgattgtgataacttcgcatcaatattt

SEQ ID NO: 26921 - DNA, 589 bp, Glycine max
  unsure (1)..(589): unsure at all n locations
tacgcacgtcccactctcctntacaccacactatctcctcgcntttnntactcntcatcnnnnncnnncncaagggccctaggggatgattgccctcgatgnaccctgcgacgcncnanagnanaccngcaagcaagccagcaccnctccttgaaccacccaaanatatactttaactgggcacagcctcactcaaagaggcccattctctagaacaatagggcaacgatctgatacactcctaatcaagacacgatgagagcacccttgccaagggagtaacccaaatctttagatacaaatactctgcccaacatactccatacatggctatcaggcttaaaccatgtataacacccttgaacaataaggacgacctctagctccatgtaaaaaatgaaaccattaaactccctaatgtccctcccaccaccagtccaatttgaaaatcttttactctcctccacctgcccagctgcattaaaaactctcactcccccataacatccctttggcctcaagagcacacacataatacacactaaagattagactctctgccttgcatcttgaaacccacatccttacg

SEQ ID NO: 26922 - DNA, 444 bp, Glycine max
agcttttcgattcattctatgtacccgttgtggtccacattgtgtttcgtgcattttgattctcgttttgtttactttttataccccctgttgacgtgcttaagccattttacttaagtcatttctcgcttaacttaaaaataaaataaatttccaccgaacatttgaattgcattatccgttaacttcggttaaaatcaattccgaccgttcggtcgtgccgtaaccacgttggaaatcaaaaaagaggtaaaaaaataatataataatcaaaaagacatcttttagtaaaataaagcggaacatcaatcggacgttttctctttgggatttctcattcttaatcgaattgattaataactaaagtgaaattaaggctaaaatcaactcgcctagtcaagctcgtccacaaaaataggcttttgaagttcgtcatttcatttc

SEQ ID NO: 26923 - DNA, 202 bp, Glycine max
ttataagcgcgggtctgggagacatatgtcaagaggactctatttgcgaagatgatgattccagaacattggatttggtacgaccatgccctcctgatcaccagccgggaaattggcgagcggaagaacgccccgacatttacgcaacgagcgtaatggcaacccttaccgtattaaagccctagagatgggcctacgctta

SEQ ID NO: 26924 - DNA, 392 bp, Glycine max
agcttactaagctctcagcttgttacattaatttatatttttcccaacaagaacataaacattgagcaccactaaaaacaatattttgaagacaacttatggatcttggtgaagttggggaatattgctagaaagataacattgtcagatagctggattacccatcagcctaagaaaattcatggcgagcaaagcaagttccgactctcttaaaacaaatatttggaagcttcaaaccaatattagtgaagacccaaaattatttaaaacttgaaaaagaaaatcgtgcaactgcaaaacacgtgcaagtgaaacaatggcactagggttttgaagtcatcaagggaaagaaatcgtatgtgagcaagcaacaattgcaaaagaaacacagc

SEQ ID NO: 26925 - DNA, 435 bp, Glycine max
  unsure (1)..(435): unsure at all n locations
tgacggacagtctgctgaaacatcgtaagcttctgatttgtgtatacccatgaaccagaaatgcgcatntatccacagcctctatcatgacttaacccagtgaacgcttgtccacattctgacttttgttgacagactttaattttgtaaggggaattgagacctgaaatggcatataaattgaagtacatatcaccaaaagtatgaagaaagattaaggagatagctcggaagcacttgcatgatagacactatataaaaaaaattaaacagaaagtcaccttataatggactctaacatcatctccatttggggaagagatcttgatggatctatcactgcgaaaggcaactntatcagtggatatgaagagaagaccagcaataggaccagatgtggttgataagtagcattgtgatgctctcaacagcttc

SEQ ID NO: 26926 - DNA, 433 bp, Glycine max
agctgcttgggggctttattttgctggatctttgaacttcaatgaggtcctttaatgatgattttccaccatggagatgcatcggaagacaaaggagaagaggtgagaggaggcaccatccactaaggaataagccatggaagaaggagcttcactgatcgaggccgtacccgaatcaaataaacatgaaaatgcagtaactaggaagtgatcctaggtcgtttcccaacgagcagtgacaaaccaaatgttcataatatacttgcagtaacagtaacgattggggggagtttgtttgttttgtgattaaagagcagaacaagtaaactgaaatacgaaactactaatgttaaaaacgggttgtttcctctgagtcagaagccattctcttatcctgggttatggagaattcgtccctaacagtcaaccactt

SEQ ID NO: 26927 - DNA, 267 bp, Glycine max
aagtgctccgatcatccatttgcatactcatgataaggtggcataataaccgatgtatatttatatacgagatgcaacatcactataagaacaggcccgtccatctatatgactcaatccagaacaatggttaatgaagacggcgtgcacgaacagatgaatgccgatctatctgtcttagaagatcaaatggcttgcatctcagaggtcatgtgtaaactgccaataacactagaggattaagcctcgacacgccacttcattaca

SEQ ID NO: 26928 - DNA, 437 bp, Glycine max
  unsure (1)..(437): unsure at all n locations
agcttactttaatttatctaactacaaaattttcatttttaagtaattaagccatgcatttcacgagtgtaagaagatatatatatgaaaggttttggttggtttagttgtcaaagcataaaaaacgcacaggcacgcatctttgatccctcttcatgcttattttaatttatacatgtgaaccatcatcatccaaagtgacgatgaatttaggtaggcgcgggtatcaaatatacacacaattgaatattgttaataagctagatgttatcttatttggttcactaatctagtccttgtagaaaataaaaattatagttaaaaacaccaattgggcgtcaggatatcctgactgctgccattgngcgaccagagcaccctagccgtgtttgtgctgttggagccggtgtcaccatatagcaatactttggatcgac

SEQ ID NO: 26929 - DNA, 401 bp, Glycine max
attgaattataacgttcaataactgcttgttatctattaccatttatgtgtaatcgattacacagtgcaaattttgaattcaaattttaatagctgttgtaaatcatttttggccactggtaatcgattacatcttctggtaatcgattaccagagagtaaatctcttggaaaaaactttttaacttaaatttcttagccaaaccttttgctacttcaattggaattcccttcctatttaatatacccttcctaagactctagagactgtcttgatcatccatcttgaatatctttaatttctttgtcttgaataaagctatgagaagcatgtgatcctttggcatcatcaaaacattcagcttgatcctttgtctacaatctccctctttttgatgatta

SEQ ID NO: 26930 - DNA, 430 bp, Glycine max
agctatgctgcatggggatcaactttattgtacttggccttgaacctctatttgataccagatcaacggactacagatactctgcacagaaggaaccaattgaaggtccaaacatgtgataaaacaaaaatgtatctgccacacacttttctgccacgtggcaaacaatcaacggtcaatttccctttccactgtccattttgtctttagccttagcgcaagtccatgcccacctcaaactttcttataagtttaatcactcagatataaatataaagagagagagaaaagaagaagctatcaacttattagcaacaatgagaggccacaattgctctcaaatcctgaaaaaggttaaaactcgatgacccttatcctatcttcttctaaacaattatacaaaacaatatatcattctcttctctataac

SEQ ID NO: 26931 - DNA, 530 bp, Glycine max
  unsure (1)..(530): unsure at all n locations
tctcctgtcatataacgctagaatagcgacgaactagacacacaagaatgctctgtgctcatgacagcggcctacaaactcagctgcgagacaagtggggggaccggtgctgtttgtgtcgacgacatgaccctctgaccaactcatgaaccttaatcgcgcgagactctcgaggaattctcacgagatggcgatggctcaaacaggcagaaatgggacatggtgctcaagtaaaaggagtaacgggcgtgaatgataacgtgcgtagatgcgttgcggtgtgcggatgagacagacggtggagaggacaggaatatggtagccattgatgagaagaagaacacgtatgtgaatgcaatccaggctgaggagcaaaatcgcctcgatgaatataaaaacgaagactcaactcaacatagtagacatctaggggacccgaattgcaacancgccaatatgagatcgaaatacgtcgttgactcttacaatacctagatgactatgcgtaggtaccatgaactaaccctccg

SEQ ID NO: 26932 - DNA, 359 bp, Glycine max
gacaagtggactcagatatcttaagaaggggggggcagaattaacatatcacaaactattccccaattaaaaattctacttttaatttaacccaacaacccaagattccttttaaacaagaactcctaaataataatgcaaattaatcttactaaataaaaataataagcactaaatactcaagaagtttaagggaagagaaaatgcacactcatatttatactggttcggccactcccttgagcccaaatccagtccccaagcaacccacttgagagttccactatcttgcaaaatccctttacaagttctgaaccacacaatgacgacccttcctttgtgttcaaattttgttacaa

SEQ ID NO: 26933 - DNA, 446 bp, Glycine max
  unsure (1)..(446): unsure at all n locations
ngnacgcttaaggtgggatatgatagtgagactcttcttgtatactattcttgtgctacaacaattactacaagacccactatccacaatgagataaattttgttgtttaaaaccttgcatcctgtatgaaagatgctctctctgtgggtttgggttaggacacaagattgactcccaaggagccttctcactattagaagatcaccttctccatcggggtaaacctcttcaatatgctcatcaaccttggcttcaccctcactttcacttgaagaaggaaaagaagtagcctcctctcggctactatagatgacttgacccctcatgatcaacagtttcatcgtgggggcattgagaagcaatatggcctttaccaatacatttgaacacttgatgtactacattaacttggaacaacctggagcgattcctcatgttttaccct

SEQ ID NO: 26934 - DNA, 442 bp, Glycine max
  unsure (1)..(442): unsure at all n locations
agcttgacttaaaaccaatatttttttttctatcaagccactactggctataaagaatcaacaagattttttgaaattttgcacaccgactaaaccatgtgaacatcttatagatggatatatcactcaatagttttggtcttttctctcaaggtatacaaggtgtcttgagagctttgtatctttacaagaatttacagaaagatttacaagaaagaatgaaaaaatgattcatgtcttggttcttcaatgcttcttctatatatagatttcatctccaagtattcattatctcttaataggtgaattctttactttgttcttcgtctgaggccttgagtttgttgaggcatttaatgcttgcattatatgcatgtacattcttcatgcaaagttcatgttgataggatagtgtgtcttggacttcancaatgaaatcact

SEQ ID NO: 26935 - DNA, 438 bp, Glycine max
  unsure (1)..(438): unsure at all n locations
tggacaaagaaagtgtcatcatgcaaaaaatgtgaaacattactacaagattcttgcattacctttcacctgccctagtgcttacccaaattggtgtggtgttgaccatcactcaaaatgactctttattcatcttccgatttgtaggatcccggatgacaagatgcaaatgcatgcatgtttatgatcaaatgttaaatataacaattaaataggtgttatcatgttcaattntacttaaatgcttacagaaccccgttgatcgagtgttagtggatgaatacgactaacttttgtgtataaaacttgtgtatattgtatcaaacttctccaacttatagttggtttataatattataagtactttctgttaaatataggtaatagaataattatacttttgntntgtgtgtntaataatcaatttctctcaatttc

SEQ ID NO: 26936 - DNA, 422 bp, Glycine max
agcttgaggaatcatatgtaactactatttacacaactattgctatcaaactacacacatgagtctgcttagaggtaagggacgagtgtatcacaattgagattagagtaaacatctgtagggatgcttagaagatcaaattggggttaatattggggtgttttatgcattttaatttttcctgtacaatgataactacgaattactcatgtttgacaggtcaattgatgccctgatacgaattggatggtttaattgagtgtttgactttgaatattagaaacctagaaatttgggaattcttgattcttgcatgtcttctcataattgattgagtagttttgtttccatgatgtgatgacatgtattgtgctatatgtttcgcattagcgtgtgtttcgatgtctgaatagtgctctttt

SEQ ID NO: 26937 - DNA, 392 bp, Glycine max
  unsure (1)..(392): unsure at all n locations
tagtacttggaatttggactcactgtcgtttagcctgtttatgcaaaggcaaanggnatctatcttaggacacaccctattgagatttgtgtagttggtgcacattctccatttaccgttggcctttttgactatgacaacattggtgagccaaggagagtaactaacttctctgataagttgggccttgaggaacttgtccacctcctccttgactgccttgcgatgctcttctactatctatctcttcttctgtgacactggtttggcctacgggcagatggcatgcttatggcttataatgccagggtgaatactcgacatgttagatggctaccatgcacataggaatgcatttctgtgtgggacattagctatgcgtttatgcctat

SEQ ID NO: 26938 - DNA, 383 bp, Glycine max
agcttgcagacagaatagttattttattcttttataggcgccgattaatcaacttgccaactgatatagcatgtagtagaggacaaagcatttcatgaattacaatacttttgtgattacaagaatgatttctttgagacatgtacttgagcaaccatccataccctcagttgctagaagttaatgatgaatcaatataagtgaaggataattgtgtgcacagaaaacaatgctgtgactatataaaacaatgcatacactcgagtccaaactccattaatgttctggacatttaggaggcaatatatcgaatagcggcagcgttcaaatggaaaattattctatttataaaagatatatgttgacatacacctttgaaacta

SEQ ID NO: 26939 - DNA, 499 bp, Glycine max
  unsure (1)..(499): unsure at all n locations
tgccagcatgattgcctcanatgacngccattgcananacctgacactaatggatgcccgacttgaagatgattgcatgaggggctttgcttgtggccctttatgcttacatcttanagacttcctggaatcgcatattgaaacttttgttatccatacaccttcaaggtctctgtctgtgtaaaacaacgcatatctggcttcctaaatgtggtctgtagtccaacccatcttatgacccttagaataatcatagtcggcctacaccgttctaataactatcacgtcttcatattgatccgtccggctgcgtgccaaattgacaacagttttgtatcctaactcttacacctaatgtggcatccatgagacttacttctctgtgattatggcggccggatgcaaccgccactttccgcaagagaatttcctacaatggtatggctgccaagatcccatgaccattgtgcgtaacccaattcaacgtcaatctttggcg

SEQ ID NO: 26940 - DNA, 579 bp, Glycine max
  unsure (1)..(579): unsure at all n locations
accaggccaacactnttcacttaacacagaacgnataaccaacaagnttcactactancccacnnnnnaaccacacaggaattgaggcactgcagcacccggcgacnccnagagacgaccngcacgcaagcaagcnnangcgacnacggaggacacagcatacgcagaactaggaggcgggcgagagaaggagcacaacagaaacaccacccacacgcaacgcgcgagaacacaccacgcacggcagcacaccgacaacggaaacaacaggcacccgcggaaccaagacccagagcgcggacaacacccggagcccaacaaaccccccacgcgaccccaacagccacacagacggacacacaaccaacacacacggggaccacccaaagaacagggcgaaggcaaataacccgggccaaaacaccagcaaaaaacgcagcgcatcaggaaagcacaccccagtaacacaaccgcggaaccaacacgcaaaccggaggaccgacaccacaccacgcancgcgagcacacgccacaggaacccacacaacgacggcnggaccggatagcacagaacagaaa

SEQ ID NO: 26941 - DNA, 501 bp, Glycine max
  unsure (1)..(501): unsure at all n locations
cttgacccattgaatgacgngcnattatagaatactcacgctngngcgcattcgacagcccgttgagggagcaccacacgtatattattacngggatatcccgccgggcggccaagagtcatggacttgcttgtgaacaaccacaatatcatattaaggagatccagctttgccgggccaccatgaatccacctgatgctccagaaaataacatacacctaaaggctaatcgcaattgatggagggagacgcaaacaaccgacgtgactacctcgcgcccagatccatccccaacaggaacgaccctacgagactgtcctcggataaaacatggcgacatgtaagaccactaccatcacaacagacatctcaagcacctacccaactgccgtgaagagcctgtctgaacaccaggaaagaagcaacaattgggtgcaagtctgacatactacagacgatggtacgacacgttggacagatgacactaggacccacaacacg

SEQ ID NO: 26942 - DNA, 438 bp, Glycine max
agctttgaagagctgagagagaccggtttatagtctaaggcatgatattgggagacaagttgaaggcttgctaaaggtccaaaaggagtttgtctgaacaattgagcaagaccaaaaaaaacatatgggcaatcattgaccaatacaaaaagaagctaagtctagcggtaacccatgaacaaaagcgagagggtgagtatgcaaaggtatcagtcctgcaagcagaaagggaagcaagagagagagtgatcgattcattacacatagaagcaatgatgtggatggataggttcattttcaccttgaataggagtcaagaacttccaacactactagccaaagccaaggcgatggcggatgtgtactcggcccccgaggaagtttatgggcacctcgattcttgtcagcacatgattgatttgatggcccacataatta

SEQ ID NO: 26943 - DNA, 417 bp, Glycine max
cttgaatcccagtccaaactctcttacaaaatctgatttttgtttatttaggtggccttgttcgtgcttgtatgcttagcgcatgtatggaccgcttagtgcacattagtgatttttggtttagtgcgcctttctcgcttagcggatgaactaaagcggtgtgcttagtgagatgaagcggtgcacttagcgaagctgtacaactcatcttcttccagagtcttcctcactgtcataccttaattttgtccggggaccatctgttgttgggatgcgaccctcgtttgaccacttcgaggtatttgacacccatcgttatgcaatttgtgaagttccgagacatgccggatgccaaaagagaagcgttgtagcataatccgtgaaatttcgtgacatgccggaaattaataggaagtg

SEQ ID NO: 26944 - DNA, 394 bp, Glycine max
gatgggcccccagcagtgttcacagcaaggtgccactcccaatcaaactctggatgaccccacaaagcctggcaagctgccttatcaagtaaaatctaaaaaagatccccatcttgcatttatgaaccaacaagaaaacaacaattttgtatgtaagttttgaattatgattggatgaaacagggcattaagatccttaatgggagaagagtggtagtgtatataagttgctcttttccaacttccccagtccatataaaaagaaattagaaaaacatataactatatggaaataaatacatctagcactgtatcgaaaccattagtagtgactatatccatgcccattaaagagcaaaccaggaagaatattctctagaggataatattacta

SEQ ID NO: 26945 - DNA, 199 bp, Glycine max
gggcttatggacgacctaaggaattaatgaatgcattggctccattgcttgtgttaaatcatgcttacaattgatattctacatgcaacgttatatatgagactatcgagtattctacgactcgaaggctgtgctggatcagaccaatgcagacgtgtctcccagactgcattatgcaatccagcccaccatatgactc

SEQ ID NO: 26946 - DNA, 407 bp, Glycine max
  unsure (1)..(407): unsure at all n locations
agcctaggaattaacatggaaataaattattttgttgcagntgntgnctatagcaaataggcttgagaaatattgaatgatatgctattggatatcctctgaagattaaaagacattatctccatctttgagaaggctaataattttggtgacacttcttaacttggtaaccttatggaaataaacagtatttttgtcaccgaggctaaaccaattgaggagagccttctccctccaaaaggattcctcaaaggcaagggcatcttgaaacttatgttgggcttttgactctaggaaaaccaactcttctaaactaccttcaagataaatcctntactgaaacattgttcaccctctccatagcaatcttataactcctattgacatttccaaagacctcanaattc

SEQ ID NO: 26947 - DNA, 349 bp, Glycine max
cctataaaactaagctatggctaattcttagatggtaaagctaaaattttattttgcaaatcaacataaaattttgatacattataaaaaaatagtataacaataaatattaacaaaagattattgcctatattaacttaaataagacaatatataaagcctataacactttttgaatggcctaaaacctagtctttttaatcaaataagctttcaaaaaagccctagcctatgtagttagtaaaaaaggtctggcctagcttggcatgatgtaggctagattgtaattctctgttgagcagactaacatattttcacccctaactaaaaaaaacacccccaactactg

SEQ ID NO: 26948 - DNA, 411 bp, Glycine max
agctattcttcaacaaacaaatcaaaatttattttctgatcttcaaaacctagctccagcttcctcttccccatatcaactatgcagcttgtggtcaacatgaatggttttcccaatattacagggatgtcagtatcttcagagatatccattaccataaagtctgtcgggaagataaaatgttttactctgaccaacacatcttcaattactccatatggccgggtaatggagcagtcagctaattgtcaagacattcgagtgggcattatttccaactctccgaatcttctgcacatggagagtggcatcaaattgatactagctcccaaggcaataagagcttttcccacattgactctgtcaattgaacaaggaatagttacactcctacgaactttatgcttgggt

SEQ ID NO: 26949 - DNA, 398 bp, Glycine max
tgcccacacgtactgtctcgtggggggtatgaactgctagacaagaaacttatggacgagaagagcaagcgtggacatgacgatcattctgggtctgtatgccccacgctcaatgtcgacccgcgatcctctgttgcaagacacttgacgcggaagatcgactgcactaagcggcatggccaaatgacgcctgaagtggctcaggatatagcagacacaattgcgagttcatatattatgttggttactgtcattggcaaataatcggtagcaaacctatgcgaatttatattatgcgaagtcaacgattggatatccatgccggattcattacaggagcaagcttcacatgggagttgtgtgcgcatgggcgacatgacatacttaacacatccctt

SEQ ID NO: 26950 - DNA, 348 bp, Glycine max
tgaatatcaatccctcacatatattatcataagactttgttactttttatgctgctttcttctttggtgatgctgtttgcttcttaaaaaagagaaccctcacattttttctgagaaaccatatcctcagtttctgaatcaaaacatgcgcagttagaaagatgaaagtgttctttgttttaatgcctgtgaggggattagactgagtggatatttggaggtcactacgtttttgttctgtttaaatgaacttgcagttactgtgatgtcctcctatatttcccgagtgagaatatgatctgtgtttaactattcctacaaaaacatacactacgaaacagtcctgtg

SEQ ID NO: 26951 - DNA, 237 bp, Glycine max
gatccttaagcgacctgcggctgcagctttgaatactaaaacttgatatgtggttttggaagctgttgcttttgaatcgaaaggaagacatggagatgctttataacgagttaacgaaggaggtggtgacatcctatgaagcaccaacaccgacacggacaccggacacgacacggacacggacacgtgaatacctgtaatgtccaaaatatagaacgtagtacgggtgtcgtgtct

SEQ ID NO: 26952 - DNA, 414 bp, Glycine max
  unsure (1)..(414): unsure at all n locations
tgtgcttacatataatttcaaattgcttaaataactttaattatatatttattaaattattctaatataaatataaaaaaataaaaaaatatttacttttagtataaacatgctttaaaaatatttgttttagtatgataatatactttaaatttgtttgtttttaattaaatttaaattttgtttttgtttgttttagtatgaatatccttagaaacatatacccgcataccaacatatatatatatatataatataataatataagaatttataaattgtaaatttaaaatcgatgtaaaacatgtgttattatattaataaataaatatcaacggcttgcattatgatttngtatgtgatccccgcattgctcgcttatttgttnntccgtgtctcttcttttttctcaac

SEQ ID NO: 26953 - DNA, 417 bp, Glycine max
gcacctgcagcatgcagctagtgagagattaacgatttttttaattttatggcaagcgcactctgatttcactagagcaggctctttgggtatcaatcttcatgcagctaatcgagttggtatagttgatgggtcttggaatccaacatatgatcttcaggccatctatcgatcatggaggttagagcctgttactttatcccttaatcaaaataagttgccttctgatttaaaaattatctataaaacataaagtttagaatgcgatgcgactgtctcctttacggagaattcttcattgagcacgatcttagctcattgcctttttagaggggtttcccttatttctaacaataagacgtgatagttgagaccttcactccttattacgcgaccgccacattctctttattcttg

SEQ ID NO: 26954 - DNA, 250 bp, Glycine max
  unsure (1)..(250): unsure at all n locations
tctcaattaagtaggagtgggagtgaccttangctttggtcncttcctcttcttctcgaagctaacacctctcgcctttgcctgaaaatcgcgaacatcgcgaaggtaaatcctgaccgcgcgtgcgccgaatgggttggtctccgggcggccgccgttcttctcgtaggcggcgccgaagcggtcgatgacggcgtcgaagctgccccaggcttggcggagcgggcagggacatggggcaagtgggttg

SEQ ID NO: 26955 - DNA, 336 bp, Glycine max
agcttccacaacatccaagtaactcaattttcaaatcatcacaaactaacaaaccaagcaaaacagggcaaaggcagaaaactctgcccaaaactcaaaccaaaatcacagctttttctcacttatagaccccagtaacatttccttcattccaattcgttaaccgttggatcgactcgaaaattttactggaagtctctagtacataagtctacattttgaccgttgggatctactagcaaacatccagaactcattctgcactactcttcccacagctaaccacagacaagcattttcctgcacttatgcaaaattctgctgcataatttcaca

SEQ ID NO: 26956 - DNA, 397 bp, Glycine max
  unsure (1)..(397): unsure at all n locations
ctttgcttggaaaccaacactagattatattccctgngttttgtaattatctcacaggaatacaatcaatgacaatgaagtattgtgtgtgggatgtgttttgattgtaaatatgcttggcacttgttctttgaatgcaatacttttctctagagtttggtgcgggtactttacgtggtggggtattcattctgcacaatatattgactctccttctaacttcatgagatatcccttgacaaattctccaagatctttttcatgtttctctcctccttttcatatggccaatttaactacaatacaatttggtatgaatggatagaaagtgtttggaatggtttttttttaagtaatcaacgtacgaataggaaaagaaatagatagaatcttttat

SEQ ID NO: 26957 - DNA, 169 bp, Glycine max
  unsure (1)..(169): unsure at all n locations
ccacacgctcgaaattgaatgttgaagcncatgagctgttgaaaccaccataaagttttaatgtgatgccggatagagcaccttatcgtttctagacgctccgaagtcgaatgtagaagctccgagctaattcaaacgaaagtaaattgtactcgatgtctgattgaat

SEQ ID NO: 26958 - DNA, 364 bp, Glycine max
  unsure (1)..(364): unsure at all n locations
agaaactcagcttaacattcacttcgagcgtacgttatattatatgacttattagacatccgcgtaaaaagttattggcgnttgagttggctcagagcttcaacattcaatttcaagcgtctcgatatatgacgggactcaatcagacatccgagtaaaaagttattgtcatttgaattggctgagagcttcaacattcaatttcgagcgtctcgatatgtaacgggactcaatcagacatccgagtaaaaagatattgtcgtatgaaattgctcagagcatcaacattcaatttcgagcatctatatatgtgacgggactcaatcaggcatccgcgtaaaaagttattgtcatttgattggct

SEQ ID NO: 26959 - DNA, 518 bp, Glycine max
  unsure (1)..(518): unsure at all n locations
agcacccccgggggttgattgcattgagtgacatcgtagaanncncggagannanctagaggcgaccagcaggcatgctagcgatgactaacgnatctttctttcattgtttgagangcacaccgacacaaaacactgttttggcgctgattactacgaagcccaagcgaggatgaacagcacggagtgtttgtgattacactatggtgggaaaccctattctgagggtgctcactctcattgtacggcgagacacattgccgactttgacctgataaatctggcgcgtttgcgctgcaaatgcactttagatatgaatatcttgcagtatagtattccgtacaccatcttatgttactcttatatagaaagtactggatgcgtgatggctcgtgctatatgacattgtattctgtgaacgaatatttatatgtgcccacgatgacacttcttacagaccacttacctacgtatgtgtagctaccacatatcactgtacatattagcggcacctatcg

SEQ ID NO: 26960 - DNA, 440 bp, Glycine max
  unsure (1)..(440): unsure at all n locations
agcttgtaggattatggggtacccatcttatgtggtactaggtggcggtcgggcgatggtgcacaacaagttttccacatccacaaagcgcgcataaacccaccatccactgttgcccacctccaactgagctcacgtactcccgcgtagcccatatcctcgtttctctcaacaccgggtccccatcaatcctcccaagcttccccaacattcaagtaattcgacaatcaaacaacacaaactatcacagccaagaaaacagggcaaatgcagaaaactctgcccaaaacaccaaccagaatcacagcttttctcacttaaagaccccagtaacaattccttcgttccaattcgttaaccgttggatcgactccaaaattttaatggaagtctatagcacataaacctacantttgaccgttgggatctactagcaaaca

SEQ ID NO: 26961 - DNA, 372 bp, Glycine max
tgtgtgcattcaatatcctgatgagggtgttccatatgtttttatgactggactttacatctgttgcccaagtttcatggtcttgcaggtgaagatcctcataagcatcttaaggagttccatattttttgttccaccatgaagccccctgatgtccaagaaaatcatatctttctaaaggcttttcctcatttctggagggagtggcaaaagattggttgtactaccttgctcccagatccatctccagctgggatgaccttaagagagtgttcttggagaaattcttccctgcatctaggaccactaccatcagaatagacatttcaagcatcaagcaacttaatggagagagcttgtatgagtactggg

SEQ ID NO: 26962 - DNA, 435 bp, Glycine max
  unsure (1)..(435): unsure at all n locations
agctntgcctttagggcttgtacgtcatctctttcttccaaagctttaacctcattgtctctcacagtctttagatttgggagccaatccaatccttgtgtccggactctcagccacttatgatagccgccgatgatcccattactgcttcccctaagctctctgtcctttcttcacgccgcatcccatgccttgcgaactccttggagtaccctagcattgtggtcactgaaacctcgtgcgatgaaaggcgtgatgctttcgtctgatggtactcctctcatgggacatccttcgcatgaagatagaatcctgattcttccttccttctagcgagggaaccatttaacagacgcccctccatgctagccaagagttggtcccaattcgtctttcttttttcgacgcacgagcggtgaccttgtagcggataga

SEQ ID NO: 26963 - DNA, 447 bp, Glycine max
cgaaagagcccgggtagtcaaagagaagttcaagtccattttcatcaaagtctgaagagagtatgatgaactaagggacgttaatatggccaccgatgaagccttggaatgagaaaccaagaaggcccgaaaggaagaacacgaccaaaacaagttttgagggactttatagggcagcaatagtgagctcaaactctgaagaggtgaaaggaatcatcatgggtcaaaggcatgatctggaaggacgagctaaaggcttgccttatgtcgaaaagaaatttgtcccaacagttaaagtgagactgaagggaatatgtgggccatcatcgatgagtgcgtagagaagctaaatctagcggcaactcacgagcaaatgctagaagatgagtacgcgcagatatcatcacaaagggaagcaagggaaagggtaattgattcatttcacca

SEQ ID NO: 26964 - DNA, 425 bp, Glycine max
  unsure (1)..(425): unsure at all n locations
nctttttccacagccaagacatcccgaggaaaatggttattgcctggattatactacccggaaccccaatgtgacatgcacagcacaaaaggtattcgtcgttcgaccttttcttatagacttctattcctggaatatcgagcatcttcgattatactaacgggacacaaatcggaccatccgcattaaaaagttattggtcgcttgaataagcaaacgagctcctggtctgaatttcaagcggccttgatatactacgggacacaaatgaacatctgagtaaaaaagtattgtgggttgaatttgccaaaagctatgttcttaaattacagcgtcacgatatactacgggacacaatctgactttcgagcgaaaagtatagtggtagaatagctccagcttcatttaattagacgtctgatcac

SEQ ID NO: 26965 - DNA, 421 bp, Glycine max
  unsure (1)..(421): unsure at all n locations
acagcagaatttagtaatgacccactaacctagaatttatatttcttaatgctcattaacctagggaattaaaacaaactaaatggctgagtgtaactgaaattgttggcaaccaaaagtcacccccaacagccaacaagtcagccaccatttggtctcccaaaaggctgatgcctaggttgccaattgggcccttattacaacttgaactaaagcccttttagttgattaacccaaaacatatttttggtcagccaactttacaaggattgggccattatttagacaaactaaacactctaaaattgaaataaagtggtgtcatttagtcctccatttgggccatgatacaactcacaaccttggactnttctncttgaaacttgggcttgtattcaaatagtatggacagcacttgttg

SEQ ID NO: 26966 - DNA, 434 bp, Glycine max
  unsure (1)..(434): unsure at all n locations
agcttttgagcgcatgggttctaggcagtangttttctcgcttgnatctctttggtgagtgattgtactgaacgtgtgttcaagattaaaccagttaggctattaatcttttgttcctgttttcttcctgtaatgtactttggatatctaactntaatattatttccattctaacttgaaggagcagctgtcttaggggggttatgtctgtattggttttgctttgagtctatctttatgttgggtgggttaggcaacttgccttatatttttgtatcctatttccagtacacctagtactgagttatatataataatatatgattcttgctgtgcaaaagaaaaaatattatttccattcttatattatgagttgacatttctcaattagggtgagacagaatcttagaacacantgttgggacatagatgct

SEQ ID NO: 26967 - DNA, 350 bp, Glycine max
  unsure (1)..(350): unsure at all n locations
ctaagcttactgcacatanaatatataacttgatattagtcttgttttcattaaaactaaaaataaattaagcataatgtttgaatgtggctcaaatcaagatcggctaacactttactataactgaaatgtgaaagacaccgtaccctaccaaaaacgaagacacgttataaacatagaccctttcaaggaatacattttcacttgaagcacttggcatccaaaagagcctcgccctcaaaacgatcataatcttcaatcatctgattgacacgctccttttgagcttcatcatagatgtcaaccttagtccattcggatagctccatgtcatagcattcatcactcac

SEQ ID NO: 26968 - DNA, 435 bp, Glycine max
  unsure (1)..(435): unsure at all n locations
agcttcctcggggccattttctgcgaacgcaaacatttggaaagttagttttaccaaggaatgctactcttaaaacaaaaatggcatncaacctcctccaataaatacaaacatcaatgtaaatttagagcaagcttatgcgcatacttctttacgaacattcacttgcacaagacattcttataactaagaaaaatgcacccatatacaatcaaggcaccttcgttacctagattatttatatgtacttccaaggtgtatttgttacctacatctcctgcacttccttggctaaatttacatacatgcgtactcaaagcanttggggtaccaaaaattgcacatgtgcacattccggtatttctaatacttatgcatatacaaactttgtgatgaatcttggctatctacacaataaggtgatacatttcatgc

SEQ ID NO: 26969 - DNA, 350 bp, Glycine max
  unsure (1)..(350): unsure at all n locations
cacgaaattntatgcctcaagtgaggtctaaaatctgaagtgtggttctcaaatgatcaaagttgaatgacaagctcacacatgacctctatttatagcctcagggtgacacaaaataagaggggaatttgaatttctattctaatttcacttgaatttgaatttaaataggtggagccaaatttggagccacaatttcactacttatgattagtgaattttagctatgattcaacccactaattccagatcaagtccaagattcttcactaagtgtgcttatgtgtcatgaggcatgtgaaacatgacagatatgcacaaagtgtgactatatgatgttgtaatgggga

SEQ ID NO: 26970 - DNA, 375 bp, Glycine max
  unsure (1)..(375): unsure at all n locations
agcttcatgatgatgaatcaagtttgttttgtagttntgatgatgacaaagatgatgacaacaagcccaagagaatgatttcaagattgagtcaactagtttcaagaatcaagagaagtttgatttcaagattcaagagaagatgaattcaagattcaagagaagaaatcaagaagacttcactagggaagtattgaaaagatttttcaaaaaacaaacatagcacagttttgtttttcaaaagagtttttctcacaattttctaagttaccagagtttctactctttggtaatcgattactagtttcctgtaattgattaccaatggcanagtttgatttcaaaagttttcaactgaatttgtaacgttcaatt

SEQ ID NO: 26971 - DNA, 251 bp, Glycine max
cgcccaggattcctgggctggcaggtgaataccctcgtaggcgtggtagagagctccatatttatcggtcgcccctgtatcccactgatgtccgacaccttcgtatctttctaagagctgtgcctcatacttggagggagtggcgactgagtggtctggctaccttgatgcgaccatgcgtcacagctgggatgaccttaatagactgatcttggacatatgattgcctgactctaggaccacttgcatcc

SEQ ID NO: 26972 - DNA, 437 bp, Glycine max
agcttgaaggtgtgactctatctattattaacttccttgagaagctagaggttagttactcacacccctccaatagctaagcttactcccatgccaaaaatgggcttggcttcttgggtaaggaggtggctaacattcatgtggcttggggagtcccaagccctaatgaatcttagctacacacacctacaatagccaagctcacccgcatgcctaaatacatgaaaatacaaaaaagtccatattacaaagactactcaaaatgtcctgaaatgcaaggctaaaagcccatactactaggatacccttaacttgtagggtagggtgtccttaatttgtagggtatcctacacacctaaaatgaccaaaatataagacccaatagaaggaaaacctattctaatatttacaaagaaaattggacctaaccttggtcc

SEQ ID NO: 26973 - DNA, 371 bp, Glycine max
  unsure (1)..(371): unsure at all n locations
cttgatgaanagttggctcactcgttgttttctatagcaatatgtagaatctcaaatttaaagaaagcctttttgagttgagtagccatatggtagtaccttgtcatctgtggatccttgatatgatattctccattcaacttaccagtgataagcttggagtcgctccaacactttagatatttagctcctacttctttagctaatctcaggccagctaagagagctttgtgctcggcttggttattcttggtttcaaactcgaaccttagggactgctctaggattacttcatctgggttttttgagataaccgtagctcaactccctttttcattggatgaactatctacttacaacttccaccactc

SEQ ID NO: 26974 - DNA, 407 bp, Glycine max
ttaagtcacctgcggcatgaagcttttttgttcggattgcctatatttttttatggagttcggctaggtttcttcgtgcgagctcaaccgaagttgtatttcggccgacgccggcattttgtcggtcaggaaaacattagcccacctcggcaaaaaaaaaacatgattcaccggtattgacagaaaaaaatgctggccttagtcggccaggaaagatgaccgatcgaggtctaaaaaagaagcatgaccggattacgccgatcgaacgtttcctaatagatatcctccaagtattattcacggattgaatggaaaaaacaatagccgacatcggtagttaaatagccgtgactgatattttttagccaacattgcgcaacgttttttacaaacgctggtcgatatat

SEQ ID NO: 26975 - DNA, 399 bp, Glycine max
  unsure (1)..(399): unsure at all n locations
tcagcattcaattntcagcgtctcgatatattactgtactctatcagacatgagagtaaanagttattgtcgtttgaatttgcaacgaccatcaacattcaatttttagcgtgttgatatattacgcgactcaatcagacatccgagtaaaaagttattgtgatttgaattggctgagagcttcaacattcaatttcgagtgtttcgatatattctgggactcaatcggacatccaagtaaatagttattgttgtttgaatttgcttagagctttggtattcaattntgaacgtctcgatatattacgggactcaatcaaacatccgagttaaaagttattgtcgtttgaatttgctcagagcatcaacattcaatttcgagcgtgtcgatatattacg

SEQ ID NO: 26976 - DNA, 352 bp, Glycine max
agcttgttcagaacttttgtttattttaacaagcttgttcgcacatcgttcgcgtgtacgatatccactcgacaaggtttgaagtagaggagaccttcaatcctataacgcaacgtggcggacaaaaatgggcagttaacttgaatggccattattgtcaatgcggaaggtattctgcgcttcactatccatgttcacacattattgcaacttgtggttacgtgagcatgaactactaccaatatatagatgttgtttacaccaatgaacacatcttataagcatactccgcacaatggtggcctcttgggaatgaagcggccattcctccatctgatgaggcatggacact

SEQ ID NO: 26977 - DNA, 267 bp, Glycine max
ttcttacgactctcgctaaatgttattgtctgctatacactcatagaatcatcgagcccatataattaaattcctaggttcaaagttcaaacggctatttcctaatggaattttgcatttttcgcttttgatccaccggtttgaggttccatgacttttctttctcatgggtcttctcaagttcctttctttaattgatttgtagcttagacttaccaatatgcttttgacttcatgttctcgcttcaatgtgagctgagttatctg

SEQ ID NO: 26978 - DNA, 435 bp, Glycine max
agcttctgttataattgcgagcgtctctatatattactggcctcaatccgacatcggagttaaaagttattgtcgctagaatttgctcacagcttctgttctgaattttgagagtctcgatatactacggaacacaatcggacatttcagtaaaaagttattgtcgattgaatttgctcagagcttctgttcttaattacgagagtctcgatatattacgggattcattcggacatccaagtgaaaagatattgccgtttgaatttgctcaaagcattcgttggcaattacgagcgtctagatatattacgggattcattcggacatccgagtaaaaaggtattgtctttttattgtgctcagagcttctgttttcaatttcgagcatctagatatattacaggactcaatcggacattcgagtcaaaagttatt

SEQ ID NO: 26979 - DNA, 380 bp, Glycine max
  unsure (1)..(380): unsure at all n locations
agcttactaaggcacctgttctttctctttctgacttttctaaaacttttgagctagaatgtgatgcctctggagtgggagttggagctgtattgttacaaggagggcaccctattgcttattttagtgaaaaacttcatagtgccaccctcaactaccccacctatgataaagagctttatgccttaataagagccctccaaacttgggaacattaccttgtttccaaggaatttgtcattcatagtgatcatcaatcacttaagtacattagagggcaaagaaagttaaacaagaggcatgcaaaatgggtagagtacctagagcaattttcatatgttatcaaatacacanagggaaaaacaaatgtggtagctgat

SEQ ID NO: 26980 - DNA, 289 bp, Glycine max
agcttggttcgaggtacttaccagttgaagatcgaagaacgatgaagaacgaatgaagaacgtcgaagaacggtcgaaaaccttcgcgaaattccttacaaaaaacgttacggaaacgtttcggaagcgcctcggcttaaattttcttcacggaaacaatttttccaagcaaattctaaagagagagaagtgcctaaggggctgaacccttttccttctcacttcctcccctatttatagcaaaataggggagatgcttgccgcccagctcgcccaggcgagcagggtt

SEQ ID NO: 26981 - DNA, 436 bp, Glycine max
  unsure (1)..(436): unsure at all n locations
agcttcactactcctgtgtattcttcccaaaatctcctcattttcctttcttcattgtcataactcattcttatcatttcatcaccaagtttaatcatttccgctatgagccttgcggttnttagagtttatcatagtctttttgagtttcttactggttggacaagagagttaactagaagacagtacataacattgattctcataatggtggatggtctttgattttagcacgttggacgctagataaaaaagagaattctctcttggagtatggacaatactgaataatgttaattcctttaacatattgatcatgtccacttgttaaaaactcattagaacaccaataatttatacttgttatcattcatcaaaatccaaggtggacgagacgaatggtcatccaaacctaacaatctccccttttttatga

SEQ ID NO: 26982 - DNA, 433 bp, Glycine max
agcttattgtcgagtttgagacatatacgtataatagaaactctgcttcaggggttgaccgagtgggaattggtggagttgcaagaaatgtcttgaacttaaaaaacatcttttcacattgctcactcgattgaaaatgttttcgtttcttcagtacttgaagaaaagctttgctttttctgccatttttggtaaaaaaaaaatgggataaggatgctaacatgcctgttaacttttgcacctccttcaaattgtgtggactcctcatggcaactacgacctcacacttatctgggttagcttcaatacctctataggcgatcttgaaacctaatattttccctctcccttactccaaaagtgcatttctctgggttgagtcgcatgttgtgcttcctcagctatgcaaaaatagctaaatcttttggataat

SEQ ID NO: 26983 - DNA, 390 bp, Glycine max
  unsure (1)..(390): unsure at all n locations
tgtatttttgcttcttctctctgatacctgcaacaactcataatcacaattcagtttcagccatacatatcagaagaaaactacaaacaagagaaatactaacaaaatattctatataacactctctaatacttgccgaaatttattaaaaattacaaaagtcttgctccttatttaatgtaagggatgctcaaagtctgcagtgaacaaagagaatattgtgagtaagtgtgaaagaaatatatcatcngaatttgtgaatttatttctttctatatttgtggaagaaatatagttaaagggcctttagttaacaagcccaaggttcgtacgacacttaaaacagcgcagcttaattaccagctatattaataacaattgatctataat

SEQ ID NO: 26984 - DNA, 431 bp, Glycine max
  unsure (1)..(431): unsure at all n locations
agcttcagcaccgaaatttagttaggctacttggtttctgcttggaaggaaatgaaaggcttcttgtctatgaatatgttcctaataaaagccttgattatttcatatttggtacgtctctgaatcactgcatagttagactgcttctctatatttcactagtggttcaagacaaagcctaactattcacacaaaattaaaactgatggatgtatatgcagatccaaacatgaaggcacaattggattgggaaagtcgttacaaaatcattcgaggtataactcgaggccttctataccttcatgaagactctcgagtgcgtgttatacatcgtgatctcaaagcaagcaacattctcttagatgaagagatgaatccgaagatagcagattntggcatggcaagactgtttttggtggatcanactcatg

SEQ ID NO: 26985 - DNA, 366 bp, Glycine max
  unsure (1)..(366): unsure at all n locations
taatcccactatgctaataaaagttcaatgcgacctataagactaaaactaataatgttagacgcaatttcttatcgataaaccaaaacgcgatagatatacactttctctgtggctgactattcctatcgcgaactgggtaaagcgtgcttttttttttgtcatcagctagaagctaatgttgnacttcaattcattgaatagattgatatcactcgagatgcttcattacaccgatcaaggaaatcatgcacatgatgcagatcaaattctccgctacaaagatcattcccacttgatagacgcaacaaaaacttacactagtgcccttacacgggtgagtaaaacatgtgctaatttaattac

SEQ ID NO: 26986 - DNA, 439 bp, Glycine max
agcttgtagaacggctggacatgatatatgtcaaggtgttggtttggccagcggttcaaggataaaggaatgtcccgcattatttccatggcaagcatgcaacaatgatgattcagaaatttatgcaaaactggtcatgcatgcacctatatggagactcaagcatctagttattatggtcatgtgacactagggcttaggattcattttccctatttaagtcaacccagtgtttccaaaacatgctcttttatcaattcatgcctttatctgagtccattttgggcattcggaaaaaatttgcacagcattcacccttcatgtgtacacacatttttttcaaaaaaaaaccttgtgttttaatcggtgaatctttccaaaggaaaattggaatttatttcttttcgaaagtgtcttggctttttagtcaaaaatatat

SEQ ID NO: 26987 - DNA, 407 bp, Glycine max
tcaagaaaagaccaaactcctctccaaaatttgatttcaagcttaaataggtggctttgttcgtgcttgcgcggttagcgcaactctggaccacttagcgctcattagtggattttggcttatcgcgtgcttttctcactcagtggatggattgaagcgatgcactttgctggatgacccttcgctcaatgaacatgcacaactcatccttcttccaaattcttcctcgcgctcagccgaggagtgatgcgctcaatggattgtttgctaagcctaaagattggcttatcgagaggatgaaaatcaacacttcacaaacttgcctaattaacctaaaatggagagaaaatgattattaaatgcacaaaatggacgtactaagtatttattacctatctttaacaaaa

SEQ ID NO: 26988 - DNA, 488 bp, Glycine max
  unsure (1)..(488): unsure at all n locations
ggacttgaaacgtctatgccngcgatccttacacgggactcatgcatgcacctgcagcatgccagcgtatggcttgcttacatattcaaatctaattagcgtataaaagttgctctttcattcaagtcatgccaccacatctgaattattcgctattagggaaagcagaaaatcaagntgatcgagatctgatccaaaaataagactcgaaaataatgggagttgattctttccacatcacgttatgttcaataaaatatcctgtgtaagtccctgaagagttataatctgtaactatactaacagaatatcacagcacgcataaattagtcaaaatgaacttgcgtaagttcttcaacatattcaaacagtacataatgtaataaagtacttaaatttcatacaaagcgatagataacatacagaccaagtcacgaattttttgaggtcatggctgacgaacttaccttctctaatgaataaaaacg

SEQ ID NO: 26989 - DNA, 399 bp, Glycine max
agcttgccacccagctcgtccaggcgagcatggttgcttcctccagaagcaacagccttctggaggaatcttctggagggcccaagtgggcctggttgctatttgcacccccatttttactaagtacaccccctgccttttttggtgattcttttttcgtaaagttacggaaacttatgaatttcgtaacgatacttgttttctttccgtaatgttacagaaccttgcggattacataatcatccctttttttgacttacggaatgttacggaacctcactaattgtgcaatgatgcttccatttgattttcggtgtgtcacggaaccttacggattgtgcatcaatattttctttttgtttccggcatgtcccggaatttcacaaattgcctaatgat

SEQ ID NO: 26990 - DNA, 404 bp, Glycine max
tgagctcattattgcttccccacaaagctccacggaatttatctcggccatgctcttccttgcaagccctcttggtttctcgttcaagggctcttgcggtagctgcattttcttctcgtaactcggcacactccttccggatgtgtgtagcgactaacttgaatttttctttggcaagtcttgcttttcctagttctgtttttaaagctcggacttcttcatcctcttccggaacttcgaagttctcctcgttgattattttcaacttggagagccaatctaaccctcctgtacaaactttcagccattcatgataaccaccgatgatgccattacggatgcccctaagtttttttatctttccttaatgggagttcccacgccttgtggactctttgtatatc

SEQ ID NO: 26991 - DNA, 392 bp, Glycine max
  unsure (1)..(392): unsure at all n locations
agcttgttggaaccagttcataataataataataatacttcagaaaactcaactagtcctcattgtcactgcgtcacgaaccctaattccttttcttcttcttctcttcccttactctcatcctcgattcagtggcagaggtgacggaattcacgtgatttccatgagtggctccgttttccttgaatcgaacaccacgtctgttcacggttcgcggtttccgaaattgagctcgattcctcgtcagtggtgatcgtcagtgcatgcatcctcggattggtaatgtgcgagcttgatccatctatttgcggcgttttgaggtcggtttcttcacgattcacgtgcattctgttacttttcagttnttgtgattcggnntaatttgtctttgc

SEQ ID NO: 26992 - DNA, 274 bp, Glycine max
  unsure (1)..(274): unsure at all n locations
tgacactgtgnagtactacatctcctaccgaagaaatgtggaagggtgctacttcacacttttattctttgaccacatagacgtaccttgtagatataccacggaggaactataccattgggacatcaagtggggcgctattggacaaaacctaacttgatccatgacgacccatatcgggcgtagatagttcagtgagaacctgtggtgcatctaatcatgagagctcctgatagtcttcgatataataacctgaccaccaagatggaggctg

SEQ ID NO: 26993 - DNA, 237 bp, Glycine max
tctgcttggaaagaaatgaattgcttcttgtctatgaatatgttcctaataacagccttgattatttcatatttggtacgtctctgaatcactgcatagttagactgcttctctatatttcactagtggcccaagaccaagcctaactattcacacaaaatctaaactgacggatgcatatgccgaaccaaacatgaaggcaccaatggattgggaatagccttacaaaatcattcc

SEQ ID NO: 26994 - DNA, 70 bp, Glycine max
tgcaaagggcaccagtgggatccttgtattgtgacatggcaaatcgtgtcatgcaatgctctgaaagaat

SEQ ID NO: 26995 - DNA, 237 bp, Glycine max
cacctgagctgcagctaggtatggaggactgaatccttttcgtgctgtttgtcacggtcttgagaaggaaggacatatatttcatggatgcatgccacaatgatgattcaaaatttatgcaaaccggcatgcatgcaccatgtggagactcgagcgatcaatattactaaaagcgacactaggctttgattcattacctatatcaagaccccctaggtttcaaaaatgctctatatc

SEQ ID NO: 26996 - DNA, 338 bp, Glycine max
tgcttgtggggcttctatggaggctggatctttgttcttcaatgaggtacttcaatggtgattttccaccatggagatgcagtggaagacaaaggagaataggtgagaggaggcgccatccactatggaataagccatggaagaaggagcttcaccaccaagatgagccttggataagaagcttggagaggatgcttcagtggaggaaaagaaagagggagagaaagatagagtggggagcacgaaattgaaggaagacaaagggagagaagttgaactttgagttgtgtctcacaagactctcattcatcaaagttacaacaagtgttacacatgct

SEQ ID NO: 26997 - DNA, 472 bp, Glycine max
  unsure (1)..(472): unsure at all n locations
atgggctgatgacgcatctcattgtaccttcagaacgcagctaangcctctagatacgcccccggcatacttgacgaacttgcgtgcgaaccctatttctccagtctgaaggaaggaacaactagacgatccaagcgtgcctgtattctatctcaccccggccaataatatatgcaccccgcttcaattgaggaggctctgtgacccttagaatgaccaaactgaccaccatcgaacagacctagcaatatatcctttacgcgtgtaaaccaatcagaggacgaagacattccttggtgtgacttacggaatgtacctgaacctctcgtaaaagactacgaagcttgccttgaatattaccgtgtgaacaggacactctccgatcgagccaacatataatttgctgtgactccggtccgtacagaattcctaatattgtcgatgatgagagtcggggccataaatgatcccg

SEQ ID NO: 26998 - DNA, 363 bp, Glycine max
  unsure (1)..(363): unsure at all n locations
ttgaatgcactattcaatggagttgacaagaacatcttcagactgatcaacacttgcacagtggccaaagatgcatgggagatcctgaagatcactcatgaaggaacctccacagtgaagatgtccagattgcaactcttggctacaaaattcgaatatctgaagatgaaggaggaagagtgtattcatgacttccacatgaacattcttgaaattgccaatgcttgcactgccttgngagagaggataacagatgaaaagctggtgagaaagatcctcagatccttgcctaagagattngacatganagtcactgcaatagacgaggcccaagacacttgcaacatgagagttgatgaactc

SEQ ID NO: 26999 - DNA, 259 bp, Glycine max
atgatttcctttgttccggaaacctttcttttctcatgtgcacccaaacccaatctccgggttcgaagacaaccttctttctccctttgttggcttgtgtagcatagcttttatatttcctctcaattagatctttgactctctcatgaaacttcttcacatagtccgcctctgcttgaccttcttaatgcgtacaaacagaaacattttgcatatgcaaaagatcaaaacgagttagtgtgctaaaaccataaacaac

SEQ ID NO: 27000 - DNA, 475 bp, Glycine max
  unsure (1)..(475): unsure at all n locations
nttgaccctcgagtcccgggatccttaagcaccgcggctgcagcttaaacactaagaacagctngaattataagaagaaacacattggaattcctctccttcaagttggaatcttgaaaaattaaccgataaaggctccaaatttttttttttaccaaggcccattaaaatatggggtaggcttcaatgacaaggtttgggaccactttgatgaccttcctgaccttccattgttagtctttaacaataaattttttacacgtgtaaaaaaataaatgggggaggaaattttagggtgttacataaggaacatacctcgatttattgcaaaagactacattctttgccttgactatgatatttgtaatataacatgctaccatcaacacaacaatcaattngctttgacttcattcctaacatattcanctaacttttttgatgataataatntgggggcaaaacatcttttttg

SEQ ID NO: 27001 - DNA, 343 bp, Glycine max
atacaatactcaagcttcttcctaaagtaagaagagtatatatgtctagatttctctgatgatttgaaacatacacaatatgagtatctggaggtggcagattctccaatccctcaaatgtttttttggaatgcagaagatatatcgtattattaataagagcaatactaccagaggtacttaagtgcaatattacaacagcagctatgctgacagcctcccaaaaaacacatataaacccatcacaagtccccacctacagacgaatacaccccaaatttaccaaatgcctccacaagtccccacatttcttctatgaaggttagctctagtagggagccta

SEQ ID NO: 27002 - DNA, 429 bp, Glycine max
  unsure (1)..(429): unsure at all n locations
agcttcatcaagatacagaagcatagtaaaatgttaaaatntatctgctnttacctataattaacacaagcttacctatttgtaactaacttttattcaatcaaaatttgtaagcgcgagtttaaagtagtaagtaggtcacagcatcacagaaaagaaaaaagaagactcgagaaaggaataactaaagagagagaaaaagacaaccaaagaagaattcaaaacattagtctttttttttaatttatacattcaaaaaattaatctaaatcgaaaagtacaaattattattattactttcggagaataaaatcatgtatattttaataaattaaatattcgacgacgacaatatagaataacgttttggtaaaaagcattccacttttattatagttttcaacaacttggaattgtaattcagttaag

SEQ ID NO: 27003 - DNA, 355 bp, Glycine max
tcaagcttttagctcgtccttcaagatcatgcctttgacccgtgatgattcctttcacctcttcggagcttgagctcactattgttgccctataaagcccctcaaaactttgctttggtcatgttcttcctttcgggccttcttggttacgcgttccaaggcttcagcggtggccatattgacgacccttagttgatcatactcttttcagactttgatggctatggacttgaacttctcttcgactactcgggctctttcaagctctgcctttagggcttgtacctcatcactttgttccgaagctttaacctcatcggctctcacagtctttaaatttgggagccaatccaat

SEQ ID NO: 27004 - DNA, 432 bp, Glycine max
  unsure (1)..(432): unsure at all n locations
agctntgaaaagtgttgtttttcaccttctcgttaagccaatctgctggcttagcgagcatccgctaagcgcaccactcatgggctaagcatgaggaagactctggaagaagatgagttgtacaggttcgctaagtgcgccacttcatctcactaagcgcaccgcttcagttcatccgctaagcgagaaaggcacgcgctaagcaaaactttactaatgtgcgctaagcggtccataattgcgctaagcgcacgagcatgaacaaggacatctatttaagcttgaaatcaaattttagaaaggtagtttggactaggattcagagctttgcatgtctagagtttctagagagaggaaggtctaagttccagagagttttgagagaatttgctgtgtgaagatctgtagagaccagagcttgaagcaggagcc

SEQ ID NO: 27005 - DNA, 359 bp, Glycine max
taggtgattggggttctattcaatgttaggcacatggtcttcgtaaggtgttttctgttgagaagagaaaacaagagacatgactgaacctgtgtgtcaatgtacacatcagaatgtattatatatatagcatgggtaataagtacatagaaaataattgcctaattactataattttgtaaatcttaaaatatcctaattaccataattaacaatatccaacagttgtctaatgagcacaataaatatatctacaatatctaacactccccatcaagttggagcatataaatcatatgcattgagcttgttacaaatataaccaatttggggacccctcagaatagtgaagacatttg

SEQ ID NO: 27006 - DNA, 433 bp, Glycine max
agcttgtctcagcgtttatgcgagacagagaccaacatgttagtcatcatcagcaagtaccaagaagaattaaatctagtcacggcccacgagcacaaagtggcggacgagtatgcccgagtgtatgtggaaaaggaggctagaggaagggtgatcgacttgttacatcaagaggaaaaaatgtggatggacctatttgctcttactttgaacaggagtcaagaacttccccgattgctagccaaggccaaagcaatggcgaacaccaactccgcccccaaggagatccacggacttcttagctattgtcagcatatgatagaattaatggcccatataattagaaaccgctaggaagttttgtattgtcactcagatcttgacaagttatgacttcctgaataaaatgagtttatctccgcgttttactcca

SEQ ID NO: 27007 - DNA, 366 bp, Glycine max
tgaccaatcccgacccaacccgggcatagtcagtctgtgagaacctgtgatgtacctaaacaggcgagctcctgacagtcaacagataaaagaaacaaagaccacaaagcaaggaggcttgtggtggctggccagctgtgaattttgtgtgatatatggttgtggcctctggtaatcgattaccaagggtgggtaatcgattacaaggcttaaaaatgaagacagaaggctaagatggtctctggtaatcgattaccaaggggtgtaatcgattaccaggcttgaaaacgaagtcatgaagctaaaggagcctctggtaatcgattaccagtctgttgtatcgattacacagaagaatgggtcact

SEQ ID NO: 27008 - DNA, 426 bp, Glycine max
  unsure (1)..(426): unsure at all n locations
agctngacaccaaatcatccatagtcagattcattatccttgcaatcatggccattctgtttagagaccccgattggcattcccgctatcattgtggacttctataggatgatttttcatttcaactaatcttatgcacatatactgctactattattcaatacatcaatttattccataaaatatcattaataaaagctctgattatgtattcatttttggattattttacatcaagattgtagccgatgattaaggattattttaaggtacacacgttttgaatcatcctttgattaatttattggaaacgaacatgctattttgtgcaccattacgtagcaaagataaaaaaataattacaaattatatttcaataagtcatggaccaaatggatttgatgatttcaagttcatgttatcgat

SEQ ID NO: 27009 - DNA, 373 bp, Glycine max
ggtatatttcaattttcaacaagaattgccaacctgattatgaaaactcccgagtcctgaacacactctaaagcaagtaacttgtaaagcaacaaaaaataaacaactaaaaccattcaccttcatacaatcatacttaacaaccactacagtgggcccaattttataagttatcataatgattatccactccttaggcttgatgtttctgttagtttcatccttcatttctttcgctgcaactaaaggggggatatctattgttcctctctagtttctatgtacttctcttatgataaaatctcttcttttttattaataacaactacaacatctaccatctatatattccttgagcaagacacatgaaata

SEQ ID NO: 27010 - DNA, 314 bp, Glycine max
atgccttactcccttgagtgacatttgtattggttgctatcttggttgtagcatattattacatctgatatctatatcgcatcatgcatcatcatggttagtgagaagaacagtttctaagttagaaaagacacttcaaaggaaaaaattatttgttataatcaattacagagttgtcgtaatcgaatacaagaagctatctaaagcttaaagagttgagtctcgtatcgatttaatcgattacagtagtctcataatcgattacactattgtttgagtcaatgactgatttattcaagagtctttggtttaat

SEQ ID NO: 27011 - DNA, 339 bp, Glycine max
tgaaacctcaattcctctaatatatgaagttggagcttcctgtgttcaccagctgcatttagatcaaaattcaaaaacttcaatgcttaataagctttgtgtttcaactcaacaggtaagtgacaagatttgccatagaccaattagaagggagttcctcttataagagctctgtatgttgttctatatgcccacagagcttcatctaatatttgagaccaatccttccttaaatgagcaactgttttctttaggatcttcttgacttcattgttagaaattccagcttgcccattggtctgtggatggtaaggtgaggctaccttgtgtctaacacta

SEQ ID NO: 27012 - DNA, 388 bp, Glycine max
  unsure (1)..(388): unsure at all n locations
agcttctcaaggaggtattgcttagttattatatgggggtgtgtcgctaagctctagcttctcaaggaagttttctcanagaagcttctcaaggaagttttctcaagaaagcttctcaaggaagctacctagtctataaatagaagcatgtgtaacacttgttgtaactttgatgaatgagagtcttgtgagacacaactcaaagatcaacttctctccctttttcttccttcaatttcgtgctcccccctctctctttctctccctctttcttttcctccattgaagcatcctctccaagcttcttatccaaggctcatcttggtggcgaagcattttctttcatggcttcattcttaatggatggcgcctcctcttacctcttttc

SEQ ID NO: 27013 - DNA, 333 bp, Glycine max
tctatggaggctggatctttgagcttcaatgaggttcttcaatggtgattttccaccatggagatgcagcggaagataaaggagaagaagtgagaggaggtgtcatccactatggaataagtcatggaagaaggaacttcgccaccaagaatgtgctttggataagaagcttataaaggatgcttcaatggaggaaaaaaaagagagagaaagagaaaggggggagcataaaattaaaggaggaaaagggggagagaagttgaactttgagttgtgtctcacaagactctcattcatcacagttacaacaagtgttacatatacttctattta

SEQ ID NO: 27014 - DNA, 414 bp, Glycine max
  unsure (1)..(414): unsure at all n locations
agcttgtcaagcagtctctctcctatttgtttantatatatgcattcgaacgatataaaaaaaagcaactgagggaaaaagcttctctcctcacatattcaaaacttcaagtattctgtttgttaatatttttaaaataataggttacctacataagtattgtaagtttaggttaattaagattaatacgcattgtaaggttaggttagttattattattaataaattaataagtatgctgttatttgttattaatttttatgtactaacagatatttgaagagtaggttaggttaggttacttagtataaaaatattatttagtttgtagtatatcattttagatttgtagtatatatttgaaggttaagttgtataacaataagtatgttgttattagtttgtagtatatat

SEQ ID NO: 27015 - DNA, 339 bp, Glycine max
tctcttggaccttatgcaaaccttttactcatccttcaagatcaaactgtctactcgcgattgggtcctttcctctctgcggagcttaagctcattgttactgccccacagagccactcggaatattgtccagccgtgttatttcctacaagccttttggtctattgtttcaagggcgtggtggtagctatatttacatttctcagttcggcattcttcctttggatcttaatagctgctgatttgaaccttgctttgactaatttgggcttgctcgagttttgcactaaaggcctgcacctcttcggcttcctccaatgcctcaactttcttcccttt

SEQ ID NO: 27016 - DNA, 305 bp, Glycine max
aaaagtgataaaactattccacaccccctgagtgcttgtctggacaacaaatattagtgtgtatgatgtctaataggattgaactcctttttgcacccttcttagactagtagtttgcttacccttaatacaatctacacagagttcaaactcagaaaaatccatagcgctaactaccccttcatttaccatacacttaattctcttgatagagatgtgtcctaatatccggtgctacaacatagatgattcctcattcacaacacattcgtttagatcagcagtgacatgcatagaagtatatg

SEQ ID NO: 27017 - DNA, 321 bp, Glycine max
tcagaataggcccaaattgtttagttctgtccgctatggaaatcactatgagaaagtaatcacaatttcatagcacatggatagaacagtaagcaaaaacttgcatgagtggcagtcaaggaaagcaccttacaacgcagtaatatgttcaaacagaatgcactatccaaagtccaagtatgatagcagtgttcccaagtgcaattattaagcatatcagatggcagaaaaggatacctgaagtgattggcaggttgagcaagggtaaataacgtttacaaacatttttttttgcacgcgaaaatcaatatattatatatg

SEQ ID NO: 27018 - DNA, 231 bp, Glycine max
  unsure (1)..(231): unsure at all n locations
tattaaaacaagaaacgacattttttgacacgatatcatgtaaatccaaacaacgtgaaagtaaaatnttagcctttggaaatactgacatgcatatatacattataatgcgggtgatataatctaaaaccatgttgaatactaactaacggggtatctataaaaaaagccatgtcgagatactaactaacttgagttagataataatcatatgttagctggttatgaaaa

SEQ ID NO: 27019 - DNA, 330 bp, Glycine max
  unsure (1)..(330): unsure at all n locations
tataactntacaatatatcaactagctattcacacttgcttgttgcttctgataatcctgctcaatatatatggacaaagggtttcattgaacagattgctatctgctatctttcgattgcaaaactgcagccctaagccgcgattcagattgcgttgctatccattctacttgtttcttcagatccctgcaaattcaataaaaaatatatcaaggaataaatacgtatgcacaatntgggagacaaattgaatgtacgttgtgaaaatgtaacagtaacacacatgcaacgaggtatgcgacatgctgagtctttgcnattctttgagt

SEQ ID NO: 27020 - DNA, 316 bp, Glycine max
  unsure (1)..(316): unsure at all n locations
taccaccataggaagccatggataagagcttgaatgtaggagaagatgagtggagggagagggagagaangagcacgaaattttgtgcctcaaatgaggtctgaactttgaagtgtaattctcaaatgatcaaagttccaaaaaaatgcacacacatgacctctatttagagcctaagtgtaaccncctgaaatattattagtaattatatttgatgttngattatatttgttgggtatttgtgtgctattacacttactcactattgtgttctatagctataaagtttgattgtgaatcatattgaattgttttc

SEQ ID NO: 27021 - DNA, 388 bp, Glycine max
  unsure (1)..(388): unsure at all n locations
agcttcatatgagtggctgaaaccatgaattcatntaagatcatatacagataccgtgtgaattaaaatctttcggccctaatcctatcatgaaaaaatggtatgctcttatcagttcaaataggtaaaaatgtacctcacaggtttcaaataagctttttttgtcaagtgcatgtgcgagtaaatcgacaggacaattcctagttgctatttatatctgcttgattgttgcagcttatcttgctcctgtttctttggcatggcaaattatgtttggactgtagaataaactaagagaagcttatccaggaaatgcccttcttgaggtaattattcccctataagctaagggataaatagtacattatctaaggacattatcgtttat

SEQ ID NO: 27022 - DNA, 352 bp, Glycine max
  unsure (1)..(352): unsure at all n locations
ttatgancactaatccttgtcctaactcacttctaatgattaattctttctctaactaagtcggtggatttaataaatcctcttttagatgagttctggtcatattaaccaatataccagtaatgacttgaccaaagtcaattcccatggactctattggtctatgaatgactttctacacgtttcactaaaaatgagttctatccctaactttccctctaaatttaatctatgctatctctaataattgaattacttgctctccaagatatcattactattatctttaatataatattgttcaattttaaaatgaattctgggatgtacataatatatctttctatctata

SEQ ID NO: 27023 - DNA, 425 bp, Glycine max
  unsure (1)..(425): unsure at all n locations
agcttaggttctaggagagcattcatacatataataaccttcattgtttctacacagaanagaaacaatgtgtatatactattgactttgaccatttcaatccttacccagagccttgcccagatttggaacgaatttacctcgagaataactcccccaaatttgggacaagatttccttgaaccatcttctgtggatgatgctctcctacaacctaaaataaggtagcagaagatacaactgaataggctcgaggttcaatcaatcaatcaattcattcatctcaactgggagcaagggataattcattcaatcacaaggttagctttttggctaactagctattcataataaaacatggccttcatcatcctcaagtacatgcatccaatccatacttcagagattcacgcaaaaatcagcac

SEQ ID NO: 27024 - DNA, 366 bp, Glycine max
gagatcgtccccttgacaacattatcggtgttatctcaaaaggtgtaacaactagacatgctcttaaagatttatgcaataatatgactttcgcgtctatgactgagcctataaatttatgatgaagccatgatagatgatcattggatagttgctatgcaagacgaactaaatcagtttgagagaaacaatgtgcgggaactagctgagacacctgaaaactaccccatcataagaacaaaatgggtatctaggaataagttagatgaacatggcatactcattaggaacaaggcatgattacttgctaaaggatataatccagaagagggaatcgattactaataaacatatgctccagttgca

SEQ ID NO: 27025 - DNA, 436 bp, Glycine max
  unsure (1)..(436): unsure at all n locations
agcttgcctcanagaggtccaggaaagacattgcggccgaatgaactagttccgccccggagtacgacagtcaccgctttaggagcgttgtacaccagcagcgtttcgaagccatcaagggatggtcgtttctccgagagcgacgcgtccagctcagggaggacgagtatactgatttccaggaggaaatagggcgccggcggtgggcaccactggttactcccatggccaagtttgatccagaaatagtccttgagttttacgccaatgcttggccaacagaggaaggcgtgcgtgacatgagatcctcggttaggggtcagtggatcccgttcgatgccgacgctatcagccagctcctgggatatccgatggtattggaagagggccaggaatgtgagtatggccagaggaggaaccggtctgatgggttcga

SEQ ID NO: 27026 - DNA, 381 bp, Glycine max
taaagtatgcccgagtcattcatccgtatgagatgttgttgaagtattggcgatcagaattgacattccttggattatagggttgaaccaaactcatgcttttacaaaaaggttcatcaagtcaagttgaaatatggaagtaaccgtcctgcaaaattggggcaaaagatgaattgagtcacatcactgcttcgtctactgccaaacatatttaggattgttgatgtccttgttacttccagtttcaccttgacaaagatgtcatggatcatgttgaaaatctaaattgattcaaccccatatcctgcgtaaaaattcgcaatacttcaactatacatcattcgcatacatccatgcttttcattggttgcatggctcatt

SEQ ID NO: 27027 - DNA, 426 bp, Glycine max
agcttggagaggatgcttcaatggaggaatataaagagggagttttagagataggggggagcacgaaattgaaggaataaaagagggagagaagtggaaccttgaagtatgtctcacaagactctcattcatcaaagttacaacaagtgctacacatacttctatttatagactaggtagctcccttgagaagctttcttgagaaaacttccttgagaagcttctttgagaaaacttccttgagaaactagagcttagctacacacacccctctcataactaagttcaccaccttgagaagcttccttaagaagattcctaaataagctagagcttagctacacaccccctatgctaagctcatccccatgacaaaatacatgaaaataccaaagaaaatccctactacaaagactactcaaaatg

SEQ ID NO: 27028 - DNA, 334 bp, Glycine max
  unsure (1)..(334): unsure at all n locations
ntatataggctctagagcttatatgcattgagaatttttagatagtcattgtctaatagatatggcacttgacacgaggtcactaatgtgttgaaagagagagagagagagagagagagagagagaaagaaagaaagagtggggaccacaaatgctgtctacagaatatcttcaaagaagtacagattgtcaatatcggctagtgctcatagctgactttcatcatatgaatagaaggaaatgttaacaacataagacaataggaattcagaatgtcaatacaagacaatataaaatcttcccttttgtatgctatgacatgaagttcttactg

SEQ ID NO: 27029 - DNA, 439 bp, Glycine max
  unsure (1)..(439): unsure at all n locations
agcttcttatccaaggctcatcttggtggttaagctccttcttccatggcttattccctagtggatggcgcctcctctcacctcttctcctttgtcttccgctgcatctccatggtgaaaaatcaccattaaaggacctcattgaagctcaaagatccagcctccatagaagccccacaagcaagcttccatcagttgtatttacgcacggngaaggtattagcaccccacatgtccgtcacaagggacggcagcctttaatcaaatgtgcaaatatgacnatcaattatattcttttccccttttacgttcttatgtctnttttatgcctttttatgtctttaactttttgtggtcgacaaaggcgtttccctttgctcctacgtattcctcaattgtgatgagaaaatcaaacctacgtagttctttggtgaacaaa

SEQ ID NO: 27030 - DNA, 403 bp, Glycine max
gcttatgagaacaaaattgcctcaatcatttccaaatattcatgtgaattatgaagcatctacaagaatcaagccaaggctattgtgcaagcaatcaatggggcaaaacacaccaaatgattatgatgatggatggctcaaattctcacaaaggtaaactcatcactttcaaattgagctttcaaaactatcatgacatgtagaggagaatcaaggatttcaagtcacaaaatgtcaagaacttttattttcaaaacaattacccatttcttgaacatatcctataattcaaagaaaaacatgcaaagtcgtacatgcacacagaattgacccaaaatattaaactagaaatccgacgaaactaacagcattaacaaattaacacaacttacaaattaacaaa

SEQ ID NO: 27031 - DNA, 312 bp, Glycine max
atgcacaattaaaagttacggcaaagttcaaaaagtagtcttatttatgtcggtagcccaagctgtgaaccagatgctgcacattctaaagcatcctggataggacttataaaaaaaatgttttataatatttaatgcagcataataatccaaaatagatgtgcctagcgcccaaaacatgagcttgaccaaaacatcttcaagagacaatacaagtaaggggcagcagatgtgcctatcgcccaatttcaccactgcactactataggttatagccacaataattcctgcaataccgctgaatagttttct

SEQ ID NO: 27032 - DNA, 356 bp, Glycine max
ttgaaagctgagctcgaaaagactatagtggtgattgagaagctgaaggtggcagtcattagggttaggaaagaatgtgatgagctgaaagatatcaacatgagcgcggctgaagcgctagagcgggaaatgaacaaagccataaaggaagagtggagtagaaacaagtttcgaggggctttgctaggaagtagtaatgagctcaaacttataaagatcgagagggataaatcaatgatggaaagcctgatgttagaggataagctaaagagttgtcagaggtcgaagagaagtttgaagaacagttgagataaatggaagaaaatatgttgataatcattggcccatattaaaag

SEQ ID NO: 27033 - DNA, 394 bp, Glycine max
  unsure (1)..(394): unsure at all n locations
agcttgcccagagaatgaatccatggaggttttgcttaccacctcgaaagactggaaagcggtttctaatgactcctctgcggcctccacataaggcatagaggatgggcagctcaccaagatgtcttcctcgcctgatacgatgaccagatgcccttccactacgaatttcaactnttggtggagtgtagagggaacaactcccactaagtggatccacggacgccccgacagacagctgtagggggggttaatatccattatttggaaggtaacttggcatgtgtgagggcctatttgtactgggaggtcgatctctcccctaacctttcggcgggtgccgtcgaaggcacgaaccaccattgaacttggctttaggtgggaggcattgaat

SEQ ID NO: 27034 - DNA, 353 bp, Glycine max
tactaagcttgagggtgcgcagcccaccatcttttatagtagtataccgatattgtgtctaccatcacgattatcgtctccctttccattattgggggtaccacctgcgccgtcagatccctccaccttttgggcgtgttcttataatgatccgtccccctttttgcacatgttctgtagttgcatcctatccggaaccatatcaaaattgtactgatactgcctaacaaaggcaaccattatgtccttccaagaatggactcgggaaggttccaagttagtgtaccaggtaacagctaccccagtaagactttcttggaaggaatgtatcaccaattcctcatcttttgcgt

SEQ ID NO: 27035 - DNA, 415 bp, Glycine max
  unsure (1)..(415): unsure at all n locations
agcttcttgcgtagccgctcttggtgcttataaaatcccaaaaacaaatccctcttattactagctatnttgaatgctttagttcctcaatgtacaaccttcaaattgttgctcgttcccctctttcttttctgcaaaaaagaaaatcaaatgctgtgaaaacatggatgaagtcctaagaaaatcaatatcaaagaaaacatggatgaaatcacaattaaaaagcacaactacctatctttcagagtcctttggttaatttgtcttgtctccttatgtggtggggttttttttaataatgttatacttttgccttccaaaaaaaacttatgactaatcctcttttcattaatccaattttgtatgttattgtataaaagatcatgggttctccacttgcctccactactcctcc

SEQ ID NO: 27036 - DNA, 318 bp, Glycine max
ttgcggatatggtcttcgccagtgttttgatcgatgtggatctgaaaagaggcaaatttaatcatcctgcttggacgaatgagaaaactggggcaaataaagagggtgacgatgagggagaaacccatgctgtgactgccattcctgtacggccaagtttcccaccaacccaacaatgtcattactcaacccttctccttacctaccgcccatttatccacaaaggccatccctaaatcaaccacaaagtctgtctaccgcacttccaatgacgaacaccacctttagcacaaaccaaaaacaccaaccaagaaatga

SEQ ID NO: 27037 - DNA, 402 bp, Glycine max
tagattgggtagaattagatatgcggaggactcgtgcatcattatgcaaagaacaacctataaggatcaaagaatttaaaacgggggcagtttgaaaagggctcagcacagccattgtcagttgcagtaaatttgacacatccaatgtgcaagctttttaatgcataggtgcagacattttggaagtattatatcagaaaagtcacacccattccaaagcttaagatatgtcaaagacttagagcaaaagattaaagggagggactcaaagttgggtctaaaacctgaatatatatatatatatatatatatatatatatatatatatatatatatatatataatatcaagtgctggacattatgaaacagagcatatttgatgaccctatctaggagttcg

SEQ ID NO: 27038 - DNA, 283 bp, Glycine max
taatgattaaggggttgtgaagcattctataattaatgatgggtgagcctctgattcttaatcagcgcaatataataactttgagaaaccatgacacactcaataaattgctagccaagagcttactgttcaatgcatatattctatgtcgtgaacaacttcattttcttttatcacaccaaaatgtactttgtatagatcccaaaggaacggaaggtgcatagcttatactctttgtatttggacagtatgatacaccattatgaaattgtaactttttatt

SEQ ID NO: 27039 - DNA, 419 bp, Glycine max
tgttattactgcacttttatagcaaggtatgtaaaaattattgattacataaaccttgagcaatatgtctaatgcgagatattcagactcacgctaacaccaaaaaaccgttgcataaaagtcttgggatacaagtgtagactgaacactcctgtcccctatcgcgtcatataattttatcacataaaatgcatgcccattaccatggcgaccacacaagggagcgaatcaatgataattattactccacgatcgcagcgtaacatttacgctatacaatatataatgattcatgtgagaccgtgacgtaaaaacgggctctatggtgtactatttcatatacggcgacacacccacactgtttacgagatggcgaccaagataggcatgttaaggaagatggtatagaattgaattcg

SEQ ID NO: 27040 - DNA, 264 bp, Glycine max
tataggttaactgcatgctatgtgacacatccacttatcagaagctacaaagagttgcttctgcgttttttttttcctttcaaacctgatgtgaaaataatattgagacctgcgctggtgatgtgtatcctaacacaccataaatatcttggaaaattatctatatggaagatttcatatagcctatcctctagcaagcattcataaaaacagctgcaaccatatacaaaaagattcaagatggagtctttgatgtatcaaatg

SEQ ID NO: 27041 - DNA, 152 bp, Glycine max
ctatttgcggctgatacttaaggcttatacggataggcgatgaccttatatgtatctctcgcactgaccgacgaccagaaggcccctctagtagaaactgcaacttttggaggggtggagaaggatctactcccactaagcggatcctagga

SEQ ID NO: 27042 - DNA, 369 bp, Glycine max
  unsure (1)..(369): unsure at all n locations
tgttctagagtagggtcattattntagttaccatctttttaactttagcctgacgtggttcgtaccctaggtaaaatagagaatacattccaagtattagaatatcacaagtttgtatacttgcctaatatgtagttctcagttcgaaccaattagtacctcctttgctctattatacaattatgtagtataatataatagcccctaccccacaagtgtgttgagattatcaattcttttagtttctttcgaaataattgtaaacctttgaacaaataattagtaacccttttactcaacattcgtattttccaatgcttcagggtattgtgaagaaaaaggctctgatcattgggcattaaccgtaat

SEQ ID NO: 27043 - DNA, 168 bp, Glycine max
  unsure (1)..(168): unsure at all n locations
agctgatgaccatttttatgtctcgagagtttntgctgttcaatttcgagcgtctagatgagatatgtacccgaatcggacatctgagtgaaaagctatgaccattcgaatttgcctagagctttcgttgttcaatttcaagagtctcgatatattatgtgcccaaat

SEQ ID NO: 27044 - DNA, 79 bp, Glycine max
tcgagaaattcgaatggtcataagttttcacactgatgtccgattcggggagataatatatctagacgctctgaattga

SEQ ID NO: 27045 - DNA, 291 bp, Glycine max
  unsure (1)..(291): unsure at all n locations
ctgcagctgactggcaatgatttacctttttttcctttatttttaatcaattcgattaagaatgagaaatcccaaagagaaaacgtccgattgattttccgctttattttactaaaagatgtctttttgattattatattattttttacctctttttgatttccaatgtggntacggcacgacagaacggtcggaattcattttaaccgaagttaacggataatacaattcacacgttcggtggaaatttattttatttttaagttaagcgagaaatgacttatgtaaaat

SEQ ID NO: 27046 - DNA, 375 bp, Glycine max
atagttacaatttgtgttagcttatgctcaattatcatgaataacacaactcattagagcttaaaacttattttgattcacaaatccagccacaactcagcaccataactcaacttcatcatatgcatcgtataggaaacttagaaaacaaaaaaagagttcaacaacaagactatttctaggaattgatttagaacatgttaagaactaaataatatgcatgaactagactcaaattcaaaagataggctaagaatgacaagaatacatgaacaaatgtatctagaattcaatcaacaaaaataaaaattcaacacaaacttagaacataatgtgacaattactatgactaaacatgactctaagacaacatgg

SEQ ID NO: 27047 - DNA, 434 bp, Glycine max
agcttgtctcagcgtctatgcgagacagagaccaacatgttagttatcatcgccaagtacgaagaagagttaggtctagccacggcccacgagcatagaatcgcggatgagtatgctcaagtatatgcggaaaaagaggctagaggaagggtgatcgactctttacaccaagaggcaaccatgtggatggagcggtttgctcttaccttgaacgggagtcaagaacttccccgattgttagccaaggccaaggcgatggcagacacctactccacccccgaagagattcacgggcttctcggctattgtcagcatatgatagacttaatggcccacataattagaaatcgttaggaaacttgtatggtctctcagaccttgactagatatgacttcctttctgaaataaaattgagtggtcccaggtttctact

SEQ ID NO: 27048 - DNA, 340 bp, Glycine max
  unsure (1)..(340): unsure at all n locations
ggtgcaaatcaaatcactcctacattntatctctagtatgcattgtatgttagtctcgtcctttgtcacgggaagccggaaggtccatatcaccttcttaattgtacacatggggcactgcgcccccaaatgcgcgagtaagaagagataattttccgggctctcgtgtccgtaaaatgcattcatatcatgcatcgcataagcatctcttcataacatcataatggacatatcctgcatttgtccggtatcatatttcagcctcaccttttgcatgagtcatggcatcatcatgcatatgcgttcaacaaactctttgatctgcaaaattgcataccat

SEQ ID NO: 27049 - DNA, 425 bp, Glycine max
  unsure (1)..(425): unsure at all n locations
agcttgtaaactntatacaagaatgaagctctgataccacttgttggagaagtggcctcagatatcttacgaaggggggttgaattaagatatcacaaactatttccccaattaaaattttattttactttctattcaagttataaattcccttaaaaatgaacttcttaaatattgattcaaatagagcaatttgaatatgaatataaaacaataataaataaaggagtttaagggaagagagattgcaaactcagatttatactggttcggtcacacccttgtgcctacgtccagtccccaagcaacccgcttgagagttccactatcttgtaaaagcctattacaagatctgaaccacacaaggacaacccttcctttgtgttagatttctttacaacaagagaccctcggtctcttaatcc

SEQ ID NO: 27050 - DNA, 349 bp, Glycine max
  unsure (1)..(349): unsure at all n locations
tgctntgattcttgccgttctttgtccactggttctgctctntgtcttggctagtctggttgctgatttcttgataaggaaaaaacgaagaagccatgatgattgcatgttatatgaagttggtgatgacgagctaggacccacatcggttaagtttgatttggacaaaggaaccattccaagaagattctagtacaaagaactcgtggacgccacgaacgggttttcagacgatagaatgcttggacaacgagcttcagggcaagtctacaagggtgtcttgagctacctatgaagagttgttgccgtgaagagaatcttcgcggacttcgagaattccgagagagtt

SEQ ID NO: 27051 - DNA, 434 bp, Glycine max
agcttttatccatggcctcctatggtggtgttcttcttctagactcatcttttccttgaagtggcgtctcctctctctcttccttctccattccgctgccattcatcttccaagaagcaaaggaatccattgatgaagaagatcttaggcctacaagctccaatggagcttacatcagcctctgactctggcttgctttggtgaagggccctcagagctgtataagtttgcatagaactctttcaccaaagccaaatctatgctcccatcaaccaaattggtgaggcgtttatggaaattacacctctccaacttagtcttaaaatcatccaactcggtgtggtagagctccaccttcctctctgacaagatgtttctcgccaggacattatccatgtactggttccaagcatctaaggagtgaaatctccttt

SEQ ID NO: 27052 - DNA, 277 bp, Glycine max
  unsure (1)..(277): unsure at all n locations
tgngttcttgagaagaagagagaaagagatcatctttttaccacctatctagaagttcacaccatataagtaccaaccatacccaaccataacaacaaataatatttaggctcaaaaccaaagacttcatggaatctccatggttgctctaacgaaaaaaaatacaaatggaatacaaagggataaagaaaagaagcttatcactccaagggtcagctatgatgtttcaagggatggggaaaaaaaaccttctatgagcacaatcaccaaaactcac

SEQ ID NO: 27053 - DNA, 438 bp, Glycine max
  unsure (1)..(438): unsure at all n locations
agcttccaagagttgaagaggcgantgaattcagctccaatgttaattttgcccgaccctaagagaaccattgaagtgtattgcgatgcgagcgggcaagtcttaaggtgtgtattgatgcaagagggaagggtagtggcttatgcttcacgtcaattgcgtcctcatgaagttaactatccgacctatgatttggaactagcagcttgatggaagcttgcttgtggggcttctatgaaggctggatctttgagcttctatgaggtcctttaatggtgattttccaccatggagatgcagcggaagacaaatgagaataggtgagaggaggcgccatccactatggaataagccttggaagaaggagcatcaccaccaagatgagccttggataaaaagcttggagaggatgcttcaatggaagaaaagaaagaggga

SEQ ID NO: 27054 - DNA, 280 bp, Glycine max
ggcatttttggacaaagtatgacaagcagggggcatgcaaattctcttcccatcaaaccttggatgcaactgagatcgtatccccatctcagctagatcttgacgggtattcaagccatccttcatcttgccttgaatgttaaggagcatcctaatcacattgtcacatacatttttctccacatgcataacatcaagacaatgtctaacgtctagatcagaccagtacgaaagatcaaagaaaatggaactcttcttccatatgcaagtcttactttta

SEQ ID NO: 27055 - DNA, 406 bp, Glycine max
agcttcttatccaaggctcatcttggtggttaagctccttcctccatggcttattccttaatggatggcgcctcctctcacctcttttcctttgtcttccgctgcatctccatggtggaaaatcaccataaaaggaccccattgaagctcaaagatccagcctccatagaagccccacaagcaagcttccatcattttcttctgagggcaaggtttatggtaaattgggattttggctcaaggcttgtagcacggctggacatgatatatgtcagggtttggttcggttcaagggtaaaaggggatgtcccacattatttccatgacacaaatgcaacaatgatgaatttggaaatttatacacctatgtggacactcaagtgccaaacttttatggtcatgtgat

SEQ ID NO: 27056 - DNA, 382 bp, Glycine max
  unsure (1)..(382): unsure at all n locations
tccttaagaagattcctaaagaagctagagcttagctacacatacctctctaatagctaagctcacctccttgagatgagaagctagaacttagctacacaccccctataataactaagctcacccccatgacaaanaacatgaaaatacaaaaaataagtccttactacaaagactactcaaaatgccccgaaatacaaggctaaaaccctatactactagaatggccaaaatacaaggcccaaacgaaggaaaaacctattctaatatttacaaagataagcgggcttatacttagcccatgggctcgaaatctaccctaaggctcaagagaaccctagggccatcccttggatctctaacccaatctacttggagtctt

SEQ ID NO: 27057 - DNA, 390 bp, Glycine max
agcttccttgagaatattcctaaagaagctagagcttagctacacacacctctctaatagctaagatcacctccttgagatgagaagctagagcttagctacacaccccctataatagctaagctcacccccatgacaaaatacatgaaaatacaaaaaaaagtccctactacaaagattactcaaaatgccctgaaatacaaggctaaaaccctatactactagaatggccaaaatacaaggcccaaaagaaggaaaaaacctattataatatttacaaagaagagtggatccaacattgacccatgggctcaaaaatctaccctaaggttcatgagaaccctagggccttctttagtagctctagccgaagcctcttggagtcttcta

SEQ ID NO: 27058 - DNA, 355 bp, Glycine max
  unsure (1)..(355): unsure at all n locations
ntgagccaaagtcccaactcaccataaaccttgctctcaaaagaaaacanannaaaaagaaaaagaaaagaagagaaaaggagaaaaggagaaaaggagaaaattcccgatcaaaagaataagaagaaagcaaaaagggaaaattcccaatcaaggaaaatgggggaaaacaaaaaaagaaagagaattctcgatcaaagatcggaagagaaaagaagaaatatgcagaaaggtcttaggaccagacaatatctgaacaatacagatttgtcaccaagtaaacaagaaaagaaaggaaaccacgacctaaagtggtcctctccctttgatngccaaccaaaatcctgtgtgtcag

SEQ ID NO: 27059 - DNA, 192 bp, Glycine max
tatcttgatatttgattccgcggtcatgaaacctccgagacgccaaggggtgcgctgatgaccaaaatcttactgtgtacaatctcgaccggacctgacatagtctgtgactatgacttgctttggtcactgagccgcgaacttgtgttagtctgcatataaatgtgtcaccagagcccaatctatggatgc

SEQ ID NO: 27060 - DNA, 387 bp, Glycine max
  unsure (1)..(387): unsure at all n locations
tatcaggaccttaaaactcagcttgcttccacaatctccccctttttgatgatgacaacttctgaaatcaagaaacacacacacactntttccttgtctatcactcttataaatgctccccctttgttcttgaatttatggttatcttaaaattaaattgtttactcatgtgagttcttgatttatccctatttctctccccctttggcatcaacaaaaagccaaagtgtgtatcaaacttaaagtatgcaaatatatcttaaacattcatacagcattcataaaaaatattaaccacaacatgaaagtaaaaccatgaagcaacaatcataaacagattaacttataaaatccacatagtcaaataacatacttgttcaacccaac

SEQ ID NO: 27061 - DNA, 254 bp, Glycine max
tgtatccctctgtattctagatgcattattgtagcttatgccgcttctagcccggcttattgagagttgaaggtttatgacctgtagaactcgctaagcaccccatctgtgcgctaagcccagctttataaataaataaaatcagattttgaatttaaaacttgggctaagcgtgtaggatcactaagcgaaccgctatgagaaaccaaacgtctctctgactcgctgtagcgagcggatcgctaaatgagaag

SEQ ID NO: 27062 - DNA, 329 bp, Glycine max
  unsure (1)..(329): unsure at all n locations
tcttatccaaggcaattcttggtggtgaagctcattcttccttggcttattccctagtggatggtgcctcccctctcctcttctactttgccttccgctgcatctacatggtgaaaaatcaccattgaaggacctcattgaagctcanagatccatcctccatagaagctccacaagcaagcttccatcaagtggtaatcagagcacaagagcttcaagtaggtgctccttanacctccattaattttttgctttaccttctcttccattggttttcatcatttttctccatgtatctcctcaaatgtcttgttctaaatgttgtaaca

SEQ ID NO: 27063 - DNA, 333 bp, Glycine max
  unsure (1)..(333): unsure at all n locations
atcttctggttgatatttacaagggatntttatgtcccatgaaacatggctttctatccttatattcctacgctgagaacgcaactgataactctactgtttttctggcttagcacttccctcgtgtgtatttatctggcatggatgagtcccgtcatcatctaactctccatccaaaatgtgtgtggttaaagaagtacaaatgagtctaagtcatcttaatctgttgcttatgctctattcttgggaaacctaattgatattttaggatggtggtggaacctaattgcacatataatattttctgctaagcatgggctcccattattggtt

SEQ ID NO: 27064 - DNA, 141 bp, Glycine max
  unsure (1)..(141): unsure at all n locations
ntgggctatgaagcacggataccctaatcccttgttgtgtccggtgtccgacacgggtccgtgtcagtgtcggacacccgtactacgttctatattatagacattattggagtccatgtgttcgtgtccgtatcgtgtacg

SEQ ID NO: 27065 - DNA, 396 bp, Glycine max
agcttgtaatacaacgattgctctctatatctcatggtctatgcattctcaaaaaaaccaaattgtcttcaagccaagccacagtacaaccttgatcaagtccttgtgaccttcatctgtttgctttcattttattgcagatgagaaggaaaagaaagctgaattatgtgttcaatggtgtgaaacaattgtgaccttcatctatttgcttgttttgtgtcttgaattaaaataattgcatccttgctatattttcggttgaaagcaccactcttgagtttgaatcattggtttagtcattaatgttcaaaaagaagcatgtgatgatttgttaggatgacattgttcttagttcatgtatgtcattgtagtatacgttcttaagtagtatatttt

SEQ ID NO: 27066 - DNA, 380 bp, Glycine max
cttgaggctggaaaactatataacaataccaaggttctagtttagctctctctcttctctctcccctattttcgttttttagttttaggctttttctttgagacatttttttttcgttttgcaattctagtagcaataaaattttgttcttcaatttataagttcgttatctattgattaatggaaggctaagtccccagcattgctttctcttgaggatcaagcgcagttttgtttgaggttctattattactgttaaattttgttcagtttctccccttcactacttactctaaatttgttgctactaattcatgaatgcttagtgcttgattaattgtctctgcgcttaatttacgttcatgcctaatgatcgttta

SEQ ID NO: 27067 - DNA, 430 bp, Glycine max
  unsure (1)..(430): unsure at all n locations
agcttctggtaaccattntataaattttatacagccattgctggggtagcggcatataataattgcaagttgaaaaaagaaacctctcgtgacacctcagatgattccaaccctgaatcttcccaaaggcaagagtctcagcctttaacaagtagatagttgcaatctttgagctactcaaggtatgtaaataatgtatttgaaatcattcttattcccacaattttgcttcctcttatacattatttctttgtatctcttccagttgtccatgccttattcagaagttgatgagactatatagtagttttcacttttcacataatgtagcaagaggacataaaaattcatgtagtatataaaagtataagcaaacattttggttcaatcttataaacagtttcagctaatttagatcggggaaagcaat

SEQ ID NO: 27068 - DNA, 410 bp, Glycine max
ttctaaaacggtgttttgacaaccgtcgaagatagtgtgcgaggtctacaacaatgccataatcaaagacaggcctccaccatcgttgaacattgcttttgaccaatgtaaaaaagcttttttttagcagtatccttagtctcgcaactgatctaaattagcaaaaccaacatgatgtttacggtctacaaaaccctcatgcaaagatgctagaagttgtgtgcccatatgtacatcttcttttacataaaacgttatagatcatttactccaaccaagtatttattttaaattttaaattataatttatgaggattaaatatttccaaaatcaattataggaagaaaaaaaaatcttattttggtttctccttcctcatcgcctttcaattcaaattaaacataaaatt

SEQ ID NO: 27069 - DNA, 432 bp, Glycine max
  unsure (1)..(432): unsure at all n locations
agctntataagtgcgggtctgggagacgaaggtcaagtgttcgcgatatgtgaagatgatgttccaagtacttcggatttggtccgaccatgccctcctgatttccagctgggaaattggcgggtggaggaacgccccggcatttacgcaacaagcataatgtaaacctttacggttttaaaagctctatagttgggcctaggctttagagttttcattttgttaaggctttgtgtcttttgtctttgaatttataatacaaggatctttcttcatctgttcctagtctctacccattctcattcatttgcatgtttacttcttttttctaaaacggcagattcgatgacgagtcccccgaaggtactaatacctgngacccgtctatcaacttcgagcaagaaatgaaccanacggaagatgaaggagatg

SEQ ID NO: 27070 - DNA, 333 bp, Glycine max
  unsure (1)..(333): unsure at all n locations
tcaagaaaaagatggcctcagcaaactccttatttccagaagggaattctatcaatagacctccaatctttaatggagagggttaccattactggaaaacccgaatgcaaatttttattgaggcaatagatctaaatatttgggaagccatagaaatagggccttatatacccaccacagtggaaagagtttcaatagatggtagttcatcaagtgaaagaataactatagaaaaacctagagatagatggtctgaagaggatagaaaacgagtacaatacaacttaaaagccaaaaatataataacatcttgcctgngaatggatgaatatt

SEQ ID NO: 27071 - DNA, 426 bp, Glycine max
  unsure (1)..(426): unsure at all n locations
agctntgtgagcttcaaaagctcagcaagttcactaccctgattaacattgcaagttgagttttgcaaggtaagaacagggattgcaaagattgagtgtgcagttcttccctcagacaacaataaggatgttatgccacttgatgcaactgttaaaataatatgtccctttgaacgaaatgcagaggctagtgtcttccgcatgaaagtttttcaatccccctataaccataaaggaagaaaatgccaccatattgcatattaacatcattcattactatatcaaagatacttttttgctcatctgcaccaaggaaagttgaaaataattttaattacttaagatatataaataattgaatttgtatggttggtgttaattaaatgtatactttttaaaataagtatttgtaattgatcatattac

SEQ ID NO: 27072 - DNA, 351 bp, Glycine max
  unsure (1)..(351): unsure at all n locations
tttgttgaaactaaattggaaaacaaaaaattctggcagacaaaaatggatggaaaaatttctccttataccttattttattttatattgttaattaattataatttatattgttaattataatgaagatcaaactttntatattattttaatttatgataaataaaaatttctttcacatcatttaagttcattatatttttataatagtaaataaagatcatactttttaaattattataattataattactatgacctaagtatctacaaaatcgtatgcctatttttagaatngaccatatttactatttgtaccaaatattaaagatgcattattatttttgaatt

SEQ ID NO: 27073 - DNA, 437 bp, Glycine max
agcttaggctaaattaggctaaactttcgtaagctatttaagctaactctagtccaacaagaggcatctgaggatgaagcttagtttaagttagtctaaacgtaggagggttgtctaaattgagcctagtccaacaagagggatctgaggatgaagcttggattgatccagtctaactagggatcgaggtttagtaatttaggctacaacatagaacacaaaagcatgattgattagagaaacatccttatatgcatcagctggtttgttggaaagacccaacacttctacctactgctgtcaattttacttacttgcatttttattgtttttatcctaaacttagtttaattctgttttaaaccatcaattatcaatgtttctttcaacaatgtcttatttctgaatttaacccggtcttagactagttccctaag

SEQ ID NO: 27074 - DNA, 396 bp, Glycine max
gatgcctttaaagtttttaaggctgaagttgagaaacaatgtggtaaacaaattaagatcgtgagatcagatagaggtggggagtactatggtagatacacagaggatggacaacccccaggtcaatttgcgaaattttttcagaaccatggaatggtggccacatcccctatgcctggttctccggatcagaatggggtggcagaacgaagaaatcgaaccttattaaacatggtgagaagcatgaggagtaatgtaaagctccctcaatttttgtggattgatgctcttaagacggctgcgtatatattaaaccgagttccaaccaaggctgtctcaaagacaccttttgaattattcaagggttggaaaccaagtttgcgacatatacgcgtt

SEQ ID NO: 27075 - DNA, 418 bp, Glycine max
  unsure (1)..(418): unsure at all n locations
agcttatgttaaataatgcagtacatctattttntgctaagtacactccctggcccttatctctataatatgattgctaattatacccttttagccttttttaaaaatacaaaacaaccctatgctggtgttattacttttatttggtgagaaggaggacctacgatccagacaaactaaccaggaacactattgggcaaagacaagcccattacatcattccttaacaaagttttaaaccctgttttacacctctggtctttaaaagtgtaaaaacaaggttaaaagggtataattagcaaatttattaagaagagaagggtatggtgtacttnagcataattaggatctatttaggaagagccaatctgaatagttaatatgagggggtatgactataagcctgaaattgatggga

SEQ ID NO: 27076 - DNA, 395 bp, Glycine max
ctatcaggacctataaaactcagcttgttgagagattaatgagccttttaataagagggttaagtgcactctgatttcaactagagcaggctctttgggtattaatcttcatgcagctaatcgtgttgttatagttgatggttcttggaatccaacatatgatctccaggccatctatcgatcatggaggtaagatcctgttaatttttcccttaatcaagataagttttcttctgattaaaaaattatttataaaatataaagtttagaatttgatgtgactgtctcctttacggagaattctttcagtgagcagtatcttagctcattggtcttttagaggggtttcccttatatctaacaataagatgtgaaattgagacttacactcttat

SEQ ID NO: 27077 - DNA, 387 bp, Glycine max
  unsure (1)..(387): unsure at all n locations
agcttcccaatcaatcttcgatatctnttatgatcagaataaggctccccctgattgggtagcaattntttatttggatccatgggactatcaattggtctacaatctgacataacagtttctttaagtatgtctaatgcatacttcctttgtgagatgataatcccattttttgactgagcaacttcaattccaataaaatatttaagttttcccaaatccttaatctaaaaatgactaaataaatgttccttccgttgagcaattttttcttggtcatttcctatgatgactatatcatctactcgatgaggtatgacaataaaaaactgaatggtctgcttcactttgtttcatcccaaaagcctgaacatctgagctgaattt

SEQ ID NO: 27078 - DNA, 370 bp, Glycine max
tgtgcaaatcaaatcactcctacatttcacctgtatcatgcatttttttctttacccactcctcacgttgggttttttacggaaaaataccataactaaacgcgccacaaggcatccctatcgcaccacatccaaatctataacgatgggtgatcaagaggagacacaggaacagatgaaagccgacatgtctgctctgaaagaacaaatggcctccatgatggaggccatgttaagtatgaagcagctcatatagaagaacgcggccaccgtagccgctgtcagttctgctgccgaagcagacccgactctcttggcaactgcgcaccatcctccctcaaacatagtatgacggggaagggacacactg

SEQ ID NO: 27079 - DNA, 425 bp, Glycine max
agcttctcatcaatacttgaaagaaaacattataaaaaggtaaaatgaatcaaaattccccaaaaactagcttatgcaattcaactattttagaagttccctcgtttaacttctccaaaaactgaagtgtataagctaattttaactggtaggaaaagttttattcactttacctattcattttcttctataaaatgcttcttgaattttatttccaaactgaacctaaatttgtatatttattacctttccgggtccgagttcatagcttttcttcagacccttggttagaagagtctgcactgttgtttcccattgaacaggtgaggtaacctgccaaatgcataacaggtgcaattatttcccattcatgtcttcttgttagattgaaacaagtatcagtaacatacctggcatgccaatat

SEQ ID NO: 27080 - DNA, 346 bp, Glycine max
tctaccatgccaaaatgaaggagacttagtatggatttcagaaaacaaaactagtaacaatgctctgggtcaaacacccacatcactacatgaaagagctgagagcattttggattttacaaaggaacgtcatttggaaattccgaccacgccaatgtgaccagggttcagtgttatgaaaataacatgcatttcatgaaaggataacgtttacaaagtctctttctctaatgtttttcaaaggaagtataagacatgcaatgacggttccaaagtcagaaaagatgcgaagataatatggaacttacaagaaacaagcatagaaccatggttacctcgaaagaaa

SEQ ID NO: 27081 - DNA, 416 bp, Glycine max
agcttcaacattgaatttagagcgtctcgttatattacctgacttattcagacatacaagtaaaaagttattatcgtttgaaaatcctcagagcttcggtattcaatttcgagcgtctcgatatattacgggactcaatcagacatccgtgtaaaaagttattgtcgtttgaattagctctgaggttcagaattcaatttcgagcgtctcaatagattacgggactcaatcagacatccgagcaaaaagttattgtcgtttgaattagctcagagcttcagaattcaatttcgatcgtctcaatatattacaggactcaatcagacatctgagtaaaaacgttattatcgttagaatttggtcagagcttcaacattcaatttcgagcgtgtcgatgtattacgggacttaatcag

SEQ ID NO: 27082 - DNA, 267 bp, Glycine max
tagagctaattcaaacgacaatatctttctactctgttgtctgattgagtcccgaaatatatcgaggcgctcgaaattgaatgttgaagctctgagctaatgcaaacgacaataactatttacacggatgtctgattgagtcccgtgatatatcgagacgctcgatattgaatgttgaaccctctagcttattcaaacgacaaatactttttactcggatgtcagaatgagacccgtaatatatctgaactctctatatggaatgtt

SEQ ID NO: 27083 - DNA, 376 bp, Glycine max
  unsure (1)..(376): unsure at all n locations
gcgancagaattgccattcgctggattatagggctgaactcaactcatgcttttacaaaaaggttcatcaagtcaagttgaaatatggaagtaaccgtcttgcaaaattggggcaaaagatgaatcgagtcacatcactgcttcgtctactgccaaacacatttaggattattgatgtccttgttacttccagtttcaccttgacaaagatgtcatggaccatgttgaaaatctaaattgattcaaccccatatcttgcgtaaaaattcacaatacttcaactgtacatcattcgcatgcatccatgcttttcaattagtgcattgctcgttgcattctttccttgaanaataaaatacaatgaacttaatcattg

SEQ ID NO: 27084 - DNA, 331 bp, Glycine max
  unsure (1)..(331): unsure at all n locations
tcaagaaaaagatggcctcagcatattccttatttctcagaaggaattctattaatagacctccaatctttaatggagagggttaccactactggaaaacccgaatgcaaatttttatcgaggcaatagatctaaatatctgggaagccattgaaatagggccttatatacccaccacagtagaaagagtttcaatagatggtagttcatcaagtgaaagcataaccatagaaaaacctagagatagatggtctgaagaggatagaaaacgagtacaatacaacttaaaagccaaaaacataataacatctgccctangaatggatgaata

SEQ ID NO: 27085 - DNA, 323 bp, Glycine max
tgcttgtggagcttctatggaggctggatcattgagcttcaatgagatccttcaatggtgattttccaccatggagatgcagcggaaggcaaaggagaagaggagaggggatgcaccatccactatggaataagacatggaagaaggagcttcaccaccaagaatgtgccttggatcagaagcttgaaggggatgttttaatggaggaaaagaaagagagaacaggggatcacaaaattgaaggaataaaagagggagagaagtggaactttgaattctatttatagactaggtagcttccttgagaagctttcttgagaaaa

SEQ ID NO: 27086 - DNA, 313 bp, Glycine max
taaatgccataagccaaactcctaatcattaaacataatcaaagccggaaggcttagaacttgaaatgtcgacaacgacgaaatatccaatactgaaacacatgacaaagaagcaaagtactgagcagaatcatgcacatgctcagaagcttatggccatagtacacggctcataaaagacaaatatgccgaatctaacatcgtagaagacggaagaagtggtgggagaatcaagctctgacgaatgtatccgacatccttttaagctgtgaagacgaatgccataccgccaagcgtgtatctacgagtcaag

SEQ ID NO: 27087 - DNA, 370 bp, Glycine max
  unsure (1)..(370): unsure at all n locations
tttactcgaggaggtgctctaggcccagttaatatagcctattctggtgtttatcagtggtggtatacaatcggtttacgtactaatggggatctttatactggagctctttttctattatttctttctactatatctttaatagcgggttggttacacttgcaaccaaaatggaaaccaagcgtttcgtggtttaaaaatgccgaatcccgcctcaatcatcattngtcaggattattcggagtcagttccttggcttggacaaggcatttagtccatgtcgctattccgggatccaggggggaatacgttcgatggaaataattaattagtatattgcctcaccccgaaagatagggccatttttcac

SEQ ID NO: 27088 - DNA, 430 bp, Glycine max
  unsure (1)..(430): unsure at all n locations
agcttatgctgcaaatatttacaatagaccttctcaacctcagcagcaaaatcaaccacagcagaaaaattatgacctctccagcaacagatacaaccctggatggaggaatcaccctaacctcagatggtccagccctcagcaacaacaacagcagcctgctccttccttccaaaatgctgctggcccaagcagaccatacattcctccaccaatccaacaacagcaacaaccccagaaacaaccaacagttgaggcccctccacaaccttcccttgaagaacttgtgaggcaaatgactatgcagaacatgcagtttcagcaagagaccagagcctccattcagagcttaaccaatcagatgggacaattggctacccaatngaatcaacaacagtcccagaattctgacaagctgccttctcaagct

SEQ ID NO: 27089 - DNA, 330 bp, Glycine max
tgaacagatgtaaaaaatatcaatgaaaactcacagtttcaagtgagattatacaaacttctaaagtctctctcatcttgaagcttcaacaactttaacacgtacctgctagctgtatttgcctgtagtgtttgaatacaggttttaatacatggtttagacatatacatgtatatataaaaagtagtaacaatgtgctttacctgtacttgatataatgaaacagcttccacaagaacaccaatggacaaaccaacttcaactacaacaaagtaattcaccttcacctggagttcatataatgagtaatggcattagaagaagtcaaag

SEQ ID NO: 27090 - DNA, 419 bp, Glycine max
agcttgtagggttaaagtctcacgattgttacgtgctcatgcttcagttgttagccatggctatacgagacatcttgccaaacaaagtcaggttagcgataactcacctgtgctttttcttccatgctatatgtagcaaagtcattgatcctgtcaagtttgatgagttggaaaatgaggccgcaattatactatgccagttggagatgtattttccccctgctttctttgacatcatgattcacttgattgtgcatctggtcagagaaatcaaatgttgtggtcctgtttatctatggtggatgtacccgattgagcgataaattgcaaaagaagccattgaatttttttcagaatacttagagaatgctaaacctgttggccttcctgagtctcggcatgatgacaaagtggggggt

SEQ ID NO: 27091 - DNA, 377 bp, Glycine max
cgtggtttgggcaatagcaccccacctgacgtcccattgtctcctgaccgccgcgacatatctccaggtaccactctgtggtcaacaataaaagcaggaagtttcacccttcaacacttcctcatctcaagcttgtaagattatggggtacccatcacatatggtactatgtggcggtcgggcgatggtgcacaacaagttttccacatccacaatgcgcgcataaacccaccatcccctgttgcccacctccaactgagctcacgtactcccacgtagcccatatcctcgtttctctcaacaccgggtctccatcaatcctctaaagcttccacaacatccaagaaaagcaacattcaaacagcacaagctatcac

SEQ ID NO: 27092 - DNA, 355 bp, Glycine max
  unsure (1)..(355): unsure at all n locations
agctttntcttaagcttttgctacaacctttttctccccctnttgtgcaacatcaaaaaagctcaaaagaaaactcgggaannatcaaaccacccagttattaaacaatgggagtnagcaaagatataaagtatcaagagtattaaaatacaaataagccaaaactcataatcaataaaaataatcaaccagaagtcaaataacataaaatgtcaacaaccacaaaatatccaagactgaaacacaagaaaaataagcaaagtacttagcataataatgtagattctaagaaactaaaagccaaaatacacggcttataaaagataaataagcagaatctaaaatctaagaagac

SEQ ID NO: 27093 - DNA, 306 bp, Glycine max
tcggttttcaatttcgatcatctcgatacattatgttcccaaatcaaacatccgtgagaaaagttatgaccattcgaatttctcgacagcttccattgttcaatttcgagcgtctagatatattatgtcccaaaatcggacatcggtgtgaaatgttatgaccattcgaatttctcgagagcttctgttgttcaatttcgagcgtttcgatatattatgtccccaaatcggaatttcgtgcacaaagttctgaccattcaaatttctctagagcttgcgctgttcaatttccagcgtctcgatata

SEQ ID NO: 27094 - DNA, 426 bp, Glycine max
  unsure (1)..(426): unsure at all n locations
agcttgtaagatttctaagatcattttcctgtcaactctntgtaaaagattgccatgaatatgaagagatgacaatttagagatattcatgagatgacaatntagagagtgatcaaagactttcaaatcgatttccactgaatttatcaatagacagatcaagatatcttaatgttgaaagttttccaaatcatctagaaagggcaccaccaattgagttgttgtaaaaatctagcatgtcaatatttttaaaaactccaatttaatccgtcaaattgggttattttatcatctagggacaaattttttctgtttttttttctcatgtgggtacttttcaaatcatgccccagaagtgaataagtggtattataatatttaagttacaagtcgtaatatgactgtnttttttntttaacttaaatc

SEQ ID NO: 27095 - DNA, 360 bp, Glycine max
  unsure (1)..(360): unsure at all n locations
tgaaggagtttattgcatcagggaacaatttcactttaaaagtgggttctaattggattcctaattttcaacttacctatttggatgtgacatcatggcagataggtcccaactttccatcgtggattcaatcacaaaacaaacttcaatatattggactgtctaacacggngattttagattctattcccacttggttctgggaaccacactctcaggttttgcatttaaacctctctcataatcatatccatggtgagcttgtgactacattacaaaatccaatatctatccaaactgttgatctaagcacaaatcacttatgtggtaaattaccctatctttcanatgatgtgtatg

SEQ ID NO: 27096 - DNA, 435 bp, Glycine max
agcttggtcccatgtgcatataaatagcttgtaagcttcgaatatatgaaaaaaagaaaatccagaagcttcttcttcctcctgaactctctttcttctcttctctatactctccttcttccttcccttcgaatacccactgcttccttaggtttcacatcgtcagcgaggaggtttcctagccctcgaaagctcggtatcagatataagcttgaatttgaaattagccaatgctaattatctgaaattatcaatagaatccgcaccttggactttcaggattagaaccacaagattagaattcatgtttggtaaagtccaactttattcaacaaattgaagcacagatttgtaggcatccatgcctataatatcccaatatctctagaagaaacatgcattgaatccatccgggcttggagccccctcaccatt

SEQ ID NO: 27097 - DNA, 301 bp, Glycine max
atggaggctctggtctcttgttgaaactgcatgttctgcatagtcatttgcctcaaaagttcttcgagggaaagttgtggaggggtctcaactgtcggctgtttctacggcttgcgctgttgttggattggtggaagaatgtattgtctgcttgggccaacatcattttggatagaacgaacacgctgctgttgttgttgctgagggctagaccatctgagattacggtgactcctccatccatggttgtatctgctgctggagaggtcataactgttctgttgcggctgattatgctgct

SEQ ID NO: 27098 - DNA, 384 bp, Glycine max
agcttataatatattatacactcgaaattaaacatcagaagctctcgagaaattcaaatggtcataacttttcacccggatgtccgattatggcgaatcacatatcgagacgctcaaaattgaacaacggaagctcttgagaaattctaatggtcataacttttaactcggatgtccgactcaggcgcatcacatatagaggcgctcgaaaaggaacaacggaagctctcgagaaattcagatggtcataactttccacactgaggtccgattcaggattataatatatcaagacgctcgaaattaaacatcgaaagctctcaagaaattcaattggtcatcacttttcacacggatgtgcgattcgggcgcataatatgtcga

SEQ ID NO: 27099 - DNA, 351 bp, Glycine max
  unsure (1)..(351): unsure at all n locations
tcttttggaccttgaacaagcaatctactcctctttcagaaccatgctatgtgctcgcgactggtccctttcttcccttcgcaacttgagttcactattgctaccccatagagctccgcgaaatttgttccggccatactcttccttgcgagccctcttggtctcttgttcaagggctcttgcggtaattgtattctcttcccgtaacccggcacactccttccgaacgtgtgtagcagccaacttgaacttctccttggcgagttttgcctttcctaactcgctnttgagagcttggacttcttcgtcctcttccggtgcttncaaaatctcttcgctgacgacttttaa

SEQ ID NO: 27100 - DNA, 407 bp, Glycine max
  unsure (1)..(407): unsure at all n locations
agctntagaaaaaaatgttaactaaaatattattgcctagtttcactcaccaattatgtaatagccctgatgctcatgcagatcctttaaaaaccaaattaccgttggatccgttcttcacttataatntatgntaatttatgaaatcttggaggtgagatgtatgattgaattttataagagtataataaatgaacacattattaaccatttttagactattataattaaaataatgtttccagtataaaaaaatatttctggctaccttactgcagaagattgttactgctaaatggaagactgctacagcagaagagaagaagccttatgaggggatataccatgcggngaaagaagcttatttgcaggtgattgcaaaggaaaaacgtgaaactgactcaatg

SEQ ID NO: 27101 - DNA, 342 bp, Glycine max
  unsure (1)..(342): unsure at all n locations
tgttcatcttgagataataggtgttcatcctcatttgaagntggtggtgcaacatatttctttggcctaacaggaactccaatatttttacagcttctaatgttatgattggtttggccacaccttccacatgtaaagtcagccaatttcctctttagtctatgtcctgtgacattgtccttatccacagatctccttctatttttctttggctttcctttttggacccttttatgtggtggaacagggtgtgtatactatgtctgggcccaatattgtggtccttagactggttcaataagtcttattataaacttctattggcagccactcatgacacat

SEQ ID NO: 27102 - DNA, 427 bp, Glycine max
  unsure (1)..(427): unsure at all n locations
agctatgtcccttttttttgttttganaattatggatttgagtatctgtgattgaatgagaatttgatgattctgtgttggaaatatgaaattatgtgtttaaaattgattagaaacatataaggaaccaatcttagacctgtttggttgtgtaattggggaattggaatcccaagttgtgcagaacaatgacaactttcgttttgctgtcagacttttgtgctaagcgcaaaatgcttctatgctaagcatcatttttctagacaacaataagcctctagacctgttgtgctaagtgcaaaatgcttctatgttaagcacaatttttttggaaaacaatgagtcgctagacctttcgtgcttaagttgaaatatttttgtgctaagcgtgatctgtcangaaaaagaaatgtcatgttntattaat

SEQ ID NO: 27103 - DNA, 370 bp, Glycine max
  unsure (1)..(370): unsure at all n locations
tgcttctacacaatgcaggatcatttttacactgttttattaggtctatatgntggaacccagtacacgataataatggtataatttgtggttctggttcaggtattgtatggtaataggaagtgattaactcattaatcgtaatacgtgaacgatgaatgtgttgatgacgcaatagaggtttatcatccatgagaatgatgtcaaatggtaaaccgaatacatatgatataaaatttgaagttgtgtgatgcaaatgtggtattgacatgcacctgccatctatttatcatttaaactgtgttcaattttgccagccaaatacacttataatttgcttattgtaagcctcgagattccaaccacgtta

SEQ ID NO: 27104 - DNA, 276 bp, Glycine max
gccatttttatgattagatgacaatgtaaacatattcatgacacgacaatttagagagtgatcaaggactttcacatcgattcccaccgaatgtatctatagacagatcaagatatcttaatgtgtgatgcgctcacagccctcttgacagggcgccacccagtgagttggcgtgcaaatttgaccggccaaattataaaaatcgtcgatataatgcgccaaattgggttattatatcatccagggacacattttatctgtgttatttactcatgt

SEQ ID NO: 27105 - DNA, 369 bp, Glycine max
  unsure (1)..(369): unsure at all n locations
tgaagggacaccacatttcctagtcccagtatctattctaacaaattctttcttcctacacctatactcaccactcctttcacaaccaattaacacaaatgaactccttcctccactactagtgtttgtgtcagaccttataatgaccgccacaaattcgttttcatgagcaacggatcgagcccactgcaaaacatcatctcggctgccaaacacctacaacgcaacccagacaattttagttntctacaacacattcattttattaaattactaacaataatgaacattattacctgagaagtattgaacgaatctgaacaatcaacttgtggttcattcacaccacattcttgttcattttgatca

SEQ ID NO: 27106 - DNA, 479 bp, Glycine max
  unsure (1)..(479): unsure at all n locations
ttgaaacctgaatgacncnttttgaatgatacctttgtagaccnggcaccnnggagtnacctgaggcaagcatgttgctcnaaatttcttggccggacgttatttcggaggaggcaagatgcccgatgctgcatgcagatccctgaaccactagcttacctggggatccgactctcggtcttcaatggaatgagcctagggaatctcgcaggagagaggcctgatagggcttcgatgagagcatgacccatgacccccgtggaaacctacgtgagactcttatggataaaggaatgcctccagtgaaaaaaaatattcatggatgcgctactgctgaagatcgacgctgctcaatggatgactgctacgtcactagagatcatgccgcatgaggtgatctgccgggccgagaaataggctttttgcaggggattgcgatcgaaaaactaggacctgactcatgacgctcctggagaccg

SEQ ID NO: 27107 - DNA, 377 bp, Glycine max
ttgcagatttggtcttcgccagtgaaaggatcaatgtgggtccgaaaagaggcaaatttgatcatcctactaggacgactgagaaaactggggcaaataaagagggtgaggatgagggagaaacccatgctgtgactgccattcctgtacggccaagtttcccaccaacccaacaatatctttactcagccaataacaaaccttctccttacccaccacccagttatccacaaaggccatccctaaatctaccacaaagtctgtctaccgcacttccaatgacgaacaccaccttcagcacaaaccataaacaccaaccaagaagtggaatttgcagcgagaaagcctgtagaattcacccaattccagtgtcctat

SEQ ID NO: 27108 - DNA, 410 bp, Glycine max
gcttgatacatgctgaggttgctccttatcttcaaaacaaggtggttgcttcacttatacttcttcattaatgaatccattcaaaaaagcactcttgacatccatctggtatatcttgatatctttgtgtgtagcataggccagaagtattctaatggcctttagtcttgctactgatgcaaaagtttttcattgtcgatcccttcatgttgattatatccttgagccactagtctttccttgttactaactactttatcttcattgagatttctcttaaagacccatttggttctgccataccctaattctgttcggggaccatcgtttgatggcatgcaacctttgcttgaccgcttcgaggtatctggcacccatctgtgcacaatacataaagttccataacgtgc

SEQ ID NO: 27109 - DNA, 294 bp, Glycine max
tgctttgcccattacctaccaaatttataatgtttttcattgctctcttttgaagccgcatttgggaccttctcccacttctttttaacacattccccctcaatctcgtgccaatgatcccttagtcactcctttgactattctaaaccttcgcatcgtggaggttaatagtgctctcaacccccaaagcttggtccaatggtgtggtctgtcccttgatgacacttcttgtgggaaattgggatgagttatgtgccatccacaaccttgaggacaagattggttttgatgggg

SEQ ID NO: 27110 - DNA, 432 bp, Glycine max
  unsure (1)..(432): unsure at all n locations
agctntcaggtctttcttttctccaatgctctcatatcctcatgcatggtttgagccagctcccatcctttaaggctttgtgtaataatgtggaaatcctaatagaatcaatagctgataggaaactctggcactacaaagaaatgtgtttagtggaactcaagttaatgggtaagtaatcagaactataaaggcaatcatctgaattctgaaggagaattactgaagactcaaggctaccaatatttttctccaatgaatactctagttcagacgattgggattgttggactaggtcgggtttctgtcatttagatacacattgcagcaattacaattgcctctagagtaggattggtactagcagatacaaatgtctctcgggtagtagatacaagtggtaagtataccctcatgtatcacatacttagt

SEQ ID NO: 27111 - DNA, 385 bp, Glycine max
tggataatattttatatggttaaagttaaaagtgtgtcatatcgttcttataaggtttaatatataatatcttttgcattaattattttttcacaaaaatattcttctttaaagtcagatatagaataataacattatggtgaaagaaacaagacccattaatattttttaattttgtttatagggatagttttgaaaaaaaaataccaatttaagataaatttaatcatctctactaaataactaaatttgttatttgaaacaacaatagtatatatattttttatgagtgagaaaataaaaacatagaagaacacaaaatgaaaattattccatagtgaaggaaaccccggagcatatgcataaaccaaatgcctcatttcta

SEQ ID NO: 27112 - DNA, 433 bp, Glycine max
agcttgcacaattcctggtgtatccacactttaaccaaatctttttcaacttcttcctagacacaaaatttaccaccgacatactgcagtgccccttttgcattttgtatgaattgatcattgaggtgcaaaataagactgatttcatcagacatcctactgagaaacaaaaaacattgattgtattttcacaaacaaagaacacaaaaagtttcagaacagagaagagaagagaagaagtttgagaatatagaagagaaaaccagagaagaggtttgacaacagaggccagatgcacaatgaccaccatggcaaacgcagcggaaatggtgccatttcgatcaacgaaatatgcaatgacgatggcgttgttacgattgtccgcaaaaccccaaaacaatcattcatcgatgataaagacactagccgacga

SEQ ID NO: 27113 - DNA, 348 bp, Glycine max
actatacaatactcacgcttgaagagtgaaatatacagaggcaaagaatagatctttaagccaagttttgatcttttaggaagatttgtgagtttttgagtgattgtgagattcctagaggtggaggagacatccccactcctttgtaatgaagcaatttctcttgattcctcttcttcattataaaaggagtgtccttgctatggaaggctaaaccctcagttagggattcttgctgaataattgatgtaaactctttccctatctaattaaggttgtttttatgtgttcattgtttctattagtactttattattgcatgcttgtggtttgatcatacatatgtgt

SEQ ID NO: 27114 - DNA, 435 bp, Glycine max
  unsure (1)..(435): unsure at all n locations
agcttgtatacatgctgaggtttctccttatcttcaaaacaatgtggtttcttcacacatacttcttcattaatgaatccattcaaaaaagcactcttgacatccatctggtatatcttgatatctttgngtggaacataagccaaaagtattctaatggcctttaatcttgctactgatgcaaaggtttttcattgtcgatcccttcatggtgattatatccttgaacccactagtctttccttgtttctaactactttatcttcattgagatttctcttaaagacccatttggttctgccataccctaattttgttcggggaccattgtttgatggcatgcaacctttgcttgaccgcttcgaggtatttggcacccattgttgcacaatacataaagttccataacgtgccagaagtcaaaagagagcattg

SEQ ID NO: 27115 - DNA, 384 bp, Glycine max
  unsure (1)..(384): unsure at all n locations
ctaagcttctatgaaggttcgttcctaatttctctacaattgcatcacctctcaataagctagtgaagaagaatgtggcatttacctgnggtgaaaaacaagagcaagcctttgctttgctcaaagaaaagcttactaaggcacctgctctagctcttcctgacttttctaaaacttttgagctagaatgtgatgcctctagagtgggagttggagctgtattgttacaaggtgggcaccctattgcttattttaatgaaaaacttcatagtgccaccctcaactaccccacctatgataaagagctttacgccttaataagagccctccaaactttggaccattaccttgtttcccaggaatttgtcattcatagtgatcatc

SEQ ID NO: 27116 - DNA, 425 bp, Glycine max
agcttcaacattcaacttcgagcgtctcgttatattacaggattctattagacatccgagtaaaaagttattgttgtttgaatttgctcaaagcttcaacattcaatttcgagcgtctccatatattacgggactcaatcagacatccgagtaaaaagttattgtcgtttgaatttgctcaaagcttcaacattcaaattcgagcgtctcgttatattataggactcagtcagacatccgagtaaaaagttattgacgtttgaatttgctcagagcttcaacattcaatttcgagcgtgtcgctatattacgggactatatcagacatccgagtaaaaagttattgtccgttgaatatgctcagagcttcaacattcaatttcgagcgtcttcatatattacgggactcaatcagacatccgagt

SEQ ID NO: 27117 - DNA, 403 bp, Glycine max
  unsure (1)..(403): unsure at all n locations
ntatactaggatgtttgattgagtcccgtaatatattgagacgctctaaattgaatgttgaagctttgagcaaattcaaacgacaacaactttttactcggatgtctgattgagtcccgtaatatatcgagacgctcgaaattgaatgttgaacctctgagccaattcaaacgacaatcactttttactcggatgtctgattgagtcccgcaatatattgagacgctataaattgaatgttgaagctttgagcaaattcaaacaacaataactttttactcagatgtctgattgcgtcccgtaatatatcgagacgctcgaaattgaatgttgaagctctgagccaattcacacgacaaataacttttactcggatgaatgattgagtcccggaatataacaa

SEQ ID NO: 27118 - DNA, 437 bp, Glycine max
  unsure (1)..(437): unsure at all n locations
agcttcttaagcacaatattattttaaatgatttacaggcacggaaaaatcaggttatgtaaaaaaaatcatttacatagtccttgagcaatattcctaatgcgaataaacagaataatgtaaaaacaaaaaaaccaatgcataaaattcttggcatacaactctagattgatcactcttgtcccctatcgcttcccaaaattttatctcataaaatgcatgcccattagcatgtgaccactcaatagagctcataatgttaattattactcaacaattgctggtaaatatcagtgccatccaatctgtagtgtctcatgtgagtctgtgacataacaaggggcacgatcgcctcctagatcaaaatcgcagacacacaaacacaaattacgaactgccaccagggattgaatcattaaaanaattactttaaaagt

SEQ ID NO: 27119 - DNA, 468 bp, Glycine max
  unsure (1)..(468): unsure at all n locations
nttgacacgctgcattgacgcgttcgatagcatgcgacagctngaagatacgagaagatgagtggacggagaacgagattttgagcacaattattgtgtgcctcanatgaggtctgaactttaaagtgttattctcaaaagatcaaaagttgaaaataacatgcacccaccaatgcgtaagtgtcacaataattaaaaggggaaattgaaatttctatttcaatttcactagaaattctatttaaaatttcactaattatgattagtgaattggagctattgttcaccccacttaatcaagatcaagtttaagattatccattaagtgtgcttaagtgtcatgagacattataagcacgaaagacatgcacaaagtgtgactatatgatgtgataatggggtgtaacaaacaaattgtcacctccccttatgaaagtcaaagttaaatggattgggttctcccattcg

SEQ ID NO: 27120 - DNA, 396 bp, Glycine max
  unsure (1)..(396): unsure at all n locations
agcttaaactattaatctcttaacagatatacttcatgtgtggctgtgatcgttccgagtggtgaaattacggttntgtccttttccttttctgatgcaggtacttcttgaacgtgattntcaacattcttaacaagaagatctacaattacttcccctatccatagtaagttatagcgattatgcgtattttcaactttgtgtggtgttagctcatgaatatcatgtcttgatgttaattgagattggatccgtgaaatgttatgcgcagacatgtgtctctgtcctttgttaacgtcggatggtaagtgaataaggtttttttttattttttattctgaattgtgaataaggttaattaaaggaaatatctcgattcgcgtttctggattatta

SEQ ID NO: 27121 - DNA, 345 bp, Glycine max
  unsure (1)..(345): unsure at all n locations
tattgcataattnntgtaaccttactgcatcattctcaatttgtttttataaataatagcaccctatgctatttatgactttcatctgaattaaatctatcactctcaaatatatatttaagatattctttaaatttcaagtgaaagtattaaataaaatttttgaaacattcttttacattaaatattctttgtttttattaaatattgcttatttattggtcaatctttttttttgacctaattactttttcaatcccgtaagttgtatcatttgactctattattttaaatcttatgtgaacgccttatcggttctaattatttaagtgcacaaattctctg

SEQ ID NO: 27122 - DNA, 409 bp, Glycine max
agcttgatcacaacatttaataaatatctgattgatggtttgcatttcaacccttgtgttgtgtctgtaattgctttaaaatgcatgctctcaaactataggggtgtcataagcgtttaagtaaaatagaacataataaacttttgtttaaattgttacacttgaacttcctgatcatgagcatgcatgcatatgcatatttatcatcctgtgagtcgaaggacaggagaagatttgcattgagtgatggtcaataccatgttgaattcaagacaaaggtaaatcaaggtaagtggtagcatagtcatattttactgtgtggagccatttcctgttttcagagacttaggggcaggtacgagcaggtgccaggcctgtgttctgcaaatcatcatcccgtgtctagctc

SEQ ID NO: 27123 - DNA, 391 bp, Glycine max
  unsure (1)..(391): unsure at all n locations
ntttcggggccatctcatgtgaaaacacatttgcttcgttagtttacaaggaaatgccattttaaagcaaaatcaagcaaaaacagcatacaactccttccaacaaaacgcaaatatcaatgtaaatttagagcaaactcatacaccaatgcacgtgtttttctgggacatacatttatgaacatacatgcatgcaagatattttgctacctatcttcacatatatgtgtttccaaagcattttcgctaaatttacatacatgcatactcaaggtattttgggctacgaaaaattacatacatgcatattcaaggtatttttgctaccaaaaattacatatatgaatatccaaggtatttttgctaccaaacattacattttatgcatatt

SEQ ID NO: 27124 - DNA, 392 bp, Glycine max
  unsure (1)..(392): unsure at all n locations
agctngactaggcgagttgattntagccttattttcactntagttattaatcaattcgattaagaatgagaaatcccaaagagaaaacgtccgattgattttccgctttattntactaaaagatgtttttcgattatttatattatnttttacctctttttgatttccatcgtggttacggcacgaccgaacggtcggaatttattttaaccgaagttaatggataatacaattcaaacgttcggtggaaatttattttatttttaagttaagcgagaaatgacttaagtaaaatggcttaagcacgtcaacagggggtataaaaagtaaacaaaacgagaataaaaatgcacgatacacaatgtggaccactacgggtacatagaatgaat

SEQ ID NO: 27125 - DNA, 394 bp, Glycine max
tctccttcatggcttattccctattggatggtgtctcctctttcctcttctcctttatcttccgctgcatctccatggtggaaaatcaccattgaaggacctcattgaagctcaaagatccagcctccatataaactttttaagtaagcttccattaagtcatgtacaattgtatagcaaagtaattgatagcacaaaatagtgatgttcatgacattataccaacactactatgaagcaattatggccatggcaaagtttaaatagtgtcaagtttccttatagtaactataacacctgcaattgtggcaaaaaatgcaattgttcatggcattataacaacactacgaggaatcttttcacaatgtcatgtttacccagaaataatgttgga

SEQ ID NO: 27126 - DNA, 479 bp, Glycine max
  unsure (1)..(479): unsure at all n locations
gtgaccctgatgacgcgtgaantcctacctttagacccacctgaacatcaacctgagcgactcgtttatgctcgattttttaanacatttttagtcaacaacattgtcggagtctgcattggccctattcaacaacattgtaatcaatcgcccaacaagtaataaccgtagctcatgcaaacttaccaaaaactttcttgagaacgtgcattgggcaaacctcttgcatcatcaagtataagaatgttgtctaaaactttagagactatcatcacttatcttgaatttctaagtgcttgacttggatgaaacatgcaaagcgcttaacttgcggcatcgtcataactttatatacagtatgctactacacagactacctgcgtcgccgacaggccattttgaaatctctgacctcgaacccaaacttcacggcttctcacaantcgatcttgaagaacggacgcatttagctttcatgn

SEQ ID NO: 27127 - DNA, 338 bp, Glycine max
  unsure (1)..(338): unsure at all n locations
tataaaattagacacganaagagtttatgttccgttctagcctaaaaggagaaggaaaagttcacaaattgattgaagtgatcatagcacaaaagaacaagcaaattaagttgaagctatcttgatagataaccataaagcacatgcctctttaggatttttcgaatgcgtgccattagcaggaacttttccattgggagcttgacaatttccaaataggaaatttaagaaatgaatacccaatgtactaaatatcttttacatatttttgatcccacataacttgaatagataaagtgtatgcattatggtatcatgcaataacattcaaacaaaat

SEQ ID NO: 27128 - DNA, 332 bp, Glycine max
tctcccctattttgctataaatagggggagaagtgtattaaaaaagggttcagccccttaggcacttctctctctctcgaaattgctgaggaaaattatttccgtgaagaaaatccaagccgaggcgccttcgtaacgttttcgtgagaaattgcacgaagattctcggcccgtcttcaagaatcatcgttcgttcttcgttttcttcagtcttcaacgggtaaggacctcataccaagctgttcaattcattctatgtacccgtggtggtccacattttgtttcatgtatttttattctcgttttcatttactttttatacccccttttga

SEQ ID NO: 27129 - DNA, 426 bp, Glycine max
  unsure (1)..(426): unsure at all n locations
ttgaactcatgcccgtgaatgatacatgaanaccaccgnaagtgaagctggagcacccattatctaataactttgtcacgtnattttattaacccatggaatgagacataactgtttggctgagaggctctgaaactgtggcaaccgaataacacccccatcagcctactacagccaccatttgggctcccaagaggcgatgccaatgccgaccatgagccctcattcctaacgcgaactaaacctcctgagagcccttcgactgggaaacccacacatatgatggccgcccctttacaagactgggccttataggacaaatacacctctaaactcgaacaaggggggcctatgtccgctcaaagggcaggaacaatcacaactggacttttcctgaactggtctgcttaattatcagacacaagc

SEQ ID NO: 27130 - DNA, 335 bp, Glycine max
  unsure (1)..(335): unsure at all n locations
tcaatgttaatgtcacatcagataatgtcaaaaactttatcaaattatggagatcgtggtatggtattgtaagtgacatccttggacagagtggatttgattgtgatggcactaagcacatgatcacagttgagaatganaatgtttggaatgaatattgcactgtaagtattctttaatatgtttctatttgttattcaaagtagattggatttgacttcttttttttttcagtcgcataaatcggctaaaccgtttcaattcaaggtgcttcaaaattgtgatgatatattggatttgtgtgctaaaaatagagtcaccggtcatggagctga

SEQ ID NO: 27131 - DNA, 400 bp, Glycine max
cttctgagagaagcggttcctcccttattctgtgatggtgctttcattgtactttttttcggttaacatgaagctgaaaaccaccaacaggttgaaccccatctgcgatgaaggtctcgtggaagtagaaccggaaatggctaaccttgtgttttttctctagaccgagtgtttcgcggtcttgtgaaccgacgaaacggctgtcttcaccgactttggctgaagtgagggcttggcatgagatgagaatggactagatgagaaattgatttgcccaggtcttgtgctagtatgacatgttggaataatgaaagtgtttggagggaagaatataataatcacagagatgtcatcattgtctggagttttgcctagcgggaattagtgtcgaatggctgtt

SEQ ID NO: 27132 - DNA, 293 bp, Glycine max
  unsure (1)..(293): unsure at all n locations
tctcaaggaggtgatcttagttatgataggggtgtgtgtagctaagctctagcttctcaaggaagttttctcaaagaagcttctcaaggaagttttctcaagacatattctcaaggaagctacctagtctataaatagaagcatgtgtaacacttgtggtaactgtgatgaatgaaagtcttatgagatacaattcaaagntccacttctttccctcttttattccttcaattttgtgctccccccttctctctttcttttcctccattaaagcatcctcttcaagctactta

SEQ ID NO: 27133 - DNA, 306 bp, Glycine max
  unsure (1)..(306): unsure at all n locations
agctntacagcagattttagtaatgacccactaacctagaattaaaataacttaatgctattaacctagggaattaaaaaaaaacttaatggctgagtgtaactgaaattgtggcaaccaaaagtcacccccaacagccaacttcagccaccatttggtctcccaaaaggctgatgcctaagttgccaattgggcccttattacaacttgaactaaacctaactaaagcccttttaattgattaacccaaaacatatttttggtcagccaactttacaaggattgggccattattggacaaattaa

SEQ ID NO: 27134 - DNA, 400 bp, Glycine max
acacttaaactcaagcttgagcattcaatggcataatgcactctttgtccgattcatgcacataatttatcgagacgctctaaattgaacaacggaagctctcagaaaatttaaatgctcataacttttaactcggaggtccgattcaagcggataatatatcgagacgctccaaattgaacaatggaagctgttgagcaattcaaatggtcataaatagtcactcggaggtccgattcaggcacataatatatcgagacgctcgaaattgaacaacggaagctctcaagaaattcaaatggtcataacttttaactcggaggtccgattcacgcacataatatatcgagacgatcgaaattgaacaaccgaaactcttaagcaattcaaaagggcataa

SEQ ID NO: 27135 - DNA, 430 bp, Glycine max
  unsure (1)..(430): unsure at all n locations
agcttgagccgccgccgccgccacanaatgtttattggaccattcaagagcgtcattacgcgtttctctctatctatctagcgtgtctgagaattccgtgtcgttgacgagcgagggtgcgactatgacctgcgacttcgatctccggcaatccgcggcgaggttcgtccagtaaaacggcgccgtatagcgggatctgcgacgctgggcggagtggcaatggagggcgagaacgcgagcaacaaggtgatcgagttgatgaacgagatagccagcatctccgattacaggcctccggtgaagaagcagtactgcaacttggcgcggaggctgaagcttctgatcccgatgttcgaggagattatggacatgaacaaagacgcgcttcccgataacacttccaacgccgtcctcgccttcaaggaagctc

SEQ ID NO: 27136 - DNA, 394 bp, Glycine max
cgctttaattgaagtgaaacactttagttaacgaggttctctttcttgtttatagctaccgtgaatttttattctgacaacaacaactaaaactaatcggccatgcatggggtagaaagaacgaagctcttgaaatttatactaatttggcccaagtacgaaataataataagaagataaaaacacttaccggaaaaagtaaatctaatgattccctggctgcatgtcgaacggctctagtgggatacattggaccaccaggagaagtaaagctatacaaacaagttttcaatctcgtactagtagtcattctcaattccaagcctgtgccgttaacataaacacaagaatggcatagttaagtcatgagatattaatagtccctgtccaaata

SEQ ID NO: 27137 - DNA, 429 bp, Glycine max
  unsure (1)..(429): unsure at all n locations
agcttctgagagatgcggttcctccctaatattgtgatggtgctgccattgtacttcccttcggttaacatgaagttgaaaaccaccaacaggttgaaccccatctgcgatgaaggtctcgtggaagtagaaccggaaatggctaaccttgtgttttttctctagaccgagtgtttcgcggtcttgtgaaccgacgaaacgggtgtcttcagcgactttggttgaagtgagggcttggcatgagatgagaagggacaagatgagaaattgagtagccatggtcttgtgctagtatgacatgttggaataatgaaagtgtttggagggaagaaattaataatcagagagatgtcagcaaagtctggagttttgccaagtgggaattatttttgaatggctggtttagattantatacgcacatcaataca

SEQ ID NO: 27138 - DNA, 347 bp, Glycine max
tgacaatagattcaacacaaaagcttaaaccatggcttcagcctaatcaaccaatcctgtatagagaaatttcagcaaaagaaaattttctttgggtgaatataatggcaaaacaaattgaactcggaaagaaaaaacaagatacttgttgcccattttccgtaaaataaattaaaaatgattttatttaaaataaataaagttttagaaaaataatgagattttttaattaattaaataaggagaaatagttttattaattaaaataatgttttaaaggtaaataaaataaatatgtgtttttagaaaaaaaacattttatttattcatttgataaagaataaaat

SEQ ID NO: 27139 - DNA, 436 bp, Glycine max
agcttgtgatccttgcaagtcctttggccttaagtgcagtcactttgtcaagaagcagcgtgcaaaattctacattcttcgccgttgcatcgccatgctcttgtgttggcatgagcgtggtgacacataataaggcctgccacaacagtatcatccttttctctgtcattgtaacataaagagggtactactactatgtcacactgcaaaattgtcactttttctctaataggattattgcattgtgtgtaatcacgtgcagctactaacatgtgaaagagattagatctgtttcaactttcagaactattattattgagtagatcttcttgttcatgtgtcaagaccctcctctcaaacttgcatatatgttattatatttgaggtctagttcattggagagcttaatgaaacttatatcatcaccatatgcaac

SEQ ID NO: 27140 - DNA, 336 bp, Glycine max
  unsure (1)..(336): unsure at all n locations
ttcaattggagcagtatgtgggctgtcatggccagttgacagatttatatttcaggttcttgatgactcaacaaatcaatccttaaaggtatccaattaatccagtaaagcttcattgcagattccatatgcatctgttgggtgcaaatttacagtaattaagtgttttcaaacatgcaagaatgtgtccaaatggagtgtcaaagatggatacaaaaaggcgtgaatgtcaaatatgaaacaaggacaaatcgcaatggttacaaggcaagtgccatgaaggacggtttggagaatgaatatngtcatgattgcgagaatgtaacaatatttgat

SEQ ID NO: 27141 - DNA, 393 bp, Glycine max
  unsure (1)..(393): unsure at all n locations
ttctctatctctctttgggcttttctacatttccttagtgacaagtcatctgcctagaagtttcttgtcttgacctggttgttgtgtgtttctcatctgccatgcacttccatgtttaatttcgagtgtctcggtatattatgcgcctaaattggacatccgagtaaaaagttatggccatttgagtttgcctagaacttttgtgttcaatattgagcatcttgatatattattggcctgaatcggatatccaagtcaaaagtaatggccatttgaattttccttctgcttccatatataattttgagcgtctcgatatgctatgcacccgaatcggatattcgagtgaaaagttatgaccatntgaatttcttgagagctttcgtttgttaa

SEQ ID NO: 27142 - DNA, 322 bp, Glycine max
  unsure (1)..(322): unsure at all n locations
tcaaaccacagcatcacaaaatctatgtgtccaaaatccctcaattcaatggctgttctaggcttgaaaggtggaatttaaaatgaggtaaatttggagcaaactctcacctcacacaagtctataacatcaatctaaactcgctcaaactggattcacacctaaatttccaccgaatcaaaattagactcctcaacacccaattttgccctagaaatggctctnggatcactatggtcatttgtttttctctctagctcagcctaacctttctcacatgtcctaaatgacatttcaagctattattaactcactttaacct

SEQ ID NO: 27143 - DNA, 384 bp, Glycine max
  unsure (1)..(384): unsure at all n locations
agcttctagattggtattccatgccactgctgctccggccaagctgtcttgaaagaaatggaccaacaacttttcgtccgcggaatacgcccccatcttccgacaatacatccggagatgcccttntggacatgtcgtccctttgtacttatcaaagtctggtactttgaacttgggagggatgacgatgttgggcacaagacataaatccgccaaatccgagaatgggtaattgccaaggccctcgattgctcttaacctctcttcaagcgcctcaatctttcctttatcttccgcaaagggaacagattcttttacgggtgtgggtgaggtcgggatatggcggactatgttcgggtgggatagttcatgtggggatggatc

SEQ ID NO: 27144 - DNA, 256 bp, Glycine max
ttggtcaatttcagactgccatattttttgacatgttgtgtgcgattgaggcacatgatatatcaagacgctcggaattaataaacaaaggttctaaagaaattaaaacggtcataacattgcagttggatgtccgattcatgcacataatatattgagacgctcaatactgaacattaaagctctagtccaattagacggtcataactttttgacatgggagtgcgattgaggcacatgatatatacagacgctc

SEQ ID NO: 27145 - DNA, 417 bp, Glycine max
  unsure (1)..(417): unsure at all n locations
agcttgatttatgaattgattntagccttattttcactttggttattagtcaattcgattaagaaagaaaatctcaaagaaaaaacgtccgattgatttttttgattattttatttaaaaatattttttgattattatattattattctgcctctntttggttttaaacgtggttacgacatgacagatcggtcggattttattccaacagaaattaaaagatgttacaactcaaatgatcggtggaaatttattttatttttgattaggtgagaaaatgacttaaataaattattaaagcacgtcaaaaaggggtatggaaagtaaatgaaataaaaataaaagcacgcgaaacaagtggggaccactaagggcacatagaatgaattgaaggttcgattcgggaactatcggtga

SEQ ID NO: 27146 - DNA, 345 bp, Glycine max
  unsure (1)..(345): unsure at all n locations
tgcctcanagaggtccaggaaggataatgcggccgataggactagttccgctcctgagtatgacagtcaccgctttaggagcgttgtacaccagcagcgcttcaaggccatcaagggatggtcatttctccgggagcgacgcgtccagctcaaggacgacgagtatgctgatttccacgaggagatagggcgccggcggtggacatcactggttacccccatggccaagttcgatccagaaatagtccttgagttttatgccaatgcttggccaacagaggagggcgtgcgtgacatgaggtcctgagtaaggggtcagtggatcccggttgatgctgatgctat

SEQ ID NO: 27147 - DNA, 434 bp, Glycine max
  unsure (1)..(434): unsure at all n locations
cacctgagctgcagcttcacacgggtttttagcctcttattatcatgagaggcttaaaattacacacagggtgaaggtcgtggaaaagaatgaacgacaaatggagatgaagggaaggaatgactctcaatgggtgattcttctctccttggacatgtccgagtccgtctgtaatgtggggaagaatgaatccttgttccctcttttttcctcacttaaaacgcaacttgttctattttttttggacctcacgctaaatgaggagtaagtgactacgcgctaagcgtgatttcacatgacatctggcttctccaagtgactntttcgtgttaagcgaggactgtccgctgagcgagtgtgacgtgctgagcgagagtctccgagccttcaactctcttccatgtcttcttctgtgttattacaaaaaaatatat

SEQ ID NO: 27148 - DNA, 386 bp, Glycine max
tgcttcctttaataataactgaatatttggagaagtattttcttgtgtttgtaagcccacagtggttctcagcaaagagttgaaggtaattttatccttgaaaatgcaaagtaatgcaactaaagatcgttatatatatgttcctatatcctttgcataatcagatgaaacctagttcagttgccgaatttgttcaaatttggaaatactcctttcctatgacaaaacttattgaagcctagatgtaatttgtatttgagaagaaaataggtgcacaaaattttcatttgaatttgcattttgccgagagtctgagtacttgagtagacattctagaacaggtgtgttagtaaacgtgatattacctgaagctcgttaatacctga

SEQ ID NO: 27149 - DNA, 315 bp, Glycine max
tcactttccagaacctgctgcttttactactactagtaattttgctgcttttactactactgctactagtaattatgctgcttttactagtactagtcctacaagagaaaggttctatggaggttttgttgagaaacttcattccttggtggtgttggtagtccaaggacattctatatggcggagggtagggtgttgtatgaacgctatgagaacgaacatggccttgccgaatagcgctgttgtcaccgccgatgtggccggaggcagaagggtgttcaggtttgttgttaagtggtagtaagtagtatgact

SEQ ID NO: 27150 - DNA, 344 bp, Glycine max
tggttctctccagtctctgcacaggccagaaactcttaataaactcaacaaccctctcaatctcgagattcaactttaaataagaaattctgttgggaggcgcgcttaacgggagataggctcacttatcacgtgtgatggaagcttgcttgtgaggcttgatctttgagcttcaatgaagtcctttaatggtgattttccaccatggagatgcagcggaagacaaacgagaaaatgtgagaggaggctccatccactatggaataagccatggaagaaagaacttctccacccacatgagccttgggatagaagcttgtaagatgctttaatggaggaaaaaa

SEQ ID NO: 27151 - DNA, 187 bp, Glycine max
tgtttcatttgcataacctaaatatcacaacgaattatgtcaattaagactaaaaggcatgggtataagatatgcggaaaaagttataacaagggtacatgtatgggaggaagagtatattatgtataaatagtaaaatgaatcaacaattaagtcatgattcataaataaatgtcgtaatgcaaaa

SEQ ID NO: 27152 - DNA, 394 bp, Glycine max
  unsure (1)..(394): unsure at all n locations
tacattatgtgcctgatttcttttccttcatttgatgataaaggaacaattaatgtgttatcatggcaaggtcccatttgctcgtctctctaaaaagtgttcacaggagatgcttaattataataatggtcaatgggtattaataatatctaataaatactgataaaaaaagtatctaataaatctttaaatatattaaaagataaacaacaaattttatattttaataaatacattctattaatgtatttggtttgttaactaacactctaaagaaaatggtcataatactctcttgaaaaanatatatttatgtttattggaattaatatatatcaactcatgtatttttctattagtagtataaagtgaaacacataagagtaaatcatac

SEQ ID NO: 27153 - DNA, 416 bp, Glycine max
  unsure (1)..(416): unsure at all n locations
ctcagcttttatccaggcacattcttggtggcgaagctccttcttccatggcttattccctagtggatagcgcctcctctcaccttttctcctttatcttccactgatctccatggtggaaaatcaccattgaaggacctcattgaagctcaaagatccagcctccatagaagcttcacaggcaagcttccatcataaactcgccaaagcgttcgtctcctagggagaaaatgagcagagtcaccaccaacgtttattcgaggaaaacattagaaaaaccaaaaagaggtctgcaaattttgagaataaggattcaggagttgtttgcacatgaggaaggtattagcaccccacgcgcccgtcacaagggatgacaacctttaattgagtgtgtgcaatgtgacttcngaattatt

SEQ ID NO: 27154 - DNA, 445 bp, Glycine max
  unsure (1)..(445): unsure at all n locations
agctnggagaggatgctntaatggaggatattatagagggagagatataaggaggggggagcacgaaattgaaggaagaaaaagggagagaagttgaactttgagttgtgtctcacaagactctcattcatcaaagttacaacaagtgttacacatgcttctatttatagactaggtagcttccttgagaagctttcttgagaaaacttccttgagaagcttctttgagaaaacttccttgagaagctagagcttagctacacacacccctctcataactaagctcacctccttgagaagcttccttaagaagattcctaaagaagctagagcttagctacatatacctctctaatagctaagctcacctccttgagatgagaagctagaacttagctacacacccnctataatagctaagctcacccncatganaaanaacatg

SEQ ID NO: 27155 - DNA, 404 bp, Glycine max
  unsure (1)..(404): unsure at all n locations
tcaagctnttatccatgaaaatcacctgaatccgttcaaaagtcgaacgctttattgtgtctcttttacttttatcagttaatatgaacctttcagaaagtttaaaatcaaccctacgcgtaactttctcacttttaaagaactacgtaggtctgagctcctcatcgcacttaaggatacgtaggagcaaaagccacgctcttattgaccccaaaaggtaaaaatcataaaaaaggggaaaataaataaatattgaagtcatgattttgcatactttaggagcaagtttcttaagtgtttcattgacagatatgttgtgcccatggtgcccctacaaaattgaaatttctgaaaattaatgcatgaagttgatgtcagtaagtacaaaagtaatgcattgacat

SEQ ID NO: 27156 - DNA, 472 bp, Glycine max
aagtcacctgcggcatgcaagcttcttctcactaagaaccaaaacccattctaaaagaggaagttcatggcattcctcatgaagaagttctagagcctttggataggagacgcttcatgtctaggtccaaataacaaagatatgtagaacttgagtccagaagtctaatctgtgagtgaaaagtggacttaaaggccaggcaatatgaagaattttaggctaccatcacaaaaaaaagtggaacattctggcagagcttgaaatgaaactctatgaggaaatagtcaaagaattctattccaattcctggccaacaaggcaacatgagatcactaagatttcctgggtgagaggggtctaagtgaaatatgacagagataccatcaataggtatctaggagagcccactacactcccagaagatggtagagtcacatatcagagaatgacgaagtgacatgaattcaataat

SEQ ID NO: 27157 - DNA, 308 bp, Glycine max
  unsure (1)..(308): unsure at all n locations
ttatcaaatggatgttaaaagtgattttctaaagggcttaattataatgaagtatatgnngaacaaccaccaggttttgaaatattggataagccaaatcatgtttataaattgaaaaaggctttatatggcttgaaacaagcccctagggcttggtacgagcgtctaagtaagttccttttagaaaaggacttttctagaggaaaagtggatactattctttttataaagagaaaatcacatgatattttactagttcaaatttatgttgatgacattatttttggatccactaacaaattgttgtg

SEQ ID NO: 27158 - DNA, 481 bp, Glycine max
  unsure (1)..(481): unsure at all n locations
agctcatggaaaaggaggcagatataataatgctgaagcaatatttctattgatgcagaaatggggccttgaaccttctgctttcacatacccgataattcttaaaacatttgttcatgcaactatatattcttttactctgcgcttttatttccctttaatatttaatctcttgcagccactagtgagggtggtggttgtggtacttctggtttcctgtgaattttttttaataaaattcaaatatgttctttgtctaccttcttattgaatttttggattttttcgatgaatgtgttcagtcttgccatagaattctaagctgtaaataagggcccaatgatggctattcaactccaacacatcccttcatctaagtttaaacacggagattgatgggctcaaaagttntaattatttgttcctataataatgattgttcagccccaacacatgtcctcgtgtttctttgatgactata

SEQ ID NO: 27159 - DNA, 402 bp, Glycine max
  unsure (1)..(402): unsure at all n locations
ntcaaattcttacctaccacgtaccttagaagttgttatagagtttgatttaccagaatgacggcatagcacatgggctcaagatttctctcacccatcctttttccatcaagctctccgctttcctttggatctcttttgtctcttccaaattgcttctatatgctggcttatttggtaaggaagctcctagaatgagatcaatttggtgctctatccctctcaaaaaatgtaacccatgagggttgtctttagggaagacatccccaaactccttcaataatccttccatacctataggcaaagcaatagaataaaaacaataatcatggggcattagtaaatacataggtagcctagctagtatcactctctccacctctttctctctcatgaacaagc

SEQ ID NO: 27160 - DNA, 359 bp, Glycine max
  unsure (1)..(359): unsure at all n locations
agcttagctacactttcctctctaatagtttatttcacctncttgagatgagaagctagagcttagctacacacccccttataatagctaagctcacccccatgacaaaatacatgaaaatacaaaaaaagtccctactacaaagactactcaaaatgcctcgaaatacaaggctaaaaccctatacaactagaatggccaaaatacaaggcctaaacgaaggaaaaaaaacctattctaatatttacaaagataagcgggctcatacttagcccatgggctcaaaatctatcctaaggctcatgagaaccctagggccttcccttggatctctggcccaatctacttggagtcttcta

SEQ ID NO: 27161 - DNA, 356 bp, Glycine max
gatgagcacaaccatctcatggtaacaccatagacatgacacactcctggaagactcaaatttaaagtcagaacctaccataggctagccgtggtagatgccatgggcatggcacatctaggcatgaatttgaacaaagttttatgaattgggaggacatcaatggtgtacccacccatcctaacctcattcaataattctaaataaatactaaacattaagaactaccaaatcatagtgggtttcatgcataatctctcagaaggctcttaaagctcaaggcttagaggggtagggttcaaaaccaaaacccattcatggttaccactataacactctgaaaattacgaatcaat

SEQ ID NO: 27162 - DNA, 495 bp, Glycine max
  unsure (1)..(495): unsure at all n locations
ggccattgaacccattganattagtcctttgatgtccngcgacctcagagncacctgccgcatgcaagctancctattgttgaggnngggattattttttgtgtaatagacgaataaaacagacctagactatcactatttctctgggagacgcggcttataaagatcaaaacattatcaaatcccgccaatggttcacaacagactctcccatgccttccatatgaacaccaaataatgcgcacgctgatacctttactgaactattacactgtaaaacctcatgctgacacgatttgaaaagcacccaattgaggtaattaccccgccctacctcacccatatagtaaccacacatccgttaatcaaataaaaaaccgccctgaccaaatgaaaattttacacgtggtgttatcaaaacaggntctccatttggctttcacctttgacaacaacaacaccatttgggcataatgtcgtgagaatacaagatct

SEQ ID NO: 27163 - DNA, 203 bp, Glycine max
  unsure (1)..(203): unsure at all n locations
tctcccagagattggcatattactggtatggaacctgacacctgaatgttcatgttntcattgacgaacatgctgtatgattctgtgttctgcgtttacagcaccatcgcttatcaaatcaccaatctgcactcatcctgatgtgataatgacacggttgttagaagaagctcactctttgcataaggatgacattgttttct

SEQ ID NO: 27164 - DNA, 403 bp, Glycine max
  unsure (1)..(403): unsure at all n locations
acacaagaaactccgctgagaggtgatctggcattgatggtttagggattatttgaccaccacatttgaaacacaaccccttttgtcggtgttccaacagttcttggtatggaagatgacacaccatattcttgtgtgccccctttttcagtcctcatgcctaggcctattatgcctattgtcatgcatttccttgctctctcgagtaggcttccactcactgttactgatgcggcccattgcatttgggccaaacgaataatatgaactggagcgatgataggaatccgatccgaaatggttttgagccccactgctccatagtgtacttcctcgttgtacttgtagcttgtactccactgcgcngtccacattcagcaacctcgacctcgatagcagtcct

SEQ ID NO: 27165 - DNA, 511 bp, Glycine max
  unsure (1)..(511): unsure at all n locations
ntgaaccctgagnatgatcctgatgaccngcgaccnnagagacacccgcggcatgcaagccagnacccgtgttaaaggaggggataattgttttccgcangacaaagcncaagagcctccgtatgagacacgactgacgcctgggagcacatggcaatagagtgcagaacccgactacagaagtcgaatccgtgagagaaaagtgcgacaaatggccaacctataggaatgaccataaggtaccttcacactatatactagaacaagctggctcaacccgaaacgacccgctgtgaggacatagacacctaagactacttcaatccctggccgaacctgcaacatgagaacacctacacaacggtgtgagacgcggccacttgagagacgacgcagataccatccagagggatctatgatagcccgccgctctctcagaatatgcgactgcacatatacaacaacgtgcactgagtgaagctataatgcnccgcggccaccgtctcacacn

SEQ ID NO: 27166 - DNA, 442 bp, Glycine max
  unsure (1)..(442): unsure at all n locations
tggttttttggattaaggnattgacttatcttaatcactcaattttgacacatgaatgactcttggaagcccatggaaattgtgtacatcaaacctactattggtattgtttccttttgaattttctactaaaaatggctaaagtagagttttgtcaataatgagtattctcactttatactaaaactagtaaattctatcctaaacaccttgattagtgttctaatatccctaagattacatgaaaccaaagtgaacctcacacatttgtcactctcacacaaagctaaattacactaccactttgtgtacaacgcaatttcattacagatggaattttcatttaggcggtttccatatctatatcaagctagactaatacaaattacttacactaaatatagggatatatagcacaaaaactctatgattaanaacatat

SEQ ID NO: 27167 - DNA, 384 bp, Glycine max
gacacttaaatctcaagctgagcaatgtcctagaataagctgttcttcttttatataggaaggcttgggtgtgagatcccttcgatcccttaatcatggcgctctgtcgaatctcaggaaggcacgtgtctgtgggaaagaaaccttgggctactttcgaggatgtcatcccacaatgattcaatactttgggaacatatttcttgtgacacaaaaaaagcttcttctatactcgatccctcttgatttccatgcccaaaatatggtaacagctctcatgtcctgaatctcaaattcactacttagtaatgacttcagctactgaatagccaacacatggtgcaatgttatatgcatgccatgcaccataagtaatagattgat

SEQ ID NO: 27168 - DNA, 269 bp, Glycine max
  unsure (1)..(269): unsure at all n locations
aaaaacgcagactttcactaaatcaatgggagaactagcttcatatattctaattataatattctacaaccaattctctctttctttctctcccatgtattctaaatgaataacaaataaaaggaaatcagatactattactgtacaagtacactgtaaatacacatgcagacacatttagagaatgcaacanattttgtaaatatagcaagcaacaactaaacattatattattatatcacacatctgttaatacatatcataattct

SEQ ID NO: 27169 - DNA, 392 bp, Glycine max
tgtaaattaaattgagtctaatagaaaaaagaatttcgttttataaactataaataacatttttacactctcatacttgatgaaagattcaagtaaaaaaaatgcttattgtaaagcattatagttaaattagacccatgaataatatttaggaaaaattgcaattgcaatggcacttttaatttataaaaaacattcacctccttttgaatgatttttttaagattatgattttttaaatgacgagtcagtaaaaaataattgtgtatgatttttaaaaaatttaaaaatcaacaaacttttattataattcgtaatttgatatcattgcatatactaatagacatttatattttattatgaaaaatttattaaaaacaatcaaataaata

SEQ ID NO: 27170 - DNA, 408 bp, Glycine max
  unsure (1)..(408): unsure at all n locations
taagtcacctgcggcgtgcagctcaactttatacccttccattgttttgttctacttacatggacttgatggggcctatgcaagttgaaagccttggaggaaagaggtatgcctatgttgttgtggatgatttctccagatatacctgggtcaactttatcagagagaaatcagacacctttgaagtattcaaagagttgagtctaacacttcaaagagaaaaagactgtgtcatcaagagaattaggagtgaccatggcagagagtttgaaaacagcaggtttactgaattctgcacatctgaaggcatcactcatgagttctctgcaggcatcacaccacaacagaatggcatagttgacaggaaaaacaggactntgcangaagctgctatggtcatgcttcatg

SEQ ID NO: 27171 - DNA, 299 bp, Glycine max
gatgtgcatatctccttacgaatgttcacttgcactatacattctatcaactaagaaaaatgcgcccatatacaatcaaggcagcttcgatacctagattatttacatgtacttccaaggagcatttgctacttacatcacacacatctgctcggctgaatctacatacatgcatactcaaagcattttggggtaccaaaaattgcacatgtgcacatcctggtattcctaatacctatacatacacaaacttcatgatgaatcttgactatctacacaataaggtgctacatttcatg

SEQ ID NO: 27172 - DNA, 370 bp, Glycine max
  unsure (1)..(370): unsure at all n locations
aagatataaagattatgggtcttcttgccttctttaggtgtctgtgagtgccatggtattgctgtttggacaccagatgtgtttctaaaatcagttcttttcttggtaccttttcagtttcagtttccttggatgtcaaaggatgagggaattggtgctngacttcagtttatgggcctcattctccatatttgtgctcttttgggattagcttagtttcacgttttacatagtaataggagagagttggaggaccaagataaacagaattaaaaagaaggaaagctgaataaaaataaaagaggagagtttcctagacaagagaacagagagaataatgagaggttgccagagaggataacaaaggaca

SEQ ID NO: 27173 - DNA, 415 bp, Glycine max
aagctttataaatcagtacatctgaaatcataacacatgatttcatcattattgtttggcaggaagtctaagaatgaatgtattatattttcctttccaaacttaatagaattactaccttacttttctgatagagataataattacaatcaatggctttacttttttccttcaaatgtttatcatatcaagtttaaaattctgtatagggtgaggatgccagagtcagaagggcctttcaaacaattttagtctatgttggaaatgttgccaagaatcccaaggaggacaagtacaggaaaattcgactgaataacccattattccaggtaaggcatattgttctaaacaaaacaattttgttggcaacagttttagttagaaaagttaaagcttcagggtagacacattcttg

SEQ ID NO: 27174 - DNA, 294 bp, Glycine max
  unsure (1)..(294): unsure at all n locations
atgattccatgcagcgggcgcagagaagactctggcttaatgcattcgggtgtaccccatgacatagaaacatatttgacagtaagggatctattacaatggatgatagaccaacgccggcttgaggtcgacagtgagaagaangaggaacaacatgtatacatgcagtcgacagatgaagaaggacctaaaaagcctaaacccttggtaatacacttcaccaggaacacggctccccaaagacctcaacacccctcggcagtgtcgggcggtagatctattatgtttccttac

SEQ ID NO: 27175 - DNA, 422 bp, Glycine max
actcaagcttcctcgagaagattcctaaagaagttagagcttagctacatacatcctctataatagctaagctcacccccatgccaaaatacatgaaaatataaaaaaagtccctatttcaaagactactcaaaatgccctgaaatacaaggctaaaaccctatactactagaatggccaaaatacaaggcccaaaagaaggaaaaaccaattataacatttacaaagaagaatggatccaaccttgacccatgggctcaaaaatctaccctaaggttcataagaaccctagggccttctttaatagctctagcccaagcctcttggagtcttctatccaatacccttggggggtaggatttcatcatcccctccaccttggaaaggatttgaccttaaatcctgaggttcttcatactcta

SEQ ID NO: 27176 - DNA, 470 bp, Glycine max
  unsure (1)..(470): unsure at all n locations
gcaagcttagtcctagaagggacggaccttnttgtgtttagagaggatctataacaatgcctatagattggacctcccagaagagtatggagtcagcaccacttttcacatttctgatttaattccttttgcaggtggagctgatattgaggaggaggaacaaacagatttgaggtcaaatcctcttcaaggggaagggtatgatgctatcctccctaggaagggaccagtcactagagccatgagcaagaggctccaagaggctagagttgctgaataaggccctagggttctcatgaatctcaaggtagatttctgagcccatgggccaaggttgggtctgttagtgcttagctntactaagctntaaaagattggctaagaatttgttaaaacataagcacttanacaatgatggaaagctggagttgctgcacatgatgtccaacgttatgtcaaagaataagatc

SEQ ID NO: 27177 - DNA, 285 bp, Glycine max
  unsure (1)..(285): unsure at all n locations
tcgcctttatggcttgtacctcaacactttcttccgttgctattacctcattggctctcacagnctttagatttgggagccaatccaatccttgtgtccggactctcagccacttatgatagccgccgatgatcccattactgcttcccctaagctctctgtcctttcttcacgccgtatcccatgccttgcgaactccttggagtaccctcgcgtagtggtcactgaaaccccgtgcgatgaaaggcgtgatgctttcgtctgatggcacttctctcatggggt

SEQ ID NO: 27178 - DNA, 401 bp, Glycine max
  unsure (1)..(401): unsure at all n locations
gcaagcttctcccttatttgctataaataggttgataagtgaagattatttggttcagccccttaggcacttctctctctctcgaaattgttgaggaaaattagttccgtgaagaaaatccaagccgaggcgcttccgtaacgtttccgtgagtaattacgcgaagattctcgaccgttcttcaagattcatcgttcgttattcgttntcttcaatcttcaacgggtaagtacctcaaaccaagcttttcaattcattctatgtacccgtggtggtccacattntgtttcatgtatttttattctcattttcatttactttttatacccccttttgacgtgcttaagccatttatttaagttatttctcgcttaatctaagaataaaataaatttccaccg

SEQ ID NO: 27179 - DNA, 334 bp, Glycine max
  unsure (1)..(334): unsure at all n locations
actcaagcttctaaggaggtgagcttagttatgagagggggggttttgctnatctctagctncncaaggaagttttctcaaagaagcttctcaagaaagttttctcaagaaagcttctcaaggaagctacctagtctataaatagaagcatgtgtaacacttgttgtaacattgatgaatgagagtcttgtgagacacaactcaaagttcaaattctctccctttttcttccttgaatttcgtgctccccccctctctctttctcttcctctttcttttcctccattgaagcatcctctccaagctttttatgccaagctcatgttggtggtga

SEQ ID NO: 27180 - DNA, 416 bp, Glycine max
  unsure (1)..(416): unsure at all n locations
tctcgggctctngcacacctattttaaagtccttcttatgcttttgacctttctctttaggggctacattttgttcaccaacttttttcttgaaacagaagaacactactaagagacctggaagaaacagcaatgtgacaccccccaaaactattgctattgttgctcccttgctcattttcctgtttgatagatcacttggtctttgagagactgttggtggagacaatgtggtcttaggggaaactgaataacattgtttcaaaggtgctccacataacatcaaattccctctatatgaggaggcaggaaacttatggagacctgaaggaatagatccattcaagtagttgaagctcanatccaaatccttaaggctaggaagggtaacatcaggaatacgtcctgtgagagag

SEQ ID NO: 27181 - DNA, 271 bp, Glycine max
aacattgctttatacggattgctagagatattaaaccatttatgaacctttgtctaatagctaacgctttgagttgacccatgccaaaaagccgggggaattaaactccccaagtgctgaaaagcccctttttaagtctttacaatgctgcatgagaagaaaacatcaaatatccttggtgtatcataataatgggaaataaccttgaaagcatcatgaagcacttccgcaatgaccatccaaatcatgcatccagcagcgaatgccgtac

SEQ ID NO: 27182 - DNA, 152 bp, Glycine max
  unsure (1)..(152): unsure at all n locations
caaaancagcagccaaccaaacggcaccgacaaacggcccnacacaaccaaagccggaaangacacaacacgaaagcgcggaaacggcccggccaaaacanaacacaaacagcgcaaaagacagcaatacacgaggcaaccttaaaaaacat

SEQ ID NO: 27183 - DNA, 404 bp, Glycine max
  unsure (1)..(404): unsure at all n locations
agcttgngaaagttcttctgattctgnngttgctattttaactgtatggctngagatgaagntcacagattggacctcttgctagttgttattgatgaatagcttaaacacttgagcttgagtgaaacaatagttgtgagactgtggtttaagctactttccttgatatctatcttacgcctaaattcatctaattgtacaggttacattntattcttctctttgaataactgcatgctttgtgaaagacaagtgatgagggcgtttttcttcattcttttatcatgcaatcaatagttnttgttgcatacagctttgaacttagtcactgcatattattgtcacttgnggaccagtgagctgttctttatttgcttgcttgaggacaagcaaaactgtaaaat

SEQ ID NO: 27184 - DNA, 153 bp, Glycine max
  unsure (1)..(153): unsure at all n locations
ntactacttcggtgaaaatatcatatctcatactcttattttatttgaaaattccaatggtctaaacgtgcagtggtcttgcgacaagtaaccacagctcgtggcagtcaccgatggtcggtggcggtggaggaggaggttgggggtgttggg

SEQ ID NO: 27185 - DNA, 370 bp, Glycine max
  unsure (1)..(370): unsure at all n locations
agcttgagcattgtgttgtcgcactagtgtatcgtgacaactctgtgcttcttctccttcgccaccttacctgngtatgtttcatctaatcctgtataaatatttgattgcattcatgtatcgcacatttagtgaagtaaacatggctagggtatctcatatttaactcgagcatcatgacaactctgtgcttcttctcctaagagaagtttcccttacccttactgtgttcttgtgacactctaagtggatctgttaataccaactataatttaagaacttttagtattntactcttgtagtgtgtcaaagaatatgttgttagcattcttaatacaaaagtgctatcccactcctatgtttgtctaac

SEQ ID NO: 27186 - DNA, 300 bp, Glycine max
  unsure (1)..(300): unsure at all n locations
tatttatatatactgaatgacaataatgtatttnttttttgcatagcacgtcataaagatttagtgaaggaaagtgatccaaaaatgtccacgaatatggtgttgaaagagcataacaagacttttctaaattggtttaaagatacaatctttgctgacgataatgcttctaaaacgttaataaagttagcagatgggtcgaaaaaaatgttataacttgggaaggatacgatataaacaagtattcattctacatgaaaacacaatacgatcagagtacaatgcataatagtgggggtg

SEQ ID NO: 27187 - DNA, 373 bp, Glycine max
  unsure (1)..(373): unsure at all n locations
taattctaagtgtttggaaaaaacaaaaaagaaaagaagttcctattaatcataatatttggagggccactggattatgtggattggaaagcaatgctttatttggcggtgcaagtgggtaggcagctattgtcatagttntaggaaatttgggatgtttacagtagcataaaaaataatatgcattaccctattaagtatttaaggataaaaatactacccctgctccctaacacaaaacccatgccaatnttcatttgtttaagttatcaatntaaatttgtgaacttattatacacatgaattgntctggtctctaactttgatctgacaatatttgttctcaacctcatctaactaactaatattcatg

SEQ ID NO: 27188 - DNA, 393 bp, Glycine max
tgtaagtatttgttggtataatttgcctgttccatttggcttttaatgtctctagaggttacttcctcgttgacatcttttgtcttgaatggaattgccatgacaggtttgttgttactgtctttgatatttggtagttgatattgtgttgtgggaggtaattccgactggattaactcaccatccttcacttgccaatttgttatgacatttgttgttggattacctatgatgtcttgtttccaagggtagtctatatcctttctgatggcataagcatgaaaccaatcaaagaaaaggacattaattttgactctttcgacaaattcgtagaacttgtcttggatttgttttctgtttgtacccttgtaatgttggaaaaaccatctcctt

SEQ ID NO: 27189 - DNA, 472 bp, Glycine max
  unsure (1)..(472): unsure at all n locations
agcttgtccaaattctttgaagctgaatctttctaatgaagattntgagtaagagtctaatgaagatgaactcaccttcatctcatgaaatattttcaagatgtggaagaacaaagggagatccaaatagaagaacttctcaaaaatgttgttcaaggaaaagaaagacaaagacaaaagctccataatatggtatgaatgcaagaaacctagacactntaaatctaaatgccagaactagagaagtctcgggacaagaagaaatactacaagtccaaggaaaagaaaggtctctttagcacctaggaggatctagacgacacattgtctaatgaagatgaagaagaagccaacctatgtctaatggtagacatagtctttgaagaataagaagtagaccanaaggatgaggtaaatcttaatgatcttaaatctcttaaacaatcttatcacgaactattatcaaactcgt

SEQ ID NO: 27190 - DNA, 404 bp, Glycine max
  unsure (1)..(404): unsure at all n locations
tcaggctgctcaattgctccaggtngcttcatggaatgtcaaaggtnngnatggnggtcagcagaggagcacaaaccacaaacccttgcgacaggtacatatttctgattcaaggccagctgggttaccaagttaaccaatgcatccagtttgccttcaagcttcttagtctcagatgatgcagctgagtttgtagctacctcatgcactcctctaatgactatggcatcatttctggcactaaactgctgggagttggaagccatcttctcaattaaatttttggcttcagcaggagtcatgtctccaagggctccaccactggcagcatctatcatacttctctccatattactgagtccttcataaaaatattggagaagaagctgctccgaaatctgatg

SEQ ID NO: 27191 - DNA, 323 bp, Glycine max
gagagaatcatccctttcagatttacaatgtcgcagggacaagcagttccgtttgctgggaaatggcaccgttttacagtcaggaatgactgagagaaggtggtcccagaaccacatggtgacgccgaacaaatagaaacctgtgaatcagaggtgatgatcccttttgcagtgcaaaggacagtgtacgctttctgtggtcctctgccacaccaacagtcactttcgagttcaatgaacaaggtatttccctgctacccaacttgcgaacctaggatgtttgatagtgagccttacaacttcaattggttaagcaaacccca

SEQ ID NO: 27192 - DNA, 407 bp, Glycine max
ctatgaaactcagctgctctcatctcatcttcccattcacctttacttgtgcactctataactccacgctcctatcaatgctcctctacggcatgttcctgaatgcccccattgggaaaagaggttctagtgctgggggcctagggttagggtttgtgagagatgttggatgctccatgcattgatgagtcttatcgcaagctgttggaagccattcgagcacagtgacgacgccgttaatgccgccgctggaagagaatgcaaggatgacctcctttggttccgtgacatcggaaagtttgccatcaacgatttctccatggccgtcatccaggccaaccaagtcgtcgaggaccatttttgatgctaagcactttccaatgacaagctgaaaagaatggatcact

SEQ ID NO: 27193 - DNA, 324 bp, Glycine max
  unsure (1)..(324): unsure at all n locations
ctcctcatcaaagagnttatcatccacattaaacaattggcttactagttgattgaacttgttgatgtggccatggagatctccttccatctctattttgagttgatacaactccatcttcaaacaaaggcaattggtaagcgactttgatgcatagatattctcgagcttctcccacaaagtcttcggtgttgtctccttcaacacattgtgttgtatctcgggagcaatgactaacggaatcgtgctcacaaccctcctttggatcttagtccactcagtttcatttatagaagccagcctatcatcttctaacgcctgatc

SEQ ID NO: 27194 - DNA, 284 bp, Glycine max
  unsure (1)..(284): unsure at all n locations
ttacagcagantntagnaaggatttcctaatctagtttttaanaaaccnaatgccattaacctagggaattaaaacaaactaaatggctgagtgtaactgaaattgttggcaaccaaaagtcacccccaacagccaacaagtcagccaccatttggtctcccaaaaggctgatgcctaagttgccaattgggcccttattacaacttgaactaaagcccttttagttgattaacccaaaacatatttttggtcagccaactttacaaggattgggccattattt

SEQ ID NO: 27195 - DNA, 422 bp, Glycine max
  unsure (1)..(422): unsure at all n locations
ccttatctttatcagtaacaagcacatttccattcacaggtttagcgacatcaacatcatcacttgagccctcactttcaatgtttccattatccagtaatatcatgcctcttttatttggacattgagaagcaatatgaccaactccttgatacctgaaacatttgatatcatgggatctagaagatgaattaatttccattttacctttaggtgcagcaaatgaatttttggacttagcttcatcttttgactttgtcatagattttttgttttgccaatttgacttccatgaataagtggaatcaaatttggaagtactcttagctntcaattgcctctccacttgaatagatntatgcagcaagtcctctatctccacataatgatgcaattctaccacattagttatctcctccttt

SEQ ID NO: 27196 - DNA, 419 bp, Glycine max
  unsure (1)..(419): unsure at all n locations
actcaagcttgtagactggctagacatgatacatgtcaggggttggttnggttaatgataaaagggatgccccacattatttccatgacacaaatgcaaaaatgatgatttggaaattttatgcaaaactggtcatgcatgcacctatgtggacgctcaagtgtcaaatttttatggtcatgtgatgctagggctcaggattcatttcctctattttaaatcaacccaatgtttccaaaatatgttcttttatcaatttgtgcattcatccgagtacatttcgggcgtccggggaaatttcacagcattcacccttcaggtgtagacacattttccaaaaattggttatgatcaatgaatttttttcaaagaaaagttggaaatcatctcttttcaaaagcatgtcggattttcagcta

SEQ ID NO: 27197 - DNA, 447 bp, Glycine max
  unsure (1)..(447): unsure at all n locations
catgcaagcttccttaagaagattcctaaagaagctatatcttagctatacacttctctctaatagctaagctcacctcattgagatgagaagctagagcttagctacacacccnctataataactaagctcacccctatggcaaaatacatgaaaatacaaaaaaaatctctactacaaaagactactcaaaatacctcgaaatacaaggctaaaaccctatactactagaatggccaaaatacaaggcccaaacgaaggaaaaacctattctaatatttacaaagataagcgggctcatacttagcccatgggctcaaaatctaccctaaggctcatgagaaccctagggccttcccttggatctctggcccaatctacttggagtcttctatccaatgcccttgcggngtaggaatgcatcactaagtctccagcattggtttc

SEQ ID NO: 27198 - DNA, 325 bp, Glycine max
  unsure (1)..(325): unsure at all n locations
gcttatgaacctcagttatggctgtaaggaatntagcttgtcaactttagatcgtgcttagccaaggataagttgtcgcttagtgatcaggctaaagcttagccgaattcatatcgaattgaagttagcttagcttatccttggccagcttagtggaccaaatcagcctcaaatgcaagggttgggggctaagcgcttgagactctatgcttaannnntgaccaaagatgcgcttagcacgaagttggcgcttcgcaaaaggactgtttttcaataaatgttttataagttatttttcagtcccttcctcaacaaattgaaaccc

SEQ ID NO: 27199 - DNA, 491 bp, Glycine max
  unsure (1)..(491): unsure at all n locations
agtcacctgcggcatgcaagctctccctctntgaacaaatacccctcttccaaatagaatccttcttgtgcctttttcccacaactctcataaatgggagagaaatgttcatctaaagcatacaagtccctactattatcaaatcctaaaatttgagctcctagggagcaaaacaatgtgtgtctcctagagagggcatcagctaccacatttgtttttcccttnttgtatttgataacatatggaaattgctctaggtactctacccattttgcatgcctcttgtttaacttgctttgccctctaatgtacttaagtgattgatgatcactatgaatgacaaattccttggaaacaaggtaatgttcccaagtttggagggctcttattaaggcataaagctctntatcataggtggngtagttgagggtggcactatcaagtttttcactanaataagaaatagggtgcccaccttgtaacaatacagc

SEQ ID NO: 27200 - DNA, 400 bp, Glycine max
  unsure (1)..(400): unsure at all n locations
tacaccacggtggttntttggggaaagtgggcggatatctngtttcngtagatatgnaaaggctgatctgtgttatggatataccaacactggagggtgccaaagatggcaagatttaccaaagtgtaggaatcctggcgatttgtttgtgaaaaagactcttgtccccgattatgaaagtgtaagttacgaaacaaatccggcttttggctacagtgattgtgaggccagttgctggagcaattgtagttgcgatggattcagagcattctggaggaatgaaactggatgtaaattctatcattggaattcatcgaaaaattatattgttgacactagtgttgctggtgtagagttttacatgctggagaacacaggcaacataacctcacataacggt

SEQ ID NO: 27201 - DNA, 353 bp, Glycine max
  unsure (1)..(353): unsure at all n locations
acagaaacattgttcacttagcattgttggagtttgctgctttgcttgaaggattcatgtgttttgtggcttatcttataagctatataggatccaatctattcctctattacgctacttaaaattttggcttgtcatatctagtatttgagcttgttattggccttactacattagaattgtcatagaaagtagctgagaactgcatgaaaatacattggtgatggagacctacctcangagcttcacatggaagaaaatagattagacatgtttcgtatttggacttttgttgggccttgtcatttgtattgggcttaagcctcttcattagttggtttgacttttaatac

SEQ ID NO: 27202 - DNA, 423 bp, Glycine max
  unsure (1)..(423): unsure at all n locations
acacttagaaactcagcttatggnttggcgcgaaataggaacangaatgtgctattgatgtttttagnnaannacgttgaggaactagcgattgattcacgggatcttcagttttcaggatctgtcagtcttaaaaagtggaaggagaaaacgtgaactactgagtgaataatttattaaatgtaagaagtgaaaaatgaaagagtaataatcgtcatatgcatactagtatctaattatctatctagctagctctagtcttgttcctattgtctttccttcttttctttttttttttatcaagttttcttcctttacttcgtaatctcatgaatacttccacgtgggtatagtttttagttgtataatgtccatcgacatgtgttagctagactcaagttctaggcaatacacatatatgta

SEQ ID NO: 27203 - DNA, 267 bp, Glycine max
ctaagttaaactgaggttcatctgtagatccctcatgtaagactagactcagctcaagtagcttactaaagtttagcctaatttagcctaagcttcgtctgcgatggtgtaatttttacgaggaggtggctcgcggtggtggcggtggacagttctgatgatgagggtgaagaaactgacgaggaatgcatacacaacgagagtgccacgtgtctaaatgaagacctaacgactaacaatgatgcagcccagatatatggaccttta

SEQ ID NO: 27204 - DNA, 404 bp, Glycine max
tgcttcttcaatctccccctttttgatgatgacaaatctgaaatcaagaaacgcatacaagctctatcttctaattgatcatttacttaattctccctctttgtttttgagtttaagctttacttgaaattaagttatttaattatataagttcttgatttaatcccaactttctctccccctttggcatcatgaaaaagccaaagtgcgtatagagacataaaatcatacattcactcataatcattcaagcaaggaagacaataatgcatacataaactaagcaaggatgataataattcattcataaactataatataatgtcagataatttagagaatcatccaagataaccaaattaaaacaactaaattagaaattaacatactaataagtgtttcaa

SEQ ID NO: 27205 - DNA, 388 bp, Glycine max
  unsure (1)..(388): unsure at all n locations
ttttctattctttattcctctataaaatgttgcatttatcaacccttttttttataacacattccaattcttttcaatatcttctctgttattttttttttctttctcttctctttgttgncgngttccttttccccagaattttgggtaaccaccatatattacaaagcttcaatcttgatggcttcggtaagaattaagatcctcccagcatgtcatgtaataatgcgcgttcatttctagccaaactattttttcattgttttaataaaaatcaaaactgaaatgacgtttagctatgtatgtacctaggtttccagcaattctttgtttgtaatgatgagcacaacggtatttttttttcattttctatgaaataataatctct

SEQ ID NO: 27206 - DNA, 405 bp, Glycine max
  unsure (1)..(405): unsure at all n locations
tatcgaatagaagctcgttcttgtggcatgtcttattgtgtgttttgntttcgntagaaagcttgaaaacggatgttgagtccaatgaggattgagttgaacgtgcttttctccccaagcctgcctcggactatagtacaaaaaattccgcataagtttgctaccatgtagctattgactaactaactacatatttctaaggattaaaaccacacctgtttaaattaaagaaacaaaaattatacaaaaagcaaaaacctacaaacaaaagtacttcttttttttttaaaccaaaaaacaaaagtacttagaaacggccaaattagtcgctttcattttttattattgatgcaacaaaagcaaccagcggtggcattgatgaacaacttgtgggtaatcaaactg

SEQ ID NO: 27207 - DNA, 436 bp, Glycine max
  unsure (1)..(436): unsure at all n locations
agcttctntgcacttttttcatttgaatttcttaattagntntggacattactttgtttgacataggaagatgccatgtttcatttgcttgacttgaagtccaaggaagaaggacaattctcccatcatagacatctcaaattctttntgcataaagttggaaaattccttacacaaagcttcattaatagcaccaaagattatgtcttcaacataaatttgcacaatcaacaactcattatttgatctcttgataaacaatgttttgtcaacttgacctcttacaaaagatttcctaattaggaaattgctcaatctttcaaaccaagatgtaggttcttgttttaaacaataccgagccattttcagcttgtaacatgattagatgtgtgaagctacaaacctagaggtggctacatatatctttcttcatgat

SEQ ID NO: 27208 - DNA, 395 bp, Glycine max
  unsure (1)..(395): unsure at all n locations
ntgcggatttggtcttctccggngaaagtggtcgaattggatctgaaaagaggcaaatttaatcatcctgcttggacgaatgagaaaactgggacaaatgaagagggtgaggatgagggagaaacccatgctgtgactgccattcctatatggccaagtttcccaccaacccaacaatgtcattacttagccaataacaacccttctccttacctaccacccagttatccacaaaggtcatccctaaatcaaccacaaaacccacctaccacactaccaatgctaaacaccacctttagcacgaaccaaaacaccaaccaaggaaggaatcttgcagcaaaaagcctatagaattcaccctaattccggtgtcctatgctgacttgctcccatat

SEQ ID NO: 27209 - DNA, 424 bp, Glycine max
  unsure (1)..(424): unsure at all n locations
agcnttgataagttcatctaactctanattcatatggaaggtattcatgttttcttaattcttttatattttttctatttatttatgctctacttacattagcatgttctctgctcatatattatttttgtaatttctgattctaatttgtggttcccaatataatataaaattccatgatatgtgttgaattgaagatgaacttactgttgtagccctatggaagaagcttgaagactcaccctttccttcattgaaatcccaatataatatgaatcttttggcattcattggaagagataaggaccctatcttctactccaaggaggcaacaatcaacgagcacacaaacataactctgtnttattatgataatctgtaatacactatttgtcatgcataaccaaaagaatcatatgatgct

SEQ ID NO: 27210 - DNA, 369 bp, Glycine max
tagactaagttcagcctaccatcctcagactgattttctactgaacagacaattcaatcgtcggaggaccttttgagggcatgtgtcttagaacaaaaggggagttgggagagttatttgtcgttgatagagttcacctataaagacctatatggtataaggtgtaggacacccctacgctagcttgagcccaaagagaacctcaccttagtgcctgaagtggtaccataaactactgagaaggttaagttaatccaagagaggatggtgactgctcagagtaggcagaaaagctatcagggcaagaggaggaaagtcctggaattcaaggttggtgatcatgtattcttaagagtcactctatggact

SEQ ID NO: 27211 - DNA, 403 bp, Glycine max
  unsure (1)..(403): unsure at all n locations
ccatgacaatggagcgtactgcctacaagagctagatggcaaagtaattccacgaacgttgaatgccacccacctgaagttctactttagctgacctacactntaaacctaatgttgtagtcttttccctaatcaagtcttatgtcccaaaagtagaaaaatcaagggttgtggtttgaagggtttttaacgtggcacatctggtgtaatgaaggggatgtgtacttaattaaatacattgaataaaattgtgcatcacttccttatgacatgtctcttatcaagacaagaacatccatagtcgtacctacaaggctcttaaaacccaatgtccgtgcttgggaagccctccttctaagcatcacgactgcagtatatgtcactcacgatgagtgacatacat

SEQ ID NO: 27212 - DNA, 380 bp, Glycine max
  unsure (1)..(380): unsure at all n locations
gaacttaaatctcagcttaacactcgtttgatgggtgcaccatcttgcttgttgggtgcgtgnaacaaagccccattatggaatggacatacatcaactaccatagaatggactgaacttagtttattgggaccgataataatagtcgcttacaacacttgtcgtaaacttgtaaaaacagatgtaatgaattttgtagggagataattacattatttcaaaaattaatatataagtatattttccttgaattatacattgtcgtatatgataaaactgttgattttaataataattatagtaaaatcatattgatgatatatcttattaatcaataatgcggataaaaatatatatttacttaacttacatttaaaaga

SEQ ID NO: 27213 - DNA, 277 bp, Glycine max
tgtatgcacgccgcacgggcgctccacattttaggtcttatatggagagccaaagcggccgagagtatgtagaaccgtctatcgcctgacttgcgccttctgtacgacgagagcggccgagcaaagaataagtaccaaccattagttaaacatattgtataaagaaaatgttgttcaaataactgggactcaattcagaacaggaacccgcaatattaccaacgacgtacgacaaaatgacggttgtcaaataagtttgaattgacgagactatgaa

SEQ ID NO: 27214 - DNA, 64 bp, Glycine max
  unsure (1)..(64): unsure at all n locations
agcttctactttcaatttcgagcttttctatatatgacgggacncaancggacagccgagtaaa

SEQ ID NO: 27215 - DNA, 343 bp, Glycine max
  unsure (1)..(343): unsure at all n locations
ttgagaaaattcaaacgacaatttctnntttctcgtttgtcngacngagtcccgtaatatatcgagacgctcgaaatggaataccgaagccctgagcaaattcaaacaacaataactttttactcggatgtctgattgagtcccgtaatatatcgagacgctcgaaatggaatgctgaagctctgagcaaattcaaacgacaataactgtttactcggatgtctgattgagtcccgtaatatatcgagatgctcgaaatggaatgcagaagctctgagcaaattcaaacgacaataactttttactcggatgtctgattgagtcccgtaatatatcgagacgc

SEQ ID NO: 27216 - DNA, 432 bp, Glycine max
  unsure (1)..(432): unsure at all n locations
tgaaactagatcattatattattaatgcnnaagtttgtttctatttcatgcaggtataccacataatcattcgaaatagctgatctcatttctctttaagacctccttaatgctacttcttatggttcttccataatgagttcattatgtataatgggctcattattgtgttgntcttcttcatatattgttgtttggagcaataactaaagtagcaatcaccttactactaaaggcacaagttaaaaggacttgcactctaacttctttaatttccacatctcgtggaactttactcccattgatttcaccattttcaatgaaccctgcattgtcaattntgacaattctcatattatatatgattaggacaataaaacacgtacccctttgactnttctagaataaccaataaatatccactgattattc

SEQ ID NO: 27217 - DNA, 386 bp, Glycine max
agcttacggtaaaatctatgacctaccatggtagattctcttatttgccattgcttccctcgcccagtattatgatcagccattgaggtgtttcacctttggggacttccagcaatcacccatggtagaataatttgaagagatcctatgatgtcccctatggggaaggagaccatacctcttctcagggttctatccctcattagctagaatttctaagatagtccaaatctcagtgcaggaattagaccacataaagcaagtcgaaaatggggtggttggaataccgagaaaatgtttggaggtaaaagcaagaatcttggcaagtagaggcgagtgggcctcgttcatagacattctcgcgctggtgatcttcggaggagtcc

SEQ ID NO: 27218 - DNA, 375 bp, Glycine max
ggtcctaaaaatactggcgctccttttcttagagtacaagtatttttatttcccagtgaatttaaaacctttacgtgacaaatgtgtttgaggtggatagaattataaaacccacatggtgtttcagcaagtaggttcactttctcaacattcacggagcataatgaatatttagttgctacaaaaaatcgcagaaaattgaagaaagggagggaagaaaaccttcaagggcgggagatcacgaggcgcgagtggggaaaagcgcgagtgggaaagctagggtttggaaaattgtgggaaacatttcaattatggatgggatcgaagaacaactcgactcgcttggctcactcgctcctatctaactctgcactc

SEQ ID NO: 27219 - DNA, 384 bp, Glycine max
  unsure (1)..(384): unsure at all n locations
accgagcagntctaataagaacgggaattttaatattcnttcgccnngcagacanataacgggacattttaggattccatttttttagtaccgcggccaaaatgaactcctgcttccatcatctcttccaagattatgtttcaatatctttttgtcatgtatatttattcccacacttttctttcatttcaaaatcgagattctatatattttttgaactgaaagaaagagaccccatataatgaaatggaaataagtgttccaaaggaacctcctctttaaatgatcgggccaagcatatgagcatgagtagtaggtaaaatatattacttctcattcgtataaaaattaacagataccgatatgtgtgaatcaataatattc

SEQ ID NO: 27220 - DNA, 467 bp, Glycine max
  unsure (1)..(467): unsure at all n locations
atgcaagctcgcaggagtatggagtacccatcacttgtggtactaggtgtttgtctggcganggngcacaacaagttgtccacatccacaaagcgcgcataaacccaccatcccctgttgcccacctccatctgagctcacgtactcccacgtagctcatatcctcgtttctctcaacagtgggtccccatcaatcctctcaagcttccacaacatccaagcaaaacaacattcaaaccgcacaagctatcacagccaagcaaaacagagcataggcagaaaactctgccaaaacaccaaccaaatcacagcttttctcacttaagaccccagtaacaataccttcgttccggttcattaaccagtggatcgactcgaannatttactggaagtctctaatacttaagcctacattntgaccgttgggatctactaggaaacatccagaactcattctgcactactc

SEQ ID NO: 27221 - DNA, 476 bp, Glycine max
  unsure (1)..(476): unsure at all n locations
cgcaggcatgcaagctcctcgattcattctatgtacccgtattttgtccacattgtgtttcttgcanttttattctcgttatgtttactttttataccccctgttgacgtgcttaagccattttacttaagtcatttctcgcttaacttagaaataaaataaatttccaccgaacgtttgaattgtattatccattaacttcggttaaaataaattccgaccgttcggtcgtgccgtaaccacgttggaaatcaaaaagaggtaaaaaataatataaataatcgaaaaacatcttttagtaaaataaagcggaaaatcaatcggacgttttctctttgggatttctcattcttaatcgaattgattaataactaaagtgaaactaaggctaaaatcaactcgcctagtcaagctcgtccacaaaaaataggctntngaagttcgcatttcaatttctcactaagtaaaatggatca

SEQ ID NO: 27222 - DNA, 392 bp, Glycine max
  unsure (1)..(392): unsure at all n locations
aactcaagcttcttagtttcagatgatgcagatgggtttggagctttctcatgcattctctctaatgactatggcatcatttctggcgctaaactgctgggagttggaggccatcttctcaattaaatttctggcttcagcaggagtcatgtctccaagggctccaccactggcagcatctatcatacttctctccatattactgagtccttcataaaaatattggagaagaaactgttctgaaatctgatggtgggggcaactggcacatagtttcttaaatctctcccagtactcatacaggctctctccactgagttgtctaatacctgagatatccttcctgatggctgtggtcctggaatcanggaaaattttttctaagaatactc

SEQ ID NO: 27223 - DNA, 441 bp, Glycine max
  unsure (1)..(441): unsure at all n locations
tcatctaaatactatatctatntgcaccttttaatctctntaggcttcaccttcaaaatcaaggggctatgtacctttcagttgtctaaataccaagtcatttacactttaatctcttcaaacttccccttcaagactgatgggctgtgtaccttccagttgtctaaataccaattctttacactntaatctcttcagactttgccttcatgactgaggggctatataccctccggttgtctaaataccaagtcatttgcaccttttcgtctctataggctntgcctttgagactgagggattgtgtatccttcgattatataaatactgagtcatttacaccttttagtctctccaagctntgccttcgagattgaggggttatgtaccttaagtcagctcatgaccaactgttcttcaatctggtcgatactcggagtt

SEQ ID NO: 27224 - DNA, 158 bp, Glycine max
atcaagccccagctcaaggtggcctccataacattgtttcctttaaagggatgaatgtggagattgatagcatcaattctgacaagggtaagaacaccactttccactcgtgccctccaaacttttcgatatgaacacgaagatcccttggatccaac

SEQ ID NO: 27225 - DNA, 394 bp, Glycine max
tcaagaaaaagatggcctcagcaaatttcttatttttttattggaattctatcaatagacctccaatctttaatggagagggttaccactactggaaaacccgaatgcaaatttttatcgaggcaatagatctaaatatctgggaagccattgaaatagggccttatatacccaccacagtagaaagagtttcaatagatggtagttcatcaagtgaaagcataaccatagaaaaacctagagatagatggtctgaagaggatagaaaacgagtacaatacaacctaaaagccaaaaacataataacatctgccctaggaatggatgaatatttcagagtttcaaattgcaagagtgctaaggaaatgtgggacactcttcgattaacacatga

SEQ ID NO: 27226 - DNA, 446 bp, Glycine max
  unsure (1)..(446): unsure at all n locations
agcttaagagctattatgaacaactnagactagnattntttaaaattattgcgtatctggctttacgttggaaaaatctaaatcatgatctgagggaaactcacacttattttctctgttgataaaaatttcagagaaaagatggcgtccgaattcaatgcatgaaaaacctctagaattaaaaaaataagactttacatttacaacgccttaaagacgagtaaggactcaaatctagaagttgtcaaataccttactccatttgaactctctaaagttcattgcttgtagcttttgttcaacttatattcttaaaagtctaaagtaaaattcaaaaatgccatcaattgcttctgtanaataaaattacatctgatactaacaaagcagaaaaatgccctcacatttacttaataatacttntctctacataatatatttaaaaa

SEQ ID NO: 27227 - DNA, 402 bp, Glycine max
  unsure (1)..(402): unsure at all n locations
tcaagctgcaggtttattcagatgagcttttctcattctgttttgaaannannncattgcaaaaaaatgagggctcaaatttgttgtagaaggataaataatcattcaccaaatttctttttctttttacaagttctctttattttattttattttatagtctcataattactatacaagtattttttttacatattatcaagataagttatcattgattttacatacaaaatgagaaatggaagttttctatttttatattaattatctgaaaggaaagaaaaataatttggaataattccatgcataaaataatatatgttaaaaaggatcaactttttaaatagataattactatcaatcaaaaatatatttgagcttcaccaaataaataaaaatgtt

SEQ ID NO: 27228 - DNA, 300 bp, Glycine max
tgcctcaaagagatctaggaaggatatttcaggtgttatgtaccagctacccaccgatttaagagcgctgtgcaccaacaaaccttcaatgccgtcgacggatcgacatatctacatgaacgacgcatccagctcagggatgatgactttacctactccctcgatgatatccaacgcactgcagtgccttaacacgttctctctatgacctagatcgacccatacataactcgcgcatgatatgctgatgctagggctacagaagatggcgtgctgtatacgcactccttggtgaggggt

SEQ ID NO: 27229 - DNA, 463 bp, Glycine max
  unsure (1)..(463): unsure at all n locations
agctnttgatacattatctgtatccaatttaattctattnttgngtatatcttagagntaaattttaagtaggatggaatcttcatcctctaacaaagtgataaatgcaggttatcatgtatgcacaaccataggatgtggccaaaaaatagatgttgacattattggtaagcctaattttcccatatgtttctcttttcttatttgctttaatccatggttttcttttgctaattgtgggtgcttcatttatgctcctcctatcaacaacaagtctagccaagtgatttctgttaccttcttatattatgattgggcattgggcaactgatttatgttacaaagattagtatatatagagttctagaactcttagttattactaactaaccttttaacaaactcttatctaacactgacgcttaactaagtactaacttnggaactatcataactaacttgg

SEQ ID NO: 27230 - DNA, 389 bp, Glycine max
  unsure (1)..(389): unsure at all n locations
tattctttttttctctttttctttctctgcaagtnttcttttcttgcatttctctcccatggctaatatcaaatctatgaaagactatcaatcaaggatttagaaaagggtcctggattgcaatattggccataatatcaagggttctatgtaattgcatcgcaatcacatttgtttgtaatttcctgcaacattaaggattgtgatgaaattgcacctgcacctacaactgcaatttaaattctttctatcaataattatcagctctgaaaccatgacctgcttgatttccagaacaatccttggtaagaaatgttacaaaacatctttccttgagaatcaaacccgtgtctgagtgattttggaaaacattttcaaagaaacaaatc

SEQ ID NO: 27231 - DNA, 194 bp, Glycine max
cgaaggaggcgcacctcttaccgctctcgtttgcttggcgtcatctcatggggaaaatcaccattacaggacctatgaactagagaccaccccataaactgcaaacacacttccatcaaagtaaaggactctcatttgagagggaggagggattcaccattgccattccacctacgaatcaaggaatactgacc

SEQ ID NO: 27232 - DNA, 392 bp, Glycine max
  unsure (1)..(392): unsure at all n locations
tgtattcaatcaagatgtcatcgaggatatctagntttattctttttnaanccgacactcataaatgaaataaaatgattacttttttgccatatcaagaaggcgtttttttatgaactgcaacatttgttgtgtcgttagtttatgtacttgcaatttaagtgatcagcaactcaaatcggaactctgttttaattgaaactatgtaaaaagtcataccgcacaaacacaggacaaaggagcattgatgctggaaccgcggttgaagatcaccaacaatagtttcccaaagcatgttatgttatttactaaagaacttatttgcgatatatatccatgcaagttgccagaatacaataagaactttttcagacatgcttgagctacataac

SEQ ID NO: 27233 - DNA, 530 bp, Glycine max
  unsure (1)..(530): unsure at all n locations
gccacatgaagaccattgaggnctatgacatcgtagacgnacngngattcttagagtncacctgcggcatgcaagctngatgttattaaaagagantgtacttgtttttagaacaaagaaccanatcgtgggtatcgtccgacaaagtgtttgatggagaatgcattgactgtgtgaatgagagagagggaccccactataaggagaagagcgactattattcttatcctggaatttgctgtaatgctgaagtaaagattgatactgaaaattagacgatgatgagtgacatgcttgattgagatagccacttccactaattgcgacgtacttgcgcgatggaattattgcgtgctcccagtgttgctctgtatgtattgaccaacagcctattcgtcacatcatctgcctccttatcttaagatagatgagagcgtgtcacttactacatacaagagacacgacaacctatcccntntacttaggcgaccctgtgataaaacaacagtgcgcatactatgagggatacn

SEQ ID NO: 27234 - DNA, 315 bp, Glycine max
  unsure (1)..(315): unsure at all n locations
gacactatagaantactaagcttgtatttacggacttggagcctggggctgtttctgtagttgtccaccaggagagagacaccagactggtgccaaagtagcctctagaacattgaagcgcactccgtatcataatgtaactagagaactcctccattgattcagaaaagatagagggagatggatagaattcaactgtgcgtgcccgagccggagcacaatgccactttgcgttatcatagagtggcctgcagttgttgaacaagagaacttcttattaagggcatgctactccacacatcttgtctgaggtgt

SEQ ID NO: 27235 - DNA, 237 bp, Glycine max
  unsure (1)..(237): unsure at all n locations
agcttgaagtgtttgtacatgaccaaatctttatttaatcgtctttacgtanagcagtctttgtattcgtttannatgcatgaagataaatcagtaggagaaccaatggatttgtttaataaactgattcttgatcttgaaaatatcgatgtcactattgatgatgaggatcaagccttggtattggtgcgctctctgcttaagagatactctcatttagaacatactctattgatt

SEQ ID NO: 27236 - DNA, 386 bp, Glycine max
tgtacactttgtcttccatttcaaaataatttatattttataaaattatctaatttcaaataaggtattttataaatgaaataaacttaattgttttattcaaatataaaatttaaaaatgaataaattttgttattttatcaaaataagaaattttaaaaataaaaataatattcaatcaagaaattaaaaaaaattgaaggaatttcaattgaaattcttaaagtttaactttttttgtaattctaaaatttttcatccaaataccacgtaaaaggaattcggttcaataaaaaaaattcctaagcgtagctggcattgataacccagtcatcattatcatttgttgtgcaaacagtagagaaaaatcatttcttaaaaaaaat

SEQ ID NO: 27237 - DNA, 444 bp, Glycine max
attgtgcatataatttgcattatttagttactaaaacttgtatttatatatttccaattaactttttaatatatttatatcatacctaatatatttatatttctgtaaaagtatattaatgtaaactaatttatatttattaattattaaattatctataaatatactaatagtattattaatattagtttatcaatactgtaatttataataacaatatataaatttatttatttaataatagtaaatacatattcaatttggatgtccagtttggtcaaatttatttattaagtagtaataattatatgttctttaatacatgaatgaaagtatatatatatatatatatatatatatatatatatatatatatatatatatatatataaaatgaggacgagctggctgcacgataaagttgtggtgacttgttggtcataa

SEQ ID NO: 27238 - DNA, 420 bp, Glycine max
gaacactcaagcttaaagtctcgagattgtgatgttttgatgtaataaatactacattgatcttttcttgacataaaaaaaaaaaattttaaaacacatcataactagactatgtttattcttcaatgttaatttaacaaaagttattgattggtgttagtatgaaatatgattattcatagtgtcaattaacattagtcgattctcacttaagcaattactcaaataatttactatattttctattatgttgttggtccactccaaacagagaacctattaaatgtgcggtaaagaaagattgtaaatagctgagtataaagtacttaaaagtaaaagtaaatgattaaggacaataaaaacaatgaagaaatagtgaaaaatgaataaaagaagttaattctgattgattaagatcat

SEQ ID NO: 27239 - DNA, 465 bp, Glycine max
  unsure (1)..(465): unsure at all n locations
gcttcctcaggagtcacaatcttcattcttcttgtaagacatctttttatcgcatatacattagtggatattgcctctccctagtagcaatgaggcaatcctattcctttcaacatacatcttgccatatcaagcaaagttttgtttctcctctctactaacccattgtgttgaggagtatatggggttgtcacttcatgttcaatgtcttttatcttacaaaactcatgaaaactccttagaattatattctccccctccatcagtccttagaatctttaattcatgaccactttgtctttcaaccagtgcacaaaaattcacaaatactgaaaacacttcactcttttcattaagcaagtacaaccacacctttctagttaattcatcaacanaggtngtgaaatacctgtttcccccaatgatggagtcttaattggaccacacacctatgaatgaaccact

SEQ ID NO: 27240 - DNA, 405 bp, Glycine max
  unsure (1)..(405): unsure at all n locations
tggcctcatatggaaagggataagctgaagcagatttctcttctttttcctttnnnnnnctggtcactcggaatgcatttggctttgttatcctaatttttgtgaccatgagtttatttctgtgtcctttcagttaaggagtaactatttggcaagtgctaacgtgaaatatcctcttactctactcaacccaagaactaataaaatgtttcttttttattttactttttaaatacatttttttgttgttaattaaaatttaataaaaattattaaattacaaataaaattcattaaataaaaaatgagatgcacaaaattgttataataaattttaactaataatataaagagtatattttaaaaaaatgtatcgctaacatttctaaacaatctaagtctaaa

SEQ ID NO: 27241 - DNA, 441 bp, Glycine max
  unsure (1)..(441): unsure at all n locations
gcttccatcaagtggtaatcagagcacattatcttcaagtaggttctctcttatacctccattaattttgtgctttaccttctcttccattgttgtttcttcatttttttctccatgtatctcctcacatgtcttgtgataaatgttttaaacatgattctttagagtttccaccgattaaacttgctatagaagctagatttgattntctatggttcaaatttcttgttcttgttcttgaaccatgaattgtgttgagtttaggttcctttgagttttgtcttgttattttttgtggctgaaacctaaaccataaaattcttacaaaaatattaaagtagaagaaaacctcanaaatctagagtgacttgttcacctattgtagttntgtcatagaagtcatgtctagtcatgaaacttgtcacataagatttcttatgt

SEQ ID NO: 27242 - DNA, 411 bp, Glycine max
acactcaagcttggttatctccttcttcactacaacaagaatcaccgggttgagtcttctttgtggctgtcttactggtttagctccatcctctaaatttatttgatgcatacatgtggatgggctaataccaggaatgtccgtcagggtccaacctatagccttcttatgcttcttgagaactgacaacaacttctcctcttgctcatcagcaagggaggcagatataatcactagaaaactcttgctatcatccaagtaagcgtattttaaatttgatggcagagacttcaattctggtgtggtcggctggacagtggtagaaggagatggtttctcagcctttacctcataaagaaagtcagaggtatgtgtacttcccgaaacatggttagtcctatctgactctat

SEQ ID NO: 27243 - DNA, 449 bp, Glycine max
  unsure (1)..(449): unsure at all n locations
agcttcgacacatgagggaagatattgaattttaagtgctngtttagttcaagtttggagcataatttgctttgcaatttactttgtggtatttatagcagtgtttactggaaccctagttcattaagtttattttttagttcattggctaaagcaaagtactgcatttgcattagtctttttttaatagtccaacttctgtttttctttttctccctgttatggcattgtaactcaaaacagttatttatttgttatgttatattaatagcttatattatctatttatttatttttctttcctaaatcaatacaaagagtgatgtgaaaatgaaagagataagtagaaggagaagctggcttctatttggtgcanaactagtggtcttttnttctggggtttctcttanaaacacgctgagagactgngtagctntgcttcattgata

SEQ ID NO: 27244 - DNA, 400 bp, Glycine max
tcttatgaaggtagtcaagcacatgaactgtgagttttgctgcctgttcagacagaccaaactcaaagtatacagcaggaatagcctcatgcaccactccaaataggaactcagcgcctgagcaaagactgaatccaacgaatggccatcagatactatgacaaactcacaaccgccaaaacaaactaaatttcgagagatgcctttcaaagaaaattccaaatgtagaaaccaacttaaaaaaccaactagtctacatacaaacataaccctaactctgctagagtttagaatttaaagaaaacagaaacctcgataaggaattagccaatcctaacaaggttggggtggttacacaatctgcattgctggtggacgtttcctccttcaaggcaatatt

SEQ ID NO: 27245 - DNA, 481 bp, Glycine max
  unsure (1)..(481): unsure at all n locations
gtcacctgcggcatgcaagctcgccacccagctcgcccaggcaagtcttatctcgcccaggctatcatggttgcttcctccagaagcaacagccttctggaggaatcttctggagggcccaagtgggcctggttgctatttacacccccatttttactaagtacaccgcctgcctttttttgtgattcttttttcgtaaagttacggaaacttacgactttcgtaacgatacttattttctttccgtaatgttacggaaccttgtggattacataatcatcccctttttgacttacggaatgttacggaacctcactaattgtgcaacgatgcttccatttgatttccggtgtgtcacggaaccttacggattgtgcatcaatattttctttntntttccggcacgtcccggaatttcacaaattgcctaatgatgggtgccaagcaccttacaaggaccaaacaaaagtcgcatgtcatc

SEQ ID NO: 27246 - DNA, 409 bp, Glycine max
tatgcacggaaaatgtaattatgaaattgagatgctttatgaatttctcatttcctagttaaccatgcattaggtaccatgttcaattattttgtttttaagtgaaacgggtttatgatcccaacatggttggctcgtggtgcctaacacatgaaactaagaatgtagtgtgaagtttcacgcttcccccttttttgtttttgttttgtagaggaaaacgcaaggatgagcaaacatgaaaacaaatggtatgcaattttgcagatcaaaaagtttgttgaacgcatatgcatgatgatgccatgactcatgcaaaatgtgaggctggaatatgataacggacaaatgcaggatatgtccattatgatgttatgaagagatgcttatgcgatgcatgatatgaatgcat

SEQ ID NO: 27247 - DNA, 430 bp, Glycine max
  unsure (1)..(430): unsure at all n locations
agcttcttattcatattttgttggtacatattgcttnttattcacataacaccaatagtattccatttataagcagagattgacgattcaaattacatatttataagagaccaaccaaacacaaagcaaccacagcttataacacccgtaacaaatcctagaacatttgaatttgcaaaggcgggccatgaccactttattctaaaacttcaaacacaacacatacttattatttattgatacatgtattacagctatctctgcttgaaggttatgcatgttgatctcacttgcagctgcatgggtcgcaagtgcagtttgatccacagttgcagccaccgttctcagctgcaacacccatttcagcaccctcgaattgggccttcaccggcccaacacccaaaactagagtctcatttgtgatcttctc

SEQ ID NO: 27248 - DNA, 401 bp, Glycine max
tgcttgtggagcttctatggaggctggacctttgatcttcaataaggtccttcaatggtgattttacaccatggagatgcagaggaaggcaaaggagaagaggataggggaggcaccgtccactagggaatatgccaaggaagaaggagcttcaccaccaagaattgccttggataagaagcttgaagaggatgctttaatggaggaaaagaaagagagaaggggggagcacgaaattgaaggaataaaagagggagagaagtggaactttgaagtgtatctcataagactttcatacatcaaagttacaacaagtgttacacatacttctatttatagactaggtaactttcttgagaagctttcttgagaaaacttccttgagaaacttctttgagaaa

SEQ ID NO: 27249 - DNA, 429 bp, Glycine max
  unsure (1)..(429): unsure at all n locations
agcttatgacaatttgaaattctcgagagttttctatgattaattntgagcgtctcgatatattataagtctgaatcggacctacgtgtgaaaagttatgaccatttgaattttttgagagattccgttgttcaatttcgagcgtctcgatatattatgcgcctgaatttgacttgcctgtgaaaggttatgaccatttgaatttctcaagagcatgcgttattcaatttcgagcttctctatatgtgatgcgcctaaatcagacatccgggttaaaagttatgaccatttgaatttctcaaaagcttcggtagttcaatttcgagcatctcgatatattatgcgcctgaatctgacatccgtgtaaaaagttatgaccactttagtttatcgggagctttccgttttcaattgctagcgtctctatat

SEQ ID NO: 27250 - DNA, 401 bp, Glycine max
  unsure (1)..(401): unsure at all n locations
cagctntggtcccctcacgcgagccattcccgtgtacagtcgtctcttataatcaatcgacctttttttttttaaaaaaaaaaagtgcaggttagctcgcctgggcgagccgagctcgcctgggtgagcagcccctgcaccaaaatataaaaaatgaagaagggggacatttttgcattcaaaaacttcttttccccccattcaaaagcaatacccacggaatttacgagtttgtagccctagggtcactatttttcgcatttttcgattccattttgcgcttttattcatcaccaacaagtaagtattccatccttaagctttctagcttttcattggtgtattttgatctccttttggtgctctaaattgtgggaatgtgttcaaacatgtggggcaat

SEQ ID NO: 27251 - DNA, 405 bp, Glycine max
cttacttagtcatatggagatcccaaatgcacaaggttgagacatccttatatacgccttcttccaaatcaatgccaactttggcatttccagatgcatgttctgcatacagagaagatatgatctccattgcattgaacccagcattctcagccaaagttctaggaatcatttgaaaacttttagcaaattttgctataacatattgatccaacctgcagggccattgaaaatgtttagtccatcccattcccgtgtcaaataccaaataagcattgaacaaaataaattaagtccaatgaatagagacaataagtatttccaaataatacacagtaatggtgccgggttaaaaagcatctagtgaatagagatagtaactatttccaaatattacacagtaat

SEQ ID NO: 27252 - DNA, 392 bp, Glycine max
tgagaaatctcagggaaccactagagatgttgttattgctgtcgggctacacatgcgagtccacttagaggtaatggatgagtttattgcaattgaggttagaataagcatatgaagggatccttaggggatcaaattggagtttattttgggatgtttattgcattgtaattcttcatgtatgattataattgcgagatttttatattgggatcatgaaattgcgattgaaattgtgtgtaagtgataaattgaatatgtgatgaattgtgagataacatgttactttgagatcataacattgttattgagattaagtataagtgcaaagttgaacatgtgttagtttgtgaattagacataaacatgtgatggtggattgtgatgttatg

SEQ ID NO: 27253 - DNA, 449 bp, Glycine max
  unsure (1)..(449): unsure at all n locations
agctatntaccgttttactattgcacaattcattttaatggtgaaaaggaaacaaaccttcttgcttgaatttccattnttgtcatagttaatttgatttataatttcactattgtttcaaaacttaattcactgttcttacccaatcaaaagtaaacacaaacagactattatatttgactattgtttcaactcaaattgtttaagctaatttttagtgtggaagagggagaaaggatgttgaaattttctcagtgttaactgtcttagtcatccacaatgaatcatgtatttgacacttagttaatacctttgtattgggtcagcctatnttgaaacaaaatggtactctcaaataaagttaaaaccacacgtcctctaatgtaacatgactgctangtatgcaacagagaggactatcanatanagttaagagcccttaactggtt

SEQ ID NO: 27254 - DNA, 376 bp, Glycine max
  unsure (1)..(376): unsure at all n locations
tatccaaaagataaaactagctaatgcatatgctaatttatataaagttnctgatattaatttctccaaaaactgaatcaaaagaattctcaggcggttagtcctttgaacacttttgtattagggaaagggaagaatcaaaagaattctcagactatgtcgttttgaattctttgacaagggagaagggagacacaaaagaattcaggcggttagtcctttgttcttttggaaaaggaagaagagagacacaaaaagaattcaggtggttagtccttggcgaattctttttggcaaagggagaagggaatgaaaaggatgaatagcacaagttttcaaggtttagaaaactagaaaacttcagaagagctttggt

SEQ ID NO: 27255 - DNA, 392 bp, Glycine max
attgtttgatgtcccacccgaatcagatcaacattaagagtgcacgatcctggacatgatcccaagctgactctcaatgagcaatgggcaatcgacgtttatagttgacagtgatcaaacagtcacgcatggtggggggagtctgattgagtgtcctaaaatcatgatcatagtcttgacacacgaccattctcacacggggctccgtcagacaccctacaaagcttatcatagctgcggggcaagaactatcacccccctttcctagagtcttattactgggaacctactcacatcggggccgtaccgagcacatcgatcacagctaaaagcgaatatcacttcccgattgaaaggcgacaccgaacaatttgtctaccatccaggtgtcg

SEQ ID NO: 27256 - DNA, 403 bp, Glycine max
tgcttctacagggaagatctttatttctttcgactgtttttttccaaatcgaagtcggttaaggtgttggacctttaaacgatcttttgattcttgaaaggagagaatcgttaaggcgcttgaccctttgaaaaatctcttgattctttttaacagagagaatcactaaggcgctggaccctgttcgacgaactcttgatttttgaaaagggagaaagctaagttgctgcgctctacttatttatgttattggattttgagagtttaaatatgtgatagaagaattcatcaatgcgacacatgaagggtccaattgtttatgcaagtatttgaatatttacttgtaatacatacacaatttacactaataaaatattaaagaaaagtatgtatcattaatatt

SEQ ID NO: 27257 - DNA, 382 bp, Glycine max
  unsure (1)..(382): unsure at all n locations
agcttgcagttattagaagagaaagatcttgtgactagaattatgaatcaaaatgttagtcagtttgtcagattgattgtgaaggaatgcattaactgtatctcggtgagagtgtgatcctaaaatttggagagaaacgactatcatttagtactgatttttgcatgaatctctgaagtatggattgaatgcatgaaattgaggatgatgaaggccatgtttgattgtgatagccacttagccaaaaagcttactacgtgcttgaatgatttatcccttgcacccagttttgagctgaatgattgaaccttaagcctatacaatnttatctcctgctaccttatcttaggttgtaggagagcatcatccacagaaaagcttg

SEQ ID NO: 27258 - DNA, 391 bp, Glycine max
  unsure (1)..(391): unsure at all n locations
ntcaattaccgacttggagtctggtaatggtaggttttcactccccgaggagagagattccaaattggagccattgttgtctaaagatcattgaagtctactttgtatcataaggtaaaaagtgtatttagccattctttcagaaaaaataaaatgaataggttaaagttaaaccgggtgtaatcaagccaacgttaaaaaatagcttgtgtaatatttgattggccggttgttgtaaaattaaatgaatttttaagaatggttttattatgtaaatctcctgtcagctgtgtatccctaatacgaaaatcttgttaagttttaagttcatttcagagctagttacgggattgatttgcagttcttagaataaattattgaaaggtttctg

SEQ ID NO: 27259 - DNA, 451 bp, Glycine max
  unsure (1)..(451): unsure at all n locations
agctntntgtggaggtcttattcgatatttcttaagtgttcccatagctatttccacttcaaaggattattattgagatggattctcttgtggcggtttgtatcatccagaaattaagatttctacaagtctgttttgttacgaccacttattgctaatatcaggacgcatctgtctatgacggattgagacccttctatctatctctcatatttataaagaggctaatagaagtgcggatttttttggaaaatttaggtcaccaggataattntgttttgtccagagttgattcccgtattaacatgtaatgagcctataataaatgtttgtttttgttattttaaacaatataagaaacataaaaaccatattaatttgatccaaattttntatacatcagaaaacttaagaaagcanagcaaactanacacgcgtacacaatctaata

SEQ ID NO: 27260 - DNA, 390 bp, Glycine max
tggaggacaaaacaaagtagtgtacaagttcttggttctatggcataccgtgctcctcagcatttgtctcggtgtctccctaagattgttcccaaattggctgaggtataacatgaagcaaacattatttttcacttctaaattccttttaagctatagattgcattaccttaacccatctcagtatttgaaggttttgactgatacacatcctaaagtccagtcagctgggcaaatggcccttcaacacgttagtcttgacttacgaactattctatccatttgattcctgcttgcttctgtgattaatgtttttaattttcatgttttttccaggtagggaatgtgatagagtccagaaatatctggtcttgtccctactctacttaa

SEQ ID NO: 27261 - DNA, 197 bp, Glycine max
aacagcacagaagcccaatgcggacaatcggtaaaaaatgtaatgacacctaccttgtgacaacaataatagaatccgcctaagttaaaccgggggtcaccaaacccacgtttgaaaagagctagtgaaacaattgacaggcccgacgtagaacaataaaaagaatgtttaagaatggtttaaaatgtaaaactccc

SEQ ID NO: 27262 - DNA, 460 bp, Glycine max
  unsure (1)..(460): unsure at all n locations
catgcaagcttgtgcaaatcanatcactcctacatttcatctctagcatgtattttctttctttctttacccactcctcacgtttggttttttagggaaaaacaccataactaaacgcaccacaaggcatccctatcgcaccagatccaaatctagaacgatgggtgatcaagaggagacacaggaacagatgaaagccgacatgtcggctttgaaagaacaaatggcctccatgatggaggccatgttaggtatgaggcagctcatggagaagaacgcggccaccgctgccgctgtcagttcggctgccgaagcagacccgactctcttggcaactgcgcaccatcctccctcaaacatagtaggacggngaagggacacactgtggcacgatggcagccctcacctgaccgagcggcttacccttatggatngccgcccaactactcaccaccggtct

SEQ ID NO: 27263 - DNA, 307 bp, Glycine max
  unsure (1)..(307): unsure at all n locations
tgagggtttagttcagtggtaaggaaccctctntttttccctttataaagactaatatgacaataagagggttgaattgtaatttttacaaattttcaaaactttttctaaacacaacaatgttacgtctgaagatgaatatgtaagaaaacatatatcaaattttcgcaaagcaatttagacaatgacttcggatcttgtaagacaaacaatgattttcaaatacaaaaatcaaattcgaaccataagtcaatttaaaacacaaaagagaaaataaacaagataagacacatggaattatattggt

SEQ ID NO: 27264 - DNA, 454 bp, Glycine max
  unsure (1)..(454): unsure at all n locations
tgcaagcttgaggcgtgaacccaccatttttagtattataacacctgttatgtgtctactatcattgtaatcatctccttctccaccatttgnggcactacttgagctgccaggtccttccacctctgggcgtattcctggaatgactcatgccccttcttgcacaagttctatagttgcactctatccggagccatattagaattatagtgatattgcctaacgaacgcaaccattaggtccttccaagaatggactcgagaaggttttatattagtataccaagtgacaaatgctgattcatggggcaagtagtccccttatacttatcaaagtccaagaccttaaacttcagaggaatgatgacatcaggcactagtcacaactccgcctccttcaatggccctcagcctntcctctatatgatgcaaatttccgctttctaccatagcaa

SEQ ID NO: 27265 - DNA, 399 bp, Glycine max
  unsure (1)..(399): unsure at all n locations
aaggtgtgtaacccaccatttttcataatagaactttagcattttgttttctatcanngctatcatttctttctccatcattgagggaaccacttgggctgccagatccctccacctttaggcatattctttgaaagatctgtgccccctcttgcatatgctctgtagtttcatcctatccaaagaaatatcagaattatactgatactgcctaatgaaggcaaccattangtccttccaagaatggactcgggaaggttccaagttagtataccaagtgacagctgccccagtaagactttctttaaagaaatgtatcagcaagttcccatcttttgtgtatgcccccatcttctgacaatacatctttagatggttcttgtggcaagtactcccctt

SEQ ID NO: 27266 - DNA, 454 bp, Glycine max
  unsure (1)..(454): unsure at all n locations
agtctcacgattgttttatgttgatgcaactatttgttagccgggctatacgagacatcttgccaaacaaagtcaggttagccataactcgcctgtgctttttcttccatgccatatgtagcaaagtcgttgatcctgtcaagtttaatgagctggaaaatgaggctgcaattatattgtgccagttggagatgtattttccccctgccttctttgacatcatgattcacttgattgtgcatctcgtcagagaaatcaaatgttgtggtcctatttatttgcagtggatgtacccagttgagtgatacatgaagatcttaaaagggtatacgaataatctatatcatccaaaagcatctattgttgagaggtacattgcagaagaagccattgaatcttgttcagaactacattgaaaggctaaancctgtggccttcctgagtcttgacatga

SEQ ID NO: 27267 - DNA, 402 bp, Glycine max
tcaacgaaagacattttaaaaataactcttaaatgctttcttgaatataaaaaaattaaataatattaattaatttttttaattaatgaaaaaataattatttttatttatatatgaattaagaggaagtacataccataaaaaaaaaaggtggaggaagtccacaacttctaggacaatttgcagatcttacgagtaagtttttgtatatttactctattaactaacttcttgcaaatgttgaatatcacggattcaatcatttaaatataaactatcaaaagatggtcgaggttcataaaacatcatccaattaattaaagaaatgacaattatattttacgtgtttgtgttaaataaaattaaaaaaaaattcatattaattattataaaattgtgtga

SEQ ID NO: 27268 - DNA, 261 bp, Glycine max
gccgacgtgggctaatgttttcctggccaaataaatgggaacatgccacgtttggccgaaaagaaacatcggttgagctcggacggaaaaacctagacgacctacgttgtatattgtttatgcgacaccaaaacagaagacttcctctaccgttcaaaaaaacattatccgccaccgcctgtaaacgaaattgcgcactctcggctgaaagatatcacttatggacatataacgaccgacaccggccattgcttattctat

SEQ ID NO: 27269 - DNA, 366 bp, Glycine max
  unsure (1)..(366): unsure at all n locations
agctntggtctctgtagatcttcacacagtattaatctctcanaactctctagaacttggacctttctctctctagaaatcctagacatgcaaagctctaaatcctagtccaaactctcttcacaaaatctgatttcaggcttaaataggtggccttgttcgtgctcgtgtgcttagcgcacttatggaccgcttagcgcacattagtgatttttggcttagcgcgcctttctcgcttagcggatgaactgaagcggtgcgcttagtgagatgaagtggtgcacttagcgatcctgtacaactcatcttcttccagagtcttccttgcgcttagcccatgagtgttgcgcttagcggacgctcact

SEQ ID NO: 27270 - DNA, 332 bp, Glycine max
  unsure (1)..(332): unsure at all n locations
tgttggattatggggcacccgtcatatgtggtactttgtggcgatcgggcgttggagcaaatcaactctcccacatccacaaatcaaacaggaacccaccatccccagttgcccaccttcaactgagctcacgtactcccacgtagcccttatcctcgttcctctcagcaccgggtccccatcaacccctccaagcttccataatatcccagcaatccaaatacaactatcatgaactaccctaaaccaagaaaacagggcagaggcagaaaactctgcccaaaacacattcacatattacaactttccttactcaaatacccncaataaca

SEQ ID NO: 27271 - DNA, 392 bp, Glycine max
  unsure (1)..(392): unsure at all n locations
aagtcacctgccgcatgcaagctngtcatgattttcctgcaccttgttgcttatgcttgccatctggcacgacccatcattgattgccatagattttgaatcttcactgtaatcaactgaagaaacattggttttcttcaattttccctccaacttaattgaaaaattctcaccttcactacaatgtgcgggtggtactgagaatgcatcttgagtaacaggcacggcgtcttttatagtacttttatgtgcatcaatttcctggatgagtgaccctcctgccacgtacgcccccatagaaggatcatacttcaaccctacttccatgccctggacagagtcatgctcagtctgtatattnttctatgatcgattgactctattaatcttgc

SEQ ID NO: 27272 - DNA, 302 bp, Glycine max
  unsure (1)..(302): unsure at all n locations
tatcaagtaaactggcttgacacactttttatcagctacattttatnnnanacaaagccaaacattatttggcaaaaggtacgcaagttaaaaataaaaacattagtgtaacaataaccaaaccaaatatctattcctgtaaataatcgtaccatattttatcaaggcatttacattcacaagttgcaagttataaaaaaggatactggttttcacaaagtcctcatctaatagtaatttcaataacaagttgctttgtgcgggtatttaaaatttcaagcacttctggcaaggggataaaa

SEQ ID NO: 27273 - DNA, 428 bp, Glycine max
  unsure (1)..(428): unsure at all n locations
agctntgatgatattgtcttcaccgacgatttgatcaaagtaggtctaaaaagaggcaaatctgagcatcatgctttgatacatgccaaaaaaaaaaaaaactatggcaaatgaagagggtgagaatgagggaaaagcccatgctgtgactgccattcttatacagccaagtttcccaccagcccaacaatgtcattactcagtcaataacaaaccttctccttacccaccgcccagttatccacaaaggcaatccctaaatcaaccacaaagtctgtctaccgcacttccaatgacgaacaccacctttagcacaaaccanaaacaccaaccaagaaatgaatnntgcagcgagaaagcctgtagaattcaccccaattccagtgtcctatgctgacttgctcccatatctacttgataattcaatg

SEQ ID NO: 27274 - DNA, 391 bp, Glycine max
tctcaatgaagttttctcaagaaagcttctcaaggatgctacctagtctataaatacaagcatgtgtaacacttattgtaactttgatgaatgagagtcttgtgagacacaactcaaagttcaacttctctccctttttcttccttcaatttcgtgctcccccctctctctttctctccctctttcttttcctccattgaagcatcctctccaagcttcttatccaaggctcatcttggtggtgaagctccttcttccatggcttattccctagtggatggcgccgcctcttacctcttctcctttgtcttccgctgcatctctatggtggaaaatcaccattaaaggacctcattgaagctcaaagatccagcctccatagaagccccac

SEQ ID NO: 27275 - DNA, 460 bp, Glycine max
  unsure (1)..(460): unsure at all n locations
cacctgcggcatgcaagcttcatcttctatccaagaagaaagngtaatataagacttaattgatttgaatgaagatgatgatcttagcctttntgtaaaaaggttcaacaagttcctgaaaatcagaggaaatcaaaggagaccaaattttaaacctaaaagaaggacataagattcatcctctactccaaaatgctttgaatgcaatcaacctggacatctcagcgttgattgcccaatcttcaagaaaagaaaggagaaatctgaaaagaaaaattttagtgaaaagaagatgaagaaggcctacatcacatgggatgacaatgatatggaatcatctgaggattcagaanatgaagagataaatctatgtctaatgactaaaagttatgaaagcgatgaagaggtagcatcttcaaataacaacttatccatttcttttgatgaaatacaagatgca

SEQ ID NO: 27276 - DNA, 58 bp, Glycine max
  unsure (1)..(58): unsure at all n locations
tgcacttgaggagggaatcanacaggcttttaaagttcacttttcttaacgaaccgcc

SEQ ID NO: 27277 - DNA, 336 bp, Glycine max
gagacaattgtcacctgaacacataaaagatctcactctcctctttccctaatgaaaaccatgccccactcaataagctgtttccgattaaagcatttgtcaccatgagtcctcgattactattgcttcctctgtgattaggcatatcaatattttaatagggactaggtaaaatgaacaacaggtatgtatttcacatgtgaaacgaatatctatcaaaattggtgcaatctttttaagctgagaaattctttgctaattcaaatcagcccttaaacacaagccctcccctaaactcatatggaacccttttcatgcataattgctctgctacct

SEQ ID NO: 27278 - DNA, 403 bp, Glycine max
  unsure (1)..(403): unsure at all n locations
ntaataatactgattcaacgaccggtccttttaaattatcgttaaaaatgtgacgatatttttataaataataatgacgaaggtttttacaaaactgtggatgaaaccgaaaattgacatgttttttacgggaaccgacattgaaatcaataattcaacgacaattttgaaaattcctctttgaaagggatgagttttgggttttgatttttgcaccctctttctcagtctcactcgatccctctctttgcggcctctctcactctgtctctcttgactcttacaccctaaaacgcggtggtgtcgccgtcgaagctgtctccagtgccactgtcgaagttgccactctctacgtttctctctttctgtttcgctcaaccccgaaccttctctcactctatgc

SEQ ID NO: 27279 - DNA, 400 bp, Glycine max
agcttaccttgtccttccccctctctattattgaaatctgggaatcactaactgacaaaaaaagaataacataattttcctgttataattcaagatttgatatgaaagcatcttaaaattcaaattagaaccagaaaagaatggattgcaacattttatttatcatatataaatataaattcaattcatgcgggtaaagattctacggtcttttacatcacttaacgacaacatcagatacagtgatactggcattagaggttaacctcattataaaggacactagtctgtacgaagatatgcaaactcacctcaacattttcaatcttttgcaaaaattgagtgtggctgagatcacctaactttgaaagaaattcacgagcctgcatcacaaacatat

SEQ ID NO: 27280 - DNA, 390 bp, Glycine max
  unsure (1)..(390): unsure at all n locations
tgagaaagtccttctgattctgtttatacttttcttactttatggcatgagatgaaattcaaagattggacctcttgctagttgttattaatgaatagcttaaacacttgtgcttgagtgaaacagtagcagtgagactgtggtttaagctactttccttgatatctgtcttatgcctaactccatctatttgttcatgttacattttattcttctctttggataactgcataccttgtgaaagacaagtgatgagggcattttactccattatcttattatgcaatcagtaacttttgttgcatacacctttgtatatagtcactgcatgtcattgtcacttgaggacaagtgagttgttctctttntgctcgaggacaagaaaaactg

SEQ ID NO: 27281 - DNA, 446 bp, Glycine max
  unsure (1)..(446): unsure at all n locations
agctngacatctatatctataatttgttttatttatttaaaatttagtgttcaaatagtataaaaatggatttatatttctaatattaatagtttaattcgctttctcgtttatattttcatgttactattatccttgtatattgaattntaaaattgtattagaaaaaattatttaatatttcacattctaggtttatactaccatcaaataatgtttaatttactataatataatttatagtgattttaaataacagctagtgtacttaatgtttgaagtcccagtatatcaacattgttgtctcaacaactacatttcatatttgtttatgaatgtatctgatgaaagagtctgtcttatatatgtgagaacaagagaataactaatgactattaaattctattatcagtagttgagattagaaacaatctagctaaatgact

SEQ ID NO: 27282 - DNA, 388 bp, Glycine max
  unsure (1)..(388): unsure at all n locations
tctagtagataaaaccatttcctttcacattcatnttcatttaagaaaaattattaaaatataacttaactgtcaaggcaaccggtactactgctcaagaccaaaaaattgggcgacattcacgggaacacagagaaacaagtgttactttgaactctaaaacaagactagttggtgaactggtaagatagatatccaaacataattgtcaataaaattgggcaaatttgggatgttaagtgtaacttcaaattgaaatcttcagttatgcccagaaaaactatgctagcttgatcttctttcaaggtccctcactgtcatttagagctaatttgcaatagtttcaactaaacaactatcctccattgtcatcagctaatgatcatct

SEQ ID NO: 27283 - DNA, 353 bp, Glycine max
  unsure (1)..(353): unsure at all n locations
gagaattgcactaagcaatcactacgcatggctccaagctccacggtgaaggacgcatgaactaaatcgccattcatggggctcccgaaaagggttgaggatggcgaattgcactaagcaatcactatgcaatgctccaacctcctgcgtggaggacgcatgaactgaaacgcaattcatggcgctcccaaaaagggttgaggatggagaattgcactaagcaatcacttcgcatggctccaagctcgtgggtggaggacgcatgaacgaaaacgcaactcatggngctccgaaataggattgagaatggagaattgcactaagcacattacggcacatggctccaaactcat

SEQ ID NO: 27284 - DNA, 343 bp, Glycine max
tcaagcttgctcgtcttgctgatatttatcatgcagacttttctgatgatgttcgatatcaattagggatcaacttgaaacttatgtgcttcaagtgagaagaaatgcttctttttccacttgtgaagatgttcaaagtttggctatgaagatggttcaaactgagaaacatttggtatttccattggtttataaacttattgagctagctttgatattgccggtgtcgacaacatccgttgaaagagctttttcagcaatgaagattatcaagtctaaattgcgcaataagatcaacgatgtgtggttcaatgacttgatggtatgctacaccgagcgggag

SEQ ID NO: 27285 - DNA, 381 bp, Glycine max
  unsure (1)..(381): unsure at all n locations
ccgggtagncgaagagaagntcaagtccatagccatcaaagtttgaaaagagtatgatgaactaagggacgtcaatatggccaccgctgaagccttggaatgagaaaccaagaaggcccgaaaggaagaacacgaccaaaacaagttttgaggggctttatagggcagcaatagtgagctcaagctccgaagaggtgaaaggaatcatcacgggtcaaaggcatgatctggaaggacgagctaaaggcttgccttatgtcgaaaagaaatttgtcccaacagttaaagcgagactgaagggaatatgtgggccatcatcgataagtgcaaagagaagctaaatctagcggcgactcacgagcaaaggctagaggatgagta

SEQ ID NO: 27286 - DNA, 402 bp, Glycine max
tcttgagatgcctttcggttatctcattagaggcttttgtatgtctacaatctcattagaaatatcgatattgaaaaaaacaatgaatcttgaggtcaaaactacatatggaaattcataatccaccagtcgatggattttcaacatgatatcttcaatcaatagtgcccaattcatttgaatacctgatttcatcctatatatgatctgcaagtcatcatccgtaacttgagcatgattgttggatcttagtgctagaatatatgtaataatgtataccaacattttgtcttccgctgtcagaccaccaacaccaaatctattccttaaaatccttcctaggttaagaagcatacctctgtatgtggccattttgctatagctatccacagattccttaaa

SEQ ID NO: 27287 - DNA, 478 bp, Glycine max
  unsure (1)..(478): unsure at all n locations
agctcgttgcgtggtagtgtaaggaagagttattgnggacaaatatttttattgtttttcgttgcaatgcatcctctgctccactacttgtatgattgtgggctcttgtaggaatgttcttcctttctatctataagagcacacaaacttgaaattcaaatattagtgaatttgaaatcaatcaccggatgaaaattcaaatgataagagtttctagaacatgaatcatcctcaaaatgcttccatgtgtattgtgaaatcatatggacattaactaacttagtataaagcatttatgtgagttagttatgtcattttggacacataaagcttctcagactttggtacttgtcacaatgtatttggacgtttgtttctacacgacatattggacgatgtatgttaacattgataaaacaagttgcatttgtggacactttgagaatgtattgtataggcttaagagaataccactcat

SEQ ID NO: 27288 - DNA, 411 bp, Glycine max
  unsure (1)..(411): unsure at all n locations
tcaagctttgtttgttgaaacaatcttgtattaatctcgaagcttaggatccttgttagtttctttnattngacatcatcaaaatcatgtgtacatacattcacattctccccctttttgatgatgacaaacatgtgatttcttctcaacaccatcaaagattgcatgatttacattttccccctttctcaagaaaattcttaattcttcttgacatcatcaaaatcttcatgatttacattctccccctttttgatgatgacaaccacctgtaggttaggaacaacaacaaagaaaaaatatctatttgcatatagtttactcccccttggttttgcaatgattgcttatatgagacagttgaagatttcatatttttcatatgtaaacaaattgtgtcataaacaatag

SEQ ID NO: 27289 - DNA, 419 bp, Glycine max
  unsure (1)..(419): unsure at all n locations
tacaatatatnggtaatcgattactagtgtatctgaacgttgaaattcanattcaattgtgaagagtcacatcttctcatanaatgccctgtgtaatcgactacatggttttggtaatcgattaccagtgacaagttttgaataaaaatcaagagatgtaactattccaatggttttctcaagattttctcaaggttataactcttccaatggttntcttgaccagacatgaagagtctataaaagcaagaccttgactngcattntaagtacttgatataactntntacacaactttttgaacatattcttgaacttcttcttcttcttctcttgccanaagcttttctaagtttctggttccaaatcttgttctttcatagaanacanaagngtgctattcatcttttttattctct

SEQ ID NO: 27290 - DNA, 410 bp, Glycine max
  unsure (1)..(410): unsure at all n locations
ntccatgaagaagaagtttggaggtataggattntgtaatctctatggattcaacctagccatgttaggaaagcagggttggaatttgattaataacccacatactacaatttataaaattctcaaaaataaatattatccaaatgttggattcttagatgccaaactagggcataaaccaagctatacatcatatagtatttttgcttcacatatattggtcgaagaaagcaattagtgcagaaaaagtgatggtagctctataaacgtttggacccaaccttgggtgtgagcatcaacaagcccatatatcacttcatcaaccctgctcgatcttgatgatctcaaagtcagttcactcatcgacaaccaacaacgatgttggcgtcaagatgtgctacaacaaattt

SEQ ID NO: 27291 - DNA, 252 bp, Glycine max
  unsure (1)..(252): unsure at all n locations
agcttccatttctatttggagcgnctcttttgtatacaggactcaancggacatcctnngataatgatattgtcgtttgaattagctacgagctaccgatttcaatatggagcatctagatatatttcgggacacaaccagacatcctggtatagagacattggcgtatcaatatgctcacagcttctattgtaaattatgagccgctcgatatattacaggactctatcagacatacagaaaaaagctatt

SEQ ID NO: 27292 - DNA, 308 bp, Glycine max
  unsure (1)..(308): unsure at all n locations
tctagtctcaatttggagcgtctcgatatattaccttattctttcgggcatcagagnaaaaagttattgtcgactgaatttcctatgagcttcagttctcaattgggagcgtctcgatatattacgggactcaaccggacatccgtgtataaagatattgccaattcaattntcttagagctatggatctaaattttgagcgtctcgatacattaccagactcaatcagacatccgaggaaaaagttattgtcgtttgaatttgatacgagctcccgttttcaattgggagcgtcccacgataaatta

SEQ ID NO: 27293 - DNA, 250 bp, Glycine max
aataccgtagaagaatcatcatggtctataccgtcccacaaagagtatcgaggcaggagagcctcatgtccgtagatgtataggagaccacattctactcttcagagcctatcgcccaggggaaccatcgattgtcttaccaaccgtggtggattggatgaggggttaacatcaaggaacattcctccaatggaccatgatcaaccacataggggaccttgactctacactttatgccacaacattaaga

SEQ ID NO: 27294 - DNA, 353 bp, Glycine max
tgaagatgatgaaacaaggagatccatgtcttctattataggaccaaacacgatgaccctcagcccaaacaatgatttcacgatcgagtcagcctgtacaagatcacgactaatgttcggttccatgagagagaaatcaacacgattctgcaaccacgagacgatcgatttcctgaatcccgaggcgatatgttcaagatacatgagaagagatcagagaacgtcgcctaacagggattggggagagatcccataaacaactctcgcacagggactgctttgcaggagctatttctcacacagttgcaagctaccagagcttatactctctggtaatccaataccatatggct

SEQ ID NO: 27295 - DNA, 450 bp, Glycine max
  unsure (1)..(450): unsure at all n locations
agtcacctgcggcatgcaagcttccagaatgttgtaccacgccactgttgttttggctaagctggcttgagagaagtgcattaacagcttttcgtccgtagaatatgcccccatccttcggcagtacatccgaagatgactttntggacacgtcgtcccttcatatttatcaaaatctggtactttaaacttgggggcaatgatgatgtcaggtaccagacagagatctgctaaatctgagaacggatagttgccgaggccttctaccgctctcaacctctcttcaagtagatcaatatttcccttgtcttttgcaaagggaacgagttccttaacgggtgcggatggagacgggacgtggcggactatgtntggttgggacaactcatggngggctggttccttgaggggaagtagagggcctaaatgggcatctccttcatcatcttc

SEQ ID NO: 27296 - DNA, 399 bp, Glycine max
  unsure (1)..(399): unsure at all n locations
actcaagctgaactgattcctgaatcttgcttgaaactnttttttttcttgattctttggcattatcaaaataatcttggaaggtattgcttccacaatctccccctttttgatgatgacaaccctgaaatcaagaaacacatacacattctttttcctagttgatcactcacttacttctccatattctccccctttgtttttgaatttatgcttcacttgaaattaagttaattacttatgtgagttcttgatttaatccctatttctctccccctttggcattgtcacaacctacccttcggcgggagggcgacgcgagggctcacgagtgcgtcttccaagaaaggaaaatgcacggagtcgccaccaacgtttattcgaggaaaacgtcggaaa

SEQ ID NO: 27297 - DNA, 467 bp, Glycine max
  unsure (1)..(467): unsure at all n locations
agcttgttctataagagaactcacttgattatatgaaattttggaaacgggggggtacaaggatgatgaacatgtggcaaatgaggtaatgcaatgtttccccattttcctttttcatgtgacagattttactaacaatgatacaatatgattggatttactttacttatttttcttttcttgttctatacaacatttcaatagcttcttcatgccaaatgtactaataggtaatcctacgtgttttgcctcatagtcttttatccaccagcttcatttagaaagcctcttacccaccaaatgaaggcaaatgaacaaaggttaacaaatgttaaaattattgtatatatggtattggctattctttcttactctaactntcatttcattacgtcttcattccaaccatagatactatggaaccttcttcataacagacaactacttataatcaatagaagcacaat

SEQ ID NO: 27298 - DNA, 398 bp, Glycine max
tgaataccctgtatctaacctttattcaatcttgtttctttgagaccaaggatttcagtaacctcattggagaagaaacctaacttcccaatgggtcagtgttcaatggtagtatgatcagttaagcctgttcctcgataacttaaatacatctccagctcaaattgatgaaaaaccaagcatgacaaagaccatagacattaaggggggaaaacagaaaaggctgagaagttaaacactactgcaacaaagagcattggcagttacaggtatgggatggatagtccaaacaatagcagactatagtataattggcttttctaactagctcaatctctctcattttgaagatattaagctagggaattcaataccaaaaatatttcagtgtccagtga

SEQ ID NO: 27299 - DNA, 323 bp, Glycine max
  unsure (1)..(323): unsure at all n locations
tggagaaatcaccgcaataccagtgtccttttctgatcgtgctcccataacgacnngaaaagccaagggtagccataaccctagccaagggtcatcaacctgcattgctgcgagaatgcgaggcgaacgcaacgtgtgcttgtcacggagaagccccggggcgcgacatagagcatggtagggctctgaagcgaaaagtgcaaggtctaagagatgcgggctggctgaaattcgacgaaaattgcgtgtaaatgctgacatcgacatgagatgccacacatggggcaactttgaaagctgatgatacgtgtccctagtgactc

SEQ ID NO: 27300 - DNA, 427 bp, Glycine max
  unsure (1)..(427): unsure at all n locations
agcttctatactcaccccatttctctctccctttttggcaacatcaaaaagccaaagtgcgtggcaatcaacacaagataatatgatagagtggacataatcaatcataagtcacaaccaaacataagccaagcataaataagtcataaccaaacataatcgaagcattcagaagtgaaatataatccanacagtcataatttaaaaccacatagaatccaagcataaaagactaaagtccaaataccgaagaataatttanagttcanaatatgataatgtaaagagcatagccaaatacacggcttataagaaaagataataataatctaaacactaagagggtggtggtggtggtggaagatcnaanctctgacgaatataacccatatcctcttcaagctacgtgagacggatatccattcct

SEQ ID NO: 27301 - DNA, 378 bp, Glycine max
  unsure (1)..(378): unsure at all n locations
ntggaaaaggttgttttcaccttttcgctaatccaattgctggcttagcgagtctccgctaagcgtaacactcctgggctacgcgcgaggaagaatccaaaagaagatgatatgtacaggttcgctaagcgcaccgcttcatctctctaagcgcaccgcttcagttcatctgcttagcgagaaaggtgcgctaagccaaaaatcactaacgtgtgctaagcggtccattcatgcgctaagcgcacgagcacaaacaggaccacctatttaagcttgaaatcatattttgtgaagagagtttggactgggattcagagctttgcatgtctagggtttctagagagagaaaggtccaagttccaaagagttttgagagat

SEQ ID NO: 27302 - DNA, 418 bp, Glycine max
  unsure (1)..(418): unsure at all n locations
gctcgccgccacggagttnttcgactatgttcttgtgtggnggttctatctacaaaaggagagagcaagaaatgaagagccaatggttgatacatgggtagagatgaaaaggatcatgaggaagcggtatgtgctggctagttactcaagggacttgaaattcaagctccaaaaactaacctaaggcaacaagggggttgaggagtatttcaaggaaatggatgtgcttatgattcaagcaaagattgaagaagatgaggaggtaactatggctcgatttcttaatggtttgactaatgatatctgtgatattgttgagttgcaggagtttgttgaaatgggtgatttgcttcacaaagcaatccaagtagagcaacaattaaaaaggaaaggagtggctaagaggagttctaccaac

SEQ ID NO: 27303 - DNA, 338 bp, Glycine max
  unsure (1)..(338): unsure at all n locations
tcaagcttatgcttttatgaaaaggttcatcaagtcaagttgatttatggaattatctatcttgcaaaaaattggggcaaaagatggatcgagttacatcgctgtttcgtctactgtcaaacatatttagattgttgatgtccttgttacttccagtttcaccttgacaaagatgtcatggaccatgttgaaaatctaaattgattcaaccccatgtcctgcataaattcgcaatacttcaactgtgcatcatttgcatacatccatgctttttattggttgcattgttcattgcattctttccttgaaaaaaaacgaacttaatnattgttataaaa

SEQ ID NO: 27304 - DNA, 385 bp, Glycine max
  unsure (1)..(385): unsure at all n locations
acttccttgagaaatcttccttgagaagttttatcttatctacacccacccctctcataactaagctcacctccttgagaagcttccttaagaaaattcctaaagaagctagagcttagctacacatacctctctaatagctaagctcacctccttgagatgagaagctagagcttagctacacatatctctctaatagctaagctcacctccttgagatgagaagctagagctttgctacacaccccctataatagctaagctcatctccatgacaaanaacatgaaaatacaaagagacatgactcaaggaagtcactgaatctacacaacaagcatttaaaagtctagaaattcaagttggcaagctagcagaagaagtgac

SEQ ID NO: 27305 - DNA, 352 bp, Glycine max
  unsure (1)..(352): unsure at all n locations
aaactcacgcttagatgttctaaatttntttattatgtgatattatttcccattttctatactatgctagcaaacatgaatttaatgtattgtttaaaatataatatttatatttttgaaaaatctcaatgtacttatatttatattattttgatttagatgtttataatgtttatgtggaaaaccttttttttagagtatacattttcattgtaatttcatttgtaatcttgtttagtttctctgtaacagttagtttttcatttatgatttagtttcttgctgactcagcagttagacacttattttttttaaatatttatattattggatcagtaatttgaaacacaag

SEQ ID NO: 27306 - DNA, 445 bp, Glycine max
  unsure (1)..(445): unsure at all n locations
gctctaacgataagtcttcctgttgctctttctatctctaacttttttatgttgcaaattgtatggaaacatcgagcgcaatacagttcccaccccaaaccctgaaccaataccttatcaatcacaatattatctttagtcccattattcacaattatcccatgcaacctatgacactntagctctatcccaacaaaaaaaatatttgaaccaaaaaaatgttttacctaacttctttttgcatcattttccacctatttttttgagtcccatcttggggatcatactcacacgtacttcagtacccctacagtggagccttcctcatcaatccgaccaaacgagcttcagttcacagcagatccaggcttacctaacgaagaacacggtccctttagtgaggatgaagacaaatttattcacaattaacctaggagggagatga

SEQ ID NO: 27307 - DNA, 397 bp, Glycine max
tgaagcggaagctgttttgagagcttgagatgagtttgtgagtggttgttttatcctagaggtgaaggaggcatcctcaccacttgtatttttccaatccttcatcttgttcttctctttgttgtaaaggaggcttcctagttctggaaagcaaaaatcctctgttggatcttccttgtaggtacttgatgtaaatatctttctatctatttaatgatgttttgtgtgttctctgtgctatcagcttttcattctagtatgcctttaccttgatcacgtagatgcatgctttgttagggtcattcaatagtggaaactggtctgattctgatgaccttgataggacagggctaagctgtcgtactatcatgaggaatctgggtgcaataatttagtt

SEQ ID NO: 27308 - DNA, 458 bp, Glycine max
  unsure (1)..(458): unsure at all n locations
ctgcgtcatgcaagctcgagcgaaagctntntgtcacaaatatcactcaaggcactttttggtttcaattacccaacttgaattctatgatttacatcatctcttatttttgtgcgtatgtgcgggtgtatctgttccctgtttctaatttgttgtctgatttcttgtaaattttggaacagactgctagaccccaaattggaaagctctgggtctctctttgttggaagttgcattcttcaactgattttgcatttaccatcacagatagtggtacatatacgagacctaattgctgctcttgtcaaacacatgcaatctgctcaaaactttgtcttgctaagctcattgctaattgtttttgccagactggcaatatcgccaactnttcaaattaatttgaatgattctactatcagtttttggtggaatgattaatggtcaaattctgttttatt

SEQ ID NO: 27309 - DNA, 402 bp, Glycine max
  unsure (1)..(402): unsure at all n locations
ntaaactaacttcaatcttatgcttgatgtgtgggttctttgttttaggttattaatggtgtactaatttgatgatcatatttggaaacaaaagatttgagttggatatggatttggggtgctaagaaggccctcaacctagtgctggaggttgttagtgatgactaacagtgttaagaatggatgagtgagtgaatccctaaataagttaaggttgatgcaagtcttacaagaggtaagccactaaccgtgttcatccattgccaataaaatcacacttcctccacgagattaatttgaaccttgttgaatggtgaaagcgtgactatgttaaggaatgcacttgggttaatcgctcaaggtgaaatctacatgagagtaaaaagttaggatgacatgata

SEQ ID NO: 27310 - DNA, 414 bp, Glycine max
  unsure (1)..(414): unsure at all n locations
agctttagtttacttgtgtaatcgattattatagagagtgtttctttctaaagaaaattttctaacttagaaaattgtcttctcacttactcatgatgatgcttgatgcacaaaagatatgatatggactaagatgaaacatttaatataacaaccaatacaaatgccactcaagggagttggacatataaaagacaaaacatcttcaagcttcaagctttagtctacatgttgttcatgttgctcccctatctctaacagtggtggaaatgagtttaaagctagctcacaagagcctcgatttagtcaagggggcaaagatgatccctatgtctataaactatntatttttttgataaatatctggatgaagtaagagatagttaggtggatctggatgttttaagttggtag

SEQ ID NO: 27311 - DNA, 393 bp, Glycine max
  unsure (1)..(393): unsure at all n locations
tncacctttggtcctcctcatagttggtgtatgagataacattctctattttcatctcccactccaagtaggcctccagaccattctttcctttaaagggaggaatgttgagtttaataccatcaattccgttttgtctaagaacaccatcattccctcttctcctcctttcttcttcattatgatctctattctccctttgatccaacctctcatggagcgcatcatctcgttgtttcattaacctctccaaatgttgcatcaaagcttgcatttggaattgcgaaagccccactccatcattaggatttgttcctgccatctcaaataaacaaatcaaacataataagacaattatagtttctgttngaatacctcacccactcaagtgta

SEQ ID NO: 27312 - DNA, 540 bp, Glycine max
  unsure (1)..(540): unsure at all n locations
ctggccnattgaaaanccttcgtaganactgagcccttgnacgaccccgcgaatctctagagannaccctgcggcatgcaagctttgcttaattattactgangagtctttttttgtctcaaacacagtgctcccagacatacaccgctctcgtagtcgattaccacaagacaaatttgaaaaataacctataaaaagggatttgaaatcgaattttgaacctataatccattaccagatgtttgtactcgattacaagcaacgaaactcttgaaattcaaattcacaagtcctgagccttcagaatataactatgtgattgatcaccagaaacctgttatcgattaccagcgagaaaattcacaaaagcttcttgaagaggcgcatctcttgcaaccattgtgatatggcacgaacggcctatatatatgtgtgtctgatttcaaaacgcaagagagagatgttctcagtagacttcattggtcaatgttctctcaacagcccttgggccaacacttgcgaactatcgagacttatttg

SEQ ID NO: 27313 - DNA, 173 bp, Glycine max
tggaagctcctgaggaaggattagactacattggtgtatacctggagcgtctcatcatattctaacctcacccccacttctcacacgttcgatctgaatatggacagggcgaggttagttcaccgactcgtaatgaggatggacatggacgtcggctctttcatattaggcca

SEQ ID NO: 27314 - DNA, 319 bp, Glycine max
  unsure (1)..(319): unsure at all n locations
tcatatancntatatactatatactatactatactatactatatactatactatactgtatcatatactatattatgaatgtattagtggagccactcgaaaatctatctaatataatatttatgaatataatacatcatanaaaataactagcaaccacaacagcgatatatcacaatttaatttgaataacaaatacatgaaataaaataataatctttatttatgtattaatataaaataaaataatatacacaatattattatataactttatttaatatcttgagtcttttttaacctgtgccattgcatctta

SEQ ID NO: 27315 - DNA, 273 bp, Glycine max
tgtaggattatggggtacccatcacatgtggtgctttgtggcggtcgggcgatggtgcacaacaagtgttacacatccacgatgcgcgcataaacccaccatgccctgtagaccacctgcgactgagctcacgtgatcccacgtagcccatatcctcgactgtctgaacaccgggtccccatgaatcctcccaagctttcccaacatcaaagtaatacaacattcacacagcacaagctaccacagccaagcaaaacagagcaaatgcagaaa

SEQ ID NO: 27316 - DNA, 444 bp, Glycine max
  unsure (1)..(444): unsure at all n locations
agctnggcttgtcttgtctcatttccacttctatttactngnaatatatcccacatttattgtgcatttttacaatntgagactctaaaatattcatccacgcctaatgcagaagtaattatattttttgcctttaaattatattgaacccttcttctttcatctttataccattcttctctaggtttttctatagttgcatttcccacactaccattgtaggaatgaagggaccaatttcaatgacttcccatatatttaaattggtggcttctataaatatctgcatacaggttttccaatagtgataaccctcaccattgaacataagagacctattaatagaantttcctcangaaatgaaaagttagatgaggccataattattcttgaagtttttaactatagacaaaaacctggctctgataccactgttggacagt

SEQ ID NO: 27317 - DNA, 399 bp, Glycine max
tgaagtaaaaaatgactccttccggtttctgaggctttaagatgggtttggttttcctcaaggtaagagtaaggtaatctataaaggtctaagactaattagttttcattgctatttctttgtcttcacagatatatgcacaaagtttttagattagcttgtcaatatcaggttcgtactgtagtgatggattttaggacctggattgcatgcactacaaaatataggagaagatcaaatgtaatgggaaataaaagaataaatagaacaaaataaataaagaataaaaaatttataaacaaaactatttggtttaacaaaattaaactagtcgagaattccgcaactagtccccgacaacggtgtcagaaatttgatgcttaaaatatgttaggctcg

SEQ ID NO: 27318 - DNA, 410 bp, Glycine max
atctggtccctaaaaaggatgggacatggctgtataagcaagcttcatgatgatgaatcaagatcgagtcatggagttttgatgatgccaaagaatcaagagtcaagcaaattccaaagattcaagaatgaagctccaagaatcaagatcaagattcaagactcaagattcaataatcaagagaggactcaattaagataagtattaaaaagttttttcacaaactgagtagcacatgaatttttctcaaaaccttttaccaaagagtttttactctctggtaatcgattactagattattgcaatcgattaccagtagcaaaatggttttcaaaaagcttactaactgaatttataacgttccaattaatatcaaaatgctgtaatcgattacaagtattttgtaatcg

SEQ ID NO: 27319 - DNA, 152 bp, Glycine max
  unsure (1)..(152): unsure at all n locations
tgctcgtagagcttctatggaggtnggtgtgtttgagcttgctgtgggagccgcaagggccattgtgcaccatggctatccaccggctgaccactgacactacgggggaagcggctacaaccactccggtctataccgctgtacattgcata

SEQ ID NO: 27320 - DNA, 446 bp, Glycine max
  unsure (1)..(446): unsure at all n locations
agcttgcttcataatagtatgagttcttttgttgcccagcgattctggtccctaaaaaggatgggacatggctgtagaagcaagcttcatgatgatgaatcaagattgagtcatggagttttgatgatgccaaagaatcaagagtcaagcaaattccaaagattcaagaatgaagctccaagaatcaagatcaagattcaagactcaagattcaataatcaagagaggactcaattaagataagtattaaaaagttttttcaaaaactgagtagcacatgaatttttctcaaaaccttttaccaaagagtttttactctctggtaatcgattactagaatattgtaatcgattaccagtagcanaatggttttcaaaaagcttacaaactgaatntataancgtccaattaattcaaaatgctgaatcgatacaagtattggaatc

SEQ ID NO: 27321 - DNA, 401 bp, Glycine max
ttgtagagcttctatggagtgttggatttttgatctcgcagggaggacggctagggggatggtgctcaatggcgacccatcacccgtccacagacagtacgtgggacgcggctagaaccactacggtatatccggttgttgattgcataacaacaccgccagtgtggcgggagcttagtcgtataaaactcatttgtggaaacaggactgatagatctactttaccccactacagagatacgccttcggtctctgcgccttaaagggggcaatccactcacatagcggcgtctctttggcggcgcgcagaattctacgacagcctttggatctgtgacgtgaacattaccatacaccgacactcatgtgggagacgacatatgatcttcaccctacatggg

SEQ ID NO: 27322 - DNA, 529 bp, Glycine max
  unsure (1)..(529): unsure at all n locations
cgccccttgaaaaccctttganncctgtgacntcgattgtacacccgggatcttaagagacgacagcacgcatgcaagcnggaattatagtagcgagagtttttcgttggngcgaccacncaacaagaaagagaaacacttacggcagagtacgcgcctactctgacatcgatactcacaaaactgtgattcatcctagatgcaacaggtgatccacacgcatgatactatatgatgtgtagcatgcttgagacacctcctttgaaacacgctcttgagacgcttcctgcgaaaaactcccgcagagaagactgaacaacatacacacaccccgctcatagctaagcccacatggccgagaagctcccataagatgaggggccagaaccttcagcttaacgacgtaggcctcgctaatatataatctcgngcccctgtggaacaaacgagagatgttcgaccacgccgcgaaatattgtagctcgccacatgcaaaccacagatagacaaaaaaatctgactcgatacg

SEQ ID NO: 27323 - DNA, 363 bp, Glycine max
taaaggaaaattttatgtcgcaaccatatttgtcttatgctttattggattgataataagctgagtatcacagagatgaaaatgctgcaattctaagaatgaatgtcttacagggagagtcagagtagcatctactcatctattgaggaaaacatgatagaatagcctctaatattttttgttcatgtgagaagaagaccattaaaagcattgcttaaaagagttaattagatggaggataacccgatagttagaggtagagaaaaaccatgaaaaactgtgagagaaaccattaaaaaggactgaaatttcaatgacttggctattgagaaaacacaatggtgtgattgctcatttgatcta

SEQ ID NO: 27324 - DNA, 339 bp, Glycine max
cggcatagcacgcgggctcaagagtgatgtcactcacactttttgcatcatgctctacgcttgactgcggatcgctatagtctctggcaagatgctggtatatgcgggcacacatgggcaggaagcgtcctagaatgagatcaatgtggtgctctatccctctcagaaaatgcaacccatgaagggtgcctttacggaagacatccccaaactccttgaataagacttccatacctatatgcaaagcaatagaatgaaaacaataatcatggtgcattagtaaagacataagtagcctagctagtatcactctctacacctctttgtctgtcatgaaca

SEQ ID NO: 27325 - DNA, 426 bp, Glycine max
agctttcctacaagtcctaattgtaattctaaacttttttcaactcactttagactccaatttccactaaccccaaatttggcttttctaaccctcagaatctcacacttttccactcccaacactaccattctcacatttaaccctaagttaactctccccatcatctctaccagttttctatcaacattttcagcatacaaatatcacaaagcatcatcataaaaccctaaatcagaatgggtagctttactcacatcaaacatgtcaagtttagcatgatttcaacaaattccttcacaaataactaccctaaggcaataacctagtagaactacccatcatagctcccaaaaacccaacacccacgaatttcaagtgagaagaagtccacccataccttgaaattgaagccccacaatgtag

SEQ ID NO: 27326 - DNA, 417 bp, Glycine max
  unsure (1)..(417): unsure at all n locations
catacttcatatggatcaactttcacngttattgttttggatcgccaaaaaaaaaacaatttataatataatttattctaattcatgtataaataaaaataactatttttataatgtttaagagaattaattgaaataatttaattttgttaatctgaagtaaaatataaaattattcctaaaatgtcattatttgaaatttgatatcatgaataaaataaaaattttgaaaatacaattgtaattaaacaaagaatgttttaagaatcatattattaattatggacaaaattatttgagtccaacatacaaattaaaataactgttttgcttatatataaatgcaaaaaactacaaactaaattaaatcaaaccaaacaaattaaatataactattttggatttaattttattttt
